United States Patent Application Publication US 2007/0072175 A1 - sequence listing, part 7

SEQ ID NO: 18787 - DNA, 896 bp, Macaca Mulatta
  misc_feature (1)...(896): n = A,T,C or G
tggaactgcagccccctgtctcccctcagcagtcagagtgnnnnnnnnnnnnnnnnnnnnaggagctggtggtgcagaaaggctggcggttgccagagtacacagtgacccaggagtccggaccagcccaccgcaaagaattcaccatgacctgccgggtggagcgtttcattgagattgnnnnnnnnnnnnnnnnnnnnnnnnnnnnnnnnnnnnnnnnnnnnnnnnnnnnnnnnnnnnnnnnnnnnnnnnnnnnnnnnnnnnnnnnnnnnnnnnnnnnnnnnnnnnnnnnnnnnnnnnnnnnnnnnnnnnnnnnnnnnnnnnnnnnnnnnnnnnnnnnnnnnnnnnnnnnnnnnnnnnnnnnnnnnnnnnnnnnnnnnnnnnnnnnnnnnnnnnnnnnnnnnnnnnnnnnnnnnnnnnnnnnnnnnnnnnnnnnnnnnnnnnnnnnnnnnnnnnnnnnnnnnnnnnnnnnnnnnnnnnnnnnnnnnnnnnnnnnnnnnnnnnnnnnnnnnnnnnnnnnnnnnnnnnnnnnnnnnnnnnnnnnnnnnnnnnnnnnnnnnnnnnnnnnactgtgtgtcatggctctgcaaccaccagagaggcagcccgtggtgaggctgcccgccgtgccatgcagtacttcaagatcatggcaggcagcaagtgaagccccagctggactcatggatgtgcaccctttgnnnnnnnnnnttctgcctctgggctcatgtatctgcgcagctctggtaccctctgtgggtaccatctctacctctgacacagactgcctgccttgaggctgagaaggcacagggcaaggagccaaggaccacagggcctcagccagcccaggattcgtcctcattttattggtgatgatgaatgggaatgaaatc

SEQ ID NO: 18788 - DNA, 131 bp, Macaca Mulatta
aggtggtggttggaggggcagaatggcactacatagccacccaggggcccctaccacacacgtgccacgacttctggcagatggtgtgggagcaaggagtgaatgtcattgccatggtcaccgcagaggag

SEQ ID NO: 18789 - DNA, 4517 bp, Macaca Mulatta
  misc_feature (1)...(4517): n = A,T,C or G
atggggaggaacacactccttcatccaagtcttgttcttctcctcttggtcctcctgcccacagatgtctcagtctctggaaaaccnnnnnnnnnnnnnnnnnnnnnnnnnnnnnnnnnnnnnnnnnnnnnnnnnnnnnnnnnnnnnnnnnnnnnnnnnnnnnnnnnnnnnnnnnnnnnnnnnnnnnnnnnnnnnnnnnnnnnnnnnnnnnnnnnnnnnnnnnnnnnnnnnnnnnnnnnnnnnnnnnnnnnnnnnnnnnnnnnnnnnnntcccaaagtcttcatccaatgaggaggtaatgttcctcactgtccaagtgaaaggaccaacccaagaatttaagaagcggaccacagtgatggttaagaacgaggaaagtctggtctttgtccagacagacaaatcaatctacaaaccagagcagacagncagtgaaatttcgtgttgtctccttggatgaaaactttcaccctgtgaacgagttggnnnnnnnnnnnnnnnnnnnnnnnnnnnnnnnnnnnnnnnnnnnnnnnnnnnnnnnnnnnnnnnnnnnnnnnnnnnnnnnnnnnnnnnnnnnnnnnnnnnnnnnnnnnnnnnnnnnnnnnnnnnnnnnnnnnnnnnnnnnnnnnnnnnnnnnnnnnnnnnnnnnnnnnnnnnnnnnnnnnnnnnnnnnnnnnnnnnnnnnnnnnnnnnnnnnnnnnnnnnnnnnnnnnnnnnnnnnnnnnnnnnnnnnnnnnnnatacacatatgggaagcctgtcccaggacatgtgactgtgagcatttgcagaaagtatagtgacgcttctgactgctttggtgaagattcaaaggctttctgtgagaaattcagtggacannnnnnnnnnnnnnnnnnnnnnnnnnnnnnnnnnnnnnnnnnnnnnnnnnnnnnnnnnnnnnnnnnnnnnnnnnnnnnnnnnnnnnnnnnnnnnnnnnnnnnnnnnnnnnnnnnnnnnnnnnnnnnnnnnnnnnnnnnnnnnnnnnnnnnnnnnnnnnnnnnnnnnnnnnnnnnnnnnnnnnnnnnnnnnnnnnnnnnnnnnnnnnnnnnnnnnnnnnnnnnnnnnnnnnnnnnnnnnnnnnnnnnnnnnnnnnnnnnnnnnnnnnnnnnnnnnnnnnnnnnnnnnnnnnnnnnnnnnnnnnnnnnnnnnnnnnnnnnnnnnnnnnnnnnnnnnnnnnnnnnnnnnnnnnnnnnnnnnnnnnnnnnnnnnnnnnnnnnnnnnnnnnnnnnnnnnnnnnnnnnnnnnnnnnnnnnnnnnnnnnnnnnnnnnnnnnnnnnnnnnnnnnnnnnnnnnnnnnnnnnnnnnnnnnnnnnnnnnnnnnnnnnnnnnnnnnnnnnnnnnnnnnnnnnnnnnnnnnnnnnnnnnnnnnnnnnnnnnnnnnnnnnnnnnnnnnnnnnnnnnnnnnnnnnnnnnnnnnnnnnnnnnnnnnnnnnnnnnnnnnnnnnnnnnnnnngataatggcaaggggaggcattgtccgaactgggactcatggactgcttgtgaagcaggaannnnnnnnnnnnnnnnnnnnnnnnnnnnnnnnnnnnnnnnnnnnnnnnnnnnnnnnnnnnnnnnnnnnnnnnnnnnnnnnnnnnnnnnnnnnnnnnnnnnnnnnnnnnnnnnnnnnnnnnnnnnnnnnnnnnnnnnnnnnnnnnnaggtggatttgagcttccgcccatcacaaagcctcccagcctcacacgcccacctgcaagtcacagcggctcctcagtccctctgcgccctccgtgctgtggaccaaagcgtgctgctcatgaagcctgacgctgagctctcggcatccgcggnnnnnnnnnnnnnnnnnnnnnnnnnnnnnnnnnnnnnnnnnnnnnnnnnnnnnnnnnnnnnnnnnnnnnnnnnnnnnnnnnnnnnnnnnnnnnnnnnnnnnnnnnnnnnnnnnnnnnnnnnnnnnnnnnnnnnnnnnnnnnnnnnnnnnnnnnnnnnnnnnnnnnnnnnnnnnnnnnnnnnnnnnnnnnnnnnnnnnnnnnnnnnnnnnnnnnnnnnnnnnnnnnnnnnnnnnnnnnnnnnnnnnnnnnnnnnnnnnnnnnnnnnnnnnnnnnnnnnnnnnnnnnnnnnnnnnnnnnnnnnnnnnnnnnnnnnnnnnnnnnnnnnnnnnnnnnnnnnnnnnnnnnnnnnnnnnnnnnnnnnnnnnnnnnnnnnnnnnnnnnnnnnnnnnnnnnnnnnnnnnnnnnnnnnnnnnnnnnnnnnnnnnnnnnnnnnnnnnnnnnnnnnnnnnnnnnnnnnnnnnnnnnnnnnnnnnnnnnnnnnnnnnnnnnnnnnnnnnnnnnnnnnnnnnnnnnnnnnnnnnnnnnnnnnnnnnnnnnnnnnnnnnnnnnnnnnnnnnnnnnnnnnnnnnnnnnnnnnnnnnnnnnnnnnnnnnnnnnnnnnnnnnnnnnnnnnnnnnnnnnnnnnnnnnnnnnnnnnnnnnnnnnnnnnnnnnnnnnnnnnnnnnnnnnnnnnnnnnnnnnnnnnnnnnnnnnnnnnnnnnnnnnnnnnnnnnnnnnnnnnnnnnnnnnnnnnnnnnnnnnnnnnnnnnnnnnnnnnnnnnnnnnnnnnnnnnnnnnnnnnnnnnnnnnnnnnnnnnnnnnnnnnnnnnnnnnnnnnnnnnnnnnnnnnnnnnnnnnnnnnnnnnnnnnnnnnnnnnnnnnnnnncctgaaggactagagaaggaaacaacattcaactccctgctttgtccatcaggnnnnnnnnnnnnnnnnnnnnnnnnnnnnnnnnnnnnnnnnnnnnnnnnnnnnnnnnnnnnnnnnnnnnnnnnnnnnnnnnnnnnnnnnnnnnnnnnnnnnnnnnnnnnnnnnnnnnnnnnnnnnnnnnnnnnnnnnnnnnnnnnnnnnnnnnnnnnnnnnnnnnnnnnnnnnnnnnnnnnnnnnnnnnnnnnnnnnnnnnnnnnnnnnnnnnnnnnnnnnnnnnnnnnnnnnnnnnnnnnnnnnnnnnnnnnnnnnnnnnnnnnnnnnnnnnnnnnnnnnnnnnnnnnnnnnnnnnnnnnnnnnnnnnnnnnnnnnnnnnnnnnnnnnnnnnnnnnnnnnnnnnnnnnnnnnnnnnnnnnnnnnnnnnnnnnnnnnnnnnnnnnnnnnnnnnnnnnnnnnnnnnnnnnnnnnnnnnnnnnnnnnnnnnnnnnnnnnnnnnnnnnnnnnnnnnnnnnnnnnnnnnnnnnnnnnnnnnnnnnnnnnnnnnnnnnnnnnnnnnnnnnnnnnnnnnnnnnnnnnnnnnnnnnnnnnnnnnnnnnnnnnnnnnnnnnnnnnnnnnnnnnnnnnnnnnnnnnnnnnnnnnnnnnnnnnnnnnnnnnnnnnnnnnnnnnnnnnnnnnnnnnnnnnnnnnnnnnnnnnnnnnnnnnnnnnnnnnnnnnnnnnnnnnnnnnnnnnnnnnnnnnnnnnnnnnnnnnnnnnnnnnnnnnnnnnnnnnnnnnnnnnnnnnnnnnnnnnnnnnnnnnnnnnnnnnnnnnnnnnnnnnnnnnnnnnnnnnnnnnnnnnnnnnnnnnnnnnnnnnnnnnnnnnnnnnnnnnnnnnnnnnnnnnnnnnnnnnnnnnnnnnnnnnnnnnnnnnnnnnnnnnnnnnnnnnnnnnnnnnnnnnnnnnnnnnnnnnnnnnnnnnnnnnnnnnnnnnnnnnnnnnnnnnnnnnnnnnnnnnnnnnnnnnnnnnnnnnnnnnnnnnnnnnnnnnnnnnnnnnnnnnnnnnnnnnnnnnnnnnnnnnnnnnnnnnnnnnnnnnnnnnnnnnnnnnnnnnnnnnnnnnnnnnnnnnnnnnnnnnnnnnnnnnnnnnnnnnnnnnnnnnnnnnnnnnnnnnnnnnnnnnnnnnnnnnnnnnnnnnnnnnnnnnnnnnnnnnnnnnnnnnnnnnnnnnnnnnnnnnnnnnnnnnnnnnnnnnnnnnnnnnnnnnnnnnnnnnnnnnnnnnnnnnnnnnnnnnnnnnnnnnnnnnnnnnnnnnnnnnnntcccgtttgcgttaggggtgcagactctccctgcaacttgtgaggaacccaaagcccacaccangcttccacatctcactaagtgtcagnnnnnnnnnnnnnnnnnnnnnnnnnnnnnnnnnnnnnnnnnnnnnnnnnnnnnnnnnnnnnnnnnnnnnnnnnnnnnnnnnnnnnnnnnngcttgaaagatctaaccatgtgagccggacagaagtcagcaacaaccatgtcttgatttacctggataaggtnnnnnnnnnnnnnnnnnnnnnnnnnnnnnnnnnnnnnnnnnnnnnnnnnnnnnnnnnnnnnnnnnnnnnnnnnnnnnnnnnnnnnnnnnnnnnnnnnnnnnnnnnnnnnnnnnnnnnnnnnnnnnnnnnnnnnnnnnnnnnnnnnnnnnnnnnnnnnnnnnnnnnnnnggctgaaaactgctttgctggagtcctgttttcagagctccacagaagacacatgtttttgtatctttaaagacttgatgaataaacattttttctggtcaatgtc

SEQ ID NO: 18790 - DNA, 401 bp, Macaca Mulatta
gtccaccatgatttctccatataattttgatcataggccagagtgagttattccacctgcacctttctgtacaaatactaattcaattttaagtcttaagtcacttttttaatatatatgatcttctgctcttcccacttcctcccctttctactgctctcccattttcccttgctgggagtagccacatgctcttgtccccccacccttgtatatggggacagtggggtcagagcagctaccctttctttccctcctgcggaacagcagacccagcaagagcatccacatcctcaccttgttcggagtggtcttgggtttgggcgggggggccagaccttgggaaggggcttaggaagggagaggcagctcttccttcagctggctctcatcaggctgca

SEQ ID NO: 18791 - DNA, 1029 bp, Macaca Mulatta
gggggggagcagagcatactatctcatcttaaatggtataaaatctcaaccaataatgtgattcaacaattaccatttctttttaattcgaatcctaagacaaattatgtatatatatattttaaactttaataacagctaccattaattgctgtaactcaattagataggctattttgaaggtggaatgtattagtgtacacataccgctgatttgatttctcttccagccattggatttaatgtagagacggtgacatacaaaaaccttaaattccaagtctgggatttaggaggacagacaagtatcaggccatactggagatgttactattcaaacacagatgcagtcatttatgtagtagacagttgtgaccgagaccgaattggcatttccaaatcggagttagttgccatgctggaggaagaagagctgagaaaagccattttagtggtgtttgcaaataaacaggacatggaacaggccatgacttcctcagagatggcaaattcacttgggttacctgccttgaaggaccgaaaatggcaaatattcaaaacatcagcaaccaaaggcactggcccttgatgaggcaatggaatgggttagtttgaaacattaaaaagccagacagtaatttcggtccattctttctcccctcgaaaacgaagaactacattcaccccttttggaaaacagaaaaggtggtactttcacacttactaggatgtttaaaaacctttatgaattgtttttggccatattactgactgactgcaatgtttgtggtaaatagggaaaagaaatatttggttggagggataattcgatcgaatcacctgaatgttctatgtaatgtaaaatattcttttcttgctttcttgtgttaaggtatatattctatttgtatggaattcttattcaaatacagttctattaaagaatgtactcctattggatgaaaaaacctatttttgaatagtagttgcagcttgtttgtataaatactaaaaaatatcttaacagat

SEQ ID NO: 18792 - DNA, 788 bp, Macaca Mulatta
  misc_feature (1)...(788): n = A,T,C or G
ttcttcctgagccgcactgtctccaatgtcatcagctccattgtctttggggaccgctttgactatgaggacaaagagttcctgtcactgctgcgcatgatgctgggaagcttccagttcacggcaacctccgcagggcannnnnnnnnnnnnnnnnnnnnnnnnnnnnnnnnnnnnnnnnnnnnnnnnnnnnnnnnnnnnnnnnnnnnnnnnnnnnnnnnnnnnnnnnnnnnnnnnnnnnnnnnnnnnnnnnnnnnnnnnnnnnnnnnnnnnnnnnnnnnnnnnnnnnnnnnnnnnnnnnnnnnnnnnnnnnnnggaggagaagaacccaaacacggagttctacttgaagaacctggtgctgaccacgctgaacctcttcattgcgggcaccgagaccgtcagcaccaccctgcgctacggcttcctgctgctcacgaagcacccagaggtggaggnnnnnnnnnnnnnnnnnnnnnnnnnnnnnnnnnnnnnnnnnnnnnnnnnnnnnnnnnnnnnnnnnnnnnnnnnnnnnnnnnnnnnnnnnnnnnnnnnnnnnnnnnnnnnnnnnnnnnnnnnnnnnnnnnnnnnnnnnnnnnnnnnnnnnnnnnnnnnnnnnnnnnnnnnnnnnnnnnnnnnnnnnngggcaccgaagtgttttttatgctgggctccgtgctgagagaccccaggttcttctccaacccccaggacttcaatccccagcacttcttggatgagaaggggcagtttaagaagagtgacgcttttgtgcccttttccatcgg

SEQ ID NO: 18793 - DNA, 412 bp, Macaca Mulatta
  misc_feature (1)...(412): n = A,T,C or G
cccagaagctgccccaaagccaagtgccaagtctatctatgnnnnnnnnnnnnnnnnnnnnnnnnnnnnnnnnnnnnnnnnnnnnnnnnnnnnnnnnnnnnnnnnnnnnnnnnnnnnnnnnnnnnnnnnnnnnnnnnnnnnnnnnnnnnnnnnnnnnnnnnnnnnnnnnnnnnnnnnnnnnnnnnnnnnnnnnnnnnnnnnnnnnnnnnnnnnnnnnnnnnnnnnnnnnnnnnnnnnnnnnnnnnnnnnnnnnnnnnnnnaggaggagctggagtcatacccgctgggcgccatcgtgcgttgtgatgcggtgatgccaccccgccggagccgctcgctgctgctgctcgtgtgccaggaacccgagcgcgcgcagcccgacgtgcacttcttccagggcctgcgccttggg

SEQ ID NO: 18794 - DNA, 6050 bp, Macaca Mulatta
  misc_feature (1)...(6050): n = A,T,C or G
agggtctcagacaagctgaagcagatcccccaagctctggcagatggcaacagcaccgaccccgccctggtcttagctgagaacgcatctctcttgtccctgagcgagcttgattcagccttctcccagctgcagagccgtctccgcaacctcagcttgcagctgggtgtggagccagccnnnnnnnnnnnnnnnnnnnnnnnnnnnnnnnnnnnnnnnnnnnnnnnnnnnnnnnnnnnnnnnnnnnnnnnnnnnnnnnnnnnnnnnnnnnnnnnnnnnnnnnnnnnnnnnnnnnnnnnnnnnnnnnnnnnnnnnnnnnnnnnnnnnnnnnnnnnnnnnnnnnnnnnnnnnnnnnnnnnnnnnnnnnnnnnnnnnnnnnnnnnnnnnnnnnnnnnnnnnnnnnnnnnnnnnnnnnnnnnnnnnnnnnnnnnnnnnnnnnnnnnnnnnnnnnnnnnnnnnnnnnnnnnnnnnnnnnnnnnnnnnnnnnnnnnnnnnnnnnnnnnnnnnnnnnnnnnnnnnnnnnnnnnnnnnnnnnnnnnnnnnnnnnnnnnnnnnnnnnnnnnnnnnnnnnnnnnnnnnnnnnnnnnnnnnnnnnnnnnnnnnnnnnnnnnnnnnnnnnnnnnnnnnnnnnnnnnnnnnnnnnnnnnnnnnnnnnnnnnnnnnnnnnnnnnnnnnnnnnnnnnnnnnnnnnnnnnnnnnnnnnnnnnnnnnnnnnnnnnnnnnnnnnnnnnnnnnnnnnnnnnnnnnnnnnnnnnnnnnnnnnnnnnnnnnnnnnnnnnnnnnnnnnnnnnnnnnnnnnnnnnnnnnnnnnnnnnnnnnnnnnnnnnnnnnnnnnnnnnnnnnnnnnnnnnnnnnnnnnnnnnnnnnnnnnnnnnnnnnnnnnnnnnnnnnnnnnnnnnnnnnnnnnnnnnnnnnnnnnnnnnnnnnnnnnnnnnnnnnnnnnnnnnnnnnnnnnnnnnnnnnnnnnnnnnnnnnnnnnnnnnnnnnnnnnnnnnnnnnnnnnnnnnnnnnnnnnnnnnnnnnnnnnnnnnnnnnnnnnnnnnnnnnnnnnnnnnnnnnnnnnnnnnnnnnnnnnnnnnnnnnnnnnnnnnnnnnnnnnnnnnnnnnnnnnnnnnnnnnnnnnnnnnnnnnnnnnnnnnnnnnnnnnnnnnnnnnnnnnnnnnnnnnnnnnnnnnnnnnnnnnnnnnnnnnnnnnnnnnnnnnnnnnnnnnnnnnnnnnnnnnnnnnnnnnnnnnnnnnnnnnnnnnnnnnnnnnnnnnnnnnnnnnnnnnnnnnnnnnnnnnnnnnnnnnnnnnnnnnnnnnnnnnnnnnnnnnnnnnnnnnnnnnnnnnnnnnnnnnnnnnnnnnnnnnnnnnnnnnnnnnnnnnnnnnnnnnnnnnnnnnnnnnnnnnnnnnnnnnnnnnnnnnnnnnnnnnnnnnnnnnnnnnnnnnnnnnnnnnnnnnnnnnnnnnnnnnnnnnnnnnnnnnnnnnnnnnnnnnnnnnnnnnnnnnnnnnnnnnnnnnnnnnnnnnnnnnnnnnnnnnnnnnnnnnnnnnnnnnnnnnnnnnnnnnnnnnnnnnnnnnnnnnnnnnnnnnnnnnnnnnnnnnnnnnnnnnnnnnnnnnnnnnnnnnnnnnnnnnnnnnnnnnnnnnnnnnnnnnnnnnnnnnnnnnnnnnnnnnnnnnnnnnnnnnnnnnnnnnnnnnnnnnnnnnnnnnnnnnnnnnnnnnnnnnnnnnnnnnnnnnnnnnnnnnnnnnnnnnnnnnnnnnnnnnnnnnnnnnnnnnnnnnnnnnnnnnnnnnnnnnnnnnnnnnnnnnnnnnnnnnnnnnnnnnnnnnnnnnnnnnnnnnnnnnnnnnnnnnnnnnnnnnnnnnnnnnnnnnnnnnnnnnnnnnnnnnnnnnnnnnnnnnnnnnnnnnnnnnnnnnnnnnnnnnnnnnnnnnnnnnnnnnnnnnnnnnnnnnnnnnnnnnnnnnnnnnnnnnnnnnnnnnnnnnnnnnnnnnnnnnnnnnnnnnnnnnnnnnnnnnnnnnnnnnnnnnnnnnnnnnnnnnnnnnnnnnnnnnnnnnnnnnnnnnnnnnnnnnnnnnnnnnnnnnnnnnnnnnnnnnnnnnnnnnnnnnnnnnnnnnnnnnnnnnnnnnnnnnnnnnnnnnnnnnnnnnnnnnnnnnnnnnnnnnnnnnnnnnnnnnnnnnnnnnnnnnnnnnnnnnnnnnnnnnnnnnnnnnnnnnnnnnnnnnnnnnnnnnnnnnnnnnnnnnnnnnnnnnnnnnnnnnnnnnnnnnnnnnnnnnnnnnnnnnnnnnnnnnnnnnnnnnnnnnnnnnnnnnnnnnnnnnnnnnnnnnnnnnnnnnnnnnnnnnnnnnnnnnnnnnnnnnnnnnnnnnnnnnnnnnnnnnnnnnnnnnnnnnnnnnnnnnnnnnnnnnnnnnnnnnnnnnnnnnnnnnnnnnnnnnnnnnnnnnnnnnnnnnnnnnnnnnnnnnnnnnnnnnnnnnnnnnnnnnnnnnnnnnnnnnnnnnnnnnnnnnnnnnnnnnnnnnnnnnnnnnnnnnnnnnnnnnnnnnnnnnnnnnnnnnnnnnnnnnnnnnnnnnnnnnnnnnnnnnnnnnnnnnnnnnnnnnnnnnnnnnnnnnnnnnnnnnnnnnnnnnnnnnnnnnnnnnnnnnnnnnnnnnnnnnnnnnnnnnnnnnnnnnnnnnnnnnnnnnnnnnnnnnnnnnnnnnnnnnnnnnnnnnnnnnnnnnnnnnnnnnnnnnnnnnnnnnnnnnnnnnnnnnnnnnnnnnnnnnnnnnnnnnnnnnnnnnnnnnnnnnnnnnnnnnnnnnnnnnnnnnnnnnnnnnnnnnnnnnnnnnnnnnnnnnnnnnnnnnnnnnnnnnnnnnnnnnnnnnnnnnnnnnnnnnnnnnnnnnnnnnnnnnnnnnnnnnnnnnnnnnnnnnnnnnnnnnnnnnnnnnnnnnnnnnnnnnnnnnnnnnnnnnnnnnnnnnnnnnnnnnnnnnnnnnnnnnnnnnnnnnnnnnnnnnnnnnnnnnnnnnnnnnnnnnnnnnnnnnnnnnnnnnnnnnnnnnnnnnnnnnnnnnnnnnnnnnnnnnnnnnnnnnnnnnnnnnnnnnnnnnnnnnnnnnnnnnnnnnnnnnnnnnnnnnnnnnnnnnnnnnnnnnnnnnnnnnnnnnnnnnnnnnnnnnnnnnnnnnnnnnnnnnnnnnnnnnnnnnnnnnnnnnnnnnnnnnnnnnnnnnnnnnnnnnnnnnnnnnnnnnnnnnnnnnnnnnnnnnnnnnnnnnnnnnnnnnnnnnnnnnnnnnnnnnnnnnnnnnnnnnnnnnnnnnnnnnnnnnnnnnnnnnnnnnnnnnnnnnnnnnnnnnnnnnnnnnnnnnnnnnnnnnnnnnnnnnnnnnnnnnnnnnnnnnnnnnnnnnnnnnnnnnnnnnnnnnnnnnnnnnnnnnnnnnnnnnnnnnnnnnnnnnnnnnnnnnnnnnnnnnnnnnnnnnnnnnnnnnnnnnnnnnnnnnnnnnnnnnnnnnnnnnnnnnnnnnnnnnnnnnnnnnnnnnnnnnnnnnnnnnnnnnnnnnnnnnnnnnnnnnnnnnnnnnnnnnnnnnnnnnnnnnnnnnnnnnnnnnnnnnnnnnnnnnnnnnnnnnnnnnnnnnnnnnnnnnnnnnnnnnnnnnnnnnnnnnnnnnnnnnnnnnnnnnnnnnnnnnnnnnnnnnnnnnnnnnnnnnnnnnnnnnnnnnnnnnnnnnnnnnnnnnnnnnnnnnnnnnnnnnnnnnnnnnnnnnnnnnnnnnnnnnnnnnnnnnnnnnnnnnnnnnnnnnnnnnnnnnnnnnnnnnnnnnnnnnnnnnnnnnnnnnnnnnnnnnnnnnnnnnnnnnnnnnnnnnnnnnnnnnnnnnnnnnnnnnnnnnnnnnnnnnnnnnnnnnnnnnnnnnnnnnnnnnnnnnnnnnnnnnnnnnnnnnnnnnnnnnnnnnnnnnnnnnnnnnnnnnnnnnnnnnnnnnnnnnnnnnnnnnnnnnnnnnnnnnnnnnnnnnnnnnnnnnnnnnnnnnnnnnnnnnnnnnnnnnnnnnnnnnnnnnnnnnnnnnnnnnnnnnnnnnnnnnnnnnnnnnnnnnnnnnnnnnnnnnnnnnnnnnnnnnnnnnnnnnnnnnnnnnnnnnnnnnnnnnnnnnnnnnnnnnnnnnnnnnnnnnnnnnnnnnnnnnnnnnnnnnnnnnnnnnnnnnnnnnnnnnnnnnnnnnnnnnnnnnnnnnnnnnnnnnnnnnnnnnnnnnnnnnnnnnnnnnnnnnnnnnnnnnnnnnnnnnnnnnnnnnnnnnnnnnnnnnnnnnnnnnnnnnnnnnnnnnnnnnnnnnnnnnnnnnnnnnnnnnnnnnnnnnnnnnnnnnnnnnnnnnnnnnnnnnnnnnnnnnnnnnnnnnnnnnnnnnnnnnnnnnnnnnnnnnnnnnnnnnnnnnnnnnnnnnnnnnnnnnnnnnnnnnnnnnnnnnnnnnnnnnnnnnnnnnnnnnnnnnnnnnnnnnnnnnnnnnnnnnnnnnnnnnnnnnnnnnnnnnnnnnnnnnnnnnnnnnnnnnnnnnnnnnnnnnnnnnnnnnnnnnnnnnnnnnnnnnnnnnnnnnnnnnnnnnnnnnnnnnnnnnnnnnnnnnnnnnnnnnnnnnnnnnnnnnnnnnnnnnnnnnnnnnnnnnnnnnnnnnnnnnnnnnnnnnnnnnnnnnnnnnnnnnnnnnnnnnnnnnnnnnnnnnnnnnnnnnnnnnnnnnnnnnnnnnnnnnnnnnnnnnnnnnnnnnnnnnnnnnnnnnnnnnnnnnnnnnnnnnnnnnnnnnnnnnnnnnnnnnnnnnnnnnnnnnnnnnnnnnnnnnnnnnnnnnnnnnnnnnnnnnnnnnnnnnnnnnnnnnnnnnnnnnnnnnnnnnnnnnnnnnnnnnnnnnnnnnnnnnnnnnnnnnnnnnnnnnnnnnnnnnnnnnnnnnnnnnnnnnnnnnnnnnnnnnnnnnnnnnnnnnnnnnnnnnnnnnnnnnnnnnnnnnnnnnnnnnnnnnnnnnnnnnnnnnnnnnnnnnnnnnnnnnnnnnnnnnnnnnnnnnnnnnnnnnnnnnnnnnnnnnnnnnnnnnnnnnnnnnnnnnnnnnnnnnnnnnnnnnnnnnnnnnnnnnnnnnnnnnnnnnnnnnnnnnnnnnnnnnnnnnnnnnnnnnnnnnnnnnnnnnncctgaccctaaagtcttccagccccaggtcatcctctgctatgctggggtctattgaccgtataggccaggtgcggtggctcaggcttgtaatcccaacatttggggaggccaagatgggaggattgcttgagcacaggagttggagaccagcctgggcaacatggtgagaccaattgactgtagggcttgtcccttgctagaacaggagcagaagactgaatagctgtgtcctcaaggcagtcccctcccacccccattcccaaagtcagaaagcgaagccagatctcaaaggctgatacctgaggcaaggagagctaaggggagagaaagcggggtggggtgggagcagacaccttcacaagccaagtgtgtcttacagatctgtacaagctgatagaaggaccgcctgctgaaatccagggctcctgagttgatgggtttgcttgtgaagcttctaggacaaggcgcagccagatggaagggagaggatccaggacttcctaaatgcagccgcatcacctctcaactcgctgcagtttcagagacagtggaagctgctctttacctcaaaagcacaaagcagaattggcaacttcacatgtctcaagagcttcaagatcctttggtctcgtgtcctttggcaccccacaactgtatgggggacaaatttgttacatgtttccaaggctacagacatggtgccatcctcacgggcctagctcatgtgaggtactttgtggatcaggtactttgctggggggatacaatgacccaggtggtctgtgtcctctgccattggtttgaacagggcaccccctgaagtctccatctcggctgtatagtctagtccaaatttgcctggcttccccgctccctcccaggtcctgcacactgtcttttttgccacacctcagcc

SEQ ID NO: 18795 - DNA, 163 bp, Macaca Mulatta
agaattaagaaagcaatctcttgaaagcgaacaggacatgcgggacagacacgattatgtggacttgatagatgtcccagactcctataatggccctcggctacaatttcctctcacttgtactgatattgatttacttcttgaggccttcaaggaacaacag

SEQ ID NO: 18796 - DNA, 831 bp, Macaca Mulatta
  misc_feature (1)...(831): n = A,T,C or G
ggggagtctctccttgcggcgctacactagagcagagtacgagtctgaggcggagggagtcatggcaggacaagcgtttagaaagtttcttccactctttgaccgagtattggttgaaaggagtgctgctgaaactgtaaccaaaggaggcattatgcttccagaaaaatctcaaggaaaagtattgcaagcaacagtagtcgctgttggatcgggttctaaaggaaagggtggagagattcaaccggttagcgtgaaagttggagataaagttcttctgccagagtatggaggcaccaaagtagttctagatgacaagaaggagtttcgctctnnnnnnnnnnnnnnnnnnnnnnnnnnacaatctcgannnnnnnnnnnnnnnnnnnnnnnnccaggttcaagcgattctcctgctnnnnnnnnnnnnnnnnnnnnnnnnnnnnnnnnnntgccaccaccctcggctaannnnnnnnnnnnnnnnnnnnnnnnnntggtgtcaccatgttggtcaggctggtcttgaaccctgacctcaagtgatccacctcnnnnnnnnnnnnnnnnnnnnnnnnnnnnnnncatgaagccaccggcacccagcttatttttcctttacctctcaagccaccctcttatcagaagagccccaatcaaaccctagcctccttgttcctggggtttgcttaacataccaaatttcttgttaacatttggacaaaatttaccttaaaccctcctctttaaccttatgaaattgaaactggccaaaaaaaaggggtcatttaaaaatttgcccctccttaacccttttttgagttcaaggcc

SEQ ID NO: 18797 - DNA, 412 bp, Macaca Mulatta
tctcaatctactttatatcatttcccagcaatatttgaaaaacatgatatttctcaaataagagatacttgacaaatgcaagcttctggggtgtcggtgaaatgctatttctctccaccaaacacatttttttgtctttccctagaatctttttgaaactgttcctggttgtaaaataatctacaggctaatttttgttttggtctcatgcttgatttcaacagagtagcaataattattatcctctttttccccttcaggccattatgcattttctcatactggagattcctccaacgacatcatgctaacttagtttttctcaactgaataaggcaaggaaccataaaatcaagaaaaaattttcaaaacaacttgacatttagagagaaatgtcaatgaagaaattatg

SEQ ID NO: 18798 - DNA, 385 bp, Macaca Mulatta
  misc_feature (1)...(385): n = A,T,C or G
ggcctcaggagtgcaagtaggtgatgaagtatgtcgcatnnnnnnnnnnnnnnnnnnnnnnnnnnnnnnnnnnnnnnnnnnnnnnnnnnnnnnnnnnnnnnnnnnnnnnnnnnnnnnnnnnnnnnnnnnnnnnnnnnnnnnnnnnnnnnnnnnnnnnnnnnnnnnnnnnnnnnnnnnnnnnnnnnnnnnnnnnnnnnnnnnnnnnnnnnnnnnnnnnnnnnnnnnnnnnnnnnnnnnnnnnnnnnnnnnnnnnnnnnnnnnnnnnnnnnnnnnnnnnnnnnnnnnnnnnnnnnnnnnnnnnnnnnnnggcaccagaactagcacctctgaaaagtaaaatgatctatgcaagctccaaggatgcaattaaaaagaaatttcaagg

SEQ ID NO: 18799 - DNA, 244 bp, Macaca Mulatta
agtttttaggaatcagctacccaggaaaaacgatttttactcatatgagccaccttctgagaatcctcccccagaaacaggagaatcagtgtgtctccagcttaagtctggtgctcatctctgcagggtttgtggctgtttaggccccaaaacgtgctccagatgccacaaagcatattactgcagcaaggagcatcagaccctagactggagattgggacataagcagacttgtgcacaacca

SEQ ID NO: 18800 - DNA, 1212 bp, Macaca Mulatta
  misc_feature (1)...(1212): n = A,T,C or G
gggggccttctcggaggtgatcctggcagaagataaaaggacgcagaagctggtggccatcaaatgcattgccaagaaggccctggagggcaaggaaggcagcatggagaatgagattgctgtcctgcacaannnnnnnnnnnnnnnnnnnnnnnnnnnnnnnnnnnnnnnnnnnnnnnnnnnnnnnnnnnnnnnnnnnnnnnnnnnnnnnnnnnnnnnnnnnnnnnnnnnnnnnnnnnnnnnnnnnnnnnnnnnnnnnnnnnnnnnnnnnnnnnnnnnnnnnnnnnnnnnnnnnnnnnnnnnnnnnnnnnnnnnnnnnnnnnnnnnnnnnnnnnnnnnnntcaagccagagaatctgctatactacagcctggatgaagactccaaaataatgatctccgactttggcctctccaagatggaggacccgggcagtgtgctctccaccgcctgcggaactccgggatacgtgnnnnnnnnnnnnnnnnnnnnnnnnnnnnnnnnnnnnnnnnnnnnnnnnnnnnnnnnnnnnnnnnnnnnnnnnnnnnnnnnnnnnnnnnnnnnnnnnnnnnnnnnnnnnnnnnnnnnnnnnnnnnnnnnnnnnnnnnnnnnnnnnnnnnnnnnnnnnnnnnnnnnnnnnnnnnnnnnnnnnnnnnnnnnnnnnnnnnnnnnnnnnnnnnnnnnnnnnnnnnnnnnnnnnnnnnnnnnnnnnnnnnnnnnnnnnnnnnnnnnnnnnnnnnnnnnnnnnnnnnnnnnnnnnnnnnnnnnnnnnnnnnnnnnnnnnnnnnnnnnnnnnnnnnnnnnnnnnnnnnnnnnnnnnnnnnnnnnnnnnnnnnnnnnnnnnnnnnnnnnnnnnnnnnnnnnnnnnnnnnnnnnnnnnnnnnnnnnnnnnnnnnnnnnnnnnnnnnnnnnnnnnnnnnnnnnnnnnnnnnnnnnnnnnnnnnnnnnnnnnnnnnnnnnnnnnnnnnnnnnnnnnnnnnnnnnnnnnnnnnnnnnnnnnnnnnnnnnnnnnnnnnnnnnnnnnnnnnnnnnnnnnnnnnnnnnnnnnnnnnnnnctgcgtggaagggcttgggggcagcctgctccccttccctccctgaactgggagtttctctgccctgtcccctcctcacctgcttccctaccactcctcactgcattttccatacaaatatttctattttattgttccttcttgtaataaagggaag

SEQ ID NO: 18801 - DNA, 3534 bp, Macaca Mulatta
  misc_feature (1)...(3534): n = A,T,C or G
ntctctctggaggagtggcaattcctggacactgcacagcagaatttatatagaaatgtgatgttagagaactacagaaacctggtcttcctgggnnnnnnnnnnnnnnnnnnnnnnnnnnnnnnnnnnnnnnnnnnnnnnnnnnnnnnnnnnnnnnnnnnnnnnnnnnnnnnnnnnnnnnnnnnnnnnnnnnnnnnnnnnnnnnnnnnnnnnnnnnnnnnnnnnnnnnnnnnnnnnnnnnnnnnnnnnnnnnnnnnnnnnnnnnnnnnnnnnnnnnnnnnnnnnnnnnnnnnnnnnnnnnnnnnnnnnnnnnnnnnnnnnnnnnnnnnnnnnnnnnnnnnnnnnnnnnnnnnnnnnnnnnnnnnnnnnnnnnnnnnnnnnnnnnnnnnnnnnnnnnnnnnnnnnnnnnnnnnnnnnnnnnnnnnnnnnnnnnnnnnnnnnnnnnnnnnnnnnnnnnnnnnnnnnnnnnnnnnnnnnnnnnnnnnnnnnnnnnnnnnnnnnnnnnnnnnnnnnnnnnnnnnnnnnnnnnnnnnnnnnnnnnnnnnnnnnnnnnnnnnnnnnnnnnnnnnnnnnnnnnnnnnnnnnnnnnnnnnnnnnnnnnnnnnnnnnnnnnnnnnnnnnnnnnnnnnnnnnnnnnnnnnnnnnnnnnnnnnnnnnnnnnnnnnnnnnnnnnnnnnnnnnnnnnnnnnnnnnnnnnnnnnnnnnnnnnnnnnnnnnnnnnnnnnnnnnnnnnnnnnnnnnnnnnnnnnnnnnnnnnnnnnnnnnnnnnnnnnnnnnnnnnnnnnnnnnnnnnnnnnnnnnnnnnnnnnnnnnnnnnnnnnnnnnnnnnnnnnnnnnnnnnnnnnnnnnnnnnnnnnnnnnnnnnnnnnnnnnnnnnnnnnnnnnnnnnnnnnnnnnnnnnnnnnnnnnnnnnnnnnnnnnnnnnnnnnnnnnnnnnnnnnnnnnnnnnnnnnnnnnnnnnnnnnnnnnnnnnnnnnnnnnnnnnnnnnnnnnnnnnnnnnnnnnnnnnnnnnnnnnnnnnnnnnnnnnnnnnnnnnnnnnnnnnnnnnnnnnnnnnnnnnnnnnnnnnnnnnnnnnnnnnnnnnnnnnnnnnnnnnnnnnnnnnnnnnnnnnnnnnnnnnnnnnnnnnnnnnnnnnnnnnnnnnnnnnnnnnnnnnnnnnnnnnnnnnnnnnnnnnnnnnnnnnnnnnnnnnnnnnnnnnnnnnnnnnnnnnnnnnnnnnnnnnnnnnnnnnnnnnnnnnnnnnnnnnnnnnnnnnnnnnnnnnnnnnnnnnnnnnnnnnnnnnnnnnnnnnnnnnnnnnnnnnnnnnnnnnnnnnnnnnnnnnnnnnnnnnnnnnnnnnnnnnnnnnnnnnnnnnnnnnnnnnnnnnnnnnnnnnnnnnnnnnnnnnnnnnnnnnnnnnnnnnnnnnnnnnnnnnnnnnnnnnnnnnnnnnnnnnnnnnnnnnnnnnnnnnnnnnnnnnnnnnnnnnnnnnnnnnnnnnnnnnnnnnnnnnnnnnnnnnnnnnnnnnnnnnnnnnnnnnnnnnnnnnnnnnnnnnnnnnnnnnnnnnnnnnnnnnnnnnnnnnnnnnnnnnnnnnnnnnnnnnnnnnnnnnnnnnnnnnnnnnnnnnnnnnnnnnnnnnnnnnnnnnnnnnnnnnnnnnnnnnnnnnnnnnnnnnnnnnnnnnnnnnnnnnnnnnnnnnnnnnnnnnnnnnnnnnnnnnnnnnnnnnnnnnnnnnnnnnnnnnnnnnnnnnnnnnnnnnnnnnnnnnnnnnnnnnnnnnnnnnnnnnnnnnnnnnnnnnnnnnnnnnnnnnnnnnnnnnnnnnnnnnnnnnnnnnnnnnnnnnnnnnnnnnnnnnnnnnnnnnnnnnnnnnnnnnnnnnnnnnnnnnnnnnnnnnnnnnnnnnnnnnnnnnnnnnnnnnnnnnnnnnnnnnnnnnnnnnnnnnnnnnnnnnnnnnnnnnnnnnnnnnnnnnnnnnnnnnnnnnnnnnnnnnnnnnnnnnnnnnnnnnnnnnnnnnnnnnnnnnnnnnnnnnnnnnnnnnnnnnnnnnnnnnnnnnnnnnnnnnnnnnnnnnnnnnnnnnnnnnnnnnnnnnnnnnnnnnnnnnnnnnnnnnnnnnnnnnnnnnnnnnnnnnnnnnnnnnnnnnnnnnnnnnnnnnnnnnnnnnnnnnnnnnnnnnnnnnnnnnnnnnnnnnnnnnnnnnnnnnnnnnnnnnnnnnnnnnnnnnnnnnnnnnnnnnnnnnnnnnnnnnnnnnnnnnnnnnnnnnnnnnnnnnnnnnnnnnnnnnnnnnnnnnnnnnnnnnnnnnnnnnnnnnnnnnnnnnnnnnnnnnnnnnnnnnnnnnnnnnnnnnnnnnnnnnnnnnnnnnnnnnnnnnnnnnnnnnnnnnnnnnnnnnnnnnnnnnnnnnnnnnnnnnnnnnnnnnnnnnnnnnnnnnnnnnnnnnnnnnnnnnnnnnnnnnnnnnnnnnnnnnnnnnnnnnnnnnnnnnnnnnnnnnnnnnnnnnnnnnnnnnnnnnnnnnnnnnnnnnnnnnnnnnnnnnnnnnnnnnnnnnnnnnnnnnnnnnnnnnnnnnnnnnnnnnnnnnnnnnnnnnnnnnnnnnnnnnnnnnnnnnnnnnnnnnnnnnnnnnnnnnnnnnnnnnnnnnnnnnnnnnnnnnnnnnnnnnnnnnnnnnnnnnnnnnnnnnnnnnnnnnnnnnnnnnnnnnnnnnnnnnnnnnnnnnnnnnnnnnnnnnnnnnnnnnnnnnnnnnnnnnnnnnncatactggagagaaactctacaaatgtgaagaatgtggcaaagtctataagtggccctcaacccttagttatcataagaaaattcatactggagagaaactctacaaatgcgaagaatgtggcaaagcctataactggccctcaacccttagttatcataagaaaattcatactggagagaaaccctataaatgtgaagaatgtggcaaagcctataattggccctcaacccttagttatcataagaaaattcatactggagagaaaccttacaaatgtgaagaatgtggcaaagcctgtaagtggtcctcaacccttagttttcataagaaaattcactctgcagagaaatcttacaaatgtgaagaatgtggtaaagccttcggctgtttctcagtctttagtaaccataaggtaattcatactggagagaaaccctataaatgtgaagaatgtggcaaagactttaatacgttctcaatctttactaaacataagaaaattcatactggagagaaaccctacaaatgtgaagaatgtggtaaagtcttcagctctttctcagtctttggtaaccataaggtaattcatactggagagaaactctacaaatgtgaagaatgtggcaaagtctataagtggccctcaacccttagttatcataagaaaattcatactggagagaaactctacaaatgcgaagaatgtggcaaagcctataactggccctcaacccttagttatcataagaaaattcatactggagagaaaccctataaatgtgaagaatgtggcaaagg

SEQ ID NO: 18802 - DNA, 2189 bp, Macaca Mulatta
  misc_feature (1)...(2189): n = A,T,C or G
ggcggcagacctgggcccctggaatggcaccatcaatggcacctgggatggggatgagctgggctacaggtgccgcttcaacgaggacttcaagtacgtgctgctgcctgtgtcctacggcgtggtgtgtgtgcttgggctgtgtctgaacgccgtggcgctctacatcttcttgtgccgcctcaagacctggaatgcgtccaccacatacatgttccacctggctgtgtctgatgcactgtatgcggcctccctgccgctgctggtctattactacgcccgcggcgaccactggccctttagcaccgtgctctgcaagctggtgcgcttcctcttctacaccaatctttactgcagcatcctcttcctcacctgcatcagcgtgcaccggtgtctgggtgtcttacgccctctgcgctccctgcgctggggccaggcccgctacgctcgccgggtggccggggccgtgtgggtgttggtgctggcctgccaggcccctgtgctctactttgtcaccaccagcgcacgtgggggccgcgtgacctgccacgacacctcggcgcccgatctcttcagccgcttcgtggcctacagctcagtcatgctgggcctgctcttcgcggtgccctttgccatcatccttgtctgttacatgctcatggctcggcggctgctaaagccggcctacgggacctcgggcggcctgcctagggccaagcgcaagtccgtgcgcaccatcgccatagtgctggctgtcttcgccctctgcttcctgcccttcatgtcacccgcaccctnnnnnnnnnnnnnnnnnnnnnnnnnnnnnnnnnnnnnnnnnnnnnnnnnnnnnnnnnnnnnnnnnnnnnnnnnnnnnnnnnnnnnnnnnnnnnnnnnnnnnnnnnnnnnnnnnnnnnnnnnnnnnnnnnnnnnnnnnnnnnnnnnnnnnnnnnnnnnnnnnnnnnnnnnnnnnnnnnnnnnnnnnnnnnnnnnnnnnnnnnnnnnnnnnnnnnnnnnnnnnnnnnnnnnnnnnnnnnnnnnnnnnnnnnnnnnnnnnnnnnnnnnnnnnnnnnnnnnnnnnnnnnnnnnnnnnnnnnnnnnnnnnnnnnnnnnnnnnnnnnnnnnnnnnnnnnnnnnnnnnnnnnnnnnnnnnnnnnnnnnnnnnnnnnnnnnnnnnnnnnnnnnnnnnnnnnnnnnnnnnnnnnnnnnnnnnnnnnnnnnnnnnnnnnnnnnnnnnnnnnnnnnnnnnnnnnnnnnnnnnnnnnnnnnnnnnnnnnnnnnnnnnnnnnnnnnnnnnnnnnnnnnnnnnnnnnnnnnnnnnnnnnnnnnnnnnnnnnnnnnnnnnnnnnnnnnnnnnnnnnnnnnnnnnnnnnnnnnnnnnnnnnnnnnnnnnnnnnnnnnnnnnnnnnnnnnnnnnnnnnnnnnnnnnnnnnnnnnnnnnnnnnnnnnnnnnnnnnnnnnnnnnnnnnnnnnnnnnnnnnnnnnnnnnnnnnnnnnnnnnnnnnnnnnnnnnnnnnnnnnnnnnnnnnnnnnnnnnnnnnnnnnnnnnnnnnnnnnnnnnnnnnnnnnnnnnnnnnnnnnnnnnnnnnnnnnnnnnnnnnnnnnnnnnnnnnnnnnnnnnnnnnnnnnnnnnnnnnnnnnnnnnnnnnnnnnnnnnnnnnnnnnnnnnnnnnnnnnnnnnnnnnnnnnnnnnnnnnnnnnnnnnnnnnnnnnnnnnnnnnnnnnnnnnnnnnnnnnnnnnnnnnnnnnnnnnnnnnnnnnnnnnnnnnnnnnnnnnnnnnnnnnnnnnnnnnnnnnnnnnnnnnnnnnnnnnnnnnnnnnnnnnnnnnnnnnnnnnnnnnnnnnnnnnnnnnnnnnnnnnnnnnnnnnnnnnnnnnnnnnnnnnnnnnnnnnnnnnnnnnnnnnnnnnnnnnnnnnnnnnnnnnnnnnnnnnnnnnnnnnnnnnnnnnnnnnnnnnnnnnnnnnnnnnnnnnnnnnnnnnnnnnnnnnnnnnnnnnnnnnnnnnnnnnnnnnnnnnnnnnnnnnnnnnnnnnnnnnnnnnnnnnnnnnnnnnnnnnnnnnnnnnnnnnnnnnnnnnnnnnnnnnnnnnnnnnnnnnnnnnnnnnntctttgtagaactgcccagtttcatgatgcaaaaacccttaaggccgaattcaaactataaacatgatgtccgcttccttgtaaaa

SEQ ID NO: 18803 - DNA, 521 bp, Macaca Mulatta
cctgacccgtttgctcatctctttttctatgaaatatgtgaatggcaataaattcatctagcctattctggctccgggcgcctcatttgtcgttgggtatatggcacttggttccagttgggttgtaggaaacccagattgtggggcatttcagacaggggaccatggcagtgggggtctgtgtgcaaggttcctgcagtcctgcctggccttggctctcctttgtgaactgtggtaaactagggggtttattctaccaccctctagcaacagttaacaggtagtagctgccctttttgtgtagttgtgacacagcctatactcaccggccacctatggtgcacctactgcatacacagtgaggcatggggttctcagtggtgaggggaacagggagcttatggactgctggggagagagaatgatagaataaggaatcttgtaaaggagaaggtgctgtgactgaatgcacttggggtgagcctgaatgaagaactctttccactgggatctgagagctg

SEQ ID NO: 18804 - DNA, 2372 bp, Macaca Mulatta
  misc_feature (1)...(2372): n = A,T,C or G
gaggtgaaattgactgtgtggataaggatggcaacactcctctccatgtggctgcaagatacggtcatgagcttttgattaacaccttaataaccagcggagctgacacagccaagtntgtggaatccatagcatgttccctttacatttagctgccctaaatgctcactctgactgctgcagaaagttgttatcatnnnnnnnnnnnnnnnnnnnnnnnnnnnnnnnnnnnnnnnnnnnnnnnnnnnnnnnnnnnnnnnnnnnnnnnnnnnnnnnnnnnnnnnnnnnnnnnnnnnnnnnnnnnnnnnnnnnnnnnnnnnnnnnnnnnnnnnnnnnnnnnnnnnnnnnnnnnnnnnnnnnnnnnnnnnnnnnnnnnnnnnnnnnnnnnnnnnnnnnnnnnnnnnnnnnnnnnnnnnnnnnnnnnnnnnnnnnnnnnnnnnnnnnnnnnnnnnnnnnnnnnnnnnnnnnnnnnnnnnnnnnnnnnnnnnnnnnnnnnnnnnnnnnnnnnnnnnnnnnnnnnnnnngaagtaagactatcttaggaaatgcccatgaaaattcagaagaacttgaaagagccagggagctgaaggaaaaggaagccacactnnnnnnnnnnnnnnnnnnnnnnnnnnnnnnnnnnnnnnnnnnnnnnnnnnnnnnnnnnnnnnnnnnnnnnnnnnnnnnnnnnnnnnnnnnnnnnnnnnnnnnnnnnnnnnngcttttggaaagaacaaacagtgggtttgaagaatcagattctggtgctactaagagtccactccacttagctnnnnnnnnnnnnnnnnnnnnnnnnnnnnnnnnnnnnnnnnnnnnnnnnnnnnnnnnnnnnnnnnnnnnnnnnnnnnnnnnnnnnnnnnnnnnnnnnnnnnnnnnnnnnnnnnnnnnnnnnnnnnnnnnnnnnnnnnnnnnnnnnnnnnnnnnnnnnnnnnnnnnnnnnnnnnnnnnnnnnnnnnnnnnnnnnnnnnnnnnnnnnnnnnnnnnnnnnnnnnnnnnnnnnnnnnnnnnnnnnnnnnnnnnnnnnnnnnnnnnnnnnnnnnnnnnnnnnnnnnnnnnnnnnnnnnnnnnnnnnnnnnnnnnnnnnnnnnnnnnnnnnnnnnnnnnnnnnnnnnnnnnnnnnnnnnnnnnnnnnnnnnnnnnnnnnnnnnnnnnnnnnnnnnnnnnnnnnnnnnnnnnnnnnnnnnnnnnnnnnnnnnnnnnnnnnnnnnnnnnnnnnnnnnnnnnnnnnnnnnnnnnnnnnnnnnnnnnnnnnnnnnnnnnnnnnnnnnnnnnnnnnnnnnnnnnnnnnnnnnnnnnnnnnnnnnnnnnnnnnnnnnnnnnnnnnnnnnnnnnnnnnnnnnnnnnnnnnnnnnnnnnnnnnnnnnnnnnnnnnnnnnnnnnnnnnnnnnnnnnnnnnnnnnnnnnnnnnnnnnnnnnnnnnnnnnnnnnnnnnnnnnnnnnnnnnnnnnnnnnnnnnnnnnnnnnnnnnnnnnnnnnnnnnnnnnnnnnnnnnnnnnnnnnnnnnnnnnnnnnnnnnnnnnnnnnnnnnnnnnnnnnnnnnnnnnnnnnnnnnnnnnnnnnnnnnnnnnnnnnnnnnnnnnnnnnnnnnnnnnnnnnnnnnnnnnnnnnnnnnnnnnnnnnnnnnnnnnnnnnnnnnnnnnnnnnnnnnnnnnnnnnnnnnnnnnnnnnnnnnnnnnnnnnnnnnnnnnnnnnnnnnnnnnnnnnnnnnnnnnnnnnnnnnnnnnnnnnnnnnnnnnnnnnnnnnnnnnnnnnnnnnnnnnnnnnnnnnnnnnnnnnnnnnnnnnnnnnnnnnnnnnnnnnnnnnnnnnnnnnnnnnnnnnnnnnnnnnnnnnnnnnnnnnnnnnnnnnnnnnnnnnnnnnnnnnnnnnnnnnnnnnnnnnnnnnnnnnnnnnnnnnnnnnnnnnnnnnnnnnnnnnnnnnnnnnnnnnnnnnnnnnnnnnnnnnnnnnnnnnnnnnnnnnnnnnnnnnnnnggctgttaacccttcaagatccaagaacataggtcggctacaaaacaggcaccctgagggaccaattatgaatcagaatgtgctttattctagccacagaatgcaaagggttacactgcaggagctgcggttagggaggggaaagggagtgaccggattgtcctgcctgtctgtgattgagaagcacacaccctttattttccaactgggaacaaggtactggaaattcctctttcccttagaaaacagaaggcaagggtgttggctatggaaattagaactgggtaatatttctagagcactttgaaattcttcaaggtaagtgttatacgaacacaaatgattctttcattgttaaattgtgttcctatcattgataa

SEQ ID NO: 18805 - DNA, 3361 bp, Macaca Mulatta
  misc_feature (1)...(3361): n = A,T,C or G
cttgcaaccttgaagaggtagcgcgaaaagcaagtacgaaaatcaaagaaataaatgttcaaaaagcaaaacttgttactgaattaacaaacctaataaagnagatttgtacttctttgcatatacaaaaagtagatttaattctccaaaatactacagtgatctctgagaaaaacaaattagaatcagattatatggctgcatcttcacaactccgtcttacagagnnnnnnnnnnnnnnnnnnnnnnnnnnnnnnnnnnnnnnnnnnnnnnnnnnnnnnnnnnnnnnnnnnnnnnnnnnnnnnnnnnnnnnnnnnnnnnnnnnnnnnnnnnnnnnnnnnnnnnnnnnnnnnnnnnnnnnnnnnnnnnnnnnnnnnnnnnnnnnnnnnnnnnnnnnnnnnnnnnnnnnnnnnnnnnnnnnnnnnnnnnnnnnnnnnnnnnnnnnnnnnnnnnnnnnnnnnnnnnnnnnnnnnnnnnnnnnnnnnnnnnnnnnnnnnnnnnnnnnnnnnnnnnnnnnnnnnnnnnnnnnnnnnnnnnnnnnnnnnnnnnnnnnnnnnnnnnnnnnnnnnnnnnnnnnnnnnnnnnnnnnnnnnnnnnnnnnnnnnnnnnnnnnnnnnnnnnnnnnnnnnnnnnnnnnnnnnnnnnnnnnnnnnnnnnnnnnnnnnnnnnnnnnnnnnnnnnnnnnnnnnnnnnnnnnnnnnnnnnnnnnnnnnnnnnnnnnnnnnnnnnnnnnnnnnnnnnnnnnnnnnnnnnnnnnnnnnnnnnnnnnnnnnnnnnnnnnnnnnnnnnnnnnnnnnnnnnnnnnnnnnnnnnnnnnnnnnnnnnnnnnnnnnnnnnnnnnnnnnnnnnnnnnnnnnnnnnnnnnnnnnnnnnnnnnnnnnnnnnnnnnnnnnnnnnnnnnnnnnnnnnnnnnnnnnnnnnnnnnnnnnnnnnnnnnnnnnnnnnnnnnnnnnnnnnnnnnnnnnnnnnnnnnnnnnnnnnnnnnnnnnnnnnnnnnnnnnnnnnnnnnnnnnnnnnnnnnnnnnnnnnnnnnnnnnnnnnnnnnnnnnnnnnnnnnnnnnnnnnnnnnnnnnnnnnnnnnnnnnnnnnnnnnnnnnnnnnnnnnnnnnnnnnnnnnnnnnnnnnnnnnnnnnnnnnnnnnnnnnnnnnnnnnnnnnnnnnnnnnnnnnnnnnnnnnnnnnnnnnnnnnnnnnnnnnnnnnnnnnnnnnnnnnnnnnnnnnnnnnnnnnnnnnnnnnnnnnnnnnnnnnnnnnnnnnnnnnnnnnnnnnnnnnnnnnnnnnnnnnnnnnnnnnnnnnnnnnnnnnnnnnnnnnnnnnnnnnnnnnnnnnnnnnnnnnnnnnnnnnnnnnnnnnnnnnnnnnnnnnnnnnnnnnnnnnnnnnnnnnnnnnnnnnnnnnnnnnnnnnnnnnnnnnnnnnnnnnnnnnnnnnnnnnnnnnnnnnnnnnnnnnnnnnnnnnnnnnnnnnnnnnnnnnnnnnnnnnnnnnnnnnnnnnnnnnnnnnnnnnnnnnnnnnnnnnnnnnnnnnnnnnnnnnnnnnnnnnnnnnnnnnnnnnnnnnnnnnnnnnnnnnnnnnnnnnnnnnnnnnnnnnnnnnnnnnnnnnnnnnnnnnnnnnnnnnnnnnnnnnnnnnnnnnnnnnnnnnnnnnnnnnnnnnnnnnnnnnnnnnnnnnnnnnnnnnnnnnnnnnnnnnnnnnnnnnnnnnnnnnnnnnnnnnnnnnnnnnnnnnnnnnnnnnnnnnnnnnnnnnnnnnnnnnnnnnnnnnnnnnnnnnnnnnnnnnnnnnnnnnnnnnnnnnnnnnnnnnnnnnnnnnnnnnnnnnnnnnnnnnnnnnnnnnnnnnnnnnnnnnnnnnnnnnnnnnnnnnnnnnnnnnnnnnnnnnnnnnnnnnnnnnnnnnnnnnnnnnnnnnnnnnnnnnnnnnnnnnnnnnnnnnnnnnnnnnnnnnnnnnnnnnnnnnnnnnnnnnnnnnnnnnnnnnnnnnnnnnnnnnnnnnnnnnnnnnnnnnnnnnnnnnnnnnnnnnnnnnnnnnnnnnnnnnnnnnnnnnnnnnnnnnnnnnnnnnnnnnnnnnnnnnnnnnnnnnnnnnnnnnnnnnnnnnnnnnnnnnnnnnnnnnnnnnnnnnnnnnnnnnnnnnnnnnnnnnnnnnnnnnnnnnnnnnnnnnnnnnnnnnnnnnnnnnnnnnnnnnnnnnnnnnnnnnnnnnnnnnnnnnnnnnnnnnnnnnnnnnnnnnnnnnnnnnnnnnnnnnnnnnnnnnnnnnnnnnnnnnnnnnnnnnnnnnnnnnnnnnnnnnnnnnnnnnnnnnnnnnnnnnnnnnnnnnnnnnnnnnnnnnnnnnnnnnnnnnnnnnnnnnnnnnnnnnnnnnnnnnnnnnnnnnnnnnnnnnnnnnnnnnnnnnnnnnnnnnnnnnnnnnnnnnnnnnnnnnnnnnnnnnnnnnnnnnnnnnnnnnnnnnnnnnnnnnnnnnnnnnnnnnnnnnnnnnnnnnnnnnnnnnnnnnnnnnnnnnnnnnnnnnnnnnnnnnnnnnnnnnnnnnnnnnnnnnnnnnnnnnnnnnnnnnnnnnnnnnnnnnnnnnnnnnnnnnnnnnnnnnnnnnnnnnnnnnnnnnnnnnnnnnnnnnnnnnnnnnnnnnnnnnnnnnnnnnnnnnnnnnnnnnnnnnnnnnnnnnnnnnnnnnnnnnnnnnnnnnnnnnnnnnnnnnnnnnnnnnnnnnnnnnnnnnnnnnnnnnnnnnnnnnnnnnnnnnnnnnnnnnnnnnnnnnnnnnnnnnnnnnnnnnnnntgagtatcaatgtgaaaaagaagcgtcaagattaagcatgcttgaaaataaaatggtcagttacatttcagtttacatagaccaacaactgttccatactttgtttgtaaaacatttaatttctctacggggcaaaattaatatttggctttacattgaattttgagctgtgaagaataaattatgtatcattttagcatattaaacggtagtaagtctagcacatagtctcagccacttaaaannnnnnnnnnnnnnnnnnnnnnnnnnnnnnnnnnnnnagatggagtctcgctccgttgcccaggctggagtgcagtgacgtgatctcagctcactgcaacctccgcctcctgggttcaagcgattctcctgcctcagcctcccgagtgactgggacaacagacacgtgccaccacactcggctaattttttatacttttagtagagacggggtttcagtatattggccaggctggtctcgaactcctgacctcgtgatccacccacttcggcctcccaaagtgctgggattataggcgtgagccactgcacctggccaaaagttgatttttaattcataaaaattgtaa

SEQ ID NO: 18806 - DNA, 544 bp, Macaca Mulatta
tcagatatgatttgatgcaggttcagtatatacatgtaaaaggttatatataaaacctcttcataaataacattagctgctctcttttatttgcacgtgtgaaagtgatgtgggccattactgaattctgacatctttagcgactggacagccaactgggatggctccttgtgctttgtaacatatatagttaaccaacaaagacaataaaagagaagtgatgcccagtaggtgttcctaggggtaaatttatttttgttaaataataagatgattatgtgcacatgctagttctaccactttttaactttagttaatgttttgcaatttctcctgttgtgtggtcatactgtaaggagacttctgttaatttgctcttctgctttcctaaccacgttgatttggcagtgcttcactgcatcaatgcaatctgtagcattagaaagggatagaagcaacaagaatatgtgtagatcaaagcaacactgcctcctgagtcctctagcttttttgtggttagaataaaggtaggacagttcttcag

SEQ ID NO: 18807 - DNA, 119 bp, Macaca Mulatta
  misc_feature (1)...(119): n = A,T,C or G
ttgcttcagacactcaccgcagacactcactgcaccggagtgagcacgaccatcatgtccatgctggtggcctttctcttgttctggggtnnnnnnngggcccagtgacagaagcagcc

SEQ ID NO: 18808 - DNA, 5599 bp, Macaca Mulatta
  misc_feature (1)...(5599): n = A,T,C or G
gctcccaaggtgaggcggcagagtgacacctggggaccctggggccagtggagcccctgcacccggacctgtggagggggcgtcagtttccgggagcgcccctgctactcccagaggnnnnnnnnnnnnnnnnnnnnnnnnnnnnnnnnnnnnnnnnnnnnnnnnnnnnnnnnnnagagctgccccgatggcgcccgggacttccgggccgagcagtgcgcggagttcgacggagctgagttccaggggcggcggtaccggtggctgccctactannnnnnnnnnnnnnnnnnnnnnnnnnnnnnnnnnnnnnnnnnnnnnnnnnnnnnnnnnnnnnnnnnnnnnnnnnnnnnnnnnnnnnnnnnnnnnnnnnnnnnnnnnnnnnnnnnnnnnnnnnnnnnnnnnnnnnnnnnnnnnnnnnnnnnnnnnnnnnnnnnnnnnnnnnnnnnnnnnnnnnnnnnnnnnnnnnnnnnnnnnnnnnnnnnnnnnnnnnnnnnnnnnnnnnnnnnnnnnnnnnnnnnnnnnnnnnnnnnnnnnnnnnnnnnnnnnnnnnnnnnnnnnnnnnnnnnnnnnnnnnnnnnnnnnnnnnnnnnnnnnnnnnnnnnnnnnnnnnnnnnnnnnnnnnnnnnnnnnnnnnnnnnnnnnnnnnnnnnnnnnnnnnnnnnnnnnnnnnnnnnnnnnnnnnnnnnnnnnnnnnnnnnnnnnnnnnnnnnnnnnnnnnnnnnnnnnnnnnnnnnnnnnnnnnnnnnnnnnnnnnnnnnnnnnnnnnnnnnnnnnnnnnnnnnnnnnnnnnnnnnnnnnnnnnnnnnnnnnnnnnnnnnnnnnnnnnnnnnnnnnnnnnnnnnnnnnnnnnnnnnnnnnnnnnnnnnnnnnnnnnnnnnnnnnnnnnnnnnnnnnnnnnnnnnnnnnnnnnnnnnnnnnnnnnnnnnnnnnnnnnnnnnnnnnnnnnnnnnnnnnnnnnnnnnnnnnnnnnnnnnnnnnnnnnnnnnnnnnnnnnnnnnnnnnnnnnnnnnnnnnnnnnnnnnnnnnnnnnnnnnnnnnnnnnnnnnnnnnnnnnnnnnnnnnnnnnnnnnnnnnnnnnnnnnnnnnnnnnnnnnnnnnnnnnnnnnnnnnnnnnnnnnnnnnnnnnnnnnnnnnnnnnnnnnnnnnnnnnnnnnnnnnnnnnnnnnnnnnnnnnnnnnnnnnnnnnnnnnnnnnnnnnnnnnnnnnnnnnnnnnnnnnnnnnnnnnnnnnnnnnnnnnnnnnnnnnnnnnnnnnnnnnnnnnnnnnnnnnnnnnnnnnnnnnnnnnnnnnnnnnnnnnnnnnnnnnnnnnnnnnnnnnnnnnnnnnnnnnnnnnnnnnnnnnnnnnnnnnnnnnnnnnnnnnnnnnnnnnnnnnnnnnnnnnnnnnnnnnnnnnnnnnnnnnnnnnnnnnnnnnnnnnnnnnnnnnnnnnnnnnnnnnnnnnnnnnnnnnnnnnnnnnnnnnnnnnnnnnnnnnnnnnnnnnnnnnnnnnnnntgctccaagagctgcagctcgggcactcggaggcgacaggtcatctgtgccattgggccgcccagccactgcgggagcctgcagcactccaagcctgtggatgtggagccttgtaacacgcagccctgtcatctcccccagnnnnnnnnnnnnnnnnnnnnnnnnnnnnnnnnnnnnnnnnnnnnnnnnnnnnnnnnnnnnnnnnnnnnnnnnnnnnnnnnnnnnnnnnnnnnnnnnnnnnnnnnnnnnnnnnnnnnnnnnnnnnnnnnnnnnnnnnnnnnnnnnnnnnnnnnnnnnnnnnnnnnnnnnnnnnnnnnnnnnnnnnnnnnnnnnnnnnnnnnnnnnnnnnnnnnnnnnnnnnnnnncaggtccacaacacccaccagccccaggcccagcagaatgagcccagtgagtgccggggctcccagtttggctgttgctatgacaacgtggccgctgcagccggtcctcttggggaaggctgtgtgggccagcccagccatnnnnnnnnnnnnnnnnnnnnnnnnnnnnnnnnnnnnnnnnnnnnnnnnnnnnnnnnnnnnnnnnnnnnnnnnnnnnnnnnnnnnnnnnnnnnnnnnnnnnnnnnnnnnnnnnnnnnnnnnnnnnnnnnnnnnnnnnnnnnnnnnnnnnnnnnnnnnnnnnnnnnnnnnnnnnnnnnnnnnnnnnnnnnnnnnnnnnnnnnnnnnnnnnnnnnnnnnnnnnnnnnnnnnnnnnnnnnnnnnnnnnnnnnnnnnnnnnnnnnnnnnnnnnnnnnnnnnnnnnnnnnnnnnnnnnnnnnnnnnnnnnnnnnnnnnnnnnnnnnnnnnnnnnnnnnnnnnnnnnnnnnnnnnnnnnnnnnnnnnnnnnnnnnnnnnnnnnnnnnnnnnnnnnnnnnnnnnnnnnnnnnnnnnnnnnnnnnnnnnnnnnnnnnnnnnnnnnnnnnnnnnnnnnnnnnnnnnnnnnnnnnnnnnnnnnnnnnnnnnnnnnnnnnnnnnnnnnnnnnnnnnnnnnnnnnnnnnnnnnnnnnnnnnnnnnnnnnnnnnnnnnnnnnnnnnnnnnnnnnnnnnnnnnnnnnnnnnnnnnnnnnnnnnnnnnnnnnnnnnnnnnnnnnnnnnnnnnnnnnnnnnnnnnnnnnnnnnnnnnnnnnnnnnnnnnnnnnnnnnnnnnnnnnnnnnnnnnnnnnnnnnnnnnnnnnnnnnnnnnnnnnnnnnnnnnnnnnnnnnnnnnnnnnnnnnnnnnnnnnnnnnnnnnnnnnnnnnnnnnnnnnnnnnnnnnnnnnnnnnnnnnnnnnnnnnnnnnnnnnnnnnnnnnnnnnnnnnnnnnnnnnnnnnnnnnnnnnnnnnnnnnnnnnnnnnnnnnnnnnnnnnnnnnnnnnnnnnnnnnnnnnnnnnnnnnnnnnnnnnnnnnnnnnnnnnnnnnnnnnnnnnnnnnnnnnnnnnnnnnnnnnnnnnnnnnnnnnnnnnnnnnnnnnnnnnnnnnnnnnnnnnnnnnnnnnnnnnnnnnnnnnnnnnnnnnnnnnnnnnnnnnnnnnnnnnnnnnnnnnnnnnnnnnnnnnnnnnnnnnnnnnnnnnnnnnnnnnnnnnnnnnnnnnnnnnnnnnnnnnnnnnnnnnnnnnnnnnnnnnnnnnnnnnnnnnnnnnnnnnnnnnnnnnnnnnnnnnnnnnnnnnnnnnnnnnnnnnnnnnnnnnnnnnnnnnnnnnnnnnnnnnnnnnnnnnnnnnnnnnnnnnnnnnnnnnnnnnnnnnnnnnnnnnnnnnnnnnnnnnnnnnnnnnnnnnnnnnnnnnnnnnnnnnnnnnnnnnnnnnnnnnnnnnnnnnnnnnnnnnnnnnnnnnnnnnnnnnnnnnnnnnnnnnnnnnnnnnnnnnnnnnnnnnnnnnnnnnnnnnnnnnnnnnnnnnnnnnnnnnnnnnnnnnnnnnnnnnnnnnnnnnnnnnnnnnnnnnnnnnnnnnnnnnnnnnnnnnnnnnnnnnnnnnnnnnnnnnnnnnnnnnnnnnnnnnnnnnnnnnnnnnnnnnnnnnnnnnnnnnnnnnnnnnnnnnnnnnnnnnnnnnnnnnnnnnnnnnnnnnnnnnnnnnnnnnnnnnnnnnnnnnnnnnnnnnnnnnnnnnnnnnnnnnnnnnnnnnnnnnnnnnnnnnnnnnnnnnnnnnnnnnnnnnnnnnnnnnnnnnnnnnnnnnnnnnnnnnnnnnnnnnnnnnnnnnnnnnnnnnnnnnnnnnnnnnnnnnnnnnnnnnnnnnnnnnnnnnnnnnnnnnnnnnnnnnnnnnnnnnnnnnnnnnnnnnnnnnnnnnnnnnnnnnnnnnnnnnnnnnnnnnnnnnnnnnnnnnnnnnnnnnnnnnnnnnnnnnnnnnnnnnnnnnnnnnnnnnnnnnnnnnnnnnnnnnnnnnnnnnnnnnnnnnnnnnnnnnnnnnnnnnnnnnnnnnnnnnnnnnnnnnnnnnnnnnnnnnnnnnnnnnnnnnnnnnnnnnnnnnnnnnnnnnnnnnnnnnnnnnnnnnnnnnnnnnnnnnnnnnnnnnnnnnnnnnnnnnnnnnnnnnnnnnnnnnnnnnnnnnnnnnnnnnnnnnnnnnnnnnnnnnnnnnnnnnnnnnnnnnnnnnnnnnnnnnnnnnnnnnnnnnnnnnnnnnnnnnnnnnnnnnnnnnnnnnnnnnnnnnnnnnnnnnnnnnnnnnnnnnnnnnnnnnnnnnnnnnnnnnnnnnnnnnnnnnnnnnnnnnnnnnnnnnnnnnnnnnnnnnnnnnnnnnnnnnnnnnnnnnnnnnnnnnnnnnnnnnnnnnnnnnnnnnnnnnnnnnnnnnnnnnnnnnnnnnnnnnnnnnnnnnnnnnnnnnnnnnnnnnnnnnnnnnnnnnnnnnnnnnnnnnnnnnnnnnnnnnnnnnnnnnnnnnnnnnnnnnnnnnnnnnnnnnnnnnnnnnnnnnnnnnnnnnnnnnnnnnnnnnnnnnnnnnnnnnnnnnnnnnnnnnnnnnnnnnnnnnnnnnnnnnnnnnnnnnnnnnnnnnnnnnnnnnnnnnnnnnnnnnnnnnnnnnnnnnnnnnnnnnnnnnnnnnnnnnnnnnnnnnnnnnnnnnnnnnnnnnnnnnnnnnnnnnnnnnnnnnnnnnnnnnnnnnnnnnnnnnnnnnnnnnnnnnnnnnnnnnnnnnnnnnnnnnnnnnnnnnnnnnnnnnnnnnnnnnnnnnnnnnnnnnnnnnnnnnnnnnnnnnnnnnnnnnnnnnnnnnnnnnnnnnnnnnnnnnnnnnnnnnnnnnnnnnnnnnnnnnnnnnnnnnnnnnnnnnnnnnnnnnnnnnnnnnnnnnnnnnnnnnnnnnnnnnnnnnnnnnnnnnnnnnnnnnnnnnnnnnnnnnnnnnnnnnnnnnnnnnnnnnnnnnnnnnnnnnnnnnnnnnnnnnnnnnnnnnnnnnnnnnnnnnnnnnnnnnnnnnnnnnnnnnnnnnnnnnnnnnnnnnnnnnnnnnnnnnnnnnnnnnnnnnnnnnnnnnnnnnnnnnnnnnnnnnnnnnnnnnnnnnnnnnnnnnnnnnnnnnnnnnnnnnnnnnnnnnnnnnnnnnnnnnnnnnnnnnnnnnnnnnnnnnnnnnnnnnnnnnnnnnnnnnnnnnnnnnnnnnntttgctgccagagaaaaattagactgtcattaaaaacagcattagcaagatgaggatactaatggggaagggtggtgggcaatgcagtaacagggaaatggtttcagaaatggtttgagttggaagacaacattcttcatctctcaggacctctaattccttgatgctaaaaaaagcagcatggattctatgagcttccaagtccctttccactttaaccgtctacaaattttccagaggactgcctagtagcaaaggttattcctggacacaggaaagagaggcattacagggaccaaagctctgaagggtgacttttattaccaacacactggctggaaaagggacaaaccgcatcatgggtgagtgacacttctcagtctgctactactcattcaacaaaggaaatgtgggctggggcagaggtcttttttcatttaatactggaaaaatactgaagagcatccatgttcacttatggctggttttgctatagaaattggaaaataaaggccacttt

SEQ ID NO: 18809 - DNA, 302 bp, Macaca Mulatta
acagtactggtctggctgcttggaactggggccttggggcacctgggaggaggggggagcggacagtttgatggagggcagcgccactaaagcatcgtgtgcagtgggtcctgcctctggccagcaccgggactgccagctgctgtgcccgcctgccaggaacctgtgggtttttctgtaaatttaaacactgcattttaggactgagggagggttattttaaggttgttctttgagccataaattgcctctttgccccaaagctgggaaagtgctggtcccactgacgtggcctcctctag

SEQ ID NO: 18810 - DNA, 665 bp, Macaca Mulatta
ggaggaaatcctcagtaaggtaatccggcttatccaggcctgtgtggatgtctctccagcaatgggtggctcagccctgctctggcagccatggaactggcccagatggtcacccaagccatgtggtccaaggactcctacctgaagcagctgccacacttcacctctgagcacatcaaacgttgcacagacaagggggtggagagtgttttcgacatcatggagatggaggatgaagaacggaacgcattgcttcagctgaccgacagccagattgcagatgtggctcgcttttgtaaccgctaccctaatatcgaactgtcttatgaggtggtggataaggacagcatccgcagtggcgggccagttgtggtgctggtgcagctggagcgagaggaggaagtcacaggccctgtcattgcgcccctcttcccgcagaagcgtgaagagggctggtgggtggtgattggagacgccaagtccaatagtctcatctccatcaagaggctgaccctccagcagaaggccaaggtgaagttggactttgtggccccagccactggcgcccacaactacactctgtacttcatgagtgacgcttacatgggatgtgaccaggagtacaaattcagcgtggatgtgaaagaagctgagacggaccgtga

SEQ ID NO: 18811 - DNA, 235 bp, Macaca Mulatta
  misc_feature (1)...(235): n = A,T,C or G
cagcccagctgttccctccgcggattctccggggctggttcatcacctccgaatattcctgtgacaggagacgcttgcaaaacccgcctccagtctccagcagcaaataaatagaaggcttgcagcccaggaggagccagaagaagtttctaggcgcgtgtgccctgngtttattaagctcctggctccgctctagacctcagcggctctggctgcctgcctgggcagcctggga

SEQ ID NO: 18812 - DNA, 458 bp, Macaca Mulatta
tgagcaccaactacagccttgcccccaacactcccatcaatcagaatgtcagcctgcatcaggcgtccctggggggctgcagccaggacttcttactcttcagccctgaggtggaaagcctgcctgtggccagtagctccacgctgctcccgttggcccccagcaattacaccagcctcaactccaccttcggctccaccaacctgacagggctcttctttccaccccagctcaatggcacagccaatgacacagcaggcccagagctgcctgaccctttggggggtctgttagatgaagccatgttggatgagatcagcctaatggacctggccattgaagaaggctttaaccctgtgcaggcctcccagctggaggaggaatttgactaagactcaggcctttccttagactcgagccatagcccttcttccctaagcagctctgaaggcagttct

SEQ ID NO: 18813 - DNA, 194 bp, Macaca Mulatta
acaggcatgtaatgaatttactacacatgtgatgaaccttctccgagaacagagtagaacacgtcccatttctccaaaagagattgaaagaatggtgggcatcatccatcgaaaatttagttccattcaaatgcaactcaaacaaagcacttgtgaagcagttatgattttaagatcaaggttcctcgatgcca

SEQ ID NO: 18814 - DNA, 2303 bp, Macaca Mulatta
tggtgacttggagcaactttgcctgtgctgattaccacatgggcagactggcagaagcccaggcttacctggacaaggtggagaacatttgcaagaagccttcaaatcctttccgctatagaatggagtgtccagaaatagactgtgaagaaggatgggccttgctgaagtgtggaggaaagaattatgagcgggccaaagcctgctttgaaaaggcgcttgaaggggaccatgaaaaccctgaattcagcactgggtatgcgatctctgcctatcggcctggatggctttaaattagccacaaagggttacaggcagttttctttgcttcccctaaggcaggctgtcagtctaaatccagaccaatggatatcttaaggttctccttgccctgaagcttcaggataatggacaggaagctgaaggagaaaagtaccttgaagaagctctggccaacatgtcctcacagacctacgtctttcgatatgcagccaagttttaccaaagaaaaggctctgtggatgaagctcttgagttattaaaaaaggccttgcaggaaacacccacttcggtcttactgcatcaccagatagggctttgctacaaggcacaaatgattcaaatcaaggaggctacaaaaagggcagcctagagggcagaatagagaaaagatagacaaaatgataagattagccatatttcattttgaatctgcagtggaaaataagcccacatttgaggtggctcatctagacctggcaagaatgtatatagaagcaggcaatcacagaaaagctgaagaaacttttcaaaaactgttatgcatgaaaccagtggtagaagaaacaatgcaagacatacatttgcagtatgctcggtttcaggaatttcaaaagaaatcagaaatcaatgcaattatccattatttaaaagccataaaaatagaacagacatcattcataagggataaaagtatcaattctttgaagaaattggttttaaagaaacttcagagaaatgcattagatctggaaagcttgagcctccttggatttgtctacaaattgaaaggaaatatgaatgaagccctggagtactatgagcgggccctgagactggctgctgactttgagaactctgtgagacaaggtccttaggcacccagatatcagccactttcacatttcatttcattttatgttaacatgtactaatcatcttttctgcttactgttttcagaaacattataattcactgtaatgatgtcattcttgaataattacatctgataaaatattagttgcagtcaacaattagtgaaacaatgtgtgtgtgcatgtaagaaagagagaaatcatttgtatgagtgctatgtagtcgagaaaaaatgttaggtaactttgtaggaaataaaatattggacttacactaaatgtttaattcattcattttattgtgaaataaaaataaaatctttagctcctccatcaactgaacagaccctttttggcaaggagaccccagaaaccttaaaaactaagtttcccaaccatgacgagatgagagatcattcacacctcattatattccctcccttgctaactgccattggactttttccactgagttaaacagaaacccatggaaaacaaagaacagaagactcactcctttgctgacatcacctagctcactccacctagcaccacggccagactcccttcccctcttgtgggttccacatgacaactgatcagccttccctcctgataagtgaccaccgcccacagactggttctggccagtccatggaggctgcacacagggtgcctcaatgtcctttgtttcaccttttgacatatgaagcctaattttgctgcattttaatgttaagtctccaccataaagtgaacacagaatgcttgtaacatacatgcttgtgtaccactcttctgtgactgctcctcatgaacattcatagccccccataacctgttaaatatgtgtgtccagccaacctaccaagcataaaacttctgtaataccctccctcactccaagagcctgcttttggttgctgtgataggctctgtttcccaggctgcaggttgtgggagaggaggctgcagtggctcatgcctgtaatcgcagcactttggggggatgaggcaggagatcacctgaacccacgaattcaggagcggcctgggcaacggcaaaaccaaccatctctacaaaaaatgcaaaaacttagctgggtgtggtggcgtgcaactgtaactgcagttccagctactcagga

SEQ ID NO: 18815 - DNA, 233 bp, Macaca Mulatta
aaagcccagctacaggcgggccactgcgaggggcccctgaggtggcgggggccatggctggggtcgcgtgcttgggaaaagctgccgacgcagatgaatggtgcgacagcggcctcggctccctgggtccggacgcagcggcccccggaggaccgggattgggcgcggagctgggcccggggctgtcgtgggctcccctcgtcttcggctacgtcactgaggatggggacacg

SEQ ID NO: 18816 - DNA, 2713 bp, Macaca Mulatta
  misc_feature (1)...(2713): n = A,T,C or G
gaggtgggaagtatcccgggctgggggtgggggtacgccgcacagctccagtagccgtcgcggcttccggtgctaggtggagggnnnnnnnnnnnnnnnnnnnnnnnnnnnnnnnnnnnnnnnnnnnnnnnnnnnnnnnnnnnnnnnnnnnnnnnnnnnnnnnnnnnnnnnnnnnnnnnnnnnnnnnnnnnnnnnnnnnnnnnnnnnnnnnnnnnnnnnnnnnnnnnnnnnnnnnnnnnnnnnnnnnnnnnnnnnnnnnnnnnnnnnnnnnnnnnnnnnnnnnnnnnnnnnnnnnnnnnnnnnnnnnnnnnnnnnnnnnnnnnnnnnnnnnnnnnnnnnnnnnnnnnnnnnnnnnnnnnnnnnnnnnnnnnnnnnnnnnnnnnnnnnnnnnnnnnnnnnnnnnnnnnnnnnnnnnnnnnnnnnnnnnnnnnnnnnnnnnnnnnnnnnnnnnnnnnnnnnnnnnnnnnnnnnnnnnnnnnnnnnnnnnnnnnnnnnnnnnnnnnnnnnnnnnnnnnnnnnnnnnnnnnnnnnnnnnnnnnnnnnnnnnnnnnnnnnnnnnnnnnnnnnnnnnnnnnnnnnnnnnnnnnnnnnnnnnnnnnnnnnnnnnnnnnnnnnnnnnnnnnnnnnnnnnnnnnnnnnnnnnnnnnnnnnnnnnnnnnnnnnnnnnnnnnnnnnnnnnnnnnnnnnnnnnnnnnnnnnnnnnnnnnnnnnnnnnnnnnnnnnnnnnnnnnnnnnnnnnnnnnnnnnnnnnnnnnnnnnnnnnnnnnnnnnnnnnnnnnnnnnnnnnnnnnnnnnnnnnnnnnnnnnnnnnnnnnnnnnnnnnnnnnnnnnnnnnnnnnnnnnnnnnnnnnnnnnnnnnnnnnnnnnnnnnnnnnnnnnnnnnnnnnnnnnnnnnnnnnnnnnnnnnnnnnnnnnnnnnnnnnnnnnnnnnnnnnnnnnnnnnnnnnnnnnnnnnnnnnnnnnnnnnnnnnnnnnnnnnnnnnnnnnnnnnnnnnnnnnnnnnnnnnnnnnnnnnnnnnnnnnnnnnnnnnnnnnnnnnnnnnnnnnnnnnnnnnnnnnnnnnnnnnnnnnnnnnnnnnnnnnnnnnnnnnnnnnnnnnnnnnnnnnnnnnnnnnnnnnnnnnnnnnnnnnnnnnnnnnnnnnnnnnnnnnnnnnnnnnnnnnnnnnnnnnnnnnnnnnnnnnnnnnnnnnnnnnnnnnnnnnnnnnnnnnnnnnnnnnnnnnnnnnnnnnnnnnnnnnnnnnnnnnnnnnnnnnnnnnnnnnnnnnnnnnnnnnnnnnnnnnnnnnnnnnnnnnnnnnnnnnnnnnnnnnnnnnnnnnnnnnnnnnnnnnnnnnnnnnnnnnnnnnnnnnnnnnnnnnnnnnnnnnnnnnnnnnnnnnnnnnnnnnnnnnnnnnnnnnnnnnnnnnnnnnnnnnnnnnnnnnnnnnnnnnnnnnnnnnnnnnnnnnnnnnnnnnnnnnnnnnnnnnnnnnnnnnnnnnnnnnnnnnnnnnnnnnnnnnnnnnnnnnnnnnnnnnnnnnnnnnnnnnnnnnnnnnnnnnnnnnnnnnnnnnnnnnnnnnnnnnnnnnnnnnnnnnnnnnnnnnnnnnnnnnnnnnnnnnnnnnnnnnnnnnnnnnnnnnnnnnnnnnnnnnnnnnnnnnnnnnnnnnnnnnnnnnnnnnnnnnnnnnnnnnnnnnnnnnnnnnnnnnnnnnnnnnnnnnnnnnnnnnnnnnnnnnnnnnnnnnnnnnnnnnnnnnnnnnnnnnnnnnnnnnnnnnnnnnnnnnnnnnnnnnnnnnnnnnnnnnnnnnnnnnnnnnnnnnnnnnnnnnnnnnnnnnnnnnnnnnnnnnnnnnnnnnnnnnnnnnnnnnnnnnnnnnnnnnnnnnnnnnnnnnnnnnnnnnnnnnnnnnnnnnnnnnnnnnnnnnnnnnnnnnnnnnnnnnnnnnnnnnnnnnnnnnnnnnnnnnnnnnnnnnnnnnnggatggttcatctgtctttggtcagaagttttctcaccctagtactcctgttggcctgaccagttttactgggtgttctaatgaggagctgggaagtggggtgacatagctgaccttagtatcaacccccctcttctccaattcttgttttctaatccaggatgtgctaaaggatgaagattttctattgtttccaggccctcagaccatccttgctgtcccttcaccctccatgcccctaccctcctcacccacttctcataaatggatctaggggttagagtggaggaaataaaatcctgaagtggttgtcagtgcttgtgggatgcattggtcttcagggttctccccgcattattatgtagttgttcagaagttgctgctactgcatctctgtctgcagggggcccttgtccctgaggtcctggcctgggtcctgacttctgtagtttctgtgaagacgtagctgtcctgtgggcttctgtgtgtgctggctgcgccctgagcttccagacagctgtccataacctttctgtgaaggtcagggcccagggccccccatagcatagctgagagatcccttcccagtagggctgtcccaagccccactccatgaggccaggtttcctggccacttttatcgatagcaggtgaatcaatactagtaaccccatccaagattgaactgtgaaagagaggttccaggggtatctccctcagtgccagttacttagtgatgtgttatccacgatgcagc

SEQ ID NO: 18817 - DNA, 1339 bp, Macaca Mulatta
  misc_feature (1)...(1339): n = A,T,C or G
ggtcttgatgcagaactttattatgtgagaaatgaccttattagtcactacgctctatcctttaatctgttagtacccagtgagacaaatttcctgcacttcacctggcatgcgaagtccaaggnnnnnnnnnnnnnnnnnnnnnnnnnnnnnnnnnnnnnnnnnnnnnnnnnnnnnnnnnnnnnnnnnnnnnnnnnnnnnnnnnnnnnnnnnnnnnnnnnnnnnnnnnnnnnnnnnnnnnnnnnnnnnnnnnnnnnnnnnnnnnnnnnnnnnnnnnnnnnnnnnnnnnnnnnnnnnnnnnnnnnnnnnnnnnnnnnnnnnnnnnnnnnnnnnnnnnnnnnnnnnnnnnnnnnnnnnnnnnnnnnnnnnnnnnnnnnnnnnnnnnnnnnnnnnnnnnnnnnnnnnnnnnnnatgatcccgtacatgcagctccaaccacttctacgcgtgtgttttatattagtgtaggggtttgttgtgcagtaatatttcttgtagcaataatattagctgttttgcaccttcatagtatgaaaaggattgaactggatgacannnnnnnnnnnnnnnnnnnnnnnnnnnnnnnnnnnnnnnnnnnnnnnnnnnnnnnnnnnnnnnnnnnnnnnnnnnnnnnnnnnnnnnnnnnnnnnnnnnnnttatcctaccttgcggatagagaagaacgacttgagaagtgtcactcttctggaagccaaagccaaggtgaaggatatagcaatatccagggagaggataactctaaaagatgnnnnnnnnnnnnnnnnnnnnnnnnnnnnnnnnnnnnnnnnnnnnnnnnnnnnnnnnnnnnnnnnnnnnnnnnnnnnnnnnnnnnnnnnnnnnnnnnnagatcaagcttctgaaattcaggtgacaatgatgctcactgaaagttgtaagctgcgaggtcttcatcacannnnnnnnnnnnnnnnnnnnnnnnnnnnnnnnnnnnnnnnnnnnnnnnnnnnnnnnnnnnnnnnnnnnnnnnnnnnnnnnnnnnnnnnnnnnnnnnnnnnnnnnnnnnnnnnnnnnnnnnnnnnnnnnnnnnnnnnnnnnnnnnnnnnnnnnnnnnnnnnnnnnnnnnnnnnnnnnnnnnnnnnnnnnnnnnnnnnnnnnnnnnnnnnnnnnnnnnnnnnnnnnnnnnnnnnnnnnnnnnnnncattgatgacacacttcaagttaagatcacagacaatgccctctccagagacttgttccccatggactatcactgtctgggggacaatgaaaacaggccagttcgttggatggctcttgaaagtctggttaataacgagttctctagcgctagtgatgt

SEQ ID NO: 18818 - DNA, 1202 bp, Macaca Mulatta
  misc_feature (1)...(1202): n = A,T,C or G
tggttcactgtaggtgtgccaagtgtttctgttatcctacaaagcgaagaataaggaggaggccccgaaacctgaccatcttgagtctccctgaagatgtgctctttcacatcctgaaatggctttctgtagaggacatcctggctgtccgagctgtannnnnnnnnnnnnnnnnnnnnnnnnnnnnnnnnnnnnnnnnnnnnnnnnnnnnnnnnnnnnnnnnnnnnnnnnnnnnnnnnnnnnnnnnnnnnnnnnnnnnnnnnnnnnnnnnnnnnnnnnnnnnnnnnnnnnnnnnnnnnnnnnnnnnnnnnnnnnnnnnnnnnnnnnnnntgtctgtgtctgatgaggcccgcgcagaagtgaatggcctgaaggcctctcgcttctttagtctcgctgagcggctgaacgtgggtgccgcgcctttcatctggctcttcatccgccctccatggtcagtgagcggaagctgctgcaaggccgtggttcatgagagcctcagggcagagtgccagctgcnnnnnnnnnnnnnnnnnnnnnnnnnnnnnnnnnnnnnnnnnnnnnnnnnnnnnnnnnnnnnnnnnnnnnnnnnnnnnnnnnnnnnnnnnnnnnnnnnnnnnnnnnnnnnnnnnnnnnnnnnnnnnnnnnnnnnnnnnnnnnnnnnnnnnnnnnnnnnnnnnnnnnnnnnnnnnnnnnnnnnnnnnnnnnnnnnnnnnnnnnnnnnnnnnnnnnnnnnnnnnnnnnnnnnnnnnnnnnnnnnnnnnnnnnnnnnnnnnnnnnnnnnnnnnnnnnnnnnnnnnnnnnnnnnnnnnnnnnnnnnnnnnnnnnnnnnnnnnnnnnnnnnnnnnnnnnnnnnnnnnnnnnnnnnnnnnnnnnnnnnnnnnnnnnnnnnnnnnnnnnnnnnnnnnnnnnnnnnnnnnnnnnnnnnnnnnnnnnnnnnnnnnnnnnnnnnnnnnnnnnnnnnnnnnnnnnnnnnnnnnnnnnnnnnnnnnnnnnnnnnnnnnnnnnnnnnnnnnnnnnnnnnnnnnnnnnnnnnnnnnnnnnnnnnnnnnnnnnnnnnnnnnnnnnnnnnnnnnggttcatcagtaaagagatcctgactatccgggaggccgtatggctcacagacaacacgtacaagtatgaggacctggtgagaatgatgggcgagatcgtctccgccttggaagggaagattcgag

SEQ ID NO: 18819 - DNA, 1874 bp, Macaca Mulatta
  misc_feature (1)...(1874): n = A,T,C or G
ggtcagcctcttggaacagaccctggaggaggggggcagnnnnnnnnnnnnnnnnnnnnnnnnnnnnnnnnnnnnnnnnnnnnnnnnnnnnnnnnnnnnnnnnnnnnnnnnnnnnnnnnnnnnnnnnnnnnnnnnnnnnnnnnnnnnnnnnnnnnnnnnnnnnnnnnnnnnnnnnnnnnnnnnnnnnnnnnnnnnnnnnnnnnnnnnnnnnnnnnnnnnnnnnnnnnnnnnnnnnnnnnnnnnnnnnnnnnnnnnnnnnnnnnnnnnnnnnnnagccgccacgcacctggagggcgactaccagcgctcagcatgctcgctgcagtccctgggcaacggtgccccacatgccaagagcaaggagctcaacggcagctgcatgaggccgggtctggcccccgagcccctgcccgctccgcccggctcacccccgcccagcgccgcacctaccagtgccactagcaacagcagtaatgggggcgggcccagcaaaagtggtcccccaaagtgcggtcccggcaccaactccaccctcaccaaacagatattcccctggatgaaagagtcgaggcaaacgtccaagctgaaaaacagctcccccggcacannnnnnnnnnnnnnnnnnnnnnnnnnnnnnnnnnnnnnnnnnnnnnnnnnnnnnnnnnnnnnnnnnnnnnnnnnnnnnnnnnnnnnnnnnnnnnnnnnnnnnnnnnnnnnnnnnnnnnnnnnnnnnnnnnnnnnnnnnnnnnnnnnnnnnnnnnnnnnnnnnnnnnnnnnnnnnnnnnnnnnnnnnnnnnnnnnnnnnnnnnnnnnnnnnnnnnnnnnnnnnnnnnnnnnnnnnnnnnnnnnnnnnnnnnnnnnnnnnnnnnnnnnnnnnnnnnnnnnnnnnnnnnnnnnnnnnnnnnnnnnnnnnnnnnnnnnnnnnnnnnnnnnnnnnnnnnnnnnnnnnnnnnnnnnnnnnnnnnnnnnnnnnnnnnnnnnnnnnnnnnnnnnnnnnnnnnnnnnnnnnnnnnnnnnnnnnnnnnnnnnnnnnnnnnnnnnnnnnnnnnnnnnnnnnnnnnnnnnnnnnnnnnnnnnnnnnnnnnnnnnnnnnnnnnnnnnnnnnnnnnnnnnnnnnnnnnnnnnnnnnnnnnnnnnnnnnnnnnnnnnnnnnnnnnnnnnnnnnnnnnnnnnnnnnnnnnnnnnnnnnnnnnnnnnnnnnnnnnnnnnnnnnnnnnnnnnnnnnnnnnnnnnnnnnnnnnnnnnnnnnnnnnnnnnnnnnnnnnnnnnnnnnnnnnnnnnnnnnnnnnnnnnnnnnnnnnnnnnnnnnnnnnnnnnnnnnnnnnnnnnnnnnnnnnnnnnnnnnnnnnnnnnnnnnnnnnnnnnnnnnnnnnnnnnnnnnnnnnnnnnnnnnnnnnnnnnnnnnnnnnnnnnnnnnnnnnnnnnnnnnnnnnnnnnnnnnnnnnnnnnnnnnnnnnnnnnnnnnnnnnnnnnnnnnnnnnnnnnnnnnnnnnnnnnnnnnnnnnnnnnnnnnnnnnnnnnnnnnnnnnnnnnnnnnnnnnnnnnnnnnnnnnnnnnnnnnnnnnnnnnnnnnnnnnnnnnnnnnnnnnnnnnnnnnnnnnnnnnnnnnnnngagagattgcttttaagtccaccccttgttccatctgcctgccaacccatcggaaaggaatccacagcagattggagatgaccccgtcaaccccagggctccagcactaccaagctggaattccacgccctggagtggggtagaggaagacaagataggatgaggcagagaagcacattttacaaaccagacgagatggctaggccatcaccaaccaacggacttaccttacatctttgtaggtaattccccccaaatcttg

SEQ ID NO: 18820 - DNA, 272 bp, Macaca Mulatta
gtctttctggtttaccacttccccaaattcagaacagaggagtaactaggggatctgattttagaggccttaattttctgttcatgtggactgttaaaagtaaaaccaaattttcaaaagggataaacctaaatatttgtttgttatcattaaagggagcatcaaatgctgggacatcattagatttgaagactaaccaacggtatcagacacgatttaatggataatcacaatggtcgtaatgtatactaagacatatataccactttcta

SEQ ID NO: 18821 - DNA, 117 bp, Macaca Mulatta
gcagaccaactgtacaagaagacagaaaaatcataataaaaaatggaaggcatcctgtgattgatgtgttgctgggagaacaggatcaatatgttcccaatagtacagatttatcag

SEQ ID NO: 18822 - DNA, 913 bp, Macaca Mulatta
  misc_feature (1)...(913): n = A,T,C or G
tttgtctttttcttaagttgcaggaatttcacgtgttattttagctactgagcctttgtaacctttagacaatgtgaatgccttcctgctttctggtaagggtctgttaacnnnnnnnnnnnnnnnnnnnnnnnnnnnnnnnnnnnnnnnnnnnnnnnnnnnnnnnnnnnnnnnnnnnnnnnnnnnnnnnnnnnnnnnnnnnnnnnnnnnnnnnnnnnnnnnnnnnnnnnnnnnnnnnnnnnnnnnnnnnnnnnnnnnnnnnnnnnnnnnnnnnnnnnnnnnnnnnnnnnnnnnnnnnnnnnnnnnnnnnnnnnnnnnnnnnnnnnnnnnnnnnnnnnnnnnnnnnnnnnnnnnnnnnnnnnnnnnnnnnnnnnnnnnnnnnnnnnnnnnnnnnnnnnnnnnnnnnnnnnnnnnnnnnnnnnnnnnnnnnnnnnnnnnnnnnnnnnnnnnnnnnnnnnnnnnnnnnnnnnnnnnnnnnnnnnnnnnnnnnnnnnnnnnnnnnnnnnnnnnnnnnnnnnnnnnnnnnnnnnnnnnnnnnnnnnnnnnnnnnnnnnnnnnnnnnnnnnnnnnnnnnnnnnnnnnnnnnnnnnnnnnnnnnnnnnnnnnnnnnnnnnnnnnnnnnnnnnnnnnnnnnnnnnnnnnnnnnnnnnccttggcgccttgggaggagaatttaggtgctggaatttgcatctgggagtgtccaccaggggatcttccagaagcccaggcgttnnnnnnnnnnnnnnggcatgaagaaatagcttgggttggtgtcaggctaaaaacaggtcctggctgtgtggcctcctgccatcacttctctgagcgacagtcacgccatcccgcatgggattcagacttgagcccatgtcccggggcccctggcggggtgggcctccagggagggagg

SEQ ID NO: 18823 - DNA, 2757 bp, Macaca Mulatta
  misc_feature (1)...(2757): n = A,T,C or G
aggaccccctaagcagcctggagcgccagctggccctgcagctgcagatcacagaggcagcccgtcggctgtgcctggaggagaatctcagcaggcaggctcggcggcagcggaagcactccatgctgcaggaggagaagaagttgcaggagctccagcgctgcctagtcgagcggaggcgcaacagtgaaccacctccggctgctgccctccccctggnnnnnnnnnnnnnnnnnnnnnnnnnnnnnnnnnnnnnnnnnnnnnnnnnnnnnnnnnnnnnnnnnnnnnnnnnnnnnnnnnnnnnnnnnnnnnnnnnnnnnnnnnnnnnnnnnnnnnnnnnnnnnnnnnnnnnnnnnnnnnnnnnnnnnnnnnnnnnnnnnnnnnnnnnnnnnnnnnnnnnnnnnnnnnnnnnnnnnnnnnnnnnnnnnnnnnnnnnnnnnnnnnnnnnnnnnnnnnnnnnnnnnnnnnnnnnnnnnnnnnnnnnnnnnnnnnnnnnnnnnnnnnnnnnnnnnnnnnnnnnnnnnnnnnnnnnnnnnnnnnnnnnnnnnnnnnnnnnnnnnnnnnnnnnnnnnnnnnnnnnnnnnnnnnnnnnnnnnnnnnnnnnnnnnnnnnnnnnnnnnnnnnnnnnnnnnnnnnnnnnnnnnnnnnnnnnnnnnnnnnnnnnnnnnnnnnnnnnnnnnnnnnnnnnnnnnnnnnnnnnnnnnnnnnnnnnnnnnnnnnnnnnnnnnnnnnnnnnnnnnnnnnnnnnnnnnnnnnnnnnnnnnnnnnnnnnnnnnnnnnnnnnnnnnnnnnnnnnnnnnnnnnnnnnnnnnnnnnnnnnnnnnnnnnnnnnnnnnnnnnnnnnnnnnnnnnnnnnnnnnnnnnnnnnnnnnnnnnnnnnnnnnnnnnnnnnnnnnnnnnnnnnnnnnnnnnnnnnnnnnnnnnnnnnnnnnnnnnnnnnnnnnnnnnnnnnnnnnnnnnnnnnnnnnnnnnnnnnnnnnnnnnnnnnnnnnnnnnnnnnnnnnnnnnnnnnnnnnnnnnnnnnnnnnnnnnnnnnnnnnnnnnnnnnnnnnnnnnnnnnnnnnnnnnnnnnnnnnnnnnnnnnnnnnnnnnnnnnnnnnnnnnnnnnnnnnnnnnnnnnnnnnnnnnnnnnnnnnnnnnnnnnnnnnnnnnnnnnnnnnnnnnnnnnnnnnnnnnnnnnnnnnnnnnnnnnnnnnnnnnnnnnnnnnnnnnnnnnnnnnnnnnnnnnnnnnnnnnnnnnnnnnnnnnnnnnnnnnnnnnnnnnnnnnnnnnnnnnnnnnnnnnnnnnnnnnnnnnnnnnnnnnnnnnnnnnnnnnnnnnnnnnnnnnnnnnnnnnnnnnnnnnnnnnnnnnnnnnnnnnnnnnnnnnnnnnnnnnnnnnnnnnnnnnnnnnnnnnnnnnnnnnnnnnnnnnnnnnnnnnnnnnnnnnnnnnnnnnnnnnnnnnnnnnnnnnnnnnnnnnnnnnnnnnnnnnnnnnnnnnnnnnnnnnnnnnnnnnnnnnnnnnnnnnnnnnnnnnnnnnnnnnnnnnnnnnnnnnnnnnnnnnnnnnnnnnnnnnnnnnnnnnnnnnnnnnnnnnnnnnnnnnnnnnnnnnnnnnnnnnnnnnnnnnnnnnnnnnnnnnnnnnnnnnnnnnnnnnnnnnnnnnnnnnnnnnnnnnnnnnnnnnnnnnnnnnnnnnnnnnnnnnnnnnnnnnnnnnnnnnnnnnnnnnnnnnnnnnnnnnnnnnnnnnnnnnnnnnnnnnnnnnnnnnnnnnnnnnnnnnnnnnnnnnnnnnnnnnnnnnnnnnnnnnnnnnnnnnnnnnnnnnnnnnnnnnnnnnnnnnnggggaactgcccctggccctcctgtcccactattgctggaggatggacatggtacatacntcatgcacatggttctcccccatttcccaggtctctgagtaccccagcctgggatgggggagaatcctttccccttttctaatgtgctctgtgatgcacacaccaagtggtaggtcaaaggtcagtatatcctggtggtgtattgtcttgctagactttcctattttcctgaccccataaatcctctttagggacccagtcactataccctgtctatgccctgtgggctcctagacctctgagctttgagtcagtggcatcatggtttatagcctcagggagtccggcggggaactggtccatgctggtgcttagtggtcaccttttgacaaccacctctgggcatctcaagggcttgcagccccattgctccttctaacattttgtttgtttttgagatgaagtctcactctgtcacccagactgaaatgcagtggcaagattttggctcactacaacccccatctcctgggttcaagcgagtctcctgcctcagccttctgagtagctgggattacaggcaagcgccaccatgcctgnnnnnnnnnnnnnnnnagtagagatggggtttcatcatgttggtcaggctggtctcaaactcctgatctcaagtgatctgcccgccttggcctctcaaagtgctgagattacgggcatgagccatcgcacccggcccttctaacattttttcatcgtagtcccaaaaaccaatactttacaagtggttttggaaaggcaccacttttgtggcatgttctggttgggggagggagtcacagttcttactgcccccaccagctatgcttctgctctgagaaggtgcttatttataccaccacggacatactccccaggactgatgagatgctgaatttt

SEQ ID NO: 18824 - DNA, 1126 bp, Macaca Mulatta
  misc_feature (1)...(1126): n = A,T,C or G
gtcgcggccggacggagggtggaggtccctgcgcctgcgcggagctggagtccggctgggccgcagccgctgggaggccggcggttgccgtggggaccggtcgggcccctccctcctccggtctcccgccccaggttcttccccaacgagacgcgccagcggaccgcgggcgagtgcagccggtgaacgggcgagaggcggcgccgctcccannnnnnnnnnnnnnnnnnnnnnnnnnnnnnnnnnnnnnnnnnnnnnnnnnnnnnnnnnnnnnnnnnnnnnnnnnnnnnnnnnnnnnnnnnnnnnnnnnnnnnnnnnnnnnnnnnnnnnnnnnnnnnnnnnnnnnnnnnnnnnnnnnntttggttcaaaggtaataaatgtttgtggtaaatatgtaaagttacaaatacgggatacagcacgccttgaatgattcaagtctgtgaagagaagttattacccaggggcgaccggggctctcctcgtctataatatctctaaccgagaaacctacaatgcacttactaattggttaacagatgcccgaatgctagcgagtcagaacattgtgatcatcctttgtggaaacaagaaggacctggatgcagatcgtgaagttaccttcttagaagcctcccgatttgctcaagaaaattagctgatgtttttggaaacaagtgcactaacaggggagaatgtagaagaggcttttgtacagtgtgcaagaaaaaatacttaacaaaattgaatcagatgagctggacccagaaagaatgggctcaggtgttcagtacagagatgctgtattgagacagctgaaatcactgcggtgcacacaggccccaaaagctcaggagtgtggttgttaggagccatgggacagcacacaggtgttcatacagtggcatttgggacacaattgttggaaccttaagaatctgaggttttttaccactctccttttctacactgtatggaagtagatctttatggggaaaagagaatttggggtgttctgccagctagtcaaagtggcacagcaaatcatataaatccaattaaatggacaacactattagatgtgtatgtaaaaattttctgtttcatattttccctttccctttc

SEQ ID NO: 18825 - DNA, 653 bp, Macaca Mulatta
gttagagtaggttatgttgtttcaagctgtaatagtgacagtttctcatcatccgtaactgttgagaggtgtgtgcatgtgaccacagatgcttgcttggacttgcccatctagcactttggaaatcagtatttaaatgccaaataatctcccaggtagtgctgcttctgaagttatctcttaatttggtgtctgtccagaaaaggttgatttatgtgtattaattggccgtcatgatgttatcatatcttattcccttttgtgctatgatttattctatcttttgtatttcagaagacatattaattaaatctatttaataaataaaaatatatagcttttcttaaatttgtgatgtttggggctgagaattatcacggctaaaaccaagacactcatgtggacatcttgttttctttaaactgtcttgtctgggatgattgtacatccagctttactgcacgataaaattttaagttttgcttagtgctgcttgaaatcctagctaccttatctctttcttcttagtcttctagacttactatgaatttaaaattctacctagaacttcaccttctttgttaggcgtgtaacactccctcttaataagatgatggcagatagattcctgcatccatggcctaacgctggag

SEQ ID NO: 18826 - DNA, 729 bp, Macaca Mulatta
  misc_feature (1)...(729): n = A,T,C or G
ggatggttagcatgtttagcaaaccttgtgaaattataatcagtttgtagttacatgtgaaactctaaatgcatggtaactgttaatgtcataacagtttagttattttgttctgttctgtcatgtgccacaaaatatgtacttttttcacttttttccctttgtatatcagttacgggttacaactggttcattctgaaaacaactacaacaaaagtccattcatattttttaacaattgtataagtgcccaagtaattcactacagcctaaagccttgcctttgtaatttgacttctgacatgttggcaatcaaagcatgcacttgtaacaatgaaaaagaaaaagcattttatattactactcaataaaatgtgcatgaacttacagaattctcatccttccactgagtccgctgaagggatttatgtgcacaaccaccacgtgtcttctaggtgctggcccaccaccacacatcacaggctgatttccacaggngcttcttcctaggggccttgtgatctgaggggtggtgcctatttccactgtaagaatcttggtggatttgtgtctcaaatcggataagagaagtctatttaaagagcagatgccatcttctggcttcctcaaggagccagtttaagaaaccaagagcatttccttttttattggaaaaataaaattaaatttggttaatcaaggttggttttcaggtttgtatttgggatt

SEQ ID NO: 18827 - DNA, 640 bp, Macaca Mulatta
  misc_feature (1)...(640): n = A,T,C or G
ggggatgattattgactgtgtgtgtgtgtgtgaaaacagacattccagtgccacccaagtatctctaacgtgcccaagaaatcctagctgtgctctggagagtgcaagccatggaaactgttcagacagcgcgtggagcctagttgcctgttgtcacagcagcttgcgctttaggagactaagacagtcctggttcgtctgtgtgtggtgtgaccagtggtgtgcccagagcactcctctcagaatcactagtgttagcaagtcgtcccaggctggggagcactcgctgtagtctttggaaagctttggctttagatttaccaagccccgtctccccactgccagtgccctgctcccccgttcgcctctttctgtttatgtgtgaacttcccagtaatatcactcgttaaatagattttctttaaatttatttaaagaacaactatttaaaagtaaaggatattttgttgacattggtggcttgatcgtccttaagcaactgaagttaaaattgttgaaggaaaaggcacttaaactggttactctttcttgtccagctgtatataagtccagtgtgttcattaatctagctgacacaaagaagaatctcctggtagagagcgacgtgtaaanactggtg

SEQ ID NO: 18828 - DNA, 749 bp, Macaca Mulatta
ttgtttttaatctcggcttcgaacatggcacaagtaagttgaatagcacatcaataggttactggacaaaagcagaagaacctgctacaggatagactgcatttgcatgtgtgtacatatctaggcatctatttatggataaataataaaagagccgacgcgtcctcgcccgggagggcttccctgtcagcaataaccggcatccgttttggaacctgcgtctggggctccaggcgctgctcttgctggcgtccatcgccgcctcggacggctgtgcattttctcgtcgcgtgcagttcgaggaggaccccagaaagccaggagctgtgattcacagtagctgtaggttaccagacggcagcattagaaagggattgtaaataacatgcaacatgagtgtaacatatttgttcagttataagatgattgtttcacagaagccttaccactctctgcttcatctaagaaaaccaataccaaaaacgacgctttaatgaacgctcagccccgcgtagtgttttcagatgagttacggttaacagattggttcatgtaggctttgctgtggcactttgtacaattaactgcttattacgtatgattactcgcagtgatctattgttccatataacccaaaagcatggtttattcattaaaacacggttgacctgaactcgtgccttaggaattaatgccccctcatggaacctgcttgaactgcacctgtgggtggaggctccggctgtgaa

SEQ ID NO: 18829 - DNA, 983 bp, Macaca Mulatta
  misc_feature (1)...(983): n = A,T,C or G
ggggtcatcttgctttacgaaactgcactcctgtcttctggcttcagtctggaagatccccagacacatgccaacaggatctacaggatgatcaaacttggtctgggtatcgatgaagatgatcctactgctgatgataccagtgcagctgtaactgaagaaatgccgcccctcgaaggagatgacgacacatcacgcatggaagaagtagactaacctccggctgaaggatgacttacctgtttcatactctacaattcntctgataatatatttttccaggaagttttnntcttattttgngtaaanaataaaaaagtcttgtatgctgacnccaccaacctactttaaggggagaaataagaaatcttgtccattttctaaatggaagcgggggtgaccttaaggccccaaaaaacgaacatgaatgttnnctttttttagtttccccattgtttttttaaagaggggccccnggggaaaacgggtggtttgtaaaatgtattgtaaacccgagggttaacctttttggggcccccacgttttttttccccgttttttaaannnnnnnnnnnnnnnnnnnnnnnnnnntttggtttttttaaaggtgttcccccgacccattaaaaaacccccggaggnnnnnnnnnnnnnnnnnnnnnnngaaaccacctttggggggggaaaccccttttttttgaaaattttttcctcccccccggggaatgcccccaaatttttggaggaggaaaaaccannnnnnnnnnnnnnnnnnntgttttaannnnnaanacaaagaaaaaaccacgccgcccccgcacaatgttgatgagggggaggggtccccccccacangtgcctttatttagagaaaaaattttttatcgggcagcacacacatattaataacgccccctctccggcgaaatattatttttataaaggagggtgnnnnnnnnnnnnnnnnnnncctgctgtggggg

SEQ ID NO: 18830 - DNA, 825 bp, Macaca Mulatta
gggctcttcccgccatcttggctcctgtggaggcctgctgggaacgggacttctaaaaggaactatgtctggaaggctgtggtccaaggccatttttgccggctataagcggggtctccggaaccaaagggagcacacagctcttcttaaaattgaaggtgtttatgcccgagatgaaacagaattctatttgggcaagagatgcgcttatgtatacaaagcaaagaacaacacagtgactccaggcggcaaaccaaataaaaccagagtcatctggggaaaggtaactcgggcccatggaaacagtggcatggttcgtgccaaattccgaagcaatcttcctgctaaggccattggacacagaatccgagtgatgctgtacccctcaaggatttaaactaacgaaaaatcaataaataaacgtggatttgtgctctgtgagaggggggggaggaaaagggaagaggaagatgtgcggccggcgtggggccgctgcgagaaggctttgcgaaacgattccggttgggggccgcggggcgcagaaaggggggggggaacctggggcggaagctgtgtgcccgagggagagcggggggccagggaggggggggctggggaagtccccgccacagagaaaaagaagaggggagggagagggggaaaggggtctggaaacgggtgcgggaaaagggaagaggcggggagaggaggtggggcacaaagacagactgagaaaagaagaggcagagaagcaagggcggaagaaggggaggtgcaacacgcgggcgcaaagaacgacaaggataggggaaagggagagagaaa

SEQ ID NO: 18831 - DNA, 176 bp, Macaca Mulatta
  misc_feature (1)...(176): n = A,T,C or G
ctatgtgtaaagttcaggtttacactgattgccttgttattactaggttcttttgagnnnnnnnnnnnnnnnnnnnaaaaaacaaatcgcgtggtgtaaaaccaacaatgatgcctagtgagcatgtgtccacaggccataacagggtagaagagagacatcgcacaacccaatga

SEQ ID NO: 18832 - DNA, 756 bp, Macaca Mulatta
gggtggactcctacgatccaaccatagaaaacacttttacaaagttgatcacagtaaatggacaagaatatcatcttcaacttgtagacacagctgggcaagatgaatattctatctttcctcagacctactccatagatattaatggctatattcttgtgtattctgttacatcaatcaaaagttttgaagtgattaaagttatccatgggaaattattggatatggtggggaaagtacaaatacctattatgttggttgggaataagaaagacctgcatatggaaagggtgatcagttatgaagaagggaaagctttggcagaatcttggaatgcagcttttttggaatcttctgctaaagaaaatcagactgctgttgatgtttttagaaggataattttggaggcagaaaaaatggatggggcagcttcacaaggcaagtcttcatgctcggtgatgtgattctgctgcgaagcccgaggacactgggaatatattctacctgaagaagcaaactgcccgttctccttgaagatcaactatgcttcttttttcttctgttaacctgaaagatatcatttgggtcagagctcccctcccttcagattatgttaactctgagtctgtccaaatgagttcacttcctttttcaaattttaagcaatcatattttcaatttatatattggtatttcttaatattatgaacaaaaaatttttatcggccattaattttttcagtggtagttttgttg

SEQ ID NO: 18833 - DNA, 144 bp, Macaca Mulatta
aggtgatgttgatggttctgttgaggccattttgaacattatagatacctatgatgcttcacacgagtgtgaactagaattagtacattttggagtaggtgatataagtgcaaatgatgttaaccttgctgaaacatttaatgg

SEQ ID NO: 18834 - DNA, 132 bp, Macaca Mulatta
gctaccaagctgtagaatacatgagaggaggagaagatccaaccatagcttgccaaaaagtgatttcaagaatccagaagtattttccagaattctttggggctgttatatgtgccaatgtgactggaagtt

SEQ ID NO: 18835 - DNA, 1126 bp, Macaca Mulatta
  misc_feature (1)...(1126): n = A,T,C or G
ccaactccccgaaccactcagggtcctgtggacagctcacctagctgcaatggctgcaggctcctggacatgcctaattctggctattgccctgctctgcctaccttggcttcaagagggcagtgccttcccaaccattcccttatcctggctttttaacaccgctgtgttccgcgcccatcacctgcacaagctggcatttgacacgtacccgaagtttgaagaagcctatatcccaaaggaacagaagtattcattcctgcgcaacccccagacctccctctgcttctcagagtctattccgacaccctccaacaaggaggaaacacagcagaaatccaacctagagctgctccacatctccctgctgctcatccagtcgtggctggagcccgtgcagttcctcaggagtgtgtttgccaaccacctggtgcataccaactcgaacttcgacatctatctctacctaaagaacctagaggaaggcatccaaacgctgatggggaggctggaagacggcagcccccggactgggcagatcttcaagcagacctacagcaagtttgacacaaactcgcacaacgatgacacactgctcaagaactacaggctgctctactgcttcaggaaggacatgaacaaggtcgagacattcctgcgcaccgtgcggtgccgcgctgtggagggcagctgtggcttctagatgcctgggtggcatcccttgtgacccctcccaattgccactcctggccatggaaggtgccactccagtgtccaacagccttgtcctaataaaattaagttgcatcataaaaaaaaaacctcgtgctcggacggggacaggcgtacccaaattcgccctatagtgagtcgtctaacttcaactgactcagtctgaccttgacgtcgtgactgggacaagcgtggcgttacccaattaatcgccttgtagaaatccccctttgcagtggcgtatgcaagagccgcacgatgcctcccacannnnnnnnnnnnnnnnnnnnnnnnnnnnnnnnnnnnnnnnnnnnnnnnnnnnnnnnnnnnnnnnnnnnnnnnnnnnnnnnnnnnnngggtaatcaggcctttttaccaataggcgaatcggaaa

SEQ ID NO: 18836 - DNA, 341 bp, Macaca Mulatta
tccactagtgcttaaatgagaactaagaaactgacacttgtatctgttaaccactctaccacagctttcactctgcttcatagtgattgaacaaggtcaaaggagtccgattctatgcctgtgtctttgggagttaatattagcccctcggcatcaaggcggctggaaaaaaaatcccaatatcaggcatgaatcaggaaggacactagagttacatggtccaggtggtagaccagcctgctaattatcccatgaaatttccctaatggcttgtgaacaggtaaacaaaaacttaacactgaaaagtgtttctgccttggaggctatcattactgtaaaat

SEQ ID NO: 18837 - DNA, 596 bp, Macaca Mulatta
  misc_feature (1)...(596): n = A,T,C or G
aggtacctgtgtgacaaggtcgtccctgggaacagggttaccatcatgggcatctactccatcaataagtttggcctgacctccagcaggggccgtgacagggtgggcgtgggcatccgaagctcctacatccgtgtcctgggcatccaggtggatacggatggctctggnnnnnnnnnnnnnnnnnnnnnnnnnnnnnnnnnnnnnnnnnnnnnnnnnnnnnnnnnnnnnnnnnnnnnnnnnnnnnnnnnnnnnnnnnnnnnnnnnnnnnnnnnnnnnnnnnnnnnnnnnnnnnnnnnnnnnnnnnnnnnnnnnnnnnnnnnnnnnnnnnnnnnnnnnnnnnnnnnnnnnnnnnnnnnnnnnnnnnnnnnnnnnnnnnnnnnnnnnnnnnnnnnnnnnnnnnnnnnnnnnnnnnnnnnnnnnnnnnnnnnnnnnnnnnnnnnnnnnnnnnnggtatacacgtctgggaaaggcagcagtgcagccggactgacagcctcagtgatgagggacccttcgtctcggaatttcatcatggagggtggagccatggtcctggctgatggtggggtcgtctgtattgatgagtttgacaa

SEQ ID NO: 18838 - DNA, 3633 bp, Macaca Mulatta
  misc_feature (1)...(3633): n = A,T,C or G
gagcctgtggagcgattaaaccgtgcgcggagctgcttctttggcggcagcggcggcggcggtagccggtgcggacgcgcggagctcgccggagacgccgggtggccggagccgtggnnnnnnnnnnnnnnnnnnnnnnnnnnnnnnnnnnnnnnagaatgattacggacctgaagccaaagaacaagatgcactagtggatggattgctgaccaggggcttgagagctggattctgttttccctcctcaaactgactttgcagccacggagaggtaannnnnnnnnnnnnnnnnnnnnnnnnnnnnnnnnnnnnnnnnnnnnnnnnnnnnnnnnnnnnnnnnnnnnnnnnnnnnnnnnnnnnnnnnnnnnnnnnnnnnnnnnnnnnnnnnnnnnnnnnnnnnnnnnnnnnnnnnnnnnnnnnnnnnnnnnnnnnnnnnnnnnnnnnnnnnnnnnnnnnnnnnnnnnnnnnnnnnnnnnnnnnnnnnnnnnnnnnnnnnnnnnnnnnnnnnnnnnnnnnnnnnnnnnnnnnnnnnnnnnnnnnnnnnnnnnnnnnnnnnnnnnnnnnnnnnnnnnnnnnnnnnnnnnnnnnnnnnnnnnnnnnnnnnnnnnnnnnnnnnnnnnnnnnnnnnnnnnnnnnnnnnnnnnnnnnnnnnnnnnnnnnnnnnnnnnnnnnnnnnnnnnnnnnnnnnnnnnnnnnnnnnnnnnnnnnnnnnnnnnnnnnnnnnnnnnnnnnnnnnnnnnnnnnnnnnnnnnnnnnnnnnnnnnnnnnnnnnnnnnnnnnnnnnnnnnnnnnnnnnnnnnnnnnnnnnnnnnnnnnnnnnnnnnnnnnnnnnnnnnnnnnnnnnnnnnnnnnnnnnnnnnnnnnnnnnnnnnnnnnnnnnnnnnnnnnnnnnnnnnnnnnnnnnnnnnnnnnnnnnnnnnnnnnnnnnnnnnnnnnnnnnnnnnnnnnnnnnnnnnnnnnnnnnnnnnnnnnnnnnnnnnnnnnnnnnnnnnnnnnnnnnnnnnnnnnnnnnnnnnnnnnnnnnnnnnnnnnnnnnnnnnnnnnnnnnnnnnnnnnnnaggtgtaaagaagacattccagtgtgagctttgcagttacacgtgtccacggcgttcaaatttggatcgtcacatgaaaagccacactgatgagagaccacacaagtgccatctctgtggcagggcattcagaacagtcaccctcctgaggaatcaccttaacacacacacaggnnnnnnnnnnnnnnnnnnnnnnnnnnnnnnnnnnnnnnnnnnnnnnnnnnnnnnnnnnnnnnnnnnnnnnnnnnnnnnnnnnnnnnnnnnnnnnnnnnnnnnnnnnnnnnnnnnnnnnnnnnnnnnnnnnnnnnnnnnnnnnnnnnnnnnnnnnnnnnnnnnnnnnnnnnnnnnnnnnnnnnnnnnnnnnnnnnnnnnnnnnnnnnnnnnnnnnnnnnnnnnnnnnnnnnnnnnnnnnnnnnnnnnnnnnnnnnnnnnnnnnnnnnnnnnnnnnnnnnnnnnnnnnnnnnnnnnnnnnnnnnnnnnnnnnnnnnnnnnnnnnnnnnnnnnnnnnnnnnnnnnnnnnnnnnnnnnnnnnnnnnnnnnnnnnnnnnnnnnnnnnnnnnnnnnnnnnnnnnnnnnnnnnnnnnnnnnnnnnnnnnnnnnnnnnnnnnnnnnnnnnnnnnnnnnnnnnnnnnnnnnnnnnnnnnnnnnnnnnnnnnnnnnnnnnnnnnnnnnnnnnnnnnnnnnnnnnnnnnnnnnnnnnnnnnnnnnnnnnnnnnnnnnnnnnnnnnnnnnnnnnnnnnnnnnnnnnnnnnnnnnnnnnnnnnnnnnnnnnnnnnnnnnnnnnnnnnnnnnnnnnnnnnnnnnnnnnnnnnnnnnnnnnnnnnnnnnnnnnnnnnnnnnnnnnnnnnnnnnnnnnnnnnnnnnnnnnnnnnnnnnnnnnnnnnnnnnnnnnnnnnnnnnnnnnnnnnnnnnnnnnnnnnaataccatggcaagacatgctgataattgtgctggcccagatggtgtagagggggagaatggagnnnnnnnnnnnnnnnnnnnnnnnnnnnnnnnnnnnnnnnnnnnnnnnnnnnnnnnnnnnnnnnnnnnnnnnnnnnnnnnnnnnnnnnnnnnnnnnnnnnnnnnnnnnnnnnnnnnnnnnnnnnnnnnnnnnnnnnnnnnnnnnnnnnnnnnnnnnnnnnnnnnnnnnnnnnnnnnnnnnnnnnnnnnnnnnnnnnnnnnnnnnnnnnnnnnnnnnnnnnnnnnnnnnnnnnnnnnnnnnnnnnnnnnnnnnnnnnnnnnnnnnnnnnnnnnnnnnnnnnnnnnnnnnnnnnnnnnnnnnnnnnnnnnnnnnnnnnnnnnnnnnnnnnnnnnnnnnnnnnnnnnnnnnnnnnnnnnnnnnnnnnnnnnnnnnnnnnnnnnnnnnnnnnnnnnnnnnnnnnnnnnnnnnnnnnnnnnnnnnnnnnnnnnnnnnnnnnnnnnnnnnnnnnnnnnnnnnnnnnnnnnnnnnnnnnnnnnnnnnnnnnnnnnnnnnnnnnnnnnnnnnnnnnnnnnnnnnnnnnnnnnnnnnnnnnnnnnnnnnnnnnnnnnnnnnnnnnnnnnnnnnnnnnnnnnnnnnnnnnnnnnnnnnnnnnnnnnnnnnnnnnnnnnnnnnnnnnnnnnnnnnnnnnnnnnnnnnnnnnnnnnnnnnnnnnnnnnnnnnnnnnnnnnnnnnnnnnnnnnnnnnnnnnnnnnnnnnnnnnnnnnnnnnnnnnnnnnnnnnnnnnnnnnnnnnnnnnnnnnnnnnnnnnnnnnnnnnnnnnnnnnnnnnnnnnnnnnnnnnnnnnnnnnnnnnnnnnnnnnnnnnnnnnnnnnnnnnnnnnnnnnnnnnnnnnnnnnnnnnnnnnnnnnnnnnnnnnnnnnnnnnnnnnnnnnnnnnnnnnnnnnnnnnnccagtagtatggcatgctacgatcaggttctgtcctgaaagctttgcctctttcttggcaaagtttctggtatggtcaagcttgtaaataacttnttttacattttaatcttttccattaattaagaggttgaaaagaagtgcagtgtaagaaaacccagcattttaattacttgcaaattaagttaccacagactctgtagtgtgtaaatgttgacaaggaattggatcacaatcatgtagcagaatggcacccagaccactgcccaccagtgacggacacccacgtggcagatcatgatttccagcccacggagccagcatttgaaccttgtacaattaactttcagttatgatttcccatcaacattttctttgccctgtttgtagctgattgttgtgttttataaatcttctgttaaagcagaagggtgattatgagtgggtcacagcagcccttataagctgggccagaaaatttcactaggtcagtaatttaaactttggatcttcaaaaaataataatgtgaaacaaaaccaactaaaaagtgattcttgcacatgaactgtcacatgtttaaaaatgtgttttttagagagcctcagtcttactgatttcaaacacttttttcttctgtgtattgcttttaagagagccatcagttagctatcagactctaggtagatgcattttgtactta

SEQ ID NO: 18839 - DNA, 562 bp, Macaca Mulatta
agccaatgggaagctggctgtgatggtcagcgaagaccatgctgggaaactgtgtggggcctgtggaaactttgacggagaccagaccaatgattggcgtgactccgaggggaagtcagtgatggagaaatggagagcacaggacttctccccatggtgaggaatgtagtatggaaaccagacttcttggggcaaaggcacctggatcctcatgggatgagggcagtcagggtgggtgtttagtctgcaagcgggggtgctaagtgtctgtctcttgcagttatggctgatcacttgtccactgggagtgaagacttcctgaagaagacctgaccctcctggaggttgcagggtctgaaggatgcatcatgtgctcctaccctgctctaccagtcttctgggtcgcagaggccaaatgtgagagcgttgaataaatctcttaagctaagctgcatgtcactgtgtctgtctcatgccttctcatccctgactttcctcctgcacagcaggtgtcaggtgcctggggaatctggcacatgatgaatgtttatcgggggctggg

SEQ ID NO: 18840 - DNA, 916 bp, Macaca Mulatta
atgaaaggagaaattttgaaagtagggtccaaggttcagtttttctgtaatgagggttatgagcttgttgggaccagttctgggacatgtcagaaatctggcaaatgggataagaagctaaacccaaagtgtgtgcctgccaagtgcccagagccacccctcttggaaaaccagctagtattgaaggagttgaccactgaggtaggagtcgtgacattttcctgtaaagaagggcatgtcctacaaggtccctctgtcctgaaatgcttgccatcccagcaatggaatgactctttccctgtttgtaagatggttctttgcaccccacctcccctaatttccttcggtgtccctgttccttcgtctgctcttcattttggaagtactgtcaagtattcttgtgtaggtgggtttttcctaagaggaaattctaccaccctctgccaacctgatggcacctggagctctccactgccagaatgtattccagtagaatgtccccaacctgaggaaatcgccaatggaatcattgatgtgcaaggccttgcctatctcagcacagctctctatacctgcaagccaggctttgaattggtgggaaataccaccaccctttgtggagaaaatggtcactggcttggaggaaaaccaacatgtaaacccattgaatgcctgaaacccaaggagattttgaatggcaaattctcttacacaaacctacactatggacagaccgttacttactcttgcaaccgaggctttcagctcgaaggtcccagtgccttgacctgtttagagacaggtgattgggatgtagatgccccgtcttgcaatgccatccactgtgattccccacaacccattgaaaatggttttgtagaaggtgcagattacagctatggtgccgtaatcatct

SEQ ID NO: 18841 - DNA, 804 bp, Macaca Mulatta
ctggttaaccaggataccacagaagtttatttcaaaaatctattcaggaaggaaaaagacaaagggattagttaatgggaggaaaatgagttttttgaaggtagatcttcataactttgtgactaatgagctttcatagggtagaaggagaataatgtagccaatgggaagaaaagacatgcaggtgaaaagagaaccataagcagagcttcatttcagtatgtagggtctcattatgtctttcttatctctctttaaaggtcatcaaggccaagaaaaacaaggaaggatcaatgaatgttaattgaaatatgcaagctgaaatgcaacaaataatttctgcttaaaaaattaagttgttaataactgtggttttctaaatttcagtaattcgtttaaataatggattcagtagatacactgtagcatattaagagcttttatatatgagttatagattaggttgctttctggaataaaattttcttcttatactcttccatatttttttagatattacattttgcatttatgactttcataaggtaaaaaataaaatatctttttttgaaggacattattttcccaaagtcttgtatatgttctcttaaggtcagtagtgagctgcttgaggctaagcactttgtacactgtgaagcacattcaagagatggggagagactcatggggccttatccacactggagtctatattgtgatctccagaggataaggccacagtaaaggctgtgactaaatttatgtagcccatgcttaaatgaacaaacactgggcctagggaag

SEQ ID NO: 18842 - DNA, 796 bp, Macaca Mulatta
ggcttttcattttgtaaatcaatctagcagcatctattaaaattaaatatgtacatacaatttaattcaacaattttagtggtacttatctaacttaggcaaaaacatttacctacagtagtattttattggagcattgttaatagcaaaaaactggaaaaacaaaatagaatgcaattaacataaaaatgctaaaataaattgtaccagatgcagaatacagaatattgttttgcaactacgtaaaagaatgcactagtttgcatgtaatgagctgtgaaatgttcatgatacatctttaacaactttattgatatataattcacataccataaaatccactcctttaaggtatacagttcagtggtttttagtatattcacagacctgtgtgctactctcagaatattttcatccctcaagaacaagccctgtatccattagcagaaactcctcattttctcaccctcccaacaccaccaagccccaggcaaccattagtctactttgtctctcatggtgtcttagtccattcggctgtaacaaaataccttggattggtggcttataaacaccagaaatttatttctcatggctttttagggacgggaaatctgaaatcaagatattgggcagaatttggtgtctgctgaagggtccaacttcctggttaaaaaagggcctttggccttgcaccctcttaggggaaaaaaaggcaagggggggtctctgggggcctctcctaagggggggctctaaatccccttcatgaagggctccggcccccctataaggg

SEQ ID NO: 18843 - DNA, 592 bp, Macaca Mulatta
  misc_feature (1)...(592): n = A,T,C or G
ctggcattgctcgggtaccacttgctggagctgctggaggccnnnnnnnnnnnnnnnnnnnnnnnnnnnnnnnnnnnnnnnnnnnnnnnnnnnnnnnnnnnnnnnnnnnnnnnnnnnnnnnnnnnnnnnnnnnnnnnnnnnnnnnnnnnnnnnnnnnnnnnnnnnnnnnnnnnnnnnnnnnnnnnnnnnnnnnnnnnnnnnnnnnnnnnnnnnnnnnnnnnnnnnnnnnnnnnnnnnnnnnnnnnnnnnnnnnnnnnnnnnnnnnnnnnnnnnnnnnnnnnnnnnnnnnnnnnnnnnnnnnnnnnnnnnnnnnnnnnnnnnnnnnnnnnnnnnnnnnnnnnnnnnnnnnnnnnnnnnnnnnnnnnnnnnnnnnnnnnnnnnnnnnnnnnnnnnnnnnnnnnnnnnnnnnnnnnnnaggtccacctcccccaggaatgcgtccaccaagaccctagcatactgttgatccatctcagtcacttttccccctgcaatgcgtcttgtgaaattgtgtagagtgtttgtgagctttttgtcccctcattctgcattaataatagctaataataaatgcatagagcaattaaactgt

SEQ ID NO: 18844 - DNA, 5412 bp, Macaca Mulatta
  misc_feature (1)...(5412): n = A,T,C or G
aggtttcttcatatggtggctacctcacttaccaagccaagtccttcggcttgcctagcgacatggttcttctggaaaagatgccggatgtacagctcactnnnnnnnnnnnnnnnnnnnnnnnnnnnnnnnnnnnnnnnnnnnnnnnnnnnnnnnnnnnnnnnnnnnnnnnnnnnnnnnnngggaaacttcagacatgccagcagccgtgccccggtgtctagggaggagctgatgacagtgctgtctagactggcagatatgcgcatccaaggcctctacttcacagagactcaaaggctcaccctgagtgaggtggggctagaggaagcctctgacacaggaagtggacgcatagcatacgctgtggaaatgtgtgcctgcccccctgcctacgctggcgactcttgtcaggnnnnnnnnnnnnnnnnnnnnnnnnnnnnnnnnnnnnnnnnnnnnnnnnnnnnnnnnnnnnnnnnnnnnnnnnnnnnnnnnnnnnnnnnnnnnnnnnnnnnnnnnnnnnnnnnnnnnnnnnnnnnnnnnnnnnnnnnnnnnnnnnnnnnnnnnnnnnnnnnnnnnnnnnnnnnnnnnnnnnnnnnnnnnnnnnnnnnnnnnnnnnnnnnnnnnnnnnnnnnnnnnnnnnnnnnnnnnnnnnnnnnnnnnnnnnnnnnnnnnnnnnnnnnnnnnnnnnnnnnnnnnnnnnnnnnnnnnnnnnnnnnnnnnnnnnnnnnnnnnnnnnnnnnnnnnnnnnnnnnnnnnnnnnnnnnnnnnnnnnnnnnnnnnnnnnnnnnnnnnnnnnnnnnnnnnnnnnnnnnnnnnnnnnnagactgcataaaccaagaacccaaagatagcagccctgcagaagaatgtgatnnnnnnnnnnnnnnnnnnnnnnnnnnnnnnnnnnnnnnnnnnnnnnnnnnnnnnnnnnnnnnnnnnnnnnnnnnnnnnnnnnnnnnnnnnnnnnnnnnnnnnnnnnnnnnnnnnnnnnnnnnnnnnnnnnnnnnnnnnnnnnnnnnnnnnnnnnnnnnnnnnnnnnnnnnnnnnnnnnnnnnnnnnnnnnnnnnnnnnnnnnnnnnnnnnnnnnnnnnnnnnnnnnnnnnnnnnnnnnnnnnnnnnnnnnnnnnnnnnnnnnnnnnnnnnnnnnnnnnnnnnnnnnnnnnnnnnnnnnnnnnnnnnnnnnnnnnnnnnnnnnnnnnnnnnnnnnnnnnnnnnnnnnnnnnnnnnnnnnnnnnnnnnnnnnnnnnnnnnnnnnnnnnnnnnnnnnnnnnnnnnnnnnnnnnnnnnnnnnnnnnnnnnnnnnnnnnnnnnnnnnnnnnnnnnnnnnnnnnnnnnnnnnnnnnnnnnnnnnnnnnnnnnnnnnnnnnnnnnnnnnnnnnnnnnnnnnnnnnnnnnnnnnnnnnnnnnnnnnnnnnnnnnnnnnnnnnnnnnnnnnnnnnnnnnnnnnnnnnnnnnnnnnnnnnnnnnnnnnnnnnnnnnnnnnnnnnnnnnnnnnnnnnnnnnnnnnnnnnnnnnnnnnnnnnnnnnnnnnnnnnnnnnnnnnnnnnnnnnnnnnnnnnnnnnnnnnnnnnnnnnnnnnnnnnnnnnnnnnnnnnnnnnnnnnnnnnntcagagacaagtaaaagaaataaattccctgcagagtgatttcaccaagtatctgacctctgctgactcatctttgttgcaaaccaacattgcactgcagctgatggagaaaagccagaaggnnnnnnnnnnnnnnnnnnnnnnnnnnnnnnnnnnnnnnnnnnnnnnnnnnnnnnnnnnnnnnnnnnnnnnnnnnnnnnnnnnnnnnnnnnnnnnnnnnnnnnnnnnnnnnnnnnnnnnnnnnnnnnnnnnnnnnnnnnnnnnnnnnnnnnnnnngatcaagagaaatgccagcggggatgagctggtgcgctgtgctgtggatgccgccaccgcctatgagaacattctcaacgccatcaaagcggccgaggacgcggccaacagggctgccagtgcatctgaatctgccctccannnnnnnnnnnnnnnnnnnnnnnnnnnnnnnnnnnnnnnnnnnnnnnnnnnnnnnnnnnnnnnnnnnnnnnnnnnnnnnnnnnnnnnnnnnnnnnnnnnnnngaagtcagtccggctctcagcaacctacagcaaaccctgaatattgtgacagttcagagagaagtgatagccaccaatctcacaactctccgagatggtcttcgtgggatacagagaggtnaggtgatattgatgctatgatcagtagtgcaaagagcatggtcagaaaggccaacgacatcacagatgaggtcctggatgggctgaaccccattcagacagatgtggaaagaattaaggacacctatgggagcacacagaacgaagacttcaaaaaggctctgacggatgcagataactcgggtgaataagttaaccaacaaactacctgatctttggcgcaagattgaaagtatcaaccaacagctgttgcccttgggaaacatctctgacaacatggacagaatacgagaattaattcagcaggccagagatgctgccagtaaggnnnnnnnnnnnnnnnnnnnnnnnnnnnnnnnnnnnnnnnnnnnnnnnnnnnnnnnnnnnnnnnnnnnnnnnnnnnnnnnnnnnnnnnnnnnnnnnnnnnnnnnnnnnnnnnnnnnnnnnnnnnnnnnnnnnnnnnnnnnnnnnnnnnnnnnnnnnnnnnnnnnnnnnnnnnnnnnnnnnnnnnnnnnnnnnnnnnnnnnnnnnnnnnnnnnnnnnnnnnnnnnnnnnnnnnnnnnnnnnnnnnnnnnnnnnnnnnnnnnnnnnnnnnnnnnnnnnnnnnnnnnnnnnnnnnnnnnnnnnnnnnnnnnnnnnnnnnnnnnagaatttatcagtttgcaaggcttaattacaccaaaggagccacatccagtaaaccagaaatacccggagtctatgacatggatggtagaaacagcaatacactccttaatctggatcccgaaaatgttgtattttatgttggaggttacccacctgattttaannnnnnnnnnnnnnnnnnnnnnnnnnnnnnnnnnttgtattgaattagatgacctcaatgaaaatgttctgagcttatacaacttcaaaaaaacattcaatctcaacacaactgaagtggagccttgtagaaggnnnnnnnnnnnnnnnnnnnnnnnnnnnnnnnnnnnnnnnnnnnnnnnnnnnnnnnnnnnnnnnnnnnnnnnnnnnnnnnnnnnnnnnnnnnnnnnnnnnnnnnnnnnnnnnnnnnnnnnnnnnnnnnnnnnnnnnnnnnnnnnnnnnnnnnnnnnnnnnnnnnnnnnnnnnnnnnnnnnnnnnnnnnnnnnnnnnnnnnnnnnnnnnnnnnnnnnnnnnnnnnnnnnnnnnnnnnnnnnnnnnnnnnnnnnnnnnnnnnnnnnnnnnnnnnnnnnnnnnnnnnnnnnnnnnnnnnnnnnnnnnnnnnnnnnnnnnnnnnnnnnnnnnnnnnnnnnnnnnnnnnnnnnnnnnnnnnnnnnnnnnnnnnnnnnnnnnnnnnnnnnnnnnnnnnnnnnnnnnnnnnnnnnnnnnnnnnnnnnnnnnnnnnnnnnnnnnnnnnnnnnnnnnnnnnnnnnnnnnnnnnnnnnnnnnnnnnnnnnnnnnnnnnnnnnnnnnnnnnnnnnnnnnnnnnnnnnnnnnnnnnnnnnnnnnnnnnnnnnnnnnnnnnnnnnnnnnnnnnnnnnnnnnnnnnnnnnnnnnnnnnnnnnnnnnnnnnnnnnnnnnnnnnnnnnnnnnnnnnnnnnnnnnnnnnnnnnnnnnnnnnnnnnnnnnnnnnngacaagcaccctgcaggtcactctggaagatggtcacattgaattgagcaccagggatagcggcagcccaattttttaaatctccacagacgtatatggatggtttgctgcactatgtatctgtaataagcgacaactctgnnnnnnnnnnnnnnnnnnnnnnnnnnnnnnnnnnnnnnnnnnnnnnnnnnnnnnnnnnnnnnnnnnnnnnnnnnnnnnnnnnnnnnnnnnnnnnnnnnnnnnnnnnnnnnnnnnnnnnnnnnnnnnnnnnnnnnnnnnnnnnnnnnnnnnnnnnnnnnnnnnnnnnnnnnnnnnnnnnnnnnnnnnnnnnnnnnnnnnnnnnnnnnnnnnnnnnnnnnnnnnnnnnnnnnnnnnnnnnnnnnnnnnnnnnnnnnnnnnnnnnnnnnnnnnnnnnnnnnnnnnncagctgttgcaggacacaccagtggcctccccaaggagcatgaaggtgtggcaagatgcctgttcaccacttcccaggacccaggccaatcatggagccctccagtttggggacattcccaccagccacttgctattcaagcttcctcaggagctgctgaaacccaggnnnnnnnnnnnnnnnnnnnnnnnnnnnnnnnnnnnnnnnnnnnnnnnnnnnnnnnnnnnnnnnnnnnnnnnnnnnnnnnnnnnnnnnnnnnnnnnnnnnnnnnnnnnnnnnnnnnnnnnnnnnnnnnnnnnnnnnnnnnnnnnnnnnnnnnnnnnnnnnnnnnnnnnnnnnnnnnnnnnnnnnnnnnnnnnnnnnnnnnnnnnnnnnnnnnnnnnnnnnnnnnnnnnnnnnnnnnnnnnnnnnnnnnnnnnnnnnnnnnnnnnnnnnnnnnnnnnnnnnnnnnnnnnnnnnnnnnnnnnnnnnnnnnnnnnnnnnnnnnnnnnnnnnnnnnnnnnnnnnnnnnnnnnnnnnnnnnnnnnnnnnnnnnnnnnnnnnnnnnnnnnnnnnnnnnnnnnnnnnnnnnnnnnnnnnnnnnnnnnnnnnnnnnnnnnnnnnnnnnnnnnnnnnnnnnnnnnnnnnnnnnnnnnnnnnnnnnnnnnnnnnnnnnnnnnnnnnnnnnnnnnnnnnnnnnnnnnnnnnnnnnnnnnnnnnnnnnnnnnnnnnnnnnnnnnnnnnnnnnnnnnnnnnnnnnnnnnnnnnnnnnnnnnnnnnnnnnnnnnnnnnnnnnnnnnnnnnnnnnnnnnnnnnnnnnnnnnnnnnnnnnnnnnnnnnnnnnnnnnnnnnnnnnnnnnnnnnnnnnnnnnnnnnnnnnnnnnnnnnnnnnnnnagtcaccataaaacaacatatcctgcacctggaactggacacagacagtagctacacagctggacagatccccttccnnnnnnnnnnnnnnnnnnnnnnnnnnnnnnnnnnnnnnnnnnagccaatttgacgacactgaggatccctgtgtggaaatcattctttggctgtctgaggaatatttttgtcaaccacatccctgtccctgtcactgaagccttggaagtccagnggcctgtcagtctgaatggctgtcctgacca

SEQ ID NO: 18845 - DNA, 333 bp, Macaca Mulatta
tttttggagttgggggctcggggagaagcgacaagacttttaaaagacttttattcaccaacttcaagaattaatatttatgtgtctgttattgttagttttattaagccttaaggtagaaggcacatagaaataatatctcatctttctgctgaccatgtagtaaggttgctccaaaggcattcagatctctacctccagtcctgcaaaaatattggacttcggacagaggaatcagaaaaattaatttcagaaactccctttgatttttattttgctgtgtctttttgagactgtattgtggtacactgtcgtctaagggacatcctcata

SEQ ID NO: 18846 - DNA, 173 bp, Macaca Mulatta
caacagtaatcctttcctaatgtcaggatgcatattgacctgtgtgtgacatttgccacgcagagcgtgcactgctgaggagaatggtgcccaagaaggacactgttgacccaaaatattccaaataaaccatgattacagccacaaattcaggtttggagaaagttgttgga

SEQ ID NO: 18847 - DNA, 537 bp, Macaca Mulatta
  misc_feature (1)...(537): n = A,T,C or G
ggaagagcaagcagtcataccaaaatacctactgggtcgggaagtcactggaaacatgagagccattctaattgactggctagtacaggttcaaatgaaattcaggttgttgcaggagaccatgtacatgactgtctccattattgatcggttcatgcagnnnnnnnnnnnnnnnnnnnnnnnnnnnnnnnnnnnnnnnnnnnnnnnnnnnnnnnnnnnnnnnnnnnnnnnnnnnnnnnnnnnnnnnnnnnnnnnnnnnnnnnnnnnnnnnnnnnnnnnnnnnnnnnnnnnnnnnnnnnnnnnnnnnnnnnnnnnnnnnnnnnnnnnnnnnnnnnnnnnnnnnnnnnnnnnnnnnnnnnnnnnnnnnnnnnnnnnnnnnnnnnnnnnnnnnnnnnnnnnnnnnnnnnnnnnnnnnnnnnnnnnnnnnnnnnnnnnnnnnnnnnctatgttggactatgatatggtgcactttcctccttctcaaattgcagcaggagctttttgcttagcactgaaaattctggataatggtgaatg

SEQ ID NO: 18848 - DNA, 134 bp, Macaca Mulatta
aatgcaagtgcggccccatcgacctgctcttcgtactggacagctcagagagcatcggcctgcagaacttcgagattgccaaggacttcgtcgtcaaggtcatcgaccggttgagccgggacgagctggtcaag

SEQ ID NO: 18849 - DNA, 633 bp, Macaca Mulatta
ctgtttctgttttgttccttacaatatcaatcttattttatattctcttgtgagaacacaaacatttgttaattgctcagtagtggcagcagtaaggacaatgtacccaatcactctctgtatcgctgtttcaaactgttgttttgaccctgtggtttactactttacatcggacacaattcagaattcaataaaaatgaaaaactggtctaccaggagaagtgacttcagattctctgaagttcatggtacagagaattttattcagcataacctacagaccttaaaacgtaagatatttgacaatgaatctgctgcctgaaataaaaccattaggactcactgggacagaactttcaagttccttcaactgtgaaaagtgtctttttggacaaactatttttccacctccaaaagaaattaacacatggacattttaaagtctttagtataaagaaaatttgtattcaatgtgttaagcattaacatgtattttatttgtgtatacactccatctgatttttctgagccattttgatttgttccttcattaaaaaaatctcttaaagttattcagtgtctaaaagtgactgatttaaattatgtggtgacaatctgtaatgtctttgaatg

SEQ ID NO: 18850 - DNA, 267 bp, Macaca Mulatta
  misc_feature (1)...(267): n = A,T,C or G
gcttcagtgaaggacacgcatatgtacagacattcctgcgcatggtgcagtgccgcactgtggagggcagctgtggcttctatgtgcccatgtggcatcctgtgacccctccccagtgcctctcctggccccggaaggtgccactccagtgcccaccagagcttgtcctaataaaacttaagttgtattnnnnnnnnnnnnnnnnnnnnnnnnnnncgggggcccgggtacccaaattcgcccctatagatgagatcgtattacaaa

SEQ ID NO: 18851 - DNA, 684 bp, Macaca Mulatta
  misc_feature (1)...(684): n = A,T,C or G
gctctggttgcccagcccggagtgcagtgacacagtcgtggctcactgcggcctcaacctcctgggctcaagcaatcctcctgcctctcagcctcctacctgtagctgggactacaggaacatnnnnnnnnnnnnnnnnnnnnnnnnnnnnnnnnnnntagaaagagtgcctcactgtgttgcccagactggtctcaaactcttgggctcaaacaattctcccacttcagcatcctaaagtactaggattataggtgtgagtcaccactgttggtgtgtcctaaattttaatggctatttttgtaccttacctgttctttaaagaaatacctgtattgattgagtgactgtgagctagtgctcagtccttgggtaggtggctttatccaatatgagtattttcactttagaaaaatattgtgacttatacagttaactccatttattaatgtcactaattgatgaacaaacttttttttgtattaatctgatgcctttgcccttgtgttgaacatgggttaagaaaatgcttttcaggctaagcatannnnnnnnnnnnnnnnnnnttcaacactttgggaggcccagccaggtnnnnnnnnnnnnnnctnnnnnnnnnnnnnnnnnnnntcaatatgacaagacctcacctctacnnnnnnnnnnnnnnnnnntacgcgagac

SEQ ID NO: 18852 - DNA, 229 bp, Macaca Mulatta
  misc_feature (1)...(229): n = A,T,C or G
gcggctgagccccccagcctgcaccctccgcaaacacaagacgaaccgtaagccgcggacacccttcaccaccgcgcagctgctggcactggagcgcaagttccgccagaagcagtacctgtccatcgccgagcgcgcggaattctccagctcgctcagcctcactgagacgcangtgaagatatggttccagaaccgccgcgccaaggcaaagagactacaagaggca

SEQ ID NO: 18853 - DNA, 358 bp, Macaca Mulatta
  misc_feature (1)...(358): n = A,T,C or G
ggttcatgcttttatcaanngagatctgatgctgaggaagtggattttgcaggttggctctgctccactatcggccttcaccagcccagcacaccaacccatgctgctggcgtctaagtgtttaggaagcagcaaagagcgagtcccctgccccagtggtnnttgccatgtcactttcaggcctccttcccatgcctgtctgtgttcagatgtgcatttcacctgtgacaaaggatgaagaacacagcatgtgccaagattctactcttgtcatttttaatattactgtctttattcttattactattattgttcccctaagtggattggctttgtgcttggggctatttgtgtgtat

SEQ ID NO: 18854 - DNA, 269 bp, Macaca Mulatta
  misc_feature (1)...(269): n = A,T,C or G
ctgtaccgcaggtctctcccatgggtctgtcctccagtgaaggggacatcccgtaagtaagttttgagagggtgggtgggttacttgcccaccagaaacagccctagtcccacctccttgcgttccctttggccccttcctgcctacctagatctgcccgaaagggctggagccccgaggagaggggcagtatttgggggattgtgctagctttaccccnnnnnnnntacacaggagcctttgatctcattaaagagatttgaaccagc

SEQ ID NO: 18855 - DNA, 1584 bp, Macaca Mulatta
  misc_feature (1)...(1584): n = A,T,C or G
agtgctcccagtaaccttccaannnnnnnnnnnnnnnnnnnnnnnnnnnnnnnnnnnnnnnnnnnnnnnnnnnnnnnnnnnnnnnnnnnnnnnnnnnnnnnnnnnnnnnnnnnnnnnnnnnnnnnnnnnnnnnnnnnnnnnnnnnnnnnnnnnnnnnnnnnnnnnnnnnnnnnnnnnnnnnnnnnnnnnnnnnnnnnnnnnnnnnnnnnnnnnnnnnnnnnnnnnnnnnnnnnnnnnnnnnnnnnnnnnnnnnnnnnnnnnnnnnnnnnnnnnnnnnnnnnnnnnnnnnnnnnnnnnnnnnnnnnnnnnnnnnnnnnnnnnnnnnnnnnnnnnnnnnnnnnnnnnnnnnnnnnnnnnnnnnnnnnnnnnnnnnnnnnnnnnnnnnnnnnnnnnnnnnnnnnnnnnnnnnnnnnnnnnnnnnnnnnnnnnnnnnnnnnnnnnnnnnnnnnnnnnnnnnnnnnnnnnnnnnnnnnnnnnnnnnnnnnnnnnnnnnnnnnnnnnnnnnnnnnnnnnnnnnnnnnnnnnnnnnnnnnnnnnnnnnnnnnnnnnnnnnnnnnnnnnnnnnnnnnnnnnnnnnnnnnnnnnnnnnnnnnnnnnnnnnnnnnnnnnnnnnnnnnnnnnnnnnnnnnnnnnnnnnnnnnnnnnnnnnnnnnnnnnnnnnnnnnnnnnnnnnnnnnnnnnnnnnnnnnnnnnnnnnnnnnnnnnnnnnnnnnnnnnnnnnnnnnnnnnnnnnnnnnnnnnnnnnnnnnnnnnnnnnnnnnnnnnnnnnnnnnnnnnnnnnnnnnnnnnnnnnnnnnnnnnnnnnnnnnnnnnnnnnnnnnnnnnnnnnnnnnnnnnnnnnnnnnnnnnnnnnnnnnnnnnnnnnnnnnnnnnnnnnnnnnnnnnnnnnnnnnnnnnnnnnnnnnnnnnnnnnnnnnnnnnnnnnnnnnnnnnnnnnnnnnnnnnnnnnnnnnnnnnnnnnnnnnnnnnnnnnnnnnnnnnnnnnnnnnnnnnnnnnnnnnnnnnnnnnnnnnnnnnnnnnnnnnnnnnnnnnnnnnnnnnnnnnnnnnnnnnnnnnnnnnnnnnnnnnnnnnnnnnnnnnnnnnnnnnnnnnnnnnnnnnnnnnnnnnnnnnnnnnnnnnnnnnnnnnnnnnnnnnnnnnnnnnnnnnnnnnnnnnnnnnnnnnnnnnnnnnnnnnnnnnnnnnnnnnnnnnnnnnnnnnnnnnnnnnnnnnnnnnnnnnnnnnnnnnnnnnnnnnnnnnnnnnnnnnnnnnnnnnnnnnnnnnnnnnnnnnnnnnnnnnnnnnnnnnnnnnnnnnnnnnnnnnnnnnnaggaaatccgggatcctcttatgcagtggcttgggaaacacgtggactccgagggagaaataaaatccagccagctctctcttagatttgtttcatcctacgtgtctgaagtagaaataaccccatcttgtatacctgtggtgaccaacatggaggccttctcatcagaaaatttcaacttggagatctatcgccaaaatctgcagaccaagcagttggggaaagtaattttgtttgccgaagtgacccccacaacgatgcgtctcctggatgg

SEQ ID NO: 18856 - DNA, 643 bp, Macaca Mulatta
tgtctttttctgtttcaggcctccagttaccaactcctgtctggcttcatgtccttttctatctggtagtgggaataatgtttttagtgaacactgttctctgggtgacaatacgtaaagaactgaaaagaaagaaaaagtggaatttagaaatctctttggattctgctcatgagaagaaggtaacttccagccttcaagaagacagacatttagaagaagagctgaagagtcaggaacaagaataaagaacagctgcaggaaggggtgcaccggaaggagcctgaggaggccaagtagcagcagctcagtgggtggccatcgatctggaccgtcccctgcccacttcctccctgtgagcactgcacacaaacatccaaaagttcaacaacaccagaactatgtgtctcatggcatataactcttaaataaagcaaataaatgaactgacttcaactgggatacatttggaaatttggtcatcaaagatgactttaaatgaggcctactctaaagaaatcttgaaaaacttacaaatcaagcctagcctgataataatcctattacatagtttgaaaaatagtacttcatttctcagaacaaggtaacaaggtgagtgggtgcatatgtacagaagattaag

SEQ ID NO: 18857 - DNA, 1007 bp, Macaca Mulatta
  misc_feature (1)...(1007): n = A,T,C or G
ggggtatccgatctctgcctatcggcctgatggcntttaaattagccccaaaggggtacaggccagttttcttgcctcccttaagnccaggctgtcagtntaaatccagaccaatggatatcttaagttctccttgccctgaagcttcagataaatgaccaggaagctgaagaagaaagtcccttgaagaagctctgnccaacatgtcntcacagacntacgtctttcgatatgcagccaagtttaccgaagaaaaggctctgtggataaagctcttgagttataaaaaagnccttgcaggaaacacncacttcggtcttactgcatcaccagatagggctntgctacaaggcacaaatgattcaaatcaaggaggctacaaaaagggcagcctagagggcagaatagagaaaagatagacaaaatgataagattagccatatttcattttgaatctgcagtggaaaataagcccacatttgaggtggctcatctagacctggcaagaatgtatatagaagcaggcaatcacagaaaagctgaagaaacttttcaaaaactgttatgcatgaaaccagtggtagaagaaacaatgcaagacatacatttgcagtatgctcggtttcaggaatttcaaaagaaatcagaaatcaatgcaattatccattatttaaaagccataaaaatagaacagacatcattcataagggataaaagtatcaattctttgaagaaattggttttaaagaaacttcagagaaatgcattagatctggaaagcttgagcctccttggatttgtctacaaattgaaaggaaatatgaatgaagccctggagtactatgagcgggccctgagactggctgctgactttgagaactctgtgagacaaggtccttaggcacccagatatcagccactttcccatttcatttcattttatgctaacatgtactaatcatcttttctgcttactgttttcagaaacattataattcactgtaatg

SEQ ID NO: 18858 - DNA, 179 bp, Macaca Mulatta
ggagcatgcaagttgtcccgttggacaaacagatcacaatcatagatagtccaagcttcatcgtatctccacttaattcctcctctgcacttgctctgcgaagtccagcaagtattgaagtagtaaaaccgatggaggctgccagtgccatccttgcccaggctgatgctcgacaggta

SEQ ID NO: 18859 - DNA, 160 bp, Macaca Mulatta
caagcccgaccccccagaaggcgtgcgcctaagccccctggctgagcgccagctccaggtgcagtgggaacctcccagttcctggcccttcccagagatcttctcactcaagtactggatccgttacaagcgtcagggagctgcccgcttccaccaggtg

SEQ ID NO: 18860 - DNA, 896 bp, Macaca Mulatta
aacttggaaatgtagttttcggttttgtaagtgaacgttgtaaattactcactgggctgaaattcagttttctcctcccaaatcttggcataaagtgattctctgaagatgccccatgccacctcagggcattcgtccctcccccagcccatgccgagacctccagggactcaagggcctcaggggagggagagttcatgctgagacattgctggcacccacccatgccaacagcctgcccccggcacgggcccctgcttggtgggtacaggactcctgtcaatcagggccttggccttgaccccaaagaccaccttgtccagatccctggctgacggcggctgcctccctgtcttccaggtccccatcctcatcccctgccacagagtggtctgcagcagcggagccgtgggcaactactccggaggactggccgtgaaggaatggcttctggtccacgaaggccaccgggcggggaagccaggcttgggagggagctcagggctggcagaggcctggctcaagagagcgggggctacctcgggctccctgcctgctggccgaaactgagtgtgtgcagtaggatggatgtttgagcgacacacacgtgtaacactgcatcagacatgggccgtaggcaccactgtattaaaggaggtgacagtgtcctgggaacaagcgtgtctgccctctctgtttccgtgttttccagcaggatgagttcagacgcccgcagtcctgcacacatttgtttccttctctaacgctgtccttgctctatttttcatgtccattaaaacaggccaagtgagtggggaaggcctggctcatgttggggccacagcccaggatgggacagtctggcaccgtcaggccacagacggctgccacagcca

SEQ ID NO: 18861 - DNA, 7644 bp, Macaca Mulatta
  misc_feature (1)...(7644): n = A,T,C or G
ctgtcacccaggctggagtgcagtnnnnnnnnnnnnnnnnnnnnnnnnnnnnnnnnnnnnnnnnnnnnnnnnnnnnnngcctcagcctcccaagtagctgggattagacgcacatgccagcacgtctggctaatttttgtatttttagtagagatggggtttcaccatgttggccaggctggtctcaaactcctgaactcaagtgatccacccaccttgcctcctaaagtgctgggattacagnnnnnnnnnnnnnnnnnnnnnnnnnnnnnnnnnnnnnnnnnnnnnnnnnnnnnnnnnnnnnnnnnnnnnnnnnnnnnnnnnnnnnnnnnnnnnnnnnnnnnnnnnnnnnnnnnnnnnnnnnnnnnnnnnnnnnnnnnnnnnnnnnnnnnnnnnnnnnnnnnnnnnnnnnnnnnnnnnnnnnnnnnctcactgcagctcaaccttctgggctcaagcaaccctcccacctcnnnnnnnnnnnnnnnnnnnnnnnnnnnnnnnnnnnnnnnnnnnnnnnnnnnnnnnnnnnnnnnnnnnnnnnnnnnnnnnnnnnnnnnnnnnnnnnnnnnnnnnnnnnnnnnnnnnnnnnnnnnnnnnnnnnnnnnnnnnnnnnnnnnnnnnnnnnnnnnnnnnnnnnnnnnnnnnnnnnnnnnnnnnnnnnnnnnnnnnnnnnnnnnnnnnnnnnnnnnnnnnnnnnnnnnnnnnnnnnnnnnnnnnnnnnnnnnnnnnnnnnnnnnnnnnnnnnnnnnnnnnnnnnnnnnnnnnnnnnnnnnnnnnnnnnnnnnnnnnnnnnnnnnnnnnnnnnnnnnnnnnnnnnnnnnnnnnnnnnnnnnnnnnnnnnnnnnnnnnnnnnnnnnnnnnnnnnnnnnnnnnnnnnnnnnnnnnnnnnnnnnnnnnnnnnnnnnnnnnnnnnnnnnnnnnnnnnnnnnnnnnnnnnnnnnnnnnnnnnnnnnnnnnnnnnnnnnnnnnnnnnnnnnnnnnnnnnnnnnnnnnnnnnnnnnnnnnnnnnnnnnnnnnnnnnnnnnnnnnnnnnnnnnnnnnnnnnnnnnnnnnnnnnnnnnnnnnnnnnnnnnnnnnnnnnnnnnnnnnnnnnnnnnnnnnnnnnnnnnnnnnnnnnnnnnnnnnnnnnnnnnnnnnnnnnnnnnnnnnnnnnnnnnnnnnnnnnnnnnnnnnnnnnnnnnnnnnnnnnnnnnnnnnnnnnnnnnnnnnnnnnnnnnnnnnnnnnnnnnnnnnnnnnnnnnnnnnnnnnnnnnnnnnnnnnnnnnnnnnnnnnnnnnnnnnnnnnnnnnnnnnnnnnnnnnnnnnnnnnnnnnnnnnnnnnnnnnnnnnnnnnnnnnnnnnnnnnnnnnnnnnnnnnnnnnnnnnnnnnnnnnnnnnnnnnnnnnnnnnnnnnnnnnnnnnnnnnnnnnnnnnnnnnnnnnnnnnnnnnnnnnnnnnnnnnnnnnnnnnnnnnnnnnnnnnnnnnnnnnnnnnnnnnnnnnnnnnnnnnnnnnnnnnnnnnnnnnnnnnnnnnnnnngaattttgatttggctactgggctgctaccttgaaatccaagccctaaaaatgccggcttctttggacttagaagatgacctggataaatgataaaaattaagaaacagattttgnnnnnnnnnnnnnnnnnnnnnnnnnnnnnnnnnnnnnnnnnnnnnnnnnnnnnnnnnnnnnnnnnnnnnnnnnnnnnnnnnnnnnnnnnnnnnnnnnnnnnnnnnnnnnnnnnnnnnnnnnnnnnnnnnnnnnnnnnnnnnnnnnnnnnnnnnnnnnnnnnnnnnnnnnnnnnnnnnnnnnnnnnnnnnnnnnnnnnnnnnnnnnnnnnnnnnnnnnnnnnnnnnnnnnnnnnnnnnnnnnnnnnnnnnnnnnnnnnnnnnnnnnnnnnnnnnnnnnnnnnnngagtccagcaagctaaaagctcctgaaggtggagccctggaacagcgtgcgtgtgacattcaacatcccccgggaagcagcggagcggctacggatccttgctcagagcaacaaccagcagcttcgggatttagggattctctccgttcagattgaaggnnnnnnnnnnnnnnnnnnnnnnnnnnnnnnnnnnnnnnnnnnnnnnnnnnnnnnnnnnnnnnnnnnnnnnnnnnnnnnnnnnnnnnnnnnnnnnnnnnnnnnnnnnnnnnnnnnnnnnnnnnnnnnnnnnnnnnnnnnnnnnnnnnnnnnnnnnnnnnnnnnnnnnnnnnnnnnnnnnnnnnnnnnnnnnnnnnnnnnnnnnnnnnnnnnnnnnnnnnnnnnnnnnnnnnnnnnnnnnnnnnnnnnnnagatgcaatggatccacttctctctgggctccatatacagcagcaaagtcatccctcaggatctttagctcccccacaccacccaatgcagcctgtctctgtgaatagacaaatgaacccagctaattttccccagctnnnnnnnnnnnnnnnnnnnnnnnnnnnnnnnnnnnnnnnnnnnnnnnnnnnnnnnnnnnnnnnnnnnnnnnnnnnntgcaggcaagacccccacagcaacatcagcaacaacagccacagggaattcgaccccagtttacttcaccaactcaggtgcctgttcctccaggctggaaccagctgccttctggagcccttcaacctcctccagcccagggttctctgggcacaatgactgcaaaccaagggtggaagaaggctcccttgcctggcccaatgcaacagcaactccaggcaagaccatccttagctacggtacagacgccttcccaccctccccctccatatccctttggcagccagcaagcctcacaagcccacacaaactttcctcagatgagcaacccaggccagttcacagctcctcagatgaannnnnnnnnnnnnnnnnnnnnnnnnnnnnnnnnnnnnnnnnnnnnnnnnnnnnnnnnnnnnnnnnnnnnnnnnnnnnnnnnnnnnnnnnnnnnnnnnnnnnnnnnnnnnnnnnnnnnnnnnnnnnnnnnnnnnnnnnnnnnnnnnnnnnnnnnnnnnnnnnnnnnnnnnnnnnnnnnnnnnnnnnnnnnnnnnnnnnnnnnnnnnnnnnnnnnnnnnnnnnnnnnnnnnnnnnnnnnnnnnnnnnnnnnnnnnnnnnnnnnnnnnnnnnnnnnnnnnnnnnnnnnnnnnnnnnnnnnnnnnnnnnnnnnnnnnnnnnnnnnnnnnnnnnnnnnnnnnnnnnnnnnnnnnnnnnnnnnnnnnnnnnnnnnnnnnnnnnnnnnnnnnnnnnnnnnnnnnnnnnnnnnnnnnnnnnnnnnnnnnnnnnnnnnnnnnnnnnnnnnnnnnnnnnnnnnnnnnnnaggtggtcaaggagctggtcctcctcaaaaccagatgcaggtgtcccacgggccaccaaatatgatgcagcccagcctcatgggaattcatggcaacatgaacaatcagcaggctggtagttctggnnnnnnnnnnnnnnnnnnnnnnnnnnnnnnnnnnnnnnnnnnnnnnnnnnnnnnnnnnnnnnnnnnnnnnnnnnnnnnnnnnnnnnnnnnnnnnnnnnnnnnnnnnnnnnnnnnnnnnnnnnnnnnnnnnnnnnnnnnnnnnnnnnnnnnnnnnnnnnnnnnnnnnnnnnnnnnnnnnnnnnnnnnnnnnnnnnnnnnnnnnnnnnnnnnnnnnnnnnnnnnnnnnnnnnnnnnnnnnnnnnnnnnnnnnnnnnnnnnnnnnnnnnnnnnnnnnnnnnnnnnnnnnnnnnnnnnnnnnnnnnnnnnnnnnnnnnnnnnnnnnnnnnnnnnnnnnnnnnnnnnnnnnnnnnnnnnnnnnnnnnnnnnnnnnnnnnnnnnnnnnnnnnnnnnnnnnnnnnnnnnnnnnnnnnnnnnnnnnnnnnnnnnnnnnnnnnnnnnnnnnnnnnnnnnnnnnnnnnnnnnnnnnnnnnnnnnnnnnnnnnnnnnnnnnnnnnnnnnnnnnnnnnnnnnnnnnnnnnnnnnnnnnnnnnnnnnnnnnnnnnnnnnnnnnnnnnnnnnnnnnnnnnnnnnnnnnnnnnnnnnnnnnnnnnnnnnnnnnnnnnnnnnnnnnnnnnnnnnnnnnnnnnnnnnnnnnnnnnnnnnnnnnnnnnnnnnnnnnnnnnnnnnnnnnnnnnnnnnnnnnnnnnnnnnnnnnnnnnnnnnnnnnnnnnnnnnnnnnnnnnnnnnnnnnnnnnnnnnnnnnnnnnnnnnnnnnnnnnnnnnnnnnnnnnnnnnnnnnnnnnnnnnnnnnnnnnnnnnnnnnnnnnnnnnnnnnnnnnnnnnnnnnnnnnnnnnnnnnnnnnnnnnnnnnnnnnnnnnnnnnnnnnnnnnnnnnnnnnnnnnnnnnnnnnnnnnnnnnnnnnnnnnnnnnnnnnnnnnnnnnnnnnnnnnnnnnnnnnnnnnnnnnnnnnnnnnnnnnnnnnnnnnnnnnnnnnnnnnnnnnnnnnnnnnnnnnnnnnnnnnnnnnnnnnnnnnnnnnnnnnnnnnnnnnnnnnnnnnnnnnnnnnnnnnnnnnnnnnnnnnnnnnnnnnnnnnnnnnnnnnnnnnnnnnnnnnnnnnnnnnnnnnnnnnnnnnnnnnnnnnnnnnnnnnnnnnnnnnnnnnnnnnnnnnnnnnnnnnnnnnnnnnnnnnnnnnnnnnnnnnnnnnnnnnnnnnnnnnnnnnnnnnnnnnnnnnnnnnnnnnnnnnnnnnnnnnnnnnnnnnnnnnnnnnnnnnnnnnnnnnnnnnnnnnnnnnnnnnnnnnnnnnnnnnnnnnnnnnnnnnnnnnnnnnnnnnnnnnnnnnnnnnnnnnnnnnnnnnnnnnnnnnnnnnnnnnnnnnnnnnnnnnnnnnnnnnnnnnnnnnnnnnnnnnnnnnnnnnnnnnnnnnnnnnnnnnnnnnnnnnnnnnnnnnnnnnnnnnnnnnnnnnnnnnnnnnnnnnnnnnnnnnnnnnnnnnnnnnnnnnnnnnnnnnnnnnnnnnnnnnnnnnnnnnnnnnnnnnnnnnnnnnnnnnnnnnnnnnnnnnnnnnnnnnnnnnnnnnnnnnnnnnnnnnnnnnnnnnnnnnnnnnnnnnnnnnnnnnnnnnnnnnnnnnnnnnnnnnnnnnnnnnnnnnnnnnnnnnnnnnnnnnnnnnnnnnnnnnnnnnnnnnnnnnnnnnnnnnnnnnnnnnnnnnnnnnnnnnnnnnnnnnnnnnnnnnnnnnnnnnnnnnnnnnnnnnnnnnnnnnnnnnnnnnnnnnnnnnnnnnnnnnnnnnnnnnnnnnnnnnnnnnnnnnnnnnnnnnnnnnnnnnnnnnnnnnnnnnnnnnnnnnnnnnnnnnnnnnnnnnnnnnnnnnnnnnnnnnnnnnnnnnnnnnnnnnnnnnnnnnnnnnnnnnnnnnnnnnnnnnnnnnnnnnnnnnnnnnnnnnnnnnnnnnnnnnnnnnnnnnnnnnnnnnnnnnnnnnnnnnnnnnnnnnnnnnnnnnnnnnnnnnnnnnnnnnnnnnnnnnnnnnnnnnnnnnnnnnnnnnnnnnnnnnnnnnnnnnnnnnnnnnnnnnnnnnnnnnnnnnnnnnnnnnnnnnnnnnnnnnnnnnnnnnnnnnnnnnnnnnnnnnnnnnnnnnnnnnnnnnnnnnnnnnnnnnnnnnnnnnnnnnnnnnnnnnnnnnnnnnnnnnnnnnnnnnnnnnnnnnnnnnnnnnnnnnnnnnnnnnnnnnnnnnnnnnnnnnnnnnnnnnnnnnnnnnnnnnnnnnnnnnnnnnnnnnnnnnnnnnnnnnnnnnnnnnnnnnnnnnnnnnnnnnnnnnnnnnnnnnnnnnnnnnnnnnnnnnnnnnnnnnnnnnnnnnnnnnnnnnnnnnnnnnnnnnnnnnnnnnnnnnnnnnnnnnnnnnnnnnnnnnnnnnnnnnnnnnnnnnnnnnnnnnnnnnnnnnnnnnnnnnnnnnnnnnnnnnnnnnnnnnnnnnnnnnnnnnnnnnnnnnnnnnnnnnnnnnnnnnnnnnnnnnnnnnnnnnnnnnnnnnnnnnnnnnnnnnnnnnnnnnnnnnnnnnnnnnnnnnnnnnnnnnnnnnnnnnnnnnnnnnnnnnnnnnnnnnnnnnnnnnnnnnnnnnnnnnnnnnnnnnnnnnnnnnnnnnnnnnnnnnnnnnnnnnnnnnnnnnnnnnnnnnnnnnnnnnnnnnnnnnnnnnnnnnnnnnnnnnnnnnnnnnnnnnnnnnnnnnnnnnnnnnnnnnnnnnnnnnnnnnnnnnnnnnnnnnnnnnnnnnnnnnnnnnnnnnnnnnnnnnnnnnnnnnnnnnnnnnnnnnnnnnnnnnnnnnnnnnnnnnnnnnnnnnnnnnnnnnnnnnnnnnnnnnnnnnnnnnnnnnnnnnnnnnnnnnnnnnnnnnnnnnnnnnnnnnnnnnnnnnnnnnnnnnnnnnnnnnnnnnnnnnnnnnnnnnnnnnnnnnnnnnnnnnnnnnnnnnnnnnnnnnnnnnnnnnnnnnnnnnnnnnnnnnnnnnnnnnnnnnnnnnnnnnnnnnnnnnnnnnnnnnnnnnnnnnnnnnnnnnnnnnnnnnnnnnnnnnnnnnnnnnnnnnnnnnnnnnnnnnnnnnnnnnnnnnnnnnnnnnnnnnnnnnnnnnnnnnnnnnnnnnnnnnnnnnnnnnnnnnnnnnnnnnnnnnnnnnnnnnnnnnnnnnnnnnnnnnnnnnnnnnnnnnnnnnnnnnnnnnnnnnnnnnnnnnnnnnnnnnnnnnnnnnnnnnnnnnnnnnnnnnnnnnnnnnnnnnnnnnnnnnnnnnnnnnnnnnnnnnnnnnnnnnnnnnnnnnnnnnnnnnnnnnnnnnnnnnnnnnnnnnnnnnnnnnnnnnnnnnnnnnnnnnnnnnnnnnnnnnnnnnnnnnnnnnnnnnnnnnnnnnnnnnnnnnnnnnnnnnnnnnnnnnnnnnnnnnnnnnnnnnnnnnnnnnnnnnnnnnnnnnnnnnnnnnnnnnnnnnnnnnnnnnnnnnnnnnnnnnnnnnnnnnnnnnnnnnnnnnnnnnnnnnnnnnnnnnnnnnnnnnnnnnnnnnnnnnnnnnnnnnnnnnnnnnnnnnnnnnnnnnnnnnnnnnnnnnnnnnnnnnnnnnnnnnnnnnnnnnnnnnnnnnnnnnnnnnnnnnnnnnnnnnnnnnnnnnnnnnnnnnnnnnnnnnnnnnnnnnnnnnnnnnnnnnnnnnnnnnnnnnnnnnnnnnnnnnnnnnnnnnnnnnnnnnnnnnnnnnnnnnnnnnnnnnnnnnnnnnnnnnnnnnnnnnnnnnnnnnnnnnnnnnnnnnnnnnnnnnnnnnnnnnnnnnnnnnnnnnnnnnnnnnnnnnnnnnnnnnnnnnnnnnnnnnnnnnnnnnnnnnnnnnnnnnnnnnnnnnnnnnnnnnnnnnnnnnnnnnnnnnnnnnnnnnnnnnnnnnnnnnnnnnnnnnnnnnnnnnnnnnnnnnnnnnnnnnnnnnnnnnnnnnnnnnnnnnnnnnnnnnnnnnnnnnnnnnnnnnnnnnnnnnnnnnnnnnnnnnnnnnnnnnnnnnnnnnnnnnnnnnnnnnnnnnnnnnnnnnnnnnnnnnnnnnnnnnnnnnnnnnnnnnnnnnnnnnnnnnnnnnnnnnnnnnnnnnnnnnnnnnntagccccgtcgcagaatttagtctcaaaggaaacttcaaccacagcactgcaggcctctgttgccagacca

SEQ ID NO: 18862 - DNA, 1366 bp, Macaca Mulatta
ggggggaacaccacccagtgtggagaagcccagccaagcactgtcaggaatcctgtgaagcagctccagctatgtgtgaagaagaggacagcactgccttggtgtgtgacaatggctctgggctctgtaaggccggctttgctggggacgatgctcccagggctgttttcccatccattgtgggacgtcccagacatcagggggtgatggtgggaatgggacaaaaagacagctacgtgggtgacgaagcacagagcaaaagaggaatcttgaccctgaagtacccgatagaacacggcatcattaccaactgggacgacatggaaaagatctggcaccactctttctacaacgagcttcgtgttgcccctgaagagcatcccaccctgctcacggaggcgcccctgaaccccaaggccaatcgggaaaaaatgacccagattatgtttgagactttcaatgtcccagccatgtatgtggctatccaggcggtgctgtccctctacgcctctggacgcacaactggcatcgtgctggactctggagatggtgtcacccacaatgtccccatctatgaaggttatgccttgccccatgccatcatgcgtctggatctggctggccgagatctcactgactacctcatgaaaaatcctgactgagcgtggctattccttcgttactaccgctgagcgtgagattgtccgggacatcaagggagaaactggtgttatgtagctctgggactttgaaaatgagatggccactgccgcatcctcctcctcccttgagaagagttacgagctgcctgatgggcaagtgatcaccatcggaaatgaacgcttccgctgcccagagaccctgttccagccatccttcatcgggatggagtctgcaggcatccatgaaaccacctacaacagcatcatgaagtgtgatattgacatcaggaaggacctctacgctaacaatgtcctatcaggaggcaccactatgtaccctggcattgccgagccgaatgcagaaggagatcacggcccctagcgcccagcaccatgaagatcaagatcattgccccctcccggagcgcaaaatactctgtcctggatcgggtgggctcccatccttgggcctcttctggttccccttttccagccaagattgttgggattccacccaaaccagggaatttaccgattggaaagccccggggccctttttccatttggttcccaccccggcaaaaaatggccttcccttaaaaaaccaccttttttcccagggcctctccttccttctagtgttgttccccagagccacacacaaaaacttgggtggtaaaaaagggttttccccggaggaggga

SEQ ID NO: 18863 - DNA, 123 bp, Macaca Mulatta
ccagagacaccacctggaggtgcaccagggcagtctcaccggagagaagccttcccagtgcggggactgagggaagagcttcagccgccggcagcactagcaggtgcaccggaggccgcacac

SEQ ID NO: 18864 - DNA, 140 bp, Macaca Mulatta
ggatacagcatttaatgaaacatttatgcttaagaagtaaaaatggcaggcttcctagacaattttcgttggccagaatgtgagtgtattgactggagcgagagaagaaatgctgtggcatctgttgtcgcaggtatatt

SEQ ID NO: 18865 - DNA, 768 bp, Macaca Mulatta
  misc_feature (1)...(768): n = A,T,C or G
acggtcaagtcagccaaggccgcctccctagtcaggagcctcccaaagcgcaggcgcacctacccggggggcgcggctgggcggagtcaagagccggaagnnnnnnnnnnnnnnnnnnnnnnnnnnnnnnnnnnnnnnnnnnnnnnnnnnnnnnnnnnnnnnnnnnnnnnnnnnnnnnnnnnnnnnnnnnnnnnnnnnnnnnnnnnnnnnnnnnnnnnnnnnnnnnnnnnnnnnnnnnnnnnnnnnnnnnnnnnnnnnnnnnnnnnnnnnnnnnnnnnnnnnnnnnnnnnnnnnnnnnnnnnnnnnnnnnnnnnnnnnnnnnnnnnnnnnnnnnnnnnnnnnnnnnnnnnnnnnnnnnnnnnnnnnnnnnnnnnnnnnnnnnnnnnnnnnnnnnnnnnnnnnnnnnnnnnnnnnnnnnnnnnnnnnnnnnnnnnnnnnnnnnnnnnnnnnnnnnnnnnnnnnnnnnnnnnnnnnnnnnnnnnnnnnnnnnnnnnnnnnnnnnnnnnnnnnnnnnnnnnnnnnnnnnnnnnnnnnnnnnngatgaagaacctatgcgttatggaaacataatgtatgacagaagggtaattcgaggcaacacttacgcactccagacagggccactgctcggacagcctgattctctagagcttcagagacaacgggaggctaagaagagggctcttgccagaaaacaagcccaagagcagctcagaccacaaacacctgaacctgtggaaggcagaaagcatgtcgatgtgcaaacag

SEQ ID NO: 18866 - DNA, 876 bp, Macaca Mulatta
gggaaggaaggcgcacagccagccgcgctcgcctcgccgcggggcgtccagctcgcccagcgtccgccgcgcctcggccaaggcttcaacagaccacaccaaaatgccgtctcaaatggagcatgccatggaaaccatgatgtttacatttcacaaattcgcgggggataaaggctacttaacaaaggaggacctgagagtactcatggaaaaggagtttcctggatttttggaaaatcaaaaagaccctctggccgtggacaaaataatgaaggacctggaccagtgcagagatggcaaagtgggcttccagagcttcttttccctaattgcgggcctcaccattgcatgcaatgactattttgtagtacacatgaagcagaagggaaagaagtaggcaaaaacgagcaattccctcctccctgataagagctgtcccaaaggggtcgcttgaggaaatctgcccccacagctttccccccatagaaagggatttcatggagcacgatcagggacccgttacagaaaacttgtaagaagtaaaatgctaaacttcccattttggacaaaggctgaagaaaagggaagaggttaaactacccagaaaaagggcctttgggaaatttgtagagaaatggagtgggcattccccccgttgggcgcgccaagtagaaagaagaggctccaccttgtgttgcagttccccccgacaggagcggcggaagcacagagaaacaaataaggaaagctgtggtggcgaggggccagcgtctaggaagcacccgcgcggaaaaaactgtgtatttggaaagaaacggtagtccaaagaaaggggacacgcgcgcgggagacgcacaagagatagagagagggaaa

SEQ ID NO: 18867 - DNA, 635 bp, Macaca Mulatta
  misc_feature (1)...(635): n = A,T,C or G
agaaatcaaaaatctccacctacgagaagatgtgggccttcatgagcagcaggcagcagaccgccctggtaagaaacagtgacgagggaatccagagagtgctcactacagactacgcgctgctgatggagtccaccagcattgagtatgtgacgcagagaaactgcaacctcactcagatcgggggcctcattgactccaaaggttatggagtgggaacgcctattggtnnnnnnnnnnnnnnnnnnnnnnnnnnnnnnnnnnnnnnnnnnnnnnnnnnnnnnnnnnnnnnnnnnnnnnnnnnnnnnnnnnnnnnnnnnnnnnnnnnnnnnnnnnnnnnnnnnnnnnnnnnnnnnnnnnnnnnnnnnnnnnnnnnnnnnnnnnnnnnnnnnnnnnnnnnnnnnnnnnnnnnnnnnnnnnnnnnnnnnnnnnnnnnnnnnnnnnnnnnnnnnnnnnnnnnnnnnnnnnnnnnnnnnnagtgtctctctttcaacgccatcatggaagaactgggaatctcactgaagaatcagaaaaaaataaagaaaaagtcaagaactaagggaaaatcttccttcacaagtatccttacttgtcatcagagacgaactcagagaaaagagactgtggcgtga

SEQ ID NO: 18868 - DNA, 1012 bp, Macaca Mulatta
  misc_feature (1)...(1012): n = A,T,C or G
aggaaaagcacaaccaacagtctgaatttactattgaaaacttggaaaacactgcagttgagtgtttggagctgggacagagacgacaagcacaaccctgagatatgctctccttctcctgctgaagnnnnnnnnnnnnnnnnnnnnnnnnnnnnnnnnnnnnnnnnnnnnnnnnnnnnnnnnnnnnnnnnnnnnnnnnnnnnnnnnnnnnnnnnnnnnnnnnnnnnnnnnnnnnnnnnnnnnnnnnnnnnnnnnnnnnnnnnnnnnnnnnnnnnnnnnnnnnnnnnnnnnnnnnnnnnnnnnnnnnnnnnnnnnnnnnnnnnnnnnngggcacaaccatattaatttccctgacttctgtgctacatgacaacaaagaatttcccaacccagagatgtttgaccctcgtcactttctggatgaaggtggcaattttaagaaaagtaactacttcatgcctttctcagcaggnnnnnnnnnnnnnnnnnnnnnnnnnnnnnnnnnnnnnnnnnnnnnnnnnnnnnnnnnnnnnnnnnnnnnnnnnnnnnnnnnnnnnnnnnnnnnnnnnnnnnnnnnnnnnnnnnnnnnnnnnnnnnnnnnnnnnnnnnnnnnnnnnnnnnnnnnnnnnnnnnnnnnnnnnnnnnnnnnnnnnnnnnnnnnnnnnnnnnnnnnnnnnnnnnnnnnnnnnnnnnnnnnnnnnnnnnnnnnnnnnnnnnnnnnnnnnnnnnnnnnnnnnnnnnnnnnnnnnnnnnnnnnnnnnnnnnnnnnnnnnnnnnnnnnnnnnnnnnnnnnnnnnncctccgttaaggagagtttcctatgcttcacagtgcaaatatatctgctattctccatactctgtaacggttgcattgactgtcacctaatgctgatacttatctaatgttgttattaatatgttattattaaatagagaaagatgatttgtgtatcataattcaaaggcatttcttctttgcatgttctaaataaaaagcattattatttgct

SEQ ID NO: 18869 - DNA, 716 bp, Macaca Mulatta
  misc_feature (1)...(716): n = A,T,C or G
agagaggcgggaaataatgttcagtacatttggagctattattcagtagcagagttgaagaaaatgatggatgcctttgatgcttgggaaggaaaaggtacagtgcaattttatttcatggaagcaggtggacttnnnnnnnnaagacaaagtaaactcaaatactgaatttctttgttttagaaagtattcttttgagtgtcaatgtatttgtcatctcatggtaacactgaggcagtttacttacaaatctttaaatcccatgagttgctaggtattattaatagtttataattcagtaactttaagtatgcttctgttagctaggcttatttaatttaattaagagttcatttagtatctactgtgcattggaaaaatacttcaaattaagcataaaatatgtaatcaaggaaagggagagaaaataatgctggggaggatatctaaagagcccttataaagtaattacaataatcttgaaatgtacactttgaaaactgatcatttttctcaaactacagagtgagagttggtaataataatgctgttttatatctccgataagtagtttacattcggtatctcttagtcctgacacaatcctgtacactacttaccattcctattttatagatgaggaaaatgagtctcagaagggctttgacactttcataaggatcacagaagggttacatgttctgttctatgcctaa

SEQ ID NO: 18870 - DNA, 150 bp, Macaca Mulatta
gcagtcctagcgggagcgaaggggaccaaataaggcaaggtggcagaccgggccccccactcctgcttccggctgctccaactgaccctgtccatcagcgttctataaggcggccctcctggagccagccacccagagcccgccgccgcc

SEQ ID NO: 18871 - DNA, 2113 bp, Macaca Mulatta
  misc_feature (1)...(2113): n = A,T,C or G
ttcaggtatccaaggcagcagaggtgagtgggtcccctgagctccgtgaccttatgctccacactaactctggcannnnnnnnnnnnnnnnnnnnnnnnnnnnnnnnnnnnnnnnnnnnnnnnnnnnnnnnnnnnnnnnnnnnnnnnnnnnnnnnnnnnnnnnnnnnnnnnnnnnnnnnnnnnnnnnnnnnnnnnnnnnnnnnnnnnnnnnnnnnnnnnnnnnnnnnnnnnnnnnnnnnnnnnnnnnnnnnnnnnnnnnnnnnnnnnnnnnnnnnnnnnnnnnnnnnnnnnnnnnnnnnnnnnnnnnnnnnnnnnnnnnnnnnnnnnnnnnnnnnnnnnnnnnnnnnnnnnnnnnnnnnnnnnnnnnnnnnnnnnnnnnnnnnnnnnnnnnnnnnnnnnnnnnnnnnnnnnnnnnnnnnnnnnnnnnnnnnnnnnnnnnnnnnnnnnnnnnnnnnnnnnnnnnnnnnnnnnnnnnnnnnnnnnnnnnnnnnnnnnnnnnnnnnnnnnnnnnnnnnnnnnnnnnnnnnnnnnnnnnnnnnnnnnnnnnnnnnnnnnnnnnnnnnnnnnnnnnnnnnnnnnnnnnnnnnnnnnnnnnnnnnnnnnnnnnnnnnnnnnnnnnnnnnnnnnnnnnnnnnnnnnnnnnnnnnnnnnnnnnnnnnnnnnnnnnnnnnnnnnnnnnnnnnnnnnnnnnnnnnnnnnnnnnnnnnnnnnnnnnnnnnnnnnnnnnnnnnnnnnnnnnnnnnnnnnnnnnnnnnnnnnnnnnnnnnnnnnnnnnnnnnnnnnnnnnnnnnnnnnnnnnnnnnnnnnnnnnnnnnnnnnnnnnnnnnnnnnnnnnnnnnnnnnnnnnnnnnnnnnnnnnnnnnnnnnnnnnnnnnnnnnnnnnnnnnnnnnnnnnnnnnnnnnnnnnnnnnnnnnnnnnnnnnnnnnnnnnnnnnnnnnnnnnnnnnnnnnnnnnnnnnnnnnnnnnnnnnnnnnnnnnnnnnnnnnnnnnnnnnnnnnnnnnnnnnnnnnnnnnnnnnnnnnnnnnnnnnnnnnnnnnnnnnnnnnnnnnnnnnnnnnnnnnnnnnnnnnnnnnnnnnnnnnnnnnnnnnnnnnnnnnnnnnnnnnnnnnnnnnnnnnnnnnnnnnnnnnnnnnnnnnnnnnnnnnnnnnnnnnnnnnnnnnnnnnnnnnnnnnnnnnnnnnnnnnnnnnnnnnnnnnnnnnnnnnnnnnnnnnnnnnnnnnnnnnnnnnnnnnnnnnnnnnnnnnnnnnnnnnnnnnnnnnnnnnnnnnnnnnnnnnnnnnnnnnnnnnnnnnnnnnnnnnnnnnnnnnnnnnnnnnnnnnnnnnnnnnnnnnnnnnnnnnnnnnnnnnnnnnnnnnnnnnnnnnnnnnnnnnnnnnnnnnnnnnnnnnnnnnnnnnnnnnnnnnnnnnnnnnnnnnnnnnnnnnnnnnnnnnnnnnnnnnnnnnnnnnnnnnnnnnnnnnnnnnnnnnnnnnnnnnnnnnnnnnnnnnnnnnnnnnnnnnnnnnnnnnnnnnnnnnnnnnnnnnnnnnnnnnnnnnnnnnnnnnnnnnnnnnnnnnnnnnnnnnnnnnnnnnnnnnnnnnnnnnnnnnnnnnnnntgctcaagttcaccagcctgttagtggcaaagagaggtccagagtccaggcccttgatgcccagctcagtgccacaaagctcagtaggagggttgttccagtggatgagggccaccaggaagcacaggtccaaggctggtcccccacctatcagcaacaacaactgtcagttcatcctgcatgggaaaaatgttggaatgggagtctgaaatggggctactgttttggtcccaacctgctgtgtgacattggagcaacacttcccatatatggacctcagtttccttctgtatacaaggatcagattcttgctgtgatccaagaactcctgaaatcatatagaaaggctggggtgtgccctgtcaatcatggttgatttcaatacactcaagtaccattcatcctttaagaaaaacatctggatatcaaggtggaaatggcccatttaatgattgattatatcgtgttgaaaatatagttataatcttatgggcctggctgggagtggaagaagg

SEQ ID NO: 18872 - DNA, 1345 bp, Macaca Mulatta
  misc_feature (1)...(1345): n = A,T,C or G
cgagaatggaggtggaggccgtctgtggtggtgcgggcgagctggaggcccaggaccctgccccttcctccagcaaggcccccggcagcgccggccactacgagctgccgtgnnnnnnnnnnnnnnnnnnnnnnnnnnnnnnnnnnnnnnnnnnnnnnnnnnnnnnnnnnnnnnnnnnnnnnnnnnnnnnnnnnnnnnnnnnnnnnnnnnnnnnnnnnnnnnggccctccaggaactggcaagaccacaagcattctgtgcttggcccgggccctgctgggcccagcactcaaagatgccgtgttggaactcaatgcttcaaacgacaggnnnnnnnnnnnnnnnnnnnnnnnnnnnnnnnnnnnnnnnnnnnnnnnnnnnnnnnnnnnnnnnnnnnnnnnnnnnnnnnnnnnnnnnnnnnnnnnnnnnnnnnnnnnnnnnnnnnnnnnnnnnnnnnnnnnnnnnnnnnnnnnnnnnnnnnnnnnnnnnnnnnnnnnnnnnnnnnnnnnnnnnnnnnnnnnnnnnnnnnnnnnnnnnnnnnnnnnnnnnnnnnnnnnnnnnnnnnnnnnnnnnnnnnnnnnnnnnnnnnnnnnnnnnnnnnnnnnnnnnnnnnnnnnnnnnnnnnnnnnnnnnnnnnnnnnnnnnnnnnnnnnnnnnnnnnnnnnnnnnnnnnnnnnnnnnnnnnnnnnnnnnnnnnnnnnnnnnnnnnnnnnnnnnnnnnnnnnnnnnnnnnnnnnnnnnnnnnnnnnnnnnnnnnnnnnnnnnnnnnnnnnnnnnnnnnnnnnnnnnnnnnnnnnnnnnnnnnnnnnnnnnnnnnnnnnnnnnnnnnnnnnnnnnnnnnnnnnnnnnnnnnnnnnnnnnnnnnnnnnnnnnnnnnnnnnnnnnnnnnnnnnnnnnnnnnnnnnnnnnnnnnnnnnnnnnnnnnnnnnnnnnnnnnnnnnnnnnnnnnggaaattggatacactcacatgaaaatagcagaaggagtgaactcccttttgcagatggcaggcctcctggccaggctgtgtcagaagacaatggccccggtggccagttagagcagagacttcgctgactgacttacaggagccctatcctgaggtacaggagctgtggctttctgatgggggaaaatgccgccttaggctggagccagcatgactgccgtttaaactccagtggctggccaggcgcggtggctcacacctgtacttccagcactttgggagaccgaggcaggtggatcacctgaggtcaggagttcgataccagcctggccaacatggggaaacactgtctctactaaaaatataaaacttagctgggtgtggtggcaggcacc

SEQ ID NO: 18873 - DNA, 1175 bp, Macaca Mulatta
  misc_feature (1)...(1175): n = A,T,C or G
gggctttctttgcggaatcaccatggcggctgggaccctgtatacgtatcctgaaaactggagggccttcaaggctctcatcgctgcacaatacagcggggctcaggtccgcgtgctctccgcaccaccccacttccattttggccaaaccaaccgcacccctgaatttctccgcaaatttcctgccggcaaggttccagcatttgagggtgacgatggattctgtgtgtttgagagcaacgccattgcctactatgtgagcaatgaggagctgcggggaagtactccagaggcagcagcccaggtggtgcagtgggtgagctttgctgattccgacatagtgcccccagccagtacctgggtattccccaccttgggcatcatgcaccacaacaaacaggccactgagaatgcaaaggaggaagtgaggcgaattctggggctgctggatgctcacttgaagacgaggacttttctggtgggcgaacgagtgacattggctgacatcacagttgtctgcaccctgttgtggctctataagcaggtcctagagccttctttccgccaggcctttcccaataccaaccgctggttcctcacctgcattaatcagccccagttccgggctgtcttgggggaagtgaagctgtgtgagaagatggcccagtttgatgctaaaaagtttgcagagacccagcctaaaaaagatacaccacggaaagagaagggttcacgggaagagaagcagaagccccaggctgagcggaaggaggagaaaaaggcggctgcccctgctcctgaggaggagatggatgaatgtgagcaggcgctggctgctgagcccaaggccaaggaaccccttcgctgacttgccccaagattaccttttgtgttggagtgaatttaagcgacaagtactccaatgaaggacacaactctcctggtggcaactgcccatatttactggggaacaccttttgaataaagaccggcctgggtccccttgtgggtaactccaaaaatattcgcctttccccggggaaaaaactctacttcagaaaccctatcttgaaaacctgacaaatccccaaacnactggggaaatgaattccagccgaacctggggacaaaaacctgaaggggaacaaaatgggccattcccaaccaccaggtaa

SEQ ID NO: 18874 - DNA, 973 bp, Macaca Mulatta
  misc_feature (1)...(973): n = A,T,C or G
gaaacagtgagctgtgtggtaccagaatggctcgcaagctgactgtgagcttggaaatccttttaaaagaaattcaagtgttactttttatttggttttaagtacaactgaagtcacctttgacaccccagatctggatattaatctgaagttagaaacaacaagcaatcaagataatttggctccaattacagctaaagcaaaagtggttattgaactgcttttatcggtctcgggagttgctaaaccttcccaggtgtattttggaggtacagttgttggcgagcaagctatgaaatctgaagatgaagtgggaagtttaatagagtatgaattcagggtaattaacttaggtaaacctcttaaaaacctcggcacagcaaccttgaacattcagtggccaaaagaaattagcaatggcaaatggttgctttatttggtgaaagtagaatccaaaggattggaaaagataacttgtgagccacaaaaggagataaacttcctgaacctcaaggagtctcacaactcaagaaagaaacgggaaattactgaaaaacagatagatgatagcagaaaattttctttatttgctgaaagaaaataccagactcttaactgtagtgtgaatgtgaactgtgtgaacatcagatgcccactgcgagggctggacagcaaggcgtctcttatattgcgctcgaggttatggaaccagccatttctagaggaatattccaaaatgaactattggacatcctcctgcgagcctccttggagtgactgccgcggccgaaaaattcacgcgccactgcgggccccgtcgcggacggttgatacccgatagggantacgacggaacgcgtgaaacagtgagccgtaatcagcggctgctaacaatcagtgccccacaaatacagaccagagaccctccatattgtagcgagcgctttccgcggataccccccaccccacacac

SEQ ID NO: 18875 - DNA, 625 bp, Macaca Mulatta
ggggctttttgaggaagacgcggtcgtaggacttgcggatctttggttcgcacgctcctgctcctgactcaccgctgttcgctctcgccgaggaacaagtcggtcaggaagccgcgcagcaggcatggcttttaaggatactggaaaaacacccgtggagccggaggtggcaattcaccgaatgtcgaatcaccctaacgagccgcaacgttaaatccctggaaaaggtgtgtgctgacttgatcagaggcgcgaaggaaaagaacctgatagtgaaaggaccagttcgaatgcctaccaagactttgagaatcactacaagaaaaactccttgtggtgaaggttctaagacatgggatcgtttccagatgagaatccacaagccgactcatttgacttgcacattccttctgagattgttaaggcagattacttccttcagtattgggccaggattttaggtgggagtcacctttgcagatgctctaagtcaacttttttaataattggttacccgttgttaaaaccaaaataatataataacccccctatatttttaaaccttgtcggcccctcctcccctcagagttttcttgacctttctttgccccggccccattagtaa

SEQ ID NO: 18876 - DNA, 1555 bp, Macaca Mulatta
  misc_feature (1)...(1555): n = A,T,C or G
aggtggtccaggaagcggaaagggtactcagagtttgaaaattgcagaacgatatggattccaatacatttctgtgggagaattattaagaaagaagatccacagtaccagcagcaataggaaatggagtcttattgccaagataattacaactggagaactggccccgcaggnaggaaacaacaattacagagataaaacaaaaattgatgcaaatacctgatgaagagggcattgttattgatggatttccaagagatgttgcccaggctctatcttttgaggaccaannnnnnnnnnnnnnnnnnnnnnnnnnnnnnnnnnnnnnnnnnnnnnnnnnnnnnnnnnnnnnnnnnnnnnnnnnnnnnnnnnnnnnnnnnnnnnnnnnnnnnnnnnnnnnnnnnnnnnnnnnnnnnnnnnnnnnnnnnnnnnnnnnnnnnnnnnnnnnnnnnnnnnnnnnnnnnnnnnnnnnnnnnnnnnnnnnnnnnnnnnnnnnnnnnnnnnnnnnnnnnnnnnnnnnnnnnnnnnnnnnnnnnnnnnnnnnnnnnnnnnnnnnnnnnnnnnnnnnnnnnnnnnnnnnnnnnnnnnnnnnnnnnnnnnnnnnnnnnnnnnnnnnnnnnnnnnnnnnnnnnnnnnnnnnnnnnnnnnnnnnnnnnnnnnnnnnnnnnnnnnnnnnnnnnnnnnnnnnnnnnnnnnnnnnnnnnnnnnnnnnnnnnnnnnnnnnnnnnnnnnnnnnnnnnnnnnnnnnnnnnnnnnnnnnnnnnnnnnnnnnnnnnnnnnnnnnnnnnnnnnnnnnnnnnnnnnnnnnnnnnnnnnnnnnnnnnnnnnnnnnnnnnnnnnnnnnnnnnnnnnnnnnnnnnnnnnnnnnnnnnnnnnnnnnnnnnnnnnnnnnnnnnnnnnnnnnnnnnnnnnnnnnnnnnnnnnnnnnnnnnnnnnnnnnnnnnnnnnnnnnnnnnnnnnnnnnnnnnnnnnnnnnnnnnnnnnnnnnnnnnnnnnnnnnnnnnnnnnnnnnnnnnnnnnnnnnnnnnnnnnnnnnnnnnnnnnnnnnnnnnnnnnnnnnnnnnnnnnnnnnnnnnnnnnnnnnnnnnnnnnnnnnnnnnnnnnnnnnnnnnnnnnnnnnnnnnnnnnnnnnnnnnnnnnnnnnnnnnnnnnnnnnnnnnnnnnnnnnnnnnnnnnnnnnnnnnnnnnnnnnnnnnnnnnnnnnnnnnnnnnnnnnnnnnnnnnnnnnnnnnnnnnnnnnnnnnnnnnnnnnnnnnnnnnnnnnnnnnnnnnnnnnnnnnnnnnnnnnnnnnnnnnnnnnnnnnnnnnnnnnnnnnnnnnnnnnnnnnnnnnnnnnnnnnnnnnnnnnnnnnnnnnnnnnnnnnnnnnnnnnnnnnnnnnnnnnnnnnnnnnnnnnnnnnnnnnnnnnnnnnnnnnnnnnnnnnnnnnnnnnnnnnnnnnnnnnnnnnggctattgtactttgttctggaaacacaaagatgaatgaataatgtatccttatggtaaaatacatgtacatataatcatacataatagagtataaatacatacaat

SEQ ID NO: 18877 - DNA, 684 bp, Macaca Mulatta
  misc_feature (1)...(684): n = A,T,C or G
gtgaacttgatgaataatataaaaaagtagaaaattaattgccaaaaaaactgaggagtcagctgatgccagaaggaaagctgaaatgctacaaaatgaagcaaaaactcttttagctcaagcaaacagcaagctgcaactgctcaaagatttagaaagaaaatatgaagacaatcaaaaatacttagaagataaagctcaagaattagcaagactggaaggagaagtccgttcactccttaaggatataagccagaaagttgctgtttatagcacgtgcttgtaacaaaggagaatataaaacggctgaggtgaccaaggtaaaacagctacattttaaaaactgacttaatgatcttcaaaataaaactcatcacctatttaattttttaatcacattttgtatggagttaaataaagtacagtgcttttgtannnnnnnnnnnnnnnnnnnnnnnnnnnnnnnnnnnnnnnnnnnnnnnnnnnnnnnnnnnnnnnnnnnnnnnnnnnnnnnnnnnnnnnnnnnnnnnnnnnnnnnnnnnnnnnnnnnnnnnnnnnnnnnnnnnnnnnnnnnnnnnnnnnnnnnnnnnnnnnnnnnnnnnnnnnnnnnnnnnnnnnnnnnnnnnnnnnnnnnnnnnnnnnnnnnnnnnnnnnnnnnnnnnnnnnnnnnnnnnnnnnnnnnnn

SEQ ID NO: 18878 - DNA, 438 bp, Macaca Mulatta
ggaaagcctattctcttaactcgattccgtgttacctgggaaatgcttaactcagcttcaacactttatttccacagccttatctctttggccaacatccctccctcaggattggcaaatgcagtagcagagggaattcgctcagaagaaaacatctataccattgaggaggatgtatatgaagtgcaggagcccaatgagtattactgctatgtcagcagcgggcagcaaccctcacaacctttgggttgtcgcgttgcagtgccatagatccaaccaccttatttttgagctttgtattgtctttttcagaaactatgggctgtgtcagctgactggttttggaggttctgtccactgccatggagcagagttttcccattatcggaagataatgactcacatgggaattgaactgggacctgccctgaacttaaa

SEQ ID NO: 18879 - DNA, 2449 bp, Macaca Mulatta
  misc_feature (1)...(2449): n = A,T,C or G
aggctctgaccaagaatgacaggagcacannnnnnnnnnnnnnnnnnnnnnnnnnnnnnnnnnnnnnnnnnnnnnnnnnnnnnnnnnnnnnnnnnnnnnnnnnnnnnnnnnnnnnnnnnnnnnnnnnnnnnnnnnnnnnnnnnnnnnnnnnnnnnnnnnnnnnnnnnnnnnnnnnnnnnnnnnnnnnnnnnnnnnnnnnnnnnnnnnnnnnnnnnnnnnnnnnnnnnnnnnnnnnnnnnnnnnnnnnnnnnnnnnnnnnnnnnnnnnnnnnnnnnnnnnnnnnnnnnnnnnnnnnnnnnnnnnnnnnnnnnnnnnnnnnnnnnnnnnnnnnnnnnnnnnnnnnnnnnnnnnnnnnnnnnnnnnnnnnnnnnnnnnnnnnnnnnnnnnnnnnnnnnnnnnnnnnnnnnnnnnnnnnnnnnnnnnnnnnnnnnnnnnnnnnnnnnnnnnnnnnnnnnnnnnnnnnnnnnnnnnnnnnnnnnnnnnnnnnnnnnnnnnnnnnnnnnnnnnnnnnnnnnnnnnnnnnnnnnnnnnnnnnnnnnnnnnnnnnnnnnnnnnnnnnnnnnnnnnnnnnnnnntgtggccatcttgctgacatcacgtagaaggtgcaccccatcatctggtccctcaccagctacccactgactgcatgcaggctctggccgtgcccaagtccataggtggggtggtnnnnnnnnnnnnnnnnnnnnnnnnnnnnnnnnnnnnnnnnnnnnnnnnnnnnnnnnnnnnnnnnnnnnnnnnnnnnnnnnnnnnnnnnnnnnnnnnnnnnnnnnnnnnnnnnnnnnnnnnnnnnnnnnnnnnnnnnnnnnnnnnnnnnnnnnnnnnnnnnnnnnnnnnnnnnnnnnnnnnnnnnnnnnnnnnnnnnnnnnnnnnnnnnnnnnnnnnnnnnnnnnnnnnnnnnnnnnnnnnnnnnnnnnnnnnnnnnnnnnnnnnnnnnnnnnnnnnnnnnnnnnnnnnnnnnnnnnnnnnnnnnnnnnnnnnnnnnnnnnnnnnnnnnnnnnnnnnnnnnnnnnnnnnnnnnnnnnnnnnnnnnnnnnnnnnnnnnnnnnnnnnnnnnnnnnnnnnnnnnnnnnnnnnnnnnnnnnnnnnnnnnnnnnnnnnnnnnnnnnnnnnnnnnnnnnnnnnnnnnnnnnnnnnnnnnnnnnnnnnnnnnnnnnnnnnnnnnnnnnnnnnnnnnnnnnnnnnnnnnnnnnnnnnnnnnnnnnnnnnnnnnnnnnnnnnnnnnnnnnnnnnnnnnnnnnnnnnnnnnnnnnnnnnnnnnnnnnnnnnnnnnnnnnnnnnnnnnnnnnnnnnnnnnnnnnnnnnnnnnnnnnnnnnnnnnnnnnnnnnnnnnnnnnnnnnnnnnnnnnnnnnnnnnnnnnnnnnnnnnnnnnnnnnnnnnnnnnnnnnnnnnnnnnnnnnnnnnnnnnnnnnnnnnnnnnnnnnnnnnnnnnnnnnnnnnnnnnnnnnnnnnnnnnnnnnnnnnnnnnnnnnnnnnnnnnnnnnnnnnnnnnnnnnnnnnnnnnnnnnnnnnnnnnnnnnnnnnnnnnnnnnnnnnnnnnnnnnnnnnnnnnnnnnnnnnnnnnnnnnnnnnnnnnnnnnnnnnnnnnnnnnnnnnnnnnnnnnnnnnnnnnnnnnnnnnnnnnnnnnnnnnnnnnnnnnnnnnnnnnnnnnnnnnnnnnnnnnnnnnnnnnnnnnnnnnnnnnnnnnnnnnnnnnnnnnnnnnnnnnnnnnnnnnnnnnnnnnnnnnnnnnnnnnnnnnnnnnnnnnnnnnnnnnnnnnnnnnnnnnnnnnnnnnnnnnnnnnnnnnnnnnnnnnnnnnnnnnnnnnnnnnnnnnnnnnnnnnnnnnnnnnnnnnnnnnnnnnnnnnnnnnnnnnnnnnnnnnnnnnnnnnnnnnnnnnnnnnnnnnnnnnnnnnnnnnnnnnnnnnnnnnnnnnnnnnnnnnnnnnnnnnnnnnnnnnnnnnnnnnnnnnnnnnnnnnnnnnnnnnnnnnnnnnnnnnnnnnnnnnnnnnnnnnnnnnnnnnnnnnnnnnnnnnnnnnnnnnnnnnnnnnnnnnnnnnnnnnnnnnnnnnnnnnnnnnnnnnnnnnnnnnnnnnnnnnnnnnnnnnnnnnnnnnnnnnnnnnnnnnnnnnnnnnnnnnnnnnnnnnnnnnnnnnnnnnnnnnnnnnnnnnnnnnnnnnnnnnnnnnnnnnnnnnnnnnnnnnnnnnnnnnnnnnnnnnnnnnnnnnnnnnnnnnagatctaccagctccccgactggcggctggtgttcctggtgaagaacttccctgtggggcagcgggtcttcgtggacagctcctttggacagcccactacacagggcgaggcccgcagggaggaggccacacgccagggggagctgcccctcgtcaaggaggtgctgctggtggcactgggcagccgccagagcaggccctacctgctggt

SEQ ID NO: 18880 - DNA, 1981 bp, Macaca Mulatta
  misc_feature (1)...(1981): n = A,T,C or G
caaaatggcctcgccggctgacagctgcatccagttcacccgccatgccagtgatgttcttctcaaccttaatcgtctccggagtcgagacatcttgactgatgttgtcattgttgtgagccgtgagcagtttagagcccataaaacggtcctcatggcctgcagnnnnnnnnnnnnnnnnnnnnnnnnnnnnnnnnnnnnnnnnnnnnnnnnnnnnnnnnnnnnnnnnnnnnnnnnnnnnnnnnnnnnnnnnnnnnnnnnnnnnnnnnnnnnnnnnnnnnnnnnnnnnnnnnnnnnnnnnnnnnnnnnnnnnnnnnnnnnnnnnnnnnnnnnnnnnnnnnnnnnnnnnnnnnnnnnnnnnnnnnnnnnnnnnnnnnnnnnnnnnnnnnnnnnnnnnnnnnnnnnnnnnnnnnnnnnnnnnnnnnnnnnnnnnnnnnnnnnnnnnnnnnnnnnnnnnnnnnnnnnnnnnnnnnnnnnnnnnnnnnnnnnnnnnnnnnnnnnnnnnnnnnnnnnnnnnnnnnnnnnnnnnnnnnnnnnnnnnnnnnnnnnnnnnnnnnnnnnnnnnnnnnnnnnnnnnnnnnnnnnnnnnnnnnnnnnnnnnnnnnnnnnnnnnnnnnnnnnnnnnnnnnnnnnnnnnnnnnnnnnnnnnnnnnnnnnnnnnnnnnnnnnnnnnnnnnnnnnnnnnnnnnnnnnnnnnnnnnnnnnnnnnnnnnnnnnnnnnnnnnnnnnnnnnnnnnnnnnnnnnnnnnnnnnnnnnnnnnnnnnnnnnnnnnnnnnnnnnnnnnnnnnnnnnnnnnnnnnnnnnnnnnnnnnnnnnnnnnnnnnnnnnnnnnnnnnnnnnnnnnnnnnnnnnnnnnnnnnnnnnnnnnnnnnnnnnnnnnnnnnnnnnnnnnnnnnnnnnnnnnnnnnnnnnnnnnnnnnnnnnnnnnnnnnnnnnnnnnnnnnnnnnnnnnnnnnnnnnnnnnnnnnnnnnnnnnnnnnnnnnnnnnnnnnnnnnnnnnnnnnnnnnnnnnnnnnnnnnnnnnnnnnnnnnnnnnnnnnnnnnnnnnnnnnnnnnnnnnnnnnnnnnnnnnnnnnnnnnnnnnnnnnnnnnnnnnnnnnnnnnnnnnnnnnnnnnnnnnnnnnnnnnnnnnnnnnnnnnnnnnnnnnnnnnnnnnnnnnnnnnnnnnnnnnnnnnnnnnnnnnnnnnnnnnnnnnnnnnnnnnnnnnnnnnnnnnnnnnnnnnnnnnnnnnnnnnnnnnnnnnnnnnnnnnnnnnnnnnnnnnnnnnnnnnnnnnnnnnnnnnnnnnnnnnnnnnnnnnnnnnnnnnnnnnnnnnnnnnnnnnnnnnnnnnnnnnnnnnnnnnnnnnnnnnnnnnnnnnnnnnnnnnnnnnnnnnnnnnnnnnnnnnnnnnnnnnnnnnnnnnnnnnnnnnnnnnnnnnnnnnnnnnnnnnnnnnnnnnnnnnnnnnnnnnnnnnnnnnnnnnnnnnnnnnnnnnnnnnnnnnnnnnnnnnnnnnnnnnnnnnnnnnnnnnnnnnnnnnnnnnnnnnnnnnnnnnnnnnnnnnnnnnnnnnnnnnnnnnnnnnnnnnnnnnnnnnnnnnnnnnnnnnnnnnnnnnnnnnnnnnnnnnnnnnnnnnnnnnnnnnnnnnnnnnnnnnnnnnnnnnnnnnnnnnnnnnnnnnnnnnnnnnnnnnnnnnnnnnnnnnnnnnnnnnnnnnnnnnnnnnnnnnnnnnnnnnnnnnnnnnnnnnnnnnnnnnnnnnnnnnnnnnnnnnnnnnnnnnnnnnnnnnnnnnnnnnnnnnnnnnnnnnnnnnnnnnnnnnnnnnnnnnnnnnnnnnnnnnnnnnnnnnnnnnnnnnnnnncaggtggcccacctccgtgcccacgtgctcatccacactggtgagaagccctatccctgtgaaatctgtggcacccgtttccggcaccttcagactctgaagagccatctgcgaatccacacgggagagaaaccttacca

SEQ ID NO: 18881 - DNA, 1193 bp, Macaca Mulatta
  misc_feature (1)...(1193): n = A,T,C or G
gtactccttccaggacgaggaggacatgttcatggtagtggacctgcttctgggtggggacctgcgctaccacctgcagcagaacgtgcagttctctgaggacacggtgaggctgtacatctgcgagatggcgctggcccttgactacctgtgtggccagcacatcatccannnnnnnnnnnnnnnnnnnnnnnnnnnnnnnnnnnnnnnnnnnnnnnnnnnnnnnnnnnnnnnnnnnnnnnnnnnnnnnnnnnnnnnnnnnnnnnnnnnnnnnnnnnnnnnnnnnnnnnnnnnnnnnnnngctccagagatcttccactcttttgtcaacggcggaactggctactccttcgaggtggactggtggtcattgggggtgatggcctatgaactgctgcgagnnnnnnnnnnnnnnnnnnnnnnnnnnnnnnnnnnnnnnnnnnnnnnnnnnnnnnnnnnnnnnnnnnnnnnnnnnnnnnnnnnnnnnnnnnnnnnnnnnnnnnnnnnnnnnnnnnnnnnnnnnnnnnnnnnnnnnnnnnnnnnnnnnnnnnnnnnnnnnnnnnnnnnnnnnnnnnnnnnnnnnnnnnnnnnnnnnnnnnnnnnnnnnnnnnnnnnnnnnnnnnnnnnnnnnnnnnnnnnnnnnnnnnnnnnnnnnnnnnnnnnnnnnnnnnnnnnnnnnnnnnnnnnnnnnnnnnnnnnnnnnnnnnnnnnnnnnnnnnnnnnnnnnnnnnnnnnnnnnnnnnnnnnnnnnnnnnnnnnnnnnnnnnnnnnnnnnnnnnnnnnnnnnnnnnnnnnnnnnnnnnnnnnnnnnnnnnnnnnnnnnnnnnnnnnnnnnnnnnnnnnnnnnnctgaagaggaggcaggacctcccgagtgagcctctccccgcccctgagcccagggatgctgcggagcccgtggaggacgaggagcactccgcccttcccatgtgtggccccatctgcccctcggccgggagcggctaggccgggacgcccgtgatcctcaccccttgagctgctttggagactcggctgccagagggagggccatgggccgaggcctggcattcacgttcccacccagcagcctggctggcagtgcccacggtgcccggacacatttcacaccttgggctcgtggtggtgcaggggacaagaggctgtgggtgcgcagacacctgtggagggcan

SEQ ID NO: 18882 - DNA, 825 bp, Macaca Mulatta
ggggcctttagctgccatcttgcgtccccgcgtgtgtgcgcctaatctcagctggtccacccgagaccccttgagcaccaaccctagtcccccgcgcggccccttattcgctccgacaagatgaaagaaacaatcatgaaccaggaaaaactcgccaaactgcaggcacaagtgcgcattggtgggaaaggaactgctcgcagaaagaagaaggtggttcatagaacagccacagcagatgataaaaaacttcagttctccttaaagaagttaggggtaaacaatatctctggtattgaagaggtgaatatgtttacaaaccaaggaacagtgatccactttaacaaccctaaagttcaggcatctctggcagcgaacactttcaccattacaggccatgctgagacgaagcagctgacagaaatgctacccagcatcttaaaccagcttggcgcagatagtctgactagtttaaggagactggccgaagctctgcccaaacaatctgtggatggaaaagcaccacttgctactggagaggatgatgatgatgaagtttccagatcttgtgggagaatttttgatgaggcttccaagaatgaggcaaactgaattgagtcaactttctgaaagataaaaacttgaaaaaagttactgggagacttgctatttttatattatggaactggcttttttgaagaaataattttggtcttatgggatctggaaaaaaatctagaatctcctaattaattttttaaagccccaaggcccccttgggacacttgcagctccttttttatcaggttttttgccttaatcccc

SEQ ID NO: 18883 - DNA, 611 bp, Macaca Mulatta
ggggattttttccagggaaaaagagagttttgtcccacagtcagcaggccactagtttattaacttccagtcaccttgatttttgctaaaatgaagactctgcagtctacacttctcctgttactgtttgtgcctctgataaagccagcaccaccaactcagcaggactcacgcattatctatgattatggaacagataattttgaagaatccatatttagccaagattatgaggataaatacctggatggaaaaaatattaaggaaaaagaaactgtgataatacccaatgagaaaagtcaattacaaaaagatgaggcaataacaccattacctcccaggaaagaaaatgatgaaatgcccacgtgtctgctgtgtgtttgtttaagtggctctgtatactgtgaagaagttgacattgatactgtaccacccttgccaaagaatcagcctatctttcgcacgattcaccaaattaaaacctacctgcccaagattttgccgattcactaatctcatagacgccatttcccggacattcactgaatattcaaatacgtacttctagaacttacctaccaaaaattatcactctctcaacgcccccccct

SEQ ID NO: 18884 - DNA, 604 bp, Macaca Mulatta
cttgtctccctcgatccaaaggccgttttctcgaggggagggcaggcccggcctggagggtgctgtggggctgtcttgcccaggccctcctgggaggggagaggcattgctgccaggggtgaggccgtgcctcaggcctccctgaaaccaaaggggaaggcaggggtgggcccgcggcggaagccggctccccaaccaaaatgctgcaccaaagctcgggtgccgcgggcacggccactgcagcctctgcccagcctggccctggcgaggggcgggcgggcgctgccaggctggtgcttctcaacgcacttgcttccggaggctgtgccccggcgcctggaacctgaggtgggaggaccagctggtgtcgccctgctcggccctgggccctgttgcgtggggcgggtgggcacagggcttcctgcctctgtgctccgccacccggcaagcagtcggagacaaaacgccttaaagccccggcgcagccccgcgggtgtatgtgcaggggcctggggcggccctggactgacgggcggtcccccagcggggtgccctggaggctgctgggcagagtgaagcagcttggggccgtgcctagggtggt

SEQ ID NO: 18885 - DNA, 820 bp, Macaca Mulatta
ggggctctggagctacttgctggagcccactcccattctgtgaattgccttccataaatctgtgctttctttactccgttcttctgactcagttcctttgttgctttgtgtttccttgttcttttgttacttcgtgtgtttgttcaattctttgttcaacccaccaagagcctggacaactcatctccaagaccttctatctggtaacagctgtaggagctggagctggcagcctggagacaagcgtcctaacaagccctggctccctacagtgaagggtcaggagaggtggggctctagaggggcctgggcccaagctcatacgatccggccctgtcctcctggctgacaaggagggtgggccaccagcagtggacgaggtgctggatgaggctgtgcccgagtaccgggcgccagggaggaagagcctcttggagatccggcagctggacccggacgacaggagcctggccgagtacaagcgggcgctgctggggcccctgccaccggccgtggaacccaagcctgccccatggtgcaggggacccaggcctaaccctccttgtccggagcaaggctccagggccccgtcgtccttggatcttcccaggggaactgggctggttcctgaaaggaccccgtgggtttggtcgccaaaaggaagggcgctgcatttcaccacgcgcaaaaacacccccttccaggtcgcccaaggaaaaactacccgcgcgcccgcccaaaatgccgtgggcccacgcgagcacccgcgggcggacgcggggaccagggtaccacaacgcgcctcccagttggtgggccg

SEQ ID NO: 18886 - DNA, 96 bp, Macaca Mulatta
gatagatcactactgtttgaggtgttttacatactttattgataatgttatcaacaacccagagaggtagttattactctgcatcttagagtaatc

SEQ ID NO: 18887 - DNA, 1117 bp, Macaca Mulatta
  misc_feature (1)...(1117): n = A,T,C or G
ggggcgcttccgccatctttccagcctcagtcggacgggcgcggagacgcttctggaaggaacgccgcgatggctgcgcagggagagccccaggtccagttcaaacttgtattggttggtgatggtggtactggaaaaacgaccttcgtgaagcgtcatttgactggtgaatttgagaagaagtatgtagccaccttgggtgttgaggttcatcccctagtgttccacaccaacagaggacctattaaattcaatgtatgggacacagccggccaggagaaattcggcggactgagagatggctattatatccaagcccagtgtgccatcatcatgtttgacgtaacatcgagagttacttacaagaacgtgcctaactggcatagagatctggtgcgagtgtgtgaaaacatccccattgtgttgtgtggtaacaaagtggacattaaggacaggaaagtgaaggcgaaatccattgtcttccaccgaaagaagaatcttcagtactacgacatttctgccaaaagtaactacaactttgaaaagcccttcctctggctcgctaggaagctcattggagaccctaacttggaatttgttgccatgcctgctcttgccccaccggaagttgtcatggacccagctttggcagcgcagtatgagcacgacttagaggttgctcagacaactgctctcccggatgaggatgatgacctgtgagaatggagctggagcccagcggtccagaagtctagttttataggcagctgtcctgtgatgtcagcggtgcggcgtgtgtgccacttcattattatctagctgagcggaacatgtgcttcatctgtgggatgctgaaggagatgagtgggcttacggagtgaatgtggcagtttaaaaaataccttcattgtttggacctgcatatttagttgttttggaacgcggttgattccttgagtttcaaatataagactgctacagtcacatcacaatattcagtggtgaaatcttgttttgttactgtcattcccattccttttcgtttagaatcagaataaagttgtatttcaaatatctacnaannnnnnnnnnnnnnnnnnnnnnnnaaacatgtcgg

SEQ ID NO: 18888 - DNA, 332 bp, Macaca Mulatta
  misc_feature (1)...(332): n = A,T,C or G
gctacgcgtcggcggcagagcgcaggcctcgtgccgttccgtccatcacggcggccgcggtggcgtcctggagccctcctcagnncagtgctgaagctgctgaaagatggcagaagaagtggtggtagtagccaaatttgattatgtggcccaacaagaacaagagttggatatcaagaaaaatgagagattatggcttctggatgattctaagtcctggtggcgagttcgaaattccatgaataaaacaggttttgtgccttctaactatgtggaaaggaaaaatagtgctcggaaagcatctattgtaaaaaacctaaaggataccttag

SEQ ID NO: 18889 - DNA, 360 bp, Macaca Mulatta
acttatatttggcgtgttccaaatggacttcatattctgttccttattgtgtggtatcatagcacaatgacagatttcctcaaggaccgccatctcagatgggttcacctatggggagtagaacaggttctgaaacccctcaagcaccaatgagtggtgtaggtcctgtgagtggtggtcctggtggctttggtattttaagtcaagggggcaactttgaaggccctaataagcgtcgtagatattaaacattcgttcattcctggctatctagaaaaaaaagtcagtggtatgcctttatacttttacctgttacctggaagaaatggttttattgttaatgtatgtagacttaaaagc

SEQ ID NO: 18890 - DNA, 778 bp, Macaca Mulatta
  misc_feature (1)...(778): n = A,T,C or G
ggnggaaaagcatcattttaccaaacataccaagaacgaaaacttcaaggatgatgttagaaaaaaatgtgatttaactagaatttgctgtctgatgttagcaaatcatggaatgttctgagtccccgagggtttactgtgaagtgctgaggacagtgttgacgactaactcgttttcctagatggaaacggagacattgacccctccctccatgtggtaaaccactccagaatggccaccaggcttcccagagttctatggtcttcttcccaagagagtttttaattgtaaatgcatacttgggaaggacttagacttttaaactgttttttgcttttgcttttccctgactccctttgcttggagtcagctgcacaccagtagtatggcatgctacgatcaggttctgtcctgaaagctttgcctctttcttggcaaagtttctggtatggtcaagcttgtaaataactttttttacattttaatcttttccattaattaagaggttgaaaagaagtgcagtgtaagaaaacccagcattttaattacttgcaaattaagttaccacagactctgtagtgtgtaaatgttgacaaggaattggatcacaatcatgtagcagaatggcacccagaccactgcccaccagtgacggacacccacgtggcagatcatgatttccagcccaccgagccagcatttgaaccttgtacaattaaactttcagttatgaatttccccatcaaccatttttcttttgcccctgttttggtagca

SEQ ID NO: 18891 - DNA, 105 bp, Macaca Mulatta
gccagaaggagtgaccattactaacatggcttgagtataattctgacattggaaatttataacccattaaatacctgtaaattgtgtgaatttcagaaatcctta

SEQ ID NO: 18892 - DNA, 860 bp, Macaca Mulatta
  misc_feature (1)...(860): n = A,T,C or G
ggggtctcttgctgcagcaacgggagtgggagcaccaggatcccgggctcggaacccgactacacggattgttttaagaaaatggcagacaaaccagacatgggggaaatcgccagcttcgataaggccaagctgaagaaaacggagacgcaggagaagaacaccctgccgaccaaagagaccattgagcaggagaagcggagtgaaatttcctaaaatcctggaggatttcctacccccgtcatcttcgagaccccagtcgtgatgtggaggaagagccacctgcaagatggacacgagccacaagctgcactgtgaacctgggcactccgcgccgatgccaccggcctgtgggtctctgaagggacccccccaatcggactgccaaattctccggtttgccctggaatattatagaaaattatttgtatgaataatgaaaataaaacacacttcgtggcgaataagatgagaaaatagtaagacgtggcgggcagctatcagcccacgaagaaaagctttctagaccatttctattgggcacccggggccccaaataggtaaatgtaaaaatgggtcaatgacaaggtttcctcaggcgaatcccaggaacatggactatggggcttggatattctnnnnnnnnnnnnnnnnnnaccccgggcggataactcgaagtgagttgagagaaaaaaaaccaagaagggggtatacagaaggagaagtttcctggggatctaatagcaacggagaattacatacggaaaactctagagcatatgaaaatattgcgccccggcaacaatcgccaacacttatcgtctatnagtgagcttcatccatacctacaggcggctatc

SEQ ID NO: 18893 - DNA, 414 bp, Macaca Mulatta
cagaggccccattcctttcaccgtttcccactcagttttcagccagggcggacccacaggagagcagcagctagagctcacgtgcttcctgggcaccccacccctcggggcctagccccctgcctgtcacccaccgtgccagtgtccacctgtcctcctcctcttcttctcctcccctgggagtcccatgttaattcctgaccctacttcagagctcactcacccagtgggttcagccagccacggtgactccagggcctgtagacaggaacgtgctggcacagagaaaagcggggaccatatcatcctccccagaaccctctcctgcttcctgccttccccctctccctgaagggcaggtccaggccaggtgagcctgtgagaagctcaggagcctggctccatctgagagca

SEQ ID NO: 18894 - DNA, 916 bp, Macaca Mulatta
  misc_feature (1)...(916): n = A,T,C or G
gctcctgcaggcggtggcgctggtgctggcggccctggtcttcctgcccaacgtggggctttgggcgctgtaccgcgagcggcagcccgnnnnnnnnnnnnnnnnnnnnnnnnnnnnnnnnnnnnnnnnnnnnnnnnnnnnnnnnnnnnnnnnnnnnnnnnnnnnnnnnnnnnnnnnnnnnnnnnnnnnnnnnnnnnnnnnnnnnnnnnnnnnnnnnnnnnnnnnnnnnnnnnnnnnntaggaaatggagaacaaggaagaccttaccccatgaccgatgctgagagagtggatcaggcgtaccgagaaaatggatttaacatctacgtcagtgacaaaatctccttgaatcgctctctcccagatatccggcacccaannnnnnnnnnnnnnnnnnnnnnnnnnnnnnnnnnnnnnnnnnnnnnnnnnnnnnnnnnnnnnnnnnnnnnnnnnnnnnnnnnnnnnnnnnnnnnnnnnnnnnnnnnnnnnnnnnnnnnnnnnnnnnnnnnnnnnnnnnnnnnnnnnnnnnnnnnnnnnnnnnnnnagagcacctgaagaagcctcttgaagactacatggctcttttccccagcgtgcgaattcttcgaaccaagaaacgggaagggctgataaggacccgaatgctgggggcctcagtggcaactggggatgtcatcacgttcttggattcacactgtgaagccaatgtcaactggcttccccccttgcnaccgcattgctcggaaccgcaagaccattgtgtgcccgatgattgacgtgattgaccatgatgactttcggtacgagacacaggcaggggatgccatgcggggagcctttgactgggagatgtactacaagcggatcccaatccctccagaactgcagaaagctgaccccagcgacccatttgagt

SEQ ID NO: 18895 - DNA, 780 bp, Macaca Mulatta
  misc_feature (1)...(780): n = A,T,C or G
ggggacaggcttgcagcttcctcctcctcggcctcacctctttttcagagtccagaccaaaattgaaaaaatggttgacctcacccagataatggacgatgaagtattcatggcttttgcctcctatgcaacaattattctttcaaaaatgatgcttatgggtgctacaactgcattctatanaatgacaagaaaggtttttgccaatccagaagactgtgtaacatttggcaaaggagaaaatgccaagaagtatcttcgaacagatgacagagtagaacgtgtacgcagagcccacctgaatgaccttgaaaatattgttccatttcttggaattggcctcctgtattccttgagtggtcccgacctctctacagccatcctgcacttcagactctttgtcggagcacggatctaccacaccatttcatatttgacaccccttccccacccaaataaaggtttgagtttttttattggatatggagttacctctttccatggcttacgggttgcttgaaaaaaaaattgtaccctgtataagagaaatcatccaaactcctttatcccagttgggatttattaaagaatttctcttactttccaaatttaataaatatagatacattttccttagggtttttttgggggcgggagtaggtaaactctaagggaaattcaacacacacctggcgggttaaaacaccccggtttttttggaaatatattcatcccatttagtccccaaattatatccccttcgtgaatatatccttgggt

SEQ ID NO: 18896 - DNA, 530 bp, Macaca Mulatta
tcgtgggcggccggtggctcagcgcggaggagctgggatcgcggtgggcccgggacgtgcgcgcttggtgcacgaacctgaaggggagctccaaggggcctgggtcgccagggctgctgctgcaattctcagagcccggcgaggggcccgcgagtcactggctcaggccgtcccagggccccgggcgcacccggtggccgctgctcagcggagggagcgcggcggcgcggggtctcggagacagcttttctcccggaagcattcctcgggccgcaggcggaaagtgggggccggagcggcagcaggccgggtcctctccgcaggtcggcaccatgcgacctgcagccctacgcggggccctgctgggctgcctctacctggcgtagctatgcctgggcggtgcggacaagcgcctgcgtgacaaccatgagtggaaaaagctgatcatgggacagcacatggctgagacagtatgcgagaaaattcaaaacgactgtagagaccctccggaatagctggacaaaacattg

SEQ ID NO: 18897 - DNA, 168 bp, Macaca Mulatta
gctatccaggaattcctggaacgaaaggtactccgggagaaatgggtcccccaggactgggccttcccggcttcaaaggccagcgtggtttccctggagatgccggcttacctggaccaccaggcttcccgggccctcctggccccgcagggaccccaggacaaatag

SEQ ID NO: 18898 - DNA, 703 bp, Macaca Mulatta
gggaaggaactggtagtgccgatggcaatgatggttatgaagctgatgatgctgagggtggtgatgggactgatccaggtacagaaacagaagaaagtatgggtggaggtgaaggtaatcagagagctgctgattcgcaaaacattggtgaaggaaatacaagtgctgcagagtcttccttttctcaggaagtttctagagaacaacagccatcatcagcatctgaaagacaggcccctcgagcacctcagtcacctagacgcccaccacatccacttcccccaagactgaccattcatgctccacctcaggagttgggaccaccagttcagagaattcagatgacccgaaggcagtctgtaggacgtgggcttcagttgactccaggaataggtggcatgcaacagcatttttttgatgatgaagacagaacagttccaagtactccaactcttgtggtgccacatcgtactgatggatttgctgaagcaattcattcaccacaggttgctggtgtccctagattccggtttgggccacctgaagatatgccacaaacaagttctagtcactctgatcttggccagcttgcttctcaaggaggtttaggaatgtacgaaacacccctattcctagctcatgaagaggagtcagggtggccgaagtgttccccacctactccaacttacaagtagcagcccct

SEQ ID NO: 18899 - DNA, 957 bp, Macaca Mulatta
ggggcctttatcatctgctggactcctggattggttttgttacttctagacgtgtgttgtccgcagtgcgacgtgctggcctatgagaaattcttccttctccttgctgaattcaactctgccatgaaccccatcatttactcctaccgcgacaaagaaatgagcgccacctttaggcagatcctctgctgccaacgcagtgagaaccccagcggccccacagaaggctcagaccgctcggcttcctccctcaaccacaccatcttggctggagttcacagcaatgaccactctgtggtttagaacggaaactgagatgaggaaccagccgtcctctcttggaggataaacagtctccccctacccaattgccagggcaaggtggggtgtgagagaggagaaatgtcaactcatgtacttaaacactaaccaatgacagtatttgttcctaggccccacaagacttgatatatattgaaaattagcttatgtgacaaccctcaccttgatccccatcccttctgaaagtaggaagtggagctcttgcaatggaattcaagaacagactctggagtgtccatttagactacactaactagactttaaaaagattttgtgtggtttggtgcaagtcaggataaattctgactagttgaatccacagcttcatttatatacagccttcccttttttatttttaaaggatacgtttcacttaataaacatgtttatgcctatcagcatgtttgtgatggatgagactatggactgtttttaaactaccataattccattttttcccttacataggaaaactgtaagctggaattatcttttgtttagaaagcatgcatgtaatgtatgtatgcagtatgccttacttaaaagattaaaaggatactaattttaaattcttctaggaaatagaacctaaacttcaaagccagtatttgttta

SEQ ID NO: 18900 - DNA, 1385 bp, Macaca Mulatta
  misc_feature (1)...(1385): n = A,T,C or G
caagagttccttgccaatgtctacgtcttagccgtgcttctgttccttgccctcctactgcaaaggacatttctgcaagcatcctactatgtggccattgaaactggaattaacttgagaggagcaatacagnnnnnnnnnnnnnnnnnnnnnnnnnnnnnnnnnnnnnnnnnnnnnnnnnnnnnnnnnnnnnnnnnnnnnnnnnnnnnnnnnnnnnnnnnnnnnnnnnnnnnnnnnnnnnnnnnnnnnnnnnnnnnnnnnnnnnnnnnnnnnnnnnnnnnnnnnnnnnnnnnnnnnnnnnnnnnnnnnnnnnnnnnnnnnnnnnnnnnnnnnnnnnnnnnnnnnnnnnnnnnnnnnnnnnnnnnnnnnnnnnnnnnnnnnnnnnnnnnnnnnnnnnnnnnnnnnnnnnnnnnnnnnnnnnnnnnnnnnnnnnnnnnnnnnnnnnnnnnnnnnnnnnnnnnnnnnnnnnnnnnnnnnnnnnnnnnnnnnnnnnnnnnnnnnnnnnnnnnnnnnnnnnnnnnnnnnnnnnnnnnnnnnnnnnnnnnnnnnnnnnnnnnnnnnnnnnnnnnnnnnnnnnnnnnnnnnnnnnnnnnnnnnnnnnnnnnnnnnnnnnnnnnnnnnnnnnnnnnnnnnnnnnnnnnnnnnnnnnnnnnnnnnnnnnnnnnnnnnnnnnnnnnnnnnnnnnnnnnnnnnnnnnnnnnnnnnnnnnnnnnnnnnnnnnnnnnnnnnnnnnnnnnnnnnnnnnnnnnnnnnnnnnnnnnnnnnnnnnnnnnnnnnnnnnnnnnnnnnnnnnnnnnnnnnnnnnnnnnnnnnnnnnnnnnnnnnnnnnnnnnnnnnnnnnnnnnnnnnnnnnnnnnnnnnnnnnnnnnnnnnnnnnngcccctcaaggtcgtgaaccgcaagcgtccagcccgggaggattgttggggcctcaccggcccactgcagagcctggtacccagtgcagagggcgatgctgacaactcctgtgtccannnnnnnnnnnnnnnnnnnnnnnnnnnnnnnnnnnnnnnnnnnnnnnnnnnnnnnnnnnnnnnnnnnnnnnnnnnnnnnnnnnnnnnnnnnnnnnnnnnnnnnnnnnnnnnnnnnnnnnnnnnnnnnnnnnnnnnnnnnnnnnnnnnnnnnnnnnnnnnnnnnnnnnnnnnnnnnnnnnnnnnnnnnnnnnnnnnnnnnnnnnnnnnnnnnnnnnnnnnnnnnnnnnnnnnnnnnnnnnnnnnnnnnnnnnnagagaggccctgtggcctatgcttcnnnnnnnnnnnnnnnnnnnnnnnnnnnnnnnnnnnnnnnnnnnnnnnnnnnnnnnnnnnnnnnnnnnnnnnggtacaagatggtcattgaggcctgctctctgcagccagaca

SEQ ID NO: 18901 - DNA, 1896 bp, Macaca Mulatta
  misc_feature (1)...(1896): n = A,T,C or G
ggacacatgttcaaagagcataattaactttttaaaagaagctagnnnnnnnnnnnnnnnnnnnnnnnnnnnnnnnnnnnnnnnnnnnnnnnnnnnnnnnnnnnnnnnnnnnnnnnnnnnnnnnnnnnnnnnnnnnnnnnnnnnnnnnnnnnnnnnnnnnnnnnnnnnnnnnnnnnnnnnnnnnnnnnnnnnnnnnnnnnnnnnnnnnnnnnnnnnnnnnnnnnnnnnnnnnnnnnnnnnnnnnnnnnnnnnnnnnnnnnnnnnnnnnnnnnnnnnnnnnnnnnnnnnnnnnnnnnnnnnnnnnnnnnnnnnnnnnnnnnnnnnnnnnnnnnnnnnnnnnnnnnnnnnnnnnnnnnnnnnnnnnnnnnnnnnnnnnnnnnnnnnnnnnnnnnnnnnnnnnnnnnnnnnnnnnnnnnnnnnnnnnnnnnnnnnnnnnnnnnnnnnnnnnnnnnnnnnnnnnnnnnnnnnnnnnnnnnnnnnnnnnnnnnnnnnnnnnnnnnnnnnnnnnnnnnnnnnnnnnnnnnnnnnnnnnnnnnnnnnnnnnnnnnnnnnnnnnnnnnnnnnnnnnnnnnnnnnnnnnnnnnnnnnnnnnnnnnnnnnnnnnnnnnnnnnnnnnnnnnnnnnnnnnnnnnnnnnnnnnnnnnnnnnnnnnnnnnnnnnnnnnnnnnnnnnnnnnnnnnnnnnnnnnnnnnnnnnnnnnnnnnnnnnnnnnnnnnnnnnnnnnnnnnnnnnnnnnnnnnnnnnnnnnnnnnnnnnnnnnnnnnnnnnnnnnnnnnnnnnnnnnnnnnnnnnnnnnnnnnnnnnnnnnnnnnnnnnnnnnnnnnnnnnnnnnnnnnnnnnnnnnnnnnnnnnnnnnnnnnnnnnnnnnnnnnnnnnnnnnnnnnnnnnnnnnnnnnnnnnnnnnnnnnnnnnnnnnnnnnnnnnnnnnnnnnnnnnnnnnnnnnnnnnnnnnnnnnnnnnnnnnnnnnnnnnnnnnnnnnnnnnnnnnnnnnnnnnnnnnnnnnnnnnnnnnnnnnnnnnnnnnnnnnnnnnnnnnnnnnnnnnnnnnnnnnnnnnnnnnnnnnnnnnnnnnnnnnnnnnnnnnnnnnnnnnnnnnnnnnnnnnnnnnnnnnnnnnnnnnnnnnnnnnnnnnnnnnnnnnnnnnnnnnnnnnnnnnnnnnnnnnnnnnnnnnnnnnnnnnnnnnnnnnnnnnnnnnnnnnnnnnnnnnnnnnnnnnnnnnnnnnnnnnnnnnnnnnnnnnnnnnnnnnnnnnnnnnnnnnnnnnnnnnnnnnnnnnnnnnnnnnnnnnnnnnnnnnnnnnnnnnnnnnnnnnnnnnnnnnnnnnnnnnnnnnnnnnnnnnnnnnnnnnnnnnnnnnnnnnnnnnnnnnnnnnnnnnnnntccacaagaaggtgaaggcctgtaaccctcagtatgcaggggccatcgtggtccactgcagncagtgcaggtgtagggcgtacaggtacctttgtcgtcattgatgccatgctggacatgatgcatacagaacggaaggtggacgtgtatggctttgtgagccggatccgggcacagcgctgccagatggtgcaaacnnnnnnnnnnnnnnnnnnnnnnnnnnnnnnnnnnnnnnnnnnnnnnnnnnnnnnnnnnnnnnnnnnnnnnnnnnnnnnnnnnnnnnnnnnnnnnnnnnnnnnnnnnnnnnnnnnnnnnnnnnnnnnnnnnnnnnnnnnnnnnnnnnnnnnnnagaagttaacatcaatcaaaatccagaatgacaagatgcggactggaaaccttccagccaacatgaagaagaaccgtgttttacagatcattccatgaattcaacagagtgatcattccagttttttttgtcgaagagaatacagactatgtgaatgcatcctttatt

SEQ ID NO: 18902 - DNA, 476 bp, Macaca Mulatta
tagaaaataatttcaacttaggaacttctagtaagaagacttttgcatcttacatgcctcaattccaaacttgctctactcagactcataagatcatggaaaacaagatgtgtgacctaactgtgtaatttcactgaagaaaccttcagatttgtgttataatgggtcatataaagtgtaatagattactttatagttgtgggtgggagagagaaaagaaaccagagtcaaatttgaaaataattgttccaaatgaatgttgtctgtttgtcctctcttagtagtatagacaaaaaatttgagaaagccttcataagcctaccaatgttgacacgctcttctattttattcccaatctgtagcgggaaggtcccttgtttccagctagaaataagcccaatagacgccatcttttgtgaaatgtaattgttttttcagagggcgtgttgttttactgcaagtttttgttttgtacc

SEQ ID NO: 18903 - DNA, 2081 bp, Macaca Mulatta
  misc_feature (1)...(2081): n = A,T,C or G
gtgaagcatcccaacatcctacaactggtggatgtgtttgtgacccgcaaggagtactttatcttcctggagctgnggccacggggagggaggtgtttgactggatcctggaccagggctactactcggagcgagacacaagcaacgtggtacggcaggtcctggaggctgtggcctatttgcactcactcaagatcgtgcacaggaatctnnnnnnnnnnnnnnnnnnnnnnnnnnnnnnnnnnnnnnnnnnnnnnnnnnnnnnnnnnnnnnnnnnnnnnnnnnnnnnnnnnnnnnnnnnnnnnnnnnnnnnnnnnnnnnnnnnnnnnnnnnnnnnnnnnnnnnnnnnnnnnnnnnnnnnnnnnnnnnnnnnnnnnnnnnnnnnnnnnnnnnnnnnnnnnnnnnnnnnnnnnnnnnnnnnnnnnnnnnnnnnnnnnnnnnnnnnnnnnnnnnnnnnnnnnnnnnnnnnnnnnnnnnnnnnnnnnnnnnnnnnnnnnnnnnnnnnnnnnnnnnnnnnnnnnnnnnnnnnnnnnnnnnnnnnnnnnnnnnnnnnnnnnnnnnnnnnnnnnnnnnnnnnnnnnnnnnnnnnnnnnnaaggctgatggaggtggacctttccagcggatcactgcagaagaggccatctcccatgagtgnggatttctggcaatgctgcttctgataagaacatcaaggatggtgtctgtgcccagattgaaaagaactttgccagggccaagtggaagnnnnnnnnnnnnnnnnnnnnnnnnnnnnnnnnnnnnnnnnnnnnnnnnnnnnnnnnnnnnnnnnnnnnnnnnnnnnnnnnnnnnnnnnnnnnnnnnnnnnnnnnnnnnnnnnnnnnnnnnnnnnnnnnnnnnnnnnnnnnnnnnnnnnnnnnnnnnnnnnnnnnnnnnnnnnnnnnnnnnnnnnnnnnnnnnnnnnnnnnnnnnnnnnnnnnnnnnnnnnnnnnnnnnnnnnnnnnnnnnnnnnnnnnnnnnnnnnnnnnnnnnnnnnnnnnnnnnnnnnnnnnnnnnnnnnnnnnnnnnnnnnnnnnnnnnnnnnnnnnnnnnnnnnnnnnnnnnnnnnnnnnnnnnnnnnnnnnnnnnnnnnnnnnnnnnnnnnnnnnnnnnnnnnnnnnnnnnnnnnnnnnnnnnnnnnnnnnnnnnnnnnnnnnnnnnnnnnnnnnnnnnnnnnnnnnnnnnnnnnnnnnnnnnnnnnnnnnnnnnnnnnnnnnnnnnnnnnnnnnnnnnnnnnnnnnnnnnnnnnnnnnnnnnnnnnnnnnnnnnnnnnnnnnnnnnnnnnnnnnnnnnnnnnnnnnnnnnnnnnnnnnnnnnnnnnnatggccaggagggtgggagagtggatgaggggcttctcactgtacatagagtcactggcatgatgccctcgctcccccatgcccccacatcccagtggggcatacttaggggtcacgggagagcagtctcgtctcctgtgtgtatgtgtgtgagtggtgggcaggccagtggcagggccagccccagcccctgcatggattccttgtggcttttctgtcttttgctagcttcaccagtttctgttccttgtgggatgctgctctagggatactcagggggctcctgctctccttccccttcccttcttgcttcaccattcccctaggcaggccctgcaggtcccacactctcccaggccctaaacttgggcggccttgccctgagagctggtcctccagcgaggccctgtcagcggtcttaggctcctgcacatgaaggtgtgtgcctgtggtgtgtgggctgctctaggagcggatacaggctggtatagaggatgcagaaaggtagggcagtatgtttaagtccagactgggcacatggctagggacactgctctctagctgtgggggtcctcaggagtggagagaatgagtaggaaggcagaagcttccatatttgtccctcctaagaccctgttatttgtgttatttcctgcccttctgagtcctgcaatgggctgccctgtaccttgaacctcatgagcctctaagtaaagggaggaacaattaggatgtggcaatg

SEQ ID NO: 18904 - DNA, 648 bp, Macaca Mulatta
gcaacaggtcatgttcaatttcttcaaagttttagcataaaaataatgagagccagaagtggggctggggcttggggggacaaaggtggcatgtgaacaaggctggcacacaggcctcgccctcctctgcctcagattcccaggtgggcgagtgagggtgaatggggcttctggtagcacctcagctcccctcagcctgttctccttccagacccagagagctgagaagagtggctgcgaggctcagggcagagttctctgcctttcagcaacagccctaactctgctccgcttgcttggcctcagaaaggtgccgtgagctctcctgctgtccctgggccgccctggctctgctgtgttcagatggtcaggctactgccagctggggccttgctgctctgaagtcccctgcggagggcccagtcctgtgtgggcactgctgggctgtcgccagcctgggtgcaggagggctgttctagctccagtggcacccatagccaggtcaactggggccctttcccaccccagcaggtgctgtggcctgggccagttcctgcctcacaggccagctgtgaggagtatgggaatagccctcccggcctggtgccagctaaaggggttgacacggtgcagggaggagacatagcc

SEQ ID NO: 18905 - DNA, 3224 bp, Macaca Mulatta
  misc_feature (1)...(3224): n = A,T,C or G
gattcacgtgtttttcaagggctaacggaaatgctgagatctaaaagcatgtttattcctgccaaggcctgacaatgaaacttcaagtcaaattancttcaggctgccgggctcactctgctgctgcgtctggtctggcgtctgctgagaagatcctncctcttctaccctgctctgcacctgtgccagactgccggctggctgagggtgggggtctccacggtggtcccagctcccaaggaggttgcagannnnnnnnnnnnnnnnnnnnnnnnnnnnnnnnnnnnnnnnnnnnnnnnnnnnnnnnnnnnnnnnnnnnnnnnnnnnnnnnnnnnnnnnnnnnnnnnnnnnnnnnnnnnnnnnnnnnnnnnnnnnnnnnnnnnnnnnnnnnnnnnnnnnnnnnnnnnnnnnnnnnnnnnnnnnnnnnnnnnnnnnnnnnnnnnnnnnnnnnnnnnnnnnnnnnnnnnnnnnnnnnnnnnnnnnnnnnnnnnnnnnnnnnnnnnnnnnnnnnnnnnnnnnnnnnnnnnnnnnnnnnnnnnnnnnnnnnnnnnnnnnnnnnnnnnnnnnnnnnnnnnnnnnnnnnnnnnnnnnnnnnnnnnnnnnnnnnnnnnnnnnnnnnnnnnnnnnnnnnnnnnnnnnnnnnnnnnnnnnnnnnnnnnnnnnnnnnnnnnnnnnnnnnnnnnnnnnnnnnnnnnnnnnnnnnnnnnnnnnnnnnnnnnnnnnnnnnnnnnnnnnnnnnnnnnnnnnnnnnnnnnnnnnnnnnnnnnnnnnnnnnnnnnnnnnnnnnnnnnnnnnnnnnnnnnnnnnnnnnnnnnnnnnnnnnnnnnnnnnnnnnnnnnnnnnnnnnnnnnnnnnnnnnnnnnnnnnnnnnnnnnnnnnnnnnnnnnnnnnnnnnnnnnnnnnnnnnnnnnnnnnnnnnnnnnnnnnnnnnnnnnnnnnnnnnnnnnnnnnnnnnnnnnnnnnnnnnnnnnnnnnnnnnnnnnnnnnnnnnnnnnnnnnnnnnnnnnnnnnnnnnnnnnnnnnnnnnnnnnnnnnnnnnnnnnnnnnnnnnnnnnnnnnnnnnnnnnnnnnnnnnnnnnnnnnnnnnnnnnnnnnnnnnnnnnnnnnnnnnnnnnnnnnnnnnnnnnnnnnnnnnnnnnnnnnnnnnnnnnnnnnnnnnnnnnnnnnnnnnnnnnnnnnnnnnnnnnnnnnnnnnnnnnnnnnnnnnnnnnnnnnnnnnnnnnnnnnnnnnnnnnnnnnnnnnnnnnnnnnnnnnnnnnnnnnnnnnnnnnnnnnnnnnnnnnnnnnnnnnnnnnnnnnnnnnnnnnnnnnnnnnnnnnnnnnnnnnnnnnnnnnnnnnnnnnnnnnnnnnnnnnnnnnnnnnnnnnnnnnnnnnnnnnnnnnnnnnnnnnnnnnnnnnnnnnnnnnnnnnnnnnnnnnnnnnnnnnnnnnnnnnnnnnnnnnnnnnnnnnnnnnnnnnnnnnnnnnnnnnnnnnnnnnnnnnnnnnnnnnnnnnnnnnnnnnnnnnnnnnnnnnnnnnnnnnnnnnnnnnnnnnnnnnnnnnnnnnnnnnnnnnnnnnnnnnnnnnnnnnnnnnnnnnnnnnnnnnnnnnnnnnnnnnnnnnnnnnnnnnnnnggccccagacagactaaagctgcccgcctggtgcatggctgaggtgacacaaagacctacctggatgcagctgccgtgctgctggacggccgcgactggagcccgtgcccctccctgcccgtgcttcacgtgactcttggcctctctgctgctgtgttggcagaaccctgggtgggcgcacccggaggaggagcagcggctgtgtcgtcctgtgcaccctacgtgctgtgtgctgtttgcatggcagggctccagctgccttcagccctgggacgtctcctcagggcagcgggacagacttggcgctgcccgggaagtccaacaggcagcatttctttggggtgggacttgccctgagcttggagccgccaccaggaggactcgcccgttctgactccacctgtgcagccagggccaccccaggagagtgtccaggtgggctggctgtccctggctgcagaccccgagctggtcctgggccagccgcacctctgaaggtttcctgtgtgctgtgctgtgcaggcctcatccctgactgagcttggctctgggtccaacccccctttcccttcaggagacccacaggaggccccggcccattccctccagcagtgcaatgaactgtcatgctgtggaccgtcaaccgagctctgcttctcggtgtgtggcaggtgtcccaggaggaagacgccgtgtgaccacatgggcagcctgttgttcacaaagtcgaagcctcgttttcctggtctcgactnnnnnnnnnnnnnnnnnnnnnnnnnnnnnnnnnnnnnnnnnnnnnnnnnnnnnnnnnnnnnnnnnnnnnnnnnnnnnnnnnnnnnnnnnnnnnnnnnnnnnnnnnnnnnnnnnnnnnnnnnnnnnnnnnnnnnnnnnnnnnnnnnnnnnnnnnnnnnnnnnnnnnnnnnnnnnnnnnnnnnnnnnnnnnnnnnnnnnnnnnnnnnnnnnnnnnnnnnnnnnnnnnnnnnnnnnnnnnnnnnnnnnnnnnnnnnnnnnnnnnnnnnnnnnnnnnnnnnnnnnnnnnnnnnnnnnnnnnnnnnnnnnnnnnnnnnnnnnnnnnnnnnnnnnnnnnnnnnnnnnnnnnnnnnnnnnnnnnnnnnnnnnnnnnnnnnnnnnnnnnnnnnnnnnnnnnnnnnnnnnnnnnnnnnnnnnnnnnnnnnnnnnnnnnnnnnnnnnnnnnnnnnnnacagacgaactattaaaagacctgcaacattgtaaaaactcatttttccatcaagaccttggccaggtaactttaggctcctgccaagaacaggaagtgatggccgtctcaccacagagcctgggctgctcctccagctctggggagtctaggccgtggggactgtccctggggaggcccctgctgtctccgtgacatctgtggcaggagtctctgagagcgggagctgcctagctacagtgttttcttgccaaggctaagtgttttgtgactctgtgctgacgtaatgtgcatcttcacgtatttatgcatgtggcaatcgttacttcctgtgcacgcagccagccctgggtctgtctctggggtaatgaaaaaggaccctaataaacacctgctcactggctgggta

SEQ ID NO: 18906 - DNA, 228 bp, Macaca Mulatta
agcctttgttgcagccgtggctggagggctggcatgtggaaggccctgaccggctgcgagtgagctggtccttgcccttggtgcccgggccactggtgggcgacggtttcctgctgcgcctgtgggacgggacacgggggcaggagcggcgtgagaacgtctcatccccccagtccgcactgccctcctgaccggacttacgcctggcactcactaccagctggatgg

SEQ ID NO: 18907 - DNA, 814 bp, Macaca Mulatta
  misc_feature (1)...(814): n = A,T,C or G
ggggaaaaacagggctaagggccccatgtttccactttaccctaaacgggggccccggggcgcccaaaaagaaattggtttttggaaaagctttctcgaggggccgagggccggccnnnnnnnnnnnnnnnnnnnnnnnnnnnnnnnnnnnngagacagggatctacttnnnnnnnnnnnnnnnnnnggcaggggtataaacatggctcgntacagcttcaaccgtccagggtcaattgatcctcctgcctcagcccgccaagtaactaggactataggcatgtgccatcacacctggccagtttctgaatttgtttgtagagatgagggtttcaccacgttgcccaggctggtctggaactcntgagcttaagcaatctgccgaccttggnnnnnnnnnnnnnnnnnnnnngaggtgtaagccaccgtgcccagccttgaaacttatttttaaactaagaatgctttttcttcttaagatatcagggcatcagaacatctctttaagttcgaggtcttatttagttagttggtgtcattaactcatcccttccaccataaacactttgtaaccaagagtgcctaacttcctgggaatgtaacctatcaggtttagttttatttggccattattcaggatggagtcactctggttcagactcctccgataggtggatctattccaccatggaggggttgtgctaagcatatatggactgaggacatcctggcacatgagggccatgtggctcaggtcatgcacatcgtgcctcgggaaaatgccccccaggagagcataaagcagctgggatcc

SEQ ID NO: 18908 - DNA, 789 bp, Macaca Mulatta
  misc_feature (1)...(789): n = A,T,C or G
ggatactttgaaaggagatgtcttggaacatcggaatgttctcagatttctggttgttatgtgatcatgtgtggaagttattaactttaatgttttttgccacagcttttgcaacttaatactcaaatgagtaacatttgctgttttaaacattaatagcagcctttctctctttatacagctgtattgtctgaacttgcattgtgattggcctgtagagttgctgagagggctcgaggggtgggctggtatctcagaaagtgcctgacacactaaccaagctgagtttcctatgggaacaattgaagtaaactttttgttctggtcctttttggtcgaggagtaacaatacaaatggattttgggagtgactcaagaagtgaagaatgcacaagaatggatcacaagatggaatttatcaaaccctagccttgcttgnnnnnnnnnnnnnnnnnnnnnnnntctgtaatggtactgactttgcttgctttgaagtagctcnnnnnnnnnnnnnnnnnnnnnnnnnnnnnnagtaactgttagtttaagtctctcgtagtgttaagttatagtgaatactgctacagcaatttctaatttttaagaattgagtaatggtgtagaacactaattcataatcactctaataattgtaatctgaataaagtgtaacattgtgtagcctttttgtataaatagacaaatagaaatggccattagtccttttaatgctatacaggatcatctgttgataactattgattatgagaactaagtatgactgtgatc

SEQ ID NO: 18909 - DNA, 871 bp, Macaca Mulatta
  misc_feature (1)...(871): n = A,T,C or G
tgtaccacaacagtagccagaagcggcactggactttctccagtgaggagcagctggcaagactgcgggccgacgccaaccgcaaattcagatgcaaagcggtggccaacgggaaggtnnnnnnnnnnnnnnnnnnnnnnnnnnnnnnnnnnnnnnnnnnnnnnnnnnnnnnnnnnnnnnnnnnnnnnnnnnnnnnnnnnnnnnnnnnnnnnnnnnnnnnnnnnnnnnnnnnnnnnnnnnnnnnnnnnnnnnnnnnnnnnnnnnnnnnnnnnnnnnnnnnnnnnnnnnnnnnnnnnnnnnnnnnnnnnnnnnnnnnnnnnnnnnnnnnnnnnnnnnnnnnnnnnnnnnnnnnnnnnnnnnnnnnnnnnnnnnnnnnnnnnnnnnnnnnnnnnnnnnnnnnnnnnnnnnnnnnnnnnnnnnnnnnnnnnnnnnnnnnnnnnnnnnnnnnnnnnnnnnnnnnnnnnnnnnnnnnnnnnnnnnnnnnnnnnnnnnnnnnnnnnnnnnnnnnnnnnnnnnnnnnnnnnnnnnnnnnnnnnnnnnnnnnnnnnnnnnnnnnnnnnnnnnnnnnnnnnnnnnnnnnnnnnnnnnnnnnnnnnnnnnnnnnnnnnnnnnnnnnnnnnnnnnnnnnnnnnnnnnnnnnnnnnnnnnnnnnnnnnnnnnnnnnnnnnnnnnnnnnnnnnnnnnnnnnnnnnnnnnnnnnnnnnnnnnnnnnnnnnnnnnnnnnnnnnnnnnnnnnnnnnnnnnnnnnnnnnnnnnnnncatgagaaacttagtaaaaaagtatgagccacccagatctgaagaagttgctgttctgaaacagaagttggagcgatgtcattctgctgagcttgcacttaatgtaatcacg

SEQ ID NO: 18910 - DNA, 649 bp, Macaca Mulatta
tgaccatcccagaggtgaagttcactcgggcaggggagctggggcagagagctcccacccactgagaaacccacagagcagcgcccttcaggagcgtgaggacgatagggcagggctggtcaggggtgagaaggcgaggaaagggaagttcaggtctgcacagcagaagacagtgagctccaccaagctggtgtccttccatgacgacagcgacgaggacctcttacacatctgactccgcagtgcctgcaggggagcacggagccgcgggacaccaagcacctccaaccaaataagacttccactcaatgatgcttctataattttgcctttaacaaaaactttcaaaagggaagagttttcgtgatgggggagagggtgaaggaggtcaggccccactccttcctcattgtttacagtcattggaataaggcgtggctcagatccgccacagggcggtaccctgtgcccagggttttaccccaagtcctcatttaaaaaacgtaagaccagacgcatctcaaaacagagggctgcattctaagaaacccttgctgctttaggcccgatagggtgtttgaccccagtatattttagcattttaattctctccccctatttattgactttgacaattactcaggtttga

SEQ ID NO: 18911 - DNA, 614 bp, Macaca Mulatta
aggcattgccattccaatccctattaaagggatagagactgatgtggacaacccaaacaatatcacttgtgtgctgacaaaggaacgttttggcaatttcatgctctttggctcactggctgccttctttacacctcttgcaattatgattgttacctactttctcactatccatgctttacagaagaaggcttacttggtcaaaaacaagccacctcgacgcctaacatggtcaactgtgtctacagttttccaaagggatgaaacaccttgttcgtcaccagaaaaggtggcaatgctggatggttctcgaaaggacaaggctctgtgcaactcaagtgatgaaagacttacgcgaagaacatccacaattggaaaaaagtcagtgcagaccatttccaatgaacagagagcctcaaaagtcctaggggattgtgttttttcctctttttgcttatgtggtgtcccttctttattacaaacataactttagttttatgtgattcatgtaaccaaactactctccaaatgctcctggagatatttgtgtggataggctatgtttcctcaggagtgaatcatttggtttacaccctcttcaataagacatttcg

SEQ ID NO: 18912 - DNA, 2223 bp, Macaca Mulatta
  misc_feature (1)...(2223): n = A,T,C or G
gcctcggacgaggccgtcgggccgccacctcttctgctcagctgccttcgccatggccaatgacagctgcgggcccgcgagccgagnnnnnngagtgagactggcagtactgcgagctgtgggggaagatggagaacctgctgctctacagccgcccttcctactgctgcaaggagcaccagcctcaggactggaagaagtacaagttagtgtgccagggcagcgagggtgtcctcggtcacggaggnnnnnnnnnnnnnnnnnnnnnnnnnnnnnnnnnnnnnnnnnnnnnnnnnnnnnnnnnnnnnnnnnnnnnnnnnnnnnnnnnnnnnnnnnnnnnnnnnnnnnnnnnnnnnnnnnnnnnnnnnnnnnnnnnnnnnnnnnnnnnnnnnnnnnnnnnnnnnnnnnnnnnnnnnnnnnnnnnnnnnnnnnnnnnnnnnnnnnnnnnnnnnnnnnnnnnnnnnnnnnnnnnnnnnnnnnnnnnnnnnnnnnnnnnnnnnnnnnnnnnnnnnnnnnnnnnnnnnnnnnnnnnnnnnnnnnnnnnnnnnnnnnnnnnnnnnnnnnnnnnnnnnnnnnnnnnnnnnnnnnnnnnnnaagcctagtttgctgacattgaacccaactttgatagactgctgtttttctggtctgaccgtcgcaaccctcatgaagtacaacnnnnnnnnnnnnnnnnnnnnnnnnnnnnnnnnnnnnnttgatgcacatgagaaagcacgagctaaagtaaaatatctaacaggtgaaaaaggtgtgagtgttgaactcaataaaccttcagattcagtcagtaaagacgtcttatagagcctttgatccagcaatatcccacttcacctacaatnnnnnnnnnnnnnnnnnnnnnnnnnnnnnnnnnnnnnnnnnnnnnnnnnnnnnnnnnnnnnnnnnnnnnnnnnnnnnnnnnnnnnnnnnnnnnnnnnnnnnnnnnnnnnnnnnnnnnnnnnnnnnnnnnnnnnnnnnnnnnnnnnnnnnnnnnnnnnnnnnnnnnnnnnnnnnnnnnnnnnnnnnnnnnnnnnnnnnnnnnnnnnnnnnnnnnnnnnnnnnnnnnnnnnnnnnnnnnnnnnnnnnnnnnnnnnnnnnnnnnnnnnnnnnnnnnnnnnnnnnnnnnnnnnnnnnnnnnnnnnnnnnnnnnnnnnnnnnnnnnnnnnnnnnnnnnnnnnnnnnnnnnnnnnnnnnnnnnnnnnnnnnnnnnnnnnnnnnnnnnnnnnnnnnnnnnnnnnnnnnnnnnnnnnnnnnnnnnnnnnnnnnnnnnnnnnnnnnnnnnnnnnnnnnnnnnnnnnnnnnnnnnnnnnnnnnnnnnnnnnnnnnnnnnnnnnnnnnnnnnnnnnnnnnnnnnnnnnnnnnnnnnnnnnnnnnnnnnnnnnnnnnnnnnnnnnnnnnnnnnnnnnnnnnnnnnnnnnnnnnnnnnnnnnnnnnnnnnnnnnnnnnnnnnnnnnnnnnnnnnnnnnnnnnnnnnnnnnnnnnnnnnnnnnnnnnnnnnnnnnnnnnnnnnnnnnnnnnnnnnnnnnnnnnnnnnnnnnnnnnnnnnnnnnnnnnnnnnnnnnnnnnnnnnnnnnnnnnnnnnnnnnnnnnnnnnnnnnnnnnnnnnnnnnnnnnnnnnnagaaatgtttcattttggtttttcaccaaccttcctttgataggacaaagcagatactaagaggaggaggaaaggctgttctgtgtctgaacccagttgggctagtccccaataggagccgagagccatgtactctaatgcctcctttttcttcccccagnnnnnnnnnnntggctctgagaattcctgcagagaagagcagggtggtgaggagatagtgagcaactcccagnngcatggagggatccagaatctggacagaagaaccacctagaaataactcggcagaattctgaaaatgaggtcacgctgggtaagaatgcnnnnnnnnnnnnncatagtcaaagttagctatcgagtttctgtnnnnnnnnnnnnnnnnnnnnnnnnnnnnnnnnnnnnnnnnnnnnnnnnnnnnnnnnnnnnnnnnnnnnnnnnnnnnnnnnnnnnnnnnnagtagtttttggggaacaagtgatgtttgggtacgtggaaaagttcaatggtgacttctgagattttggtgtacccatcacccaagggtagtcttttttatccatcaagtctgtacccaatgtgtagt

SEQ ID NO: 18913 - DNA, 2310 bp, Macaca Mulatta
  misc_feature (1)...(2310): n = A,T,C or G
caactgcttttgctaaataatttgcagggtgacgtagggcagccgggacccaatgggattccatcggacaccctccaccccatcgtcgcgcccacgggagtcaccttccacccagatcagtacaagnnnnnnnnnnnnnnnnnnnnnnnnnnnnnnnnnnnnnnnnnnnnnnnnnnnnnnnnnnnnnnnnnnnnnnnnnnnnnnnnnnnnnnnnnnnnnnnnnnnnnnnnnnnnnnnnnnnnnnnnnnnnnnnnnnnnnnnnnnnnnnnnnnnnnnnnnnnnnnnnnnnnnnnnnnnnnnnnnnnnnnnnnnnnnnnnnnnnnnnnnnnnnnnnnnnnnnnnnnnnnnnnnnnnnnnnnnnnnnnnnnnnnnnnnnnnnnnnnnnnnnnnnnnnnnnnnnnnnnnnnnnnnnnnnnnnnnnnnnnnnnnnnnnnnnnnnnnnnnnnnnnnnnnnnnnnnnnnnnnnnnnnnnnnnnnnnnnnnnnnnnnnnnnnnnnnnnnnnnnnnnnnnnnnnnnnnnnnnnnnnnnnnnnnnnnnnnnnnnnnnnnnnnnnnnnnnnnnnnnnnnnnnnnnnnnnnnnnnnnnnnnnnnnnnnnnnnnnnnnnnnnnnnnnnnnnnnnnnnnnnnnnnnnnnnnnnnnnnnnnnnnnnnnnnnnnnnnnnnnnnnnnnnnnnnnnnnnnnnnnnnnnnnnnnnnnnnnnnnnnnnnnnnnnnnnnnnnnnnnnnnnnnnnnnnnnnnnnnnnnnnnnnnnnnnnnnnnnnnnnnnnnnnnnnnnnnnnnnnnnnnnnnnnnnnnnnnnnnnnnnnnnnnnnnnnnnnnnnnnnnnnnnnnnnnnnnnnnnnnnnnnnnnnnnnnnnnnnnnnnnnnnnnnnnnnnnnnnnnnnnnnnnnnnnnnnnnnnnnnnnnnnnnnnnnnnnnnnnnnnnnnnnnnnnnnnnnnnnnnnnnnnnnnnnnnnnnnnnnnnnnnnnnnnnnnnnnnnnnnnnnnnnnnnnnnnnnnnnnnnnnnnnnnnnnnnnnnnnnnnnnnnnnnnnnnnnnnnnnnnnnnnnnnnnnnnnnnnnnnnnnnnnnnnnnnnnnnnnnnnnnnnnnnnnnnnnnnnnnnnnnnnnnnnnnnnnnnnnnnnnnnnnnnnnnnnnnnnnnnnnnnnnnnnnnnnnnnnnnnnnnnnnnnnnnnnnnnnnnnnnnnnnnnnnnnnnnnnnnnnnnnnnnnnnnnnnnnnnnnnnnnnnnnnnnnnnnnnnnnnnnnnnnnnnnnnnnnnnnnnnnnnnnnnnnnnnnnnnnnnnnnnnnnnnnnnnnnnnnnnnnnnnnnnnnnnnnnnnnnnnnnnnnnnnnnnnnnnnnnnnnnnnnnnnnnnnnnnnnnnnnnnnnnnnnnnnnnnnnnnnnnnnnnnnnnnnnnnnnnnnnnnnnnnnnnnnnnnnnnnnnnnnnnnnnnnnnnnnnnnnnnnnnnnnnnnnnnnnnnnnnnnnnnnnnnnnnnnnnnnnnnnnnnnnnnnnnnnnnnnnnnnnnnnnnnnnnnnnnnnnnnnnnnnnnnnnnnnnnnnnnnnnnnnnnnnnnnnnnnnnnnnnnnnnnnnnnnnnnnnnnnnnnnnnnnnnnnnnnnnnnnnnnnnnnnnnnnnnnnnnnnnnnnnnnnnnnnnnnnnnnnnnnnnnnnnnnnnnnnnnnnnnnnnnnnnnnnnnnnnnnnnnnnnnnnnnnnnnnnnnnnnnnnnnnnnnnnnnnnnnnnnnnnnnnnnnnnnnnnnnnnnnnnnnnnnnnnnnnnnnnnnnnnnnnnnnnnnnnnnnnnnnnnnnnnnnnnnnnnnnnnnnnnnnnnnnnnnnnnnnnnnnnnnnnnnnnnnnnnnnnnnnnnnnnnnnnnnnnnnnnnnnnnnnnnnnnnnnnnnnnnnnnnnnnnnnnnnnnnnnnnnnnnnnnnnnnnnnnnnnnnnnnnnnnnnnnnnnnnnnnnnnnnnnnnnnnnnnnnnnnnnnnnnnnnnnnnnnnnnnnnnnnnnnnnnnnnnnnnnnnnnnnnnnnnnnnnnnnnnnnnnnnnnnnnnnnnnnnnnnnnnnnnnnnnnnnnnnnnnnnnnnnnnnnnnnnnnnnnnnnnnnnnnnnnnnnnnnnnnnnnnnnnnnnnnnnnnnnnnaggtatccaaggaatgccaggcatcccaggactgtcaggaatccctgggctgcctgggaggcccggccacatcaaaggagtcaagggagacatcggagccccgggcatccctggtttgccaggattccctggggtggctggcccccctggaattacagggttcccaggattcataggaagccgg

SEQ ID NO: 18914 - DNA, 185 bp, Macaca Mulatta
aacatctgagaaaacttacagccccctacaccaagagtgtatctatgaaagagcccccacactttgaaaacttaagaatcccttatgaagtttgcctgttctagaattgtaagattgttaatttccttcttcagtctctagtgacaacacttaacttcttttctaataaaaaaaaatacctgtag

SEQ ID NO: 18915 - DNA, 255 bp, Macaca Mulatta
aatcccaagcaagcctagagcttgccatcaagcagtggggctctcagtagggagcctggaatggaagctggatgctcgggtctctgggcacagcctgacccctgtgcaccgagtggccagggcatgtctggccctgtctgctcatccttggaaggtgacagcaactgcctgtgtagctcccacatgcacaggggcccgtggactcttcactccggagggtcctgggtcttccgagagcaataaacagtttctttg

SEQ ID NO: 18916 - DNA, 2127 bp, Macaca Mulatta
  misc_feature (1)...(2127): n = A,T,C or G
ggcgctcgggccgctcttgtggggctgcgccctggcgctgcagggctgaatgttatacccccgagagaggccattgcgggagcgcaacgagctggaggcctctggagcttcggcgccgacttcnnnnnnnnnnnnnnnnnnnnnnnnnnnnnnnnnnnnnnnnnnnnnnnnnnnnnnagtctggccccaccttggacataccggttctctccatcttcaatgacatcagccgggactgggcattttgtcagctggatgtgatatgaacgggaggtgaccctgctgaagcaatggatccaggacctgcacacaagagtggtgctgaggattggcagtgcccacttctatgccannnngtgggtgaatggggtcgacacgctagagcatgaggggggctacctgccctttgaagccgacatcagcaacctggtccaggtggggcccctgtcctcccagctccgcatcactatcgccatcaacaacacactcacccccaccaccctgccaccagggaccatccaatacctgaccgacacctccaagnnnnnnnnnnnnnnnnnnnnnnnnnnnnnnnnnnnnnnnnnnnnnnnnnnnnnnnnnnnnnnnnnnnnnnnnnnnnnnnnnnnnnnnnnnnnnnnnnnnnnnnnnnnnnnnnnnnnnnnnnnnnnnnnnnnnnnnnnnnnnnnnnnnnnnnnnnnnnnnnnnnnnnnnnnnnnnnnnnnnnnnnnnnnnnnnnnnnnnnnnnnnnnnnnnnnnnnnnnnnnnnnnnnnnnnnnnnnnnnnnnnnnnnnnnnnnnnnnnnnnnnnnnnnnnnnnnnnnnnnnnnnnnnnnnnnnnnnnnnnnnnnnnnnnnnnnnnnnnnnnnnnnnnnnnnnnnnnnnnnnnnnnnnnnnnnnnnnnnnnnnnnnnnnnnnnnnnnnnnnnnnnnnnnnnnnnnnnnnnnnnnnnnnnnnnnnnnnnnnnnnnnnnnnnnnnnnnnnnnnnnnnnnnnnnnnnnnnnnnnnnnnnnnnnnnnnnnnnnnnnnnnnnnnnnnnnnnnnnnnnnnnnnnnnnnnnnnnnnnnnnnnnnnnnnnnnnnnnnnnnnnnnnnnnnnnnnnnnnnnnnnnnnnnnnnnnnnnnnnnnnnnnnnnnnnnnnnnnnnnnnnnnnnnnnnnnnnnnnnnnnnnnnnnnnnnnnnnnnnnnnnnnnnnnnnnnnnnnnnnnnnnnnnnnnnnnnnnnnnnnnnnnnnnnnnnnnnnnnnnnnnnnnnnnnnnnnnnnnnnnnnnnnnnnnnnnnnnnnnnnnnnnnnnnnnnnnnnnnnnnnnnnnnnnnnnnnnnnnnnnnnnnnnnnnnnnnnnnnnnnnnnnnnnatggtgatcgctcacaccaaagccttggacccctcccggcctgtgacctttgtgaccaactccaactatgcagcagacaagggggnngggctccgtatgtggacgtgatctgtgtgaacagctactacacttggtatcatgactatgggcacctggagttgattcagctgcagctggccacccagtttgagaactggtgtaagacttatcgcaagcccattattcagagtgagtnnnnnnnnnnnnnnnnnnnnnnnnnnnnnnnnnnnnnnnnnnnnnnnnnnnnnnnnnnnnnnnnnnnnnnnnnnnnnnnnnnnnnnnnnnnnnnnnnnnnnnnnnnnnnnnnnnnnnnnnnnnnnnnnnnnnnnnnnnnnnnnnnnnnnnnnnnnnnnnnnnnnnnnaccgacgagagtgctggggaataaaaagggggtcttcactcggcagagacaaccaaaaagtgcagcgttccttttgcgagagagatactggaagattgccaatgaaaccaggtatccctactcaatagccaagtcacagtgtttggaaaacagcccgtttacttgagcaagactgacaccacctgtgtgtcccttcctcccagagtcagggcaacttccacagcagcagaacaagtgcctcttggactgttcatggcagaccagaacatttctggcctgggttttatggtcatctgtgctagcagggaccactagaggtggaaatagaagattttctaatatggaaataaagagttggcatgtaagtggctactg

SEQ ID NO: 18917 - DNA, 1228 bp, Macaca Mulatta
cctctttgcaaattggcctttgctctttcaatgcctttcatccatctccactctctcaactggctaaagtcacagcacagatactgcccagtgccttaagaggagacatgatccactgaggggataggtctaccaggaactctcagcaaacacggggctgtgttcagtccataaaggaaaagcattttcaaagctctcattgttcatgtaaaaatcatacacgtggcattttgctccacattccttacacacaggggtagagaggattgcttttgtgacccacattcaaatatgtgactgttttcttttctctttcactgctaagcagcctagaaaggataaatgaatactagactaagatttgttctccaggaggctcaacctgaactgaacacacagaatgtcagagctggaagggactatagagatcatctggtctgaccctcttgtatggatgattagaaaactgaggtgtagaaggggcaatggccccaaaatcaacaaagcaagtttagcacaagagctcggactagaattcagggtcctcactcccaggccaccgaaccatgcagccccttctttgggggaagagacctgtgtcagtcttggttaattattccagggaaccttgctaacagaaacttgctcttgccttgtctcttcagtaggtatgacctggctataaaaagattgcctagacgagccagatcattgagtttcagcaagtccttgagctccgcaacatctgccagatatagtagacaagcacccatggaggcaggtttcgggcctgaagcaaatcagagggctttgcaaaagacagcatagagccatcttcctgcaactttacctctttccctcagatggggagccatgactggcttgcacctcaggatactgtaatttgactccataattgcttttgctcctgaaacctgggaatcaatggaaaggcagggaatgtgcctcttctgtggccagattctgttatttgcaattaaagcaagtttttaaaaaatgcaagaggcagttgttagtcttcagggtttggccactgaaatagctatgtggcagatactgaaaacagaggacaatttgaggatcttgctggaataataaatggcagctaccatttgttgagcacatattattatatcaggcactgagctgggtaggctcctaaacttcacaataaccctatgacttaactaactttattctccatttt

SEQ ID NO: 18918 - DNA, 1300 bp, Macaca Mulatta
  misc_feature (1)...(1300): n = A,T,C or G
agagcgtgggaaaacactggtgcagaagaaaccgaccatgtatcctgagtggaagtcgacattcgatgcccacatctacgagggccgcgtcatccagatcgtgctaatgcgggcagcnnnnnnnnnnnnnnnnnnnnnnnnnnnnnnnnnnnnnnnnnnnnnnnnnnnnnnnnnnnnnnnnnnnnnnnnnnnnnnnnnnnnctggacctgcagcctcaggccaaggtgttgatgtctgttcagtatttcctggaggacgtggngattgcaaacagtctatgcgcagtgaggacgaggccaagttcccaacgatgaaccgccgcggagccatcaaacaggccaaaatccactacatcannnnnnnnnnnnnnnnnnnnnnnnnnnnnnnnnnnnnnnnnnnnnnnnnnnnnnnnnnnnnnnnnnnnnnnnnnnnnnnnnnnnnnnnnnnnnnnnnnnnnnaatgtaacgctgccatccacaagaaatgcatcgacaagatcatcggcagatgcactggcactgcggccaacagccgggacannnntccagaaagaacgcttcaacatcgacatgccgcaccgcttcaaggttcacaactacatgagccccaccttctgtgaccactgcggcagcctgctctggggactggtgaagcagggattaaagtgtgaagnctggnnnnnnnnnnnnnnnnnnnnnnnnnnnnnnnnnnnnnnnnnnnnnnnnnnnnnnnnnnnnnnnnnnnnnnnnnnnnnnnnnnnnnnnnnnnnccagagagcctcccggagatcagactcggcctcctcannnnnnnnnnnnnnnnnnnnnnnnnnnnnnnnnnnnnnnnnnnnnnnnnnnnnnnnnnnnnnnnnnnnnnnnnnnnnnnnnnnnnnnnnnnnnnnnnnnnnnnnnnnnnnnnnnnnnnnnnnnnnnnnnnnnnnnnnnnnnnnnnnnnnnnnnnnnnnnnnnnnnnnnnnnnnnnnnnnnnnnnnnnnnnnnggagagtactttgccatcaaggccctcaagaaggatgtagtcctgatcgacgacgacgtggaatgcaccatggttgagaagcgggtgctgacactcgccgcagaaaatccctttctcacccacctcatctgcaccttccagaccaagnnnnnnnnnnnnnnnnnnnnnnnnnnnnnnnnnnnnnnnnnnnnnnnnnnnnnnnnnnnnnnnnnnnnnnnnnnnnnnnnnnnnnnnnnnngttttatgcagctgagataatctgtggactgcagtttctacacagcaagggcatcatttacag

SEQ ID NO: 18919 - DNA, 1332 bp, Macaca Mulatta
  misc_feature (1)...(1332): n = A,T,C or G
ggggaacaccacccagtgtggagaagcccagccaagcactgtcaggaatcctgtgaagcagctccagctatgtgtgaagaagaggacagcactgccttggtgtgtgacaatggctctgggctctgtaaggccggctttgctggggacgatgctcccagggctgttttcccatccattgtgggacgtcccagacatcagggggtgatggtgggaatgggacaaaaagacagctacgtgggtgacgaagcacagagcaaaagaggaatcttgaccctgaagtacccgatagaacacggcatcattaccaactgggacgacatggaaaagatctggcaccactctttctacaacgagcttcgtgttgcccctgaagagcgtcccaccctgctcacggaggcgcccctgaacccccaaggccaatcgggaaaaaaatgacccagattatgtttgagactttcaatgtcccagcccatgtatggtggctatccaggcggtgctgtccctctacgcctctggacgcacaactggcatcgtgctggactctggagatggtgtcacccacaatgtccccatctatgaaggttatgccttgccccatgccatcatgcgtctggatctggctggccgagatctccgaaaaaaatccccagccgggaagactgagcgtggctattccttcgttactaccgctgagcgtgagattgtccgggagatcaaagaagaaactgtgttatgtagcgtctggactttgaaaatgaaatggccactgcaacatcctcctcctcccttgaaaaaagttacaaactgcctgatgggcaagtgaatcacaaacaaaaatgaaacgcttcggctgcccaaaaaccctgttccaaccatccatcaaacaagaatggagaactgcaagcatccatgaaaaccaccaaacaaaagcatcaagaaaatgtgatagaaaaacatcaaggaaagaacctcaaacacataaaaaaagtgcctaaacccaggaaagaaagcaaactaataaaaaccccatggacaattgaccaaaaacaaaatggcaaaaaaggaagatacaagcgnnnnnnnnnnnnnnnnnnnncaacccatgaaaaaaatacaaaaatagattggagaacaaacgnnnnnnnnnnnnnnnnnnnnnnnncccggagtaaaggaaggaaccccaattcctaaggcccaataataataccaaactttcgaaccaaaataccgaaaaccaacgagaaaaggaagacacaaatgtaaaaaacagggcccacagcagtaatagaaataatagagaagataataaaataaaaaagaattaacgca

SEQ ID NO: 18920 - DNA, 1718 bp, Macaca Mulatta
  misc_feature (1)...(1718): n = A,T,C or G
gccggggcatatgcgcatgtggtgtatgtaagtgtacagatccgaagtccaagggcaaacatgtgagatgtgtcagacctgccttggggtctgtgctgagcataaagaatgtgttcagtgcagagccttcaataaaggagaaaagaaagacacatgcacacaggaatgttcctattttaacattaccaaggtagaaagtcgggacaaattaccccagccagtccaacctgatcctgtgtcccattgtaaggagaaggatgttgacgactgttggttctattttacatattcagtgaatgggaacaatgaggtcatggttcatgttgtggagaatccagagtgtcccactggtccagacatcattccaattgtagctggtgtggttgctggaattgttcttattggccttgcattactgctgatatggaagcttttaatgataattcatgacagaagggagtttgctaaatttgaaaaggagaaaatgaatgccaaatgggacacaggtgaaaatcctatttataagagtgccgtgacaactgtggtcaatccgaagtatgagggaaaatgagtaccgcctgtgcaaatcccacaacactgaatgcaaagtagcaatttccatagtcacagttaggtagctttagggcaatattgccatggtttggctcatgtgcaggttttgaaaatgtacaatatgtataatttttaaaatgttttattattttgaaaataatgtaattcatgccagggactgacaaaagacttgagacaggatggttattcttgtcagctaaggtcacattgtgcctttttgaccttttcttcctggactattgaaatcaagcttattggattaagtgatatttctacagtgattgaaagggcaatagttaatgagcatgatgagagtttctgttaatcatgtattaaaactgatttttagctttacaaatatgtcagtttgcagttacgcagaatccaaagtaaatgtcttgctagctagttaaggattgttttaaatctgttattttgctatttgcctgttagacatgactgatgacatatctgaaagacaagtacatttagagttgctggtgtaaaatagggttgaaatagttgatctccacaggccatgggaaaaattcagagagttaggaaggaagaaccaatagctttaaaacctgtgtgccattttaagagttacttaatgtttggtaacttttatgccttcactttacaaattcaagccttaggtataagaaccgagcaattttctgctaaaaagtcccttgattttagcacctatttacataaaggccatacttttggcaaagtattttgctgaatggggacctttcaagttgaatttatttttagttttactatnnnnnnnnnnngtttaatgtctggtgctttttatcacctcttctaatcttttaatgtatttgtttgccattttgggtaagactttttttatgagtactttttctttgaagttttagcggtcagtttgccttttttaatgaacatgtgaagttgttaccgtggctatgcaacagctctcacctatgcgaatccttacttcaaattagtgccatagcagacacactgtaagtttacttctcacccatttgagtttgccacatcctggtttcaaacaaattcacattccttggttttaggtgccttttagtttttaaaggtcacttttttacagg

SEQ ID NO: 18921 - DNA, 640 bp, Macaca Mulatta
  misc_feature (1)...(640): n = A,T,C or G
gggatggtaataagtagcttccaattcaattcatcctaaagccaaagaaaatacaccaccacacgcgcacacgaacacacatgcgcgcacacacacacacaccactttatggcaattcttacagaaattcaatgacatttcttttcttacaaaatttccaccacatttctatccctaagccaacatacaatgtgaaatgaaagctagtacatggagtgcagctgctaaaaattttcagcacagggctcttgctgactctgctcatgagacggcatcagccacccgatgactggcgtatcttggtcctgtgtctttcttcttatgctgtgttaatgtgtttactttccatttggcagagagacaagagagacacctccaacttcgacaaagagttcaccagacagcctgtggaactgacccccactgacaaactcttcatcatgaacttggaccaaaatgaatttgctggcttctcttacactaacccagagtttgtcattaatgtgtaggtgaatgcaaactccatcattgagcctggggtgtaagacttcaggccaagcgtacgtatcaattctagtcttccaggaatcacggtgcacatgctggcattcaacatgtggaaagcttgtcntagagggcn

SEQ ID NO: 18922 - DNA, 857 bp, Macaca Mulatta
  misc_feature (1)...(857): n = A,T,C or G
ggattttccaatttgaagattcatttgaaggtggctcctgccacctgctaatagcagttcaaactaaattttttgtatcaagtccctgaatggaagtatgacgttgggtccctctgaagtttaattctgagttctcattaaaagaaatttgctttcattgttttatttcttaattgctatgcttcagaatcaatttgtgttttatgccctttcccccagtattgtagagcaagtcttgtgttaaaagcccagtgtgacagtgtcatgatgtagtagtgtcttactggttttttaataaatccttttgtaaaacnaacaccaatcaacacaaaacccnnnnnntnncnnccccctnnccatncanccccttgtcgggccgcctccggcccctcaagaaagctttcaaaaacctttctttttgggccccggggccccatagggcaagcggaacttgggcaataccttgtttccccaggaaaacccggggccatgaaaacggccctgggattcccccccaaacaaaaaaccccccggggggcaaaccggagctcttctgaaaaaaattccaaaaggagagtcccgaaggcgccttttcccgggacccttcccccaggggcgccccccgttacgtctccatccttacatctttcccccggctcgtgccacccttcccccggatcgggccggacatccctttaccccttcccttccccaccttgggaaccccctcccccccaggggtggcccgccgctcgtgatacccccccgggcggttcaggccctcggggggccgcttggggtgaacactatttgcccaccggggcacaatagcggcgcgttatagaaacccgctcccc

SEQ ID NO: 18923 - DNA, 3361 bp, Macaca Mulatta
  misc_feature (1)...(3361): n = A,T,C or G
agggaatactggagcgatctgaaacagaaaccaaacaaagacttagtagccagatagaaaaactggaacatgagatctctcatctaaagaagaagttgggaaatgaggtggaacaaaggcatacacttactagaaatctagatgnnnnnnnnnnnnnnnnnnnnnnnnnnnnnnnnnnnnnnnnnnnnnnnnnnnnnnnnnnnnnnnnnnnnnnnnnnnnnnnnnnnnnnnnnnnnnnnnnnnnnnnnnnnnnnnnnnnnnnnnnnnnnnnnnnnnnnnnnnnnnnnnnnnnnnnnnnnnnnnnnnnnnnnnnnnnnnnnnnnnnnnnnnnnnnnnnnnnnnnnnnnnnnnnnnnnnnnnnnnnnnnnnnnnnnnnnnnnnnnnnnnnnnnnnnnnnnnnnnnnnnnnnnnnnnnnnnnnnnnnnnnnnnnnnnnnnnnnnnnnnnnnnnnnnnnnnnnnnnnnnnnnnnnnnnnnnnnnnnnnnnnnnnnnnnnnnnnnnnnnnnnnnnnnnnnnnnnnnnnnnnnnnnnnnnnnnnnnnnnnnnnnnnnnnnnnnnnnnnnnnnnnnnnnnnnnnnnnnnnnnnnnnnnnnnnnnnnnnnnnnnnnnnnnnnnnnnnnnnnnnnnnnnnnnnnnnnnnnnnnnnnnnnnnnnnnnnnnnnnnnnnnnnnnnnnnnnnnnnnnnnnnnnnnnnnnnnnnnnnnnnnnnnnnnnnnnnnnnnnnnnnnnnnnnnnnnnnnnnnnnnnnnnnnnnnnnnnnnnnnnnnnnnnnnnnnnnnnnnnnnnnnnnnnnnnnnnnnnnnnnnnnnnnnnnnnnnnnnnnnnnnnnnnnnnnnnnnnnnnnnnnnnnnnnnnnnnnnnnnnnnnnnnnnnnnnnnnnnnnnnnnnnnnnnnnnnnnnnnnnnnnnnnnnnnnnnnnnnnnnnnnnnnnnnnnnnnnnnnnnnnnnnnnnnnnnnnnnnnnnnnnnnnnnnnnnnnnnnnnnnnnnnnnnnnnnnnnnnnnnnnnnnnnnnnnnnnnnnnnnnnnnnnnnnnnnnnnnnnnnnnnnnnnnnnnnnnnnnnnnnnnnnnnnnnnnnnnnnnnnnnnnnnnnnnnnnnnnnnnnnnnnnnnnnnnnnnnnnnnnnnnnnnnnnnnnnnnnnnnnnnnnnnnnnnnnnnnnnnnnnnnnnnnnnnnnnnnnnnnnnnnnnnnnnnnnnnnnnnnnnnnnnnnnnnnnnnnnnnnnnnnnnnnnnnnnnnnnnnnnnnnnnnnnnnnnnnnnnnnnnnnnnnnnnnnnnnnnnnnnnnnnnnnnnnnnnnnnnnnnnnnnnnnnnnnnnnnnnnnnnnnnnnnnnnnnnnnnnnnnnnnnnnnnnnnnnnnnnnnnnnnnnnnnnnnnnnnnnnnnnnnnnnnnnnnnnnnnnnnnnnnnnnnnnnnnnnnnnnnnnnnnnnnnnnnnnnnnnnnnnnnnnnnnnnnnnnnnnnnnnnnnnnnnnnnnnnnnnnnnnnnnnnnnnnnnnnnnnnnnnnnnnnnnnnnnnnnnnnnnnnnnnnnnnnnnnnnnnnnnnnnnnnnnnnnnnnnnnnnnnnnnnnnnnnnnnnnnnnnnnnnnnnnnnnnnnnnnnnnnnnnnnnnnnnnnnnnnnnnnnnnnnnnnnnnnnnnnnnnnnnnnnnnnnnnnnnnnnnnnnnnnnnnnnnnnnnnnnnnnnnnnnnnnnnnnnnnnnnnnnnnnnnnnnnnnnnnnnnnnnnnnnnnnnnnnnnnnnnnnnnnnnnnnnnnnnnnnnnnnnnnnnnnnnnnnnnnnnnnnnnnnnnnnnnnnnnnnnnnnnnnnnnnnnnnnnnnnnnnnnnnnnnnnnnnnnnnnnnnnnnnnnnnnnnnnnnnnnnnnnnnnnnnnnnnnnnnnnnnnnnnnnnnnggttatggagacatcggctcagtcctctggagaccatcaggaacagcatgttttagtccaggaaatgcaggaactcaaagaaacgctcaaccaagcagaaacaaaatcaaaatcactcgagagtcaagtagagaatctgcagaagnnnnnnnnnnnnnnnnnnnnnnnnnnnnnnnnnnnnnnnnnnnnnnnnnnnnnnnnnnnnnnnnnnnnnnnnnnnnnnnnnnnnnnnnnnnnnnnnnnnnnnnnnnnnnnnnnnnnnnnnnnnnnnnnnnnnnnnnnnnnnnnnnnnnnnnnnnnnnnnnnnnnnnnnnnnnnnnnnnnnnnnnnnnnnnnnnnnnnnnnnnnnnnnnnnnnnnnnnnnnnnnnnnnnnnnnnnnnnnnnnnnnnnnnnnnnnnnnnnnnnnnnnnnnnnnnnnnnnnnnnnnnnnnnnnnnnnnnnnnnnnnnnnnnnnnnnnnnnnnnnnnnnnnnnnnnnnnnnnnnnnnnnnnnnnnnnnnnnnnnnnnnnnnnnnnnnnnnnnnnnnnnnnnnnnnnnnnnnnnnnnnnnnnnnnnnnnnnnnnnnnnnnnnnnnnnnnnnnnnnnnnnnnnnnnnnnnnnnnnnnnnnnnnnnnnnnnnnnnnnnnnnnnnnnnnnnnnnnnnnnnnnnnnnnnnnnnnnnnnnnnnnnnnnnnnnnnnnnnnnnnnnnnnnnnnnnnnnnnnnnnnnnnnnnnnnnnnnnnnnnnnnnnnnnnnnnnnnnnnnnnnnnnnnnnnnnnnnnnnnnnnnnnnnnnnnnnnnnnnnnnnnnnnnnnnnnnnnnnnnnnnnnnnnnnnnnnnnnnnnnnnnnnnnnnnnnnnnnnnnnnnnnnnnnnnnnnnnnnnnnnnnnnnnnnnnnnnnnnnnnnnnnnnnnnnnnnnnnnnnnnnnnnnnnnnnnnnnnnnnnnnnnnnnnnnnnnnnnnnnnnnnnnnnnnnnnnnnnnnnnnnnnnnnnnnnnnnnnnnnnnnnnnnnnnnnnnnnnnnnnnnnnnnnnnnnnnnnnnnnnnnnnnnnnnnnnnnnnnnnnnnnnnnnnnnnnnnnnnnnnnnnnnnnnnnnnnnnnnnnnnnnnnnnnnnnnnnnnnnnnnnnnnnnnnnnnnnnnnnnnnnnnnnnnnnnnnnnnnnnnnnnnnnnnnnnnnnnnnnnnnnnnnnnnnnnnnnnnnnnnnnnnnnnnnnnnnnnnnnnnnnnnnnnnnnnnnnnnnnnnnnnnnnnnnnnnnnnnnnnnnnnnnnnnnnnnnnnnnnnnnnnnnnnnnnnnnnnnnnnnnnnnnnnnnnnnnnnnnnnnnnnnnnnnnnnnnnnnnnnnngagttacccagggagattatacacctatggaagacagtgaagaaacctctcagtctctacaaatagatcttggaccacttcaatcagatcagcaaacaacaacttcatcccaggatggtcaaggcaaaggagatgatgtcat

SEQ ID NO: 18924 - DNA, 631 bp, Macaca Mulatta
gggattgaccatgcagaagagatggagttgctgttggaaaactactaccgattggctgacgatctctccaatgcagctcgggagcttagggtgctgattgatgattcacaaagtattattttcatcaatctggacagccaccgtaacgtgatgatgaggttgaatctacagctgaccatgggaaccttctctctttcgctctttggactaatgggagttgcttttggaatgaatttggaatcttcgcttgaagaggaccacaggattttttggctgattacaggaattatgttcatgggaagtggcctcatctggaggcgcctgctttcatttcttggacgacagctagaagctccattgcctcctatgatggctcctttacctaaaaagactcttctggcagatagaagcatggaattgaaaaacagcctcagactggatggacttggatcaggaaggggcatcctaacaaaccgttagcaacagcccagtggatactgaagtttttttaatggtagtcacaggaaacttctgatactgtttttattattttcttgtatagagtcacacacttgaaaaaaattaatgtttgaaaacaaaaatattttggcagtcacaataccagaactgg

SEQ ID NO: 18925 - DNA, 421 bp, Macaca Mulatta
  misc_feature (1)...(421): n = A,T,C or G
gtggatgctgggcacagagctgtcatctttgaccggttccgtggagtacaggacattgtggtaggggaagggactcactttctcatcccatgggtacagaaaccaattatctttgactgccgttctcgaccacgtaatgtgccggtcatcactggtagcaaannnnnnnnnnnnnnnnnnnnnnnnnnnnnnnnnnnnnnnnnnnnnnnnnnnnnnnnnnnnnnnnnnnnnnnnnnnnnnnnnnnnnnnnnnnnnnnnnnnnnnnnnnnnnnnnnnnnnnnnnnnnnnnnnnnnnnnnnnnnnnnnnnnnnnnnnnnnnnnagaactaatcacccagagagatctggtctccaggcaggtgagcgacgatcttacagagcgagcagccacctttgggctcatcctggatgacgtgtccttg

SEQ ID NO: 18926 - DNA, 89 bp, Macaca Mulatta
atggcggagtacgacttgactactcgcatcgcgcactttttggatcggcatctagtctttccgctccttgagtttctctctgtaaagga

SEQ ID NO: 18927 - DNA, 474 bp, Macaca Mulatta
  misc_feature (1)...(474): n = A,T,C or G
agactgcggcatgaatgtgcaccataaatgccgggagaaggtggccaacctctgcggcatcaaccagaagctcttggccgaggccttgaaccaagtcacccannnnnnnnnnnnnnnnnnnnnnnnnnnnnnnnnnnnnnnnnnnnnnnnnnnnnnnnnnnnnnnnnnnnnnnnnnnnnnnnnnnnnnnnnnnnnnnnnnnnnnnnnnnnnnnnnnnnnnnnnnnnnnnnnnnnnnnnnnnnnnnnnnnnnnnnnnnnnnnnnnnnnnnnnnnnnnnnnnnnnnnnnnnnnnnnnnnnnnnnnnnnnnnnnnnnnnnnnnnnnnnnnggagagtactttgccatcaaggccctcaagaaggatgtagtcctgatcgacgacgacgtggaatgcaccatggttgagaagcgggtgctgacactcgccgcagaaaatccctttctcacccacctcatctgcaccttccagaccaag

SEQ ID NO: 18928 - DNA, 230 bp, Macaca Mulatta
ttcttcctcaacacataatgccttggcgccttgggtccgcaagatatttcttcacaagctttccctttactgctttgcatgagaagtcatgtagataggtacttcactcagaaggaggaaactgagagtggtagtggaccagaatcttctagaaacacattggaaactgcgctcgattctattcgctacattacaagacacatcatgaaggaaaatgatgtccgtgaggt

SEQ ID NO: 18929 - DNA, 671 bp, Macaca Mulatta
  misc_feature (1)...(671): n = A,T,C or G
gagggaagaatacacgcgagtttgaacaacaaagaggctttgcccaaggctgcatccagtatggtatcaaaatgtctgaagggcggagaaccaggcgcttcaaggaaaccaatgacaaagcagagcttgatcgccagtggaagaagattagtgcaatcattgagaagaggaagaagatggaagctgatggggttgaagtcaaaagaccaaaatactaatcaccagttacaaccggagaccctccacaaggatatgcttcccactgttttctttatacaatttccaaaggttgcaagatgttttttggtggatgaatataaaattttattgtgtaattacttggttccattaaaattggttaacnnnnnnnnnnnnnnnnnnnnnnnnnnnnnnnnnnnnnnnnnnnnnnnnnnnnnnnnnnnnnnnnnnnnnnnnnnnnnnnnnnnnnnnnnnnnnnnnnnnnnnnnnnnnnnnnnnnnnnnnnnnnnnnnnnnnnnnnnnnnnnnnnnnnnnnnnnnnnnnnnnnnnnnnnnnnnnnnnnnnnnnnnnnnnnnnnnnnnnnnnnnnnnnnnnnnnnnnnnnnnnnnnnnnnnnnnnnnnnnnnnnnnnnnnnnnnnnnnnnnnnnnnnnnnnnnnnnnnnnnnnnnnnnnnnnnnnnnnnnnnnnnnnnn

SEQ ID NO: 18930 - DNA, 16450 bp, Macaca Mulatta
  misc_feature (1)...(16450): n = A,T,C or G
tgcacagtagtagttatagttaccgtagcagtgattctgnnnnnnnnnnnnnnnnnnnnnnnnnnnnnnnnnnnnnnnnnnnnnnnnnnnnnnnnnnnnnnnnnnnnnnnnnnnnnnnnnnnnnnnnnnnnnnnnnnnnnnnnnnnnnnnnnnnnnnnnnnnnnnnnnnnnnnnnnnnnnnnnnnnnnnnnnnnnnnnnnnnnnnnnnnnnnnnnnnnnnnnnnnnnnnnnnnnnnnnnnnnnnnnnnnnnnnnnnnnnnnnnnnnnnnnnnnnnnnnnnnnnnnnnnnnnnnnnnnnnnnnnnnnnnnnnnnnnnnnnnnnnnnnnnnnnnnnnnnnnnnnnnnnnnnnnnnnnnnnnnnnnnnnnnnnnnnnnnnnnnnnnnnnnnnnnnnnnnnnnnnnnnnnnnnnnnngggttgcaaaactgcgtgatgaaattatggccttaagaaacgaatgttcttctgtgtacagcaaaggacgcatgctgacaacagaacagacaaagctcatgatatcaggaatcactcaaagtttaaactcaggatttgcgcagaccttacaccctagtctcacctcagggctgacccagagtttaacaccttccctaacctcttctagtatgacttctggcctgtcatcagggatgacttcccgcctgactccatctgtcactccagcttatacacctggtttcccatcaggatcagttccaaatttcagttcaggagtagagccaaattcactgcaaactctgaagctgatgcagatccgaaaaccccttctaaagtcttctttgctagatcaaaatttaacagaagaggaaatcaacatgaaatttgttcaggatcttttgaactgggttgaagagatgcaggtannnnnnnnnnnnnnnnnnnnnnnnnnnnnnnnnnnnnnnnnnnnnnnnnnnnnnnnnnnnnnnnnnnnnnnnnnnnnnnnnnnnnnnnnnnnnnnnnnnnnnnnnnnnnnnnnnnnnnnnnnnnnnnnnnnnnnnnnnnnnnnnnnnnnnnnnnnnnnnnnnnnnnnnnnnnnnnnnnnnnnnnnnnnnnnnnnnnnnnnnnngaatacatccaggaatcaggaacggcaccttgatacactccataattttgtaagtcgtgcgactaatgaacttatttggttgaatgaaaaagaagaggaggaagttgcttatgactggagtgagagaaacaccaacgtagctaggaaaaaagattatcatgctnnnnnnnnnnnnnnnnnnnnnnnnnnnnnnnnnnnnnnnnnnnnnnnnnnnnnnnnnnnnnnnnnnnnnnnnnnnnnnnnnnnnnnnnnnnnnnnnnnnnnnnnnnnnnnnnnnnnnnnnnnnnnnnnnnnnnnnnnnnnnnnnnnnnnnnnnnnnnnnnnnnnnnnnnnnnnnnnnnnnnnnnnnnnnnnnnnnnnnnnnnnnnnnnnnnnnnnnnnnnnnnnnnnnnnnnnnnnnnnnnnnnnnnnnnnnnnnnnnnnnnnnnnnnnnnnnnnnnnnnnnnnnnnnnnnnnnnnnnnnnnnnnnnnnnnnnnnnnnnnnnnnnnggaagagaaagaagaacttctgcagtacaaaagcactatagcaagcctaatgggaaaagcaaaaacaataattcaactgaagccaaggaattctgactgtccactcaaaacttctattccaatcaaagctatctgtgactacagacaaattgannnnnnnnnnnnnnnnnnnnnnnnnnnnnnnnnnnnnnnnnnnnnnnnnnnnnnnnnnnnnnnnnnnnnnnnnnnnnnnnnnnnnnnnnnnnnnnnnnnnnnnnnnnnnnnnnnnnnnnnnnnnnnnnnnnnnnnnnnnnnnnnnnnnnnnnnnnnnnnnnnnnnnnnnnnnnnnnnnnnnnnnnnnnnnnnnnnnnnnnnnnnnnnnnnnnnnnnnnnnnnnnnnnnnnnnnnnnnnnnnnnnnnnnnnnnnnnnnnnnnnnnnnnnnnnnnnnnnnnnnnnnnnnnnnnnnnnnntcctggtgaacatcagcaagttctaagtaatctacaatcnnnnnnnnnnnnnnnnnnnnnnnnnnnnnnnnnnnnnnnnnnnnnnnnnnnnnnnnnnnnnnnnnnnnnnnnnnnnnnnnnnnnnnnnnnnnnnnnnnnnnnnnnnnnnnnnnnnnnnnnnnnnnnnnnnnnnnnnnnnnnnnnnnnnnnnnnnnnnnnnnnnnnnnnnnnnnnnnnnnnnnnnnnnnnnnnnnnnnnnnnnnnnnnnnnnnnnnnnnnnnnnnnnnnnnnnnnnnnnnnnnnnnnnnnnnnnnnnnnnnnnnnnnnnnnnnnnnnnnnnnnnnnnagaaactaaagaaagagctggaacgacttaaggatgatttgggaactatcacaaataagtgtgaggagtttntcagtcaagcagcggcctcttcatcagtccctaccctacgatcggagcttaatgtggtccttcagaacatgaaccaagtctattctatgtcttccacttacatagataagnnnnnnnnnnnnnnnnnnnnnnnnnnnnnnnnnnnnnnnnnnnnnnnnnnnnnnnnnnnnnnnnnnnnnnnnnnnnnnnnnnnnnnnnnnnnnnnnnnnnnnnnnnnnnnnnnnnnnnnnnnnnnnnnnnnnnnnagcaatggagatctgaagtagatgaaaagagacaggtattccatgcattacaggatgagttgcagaaagctaaagccatcagtgatgaaatgtttaaaacgtataaagaacgggaccttgattttgactggcacaaagaaaaagcagatcaattagttgaaaggtggcaaaatgttcatgtgcagattgacaacaggttnnnnnnnnnnnnnnnnnnnnnnnnnnnnnnnnnnnnnnnnnnnnnnnnnnnnnnnnnnnnnnnnnnnnnnnnnnnnnnnnnnnnnnnnnnnnnnnnnnnnnnnnnnnnnnnnnnnnnnnnnnnnnnnnnnnnnnnnnnnnnnnnnnnnnnnnnnnnnnnnnnnnnnnnnnnnnnnnnnnnnnnnnnnnnnnnnnnnnnnnnnnnnnnnnnnnnnnnnnnnnnnnnnnnnnnnnnnnnnnnnnnnnnnnnnnnnnnnnnnnnnnnnnnnnnnnnnnnnnnnnnnnnnnnnnnnnnnnnnnnnnnnnnnnnnnnnnnnnnnnnnnnnnnnnnnnnnnnnnnnnnnnnnnnnnnnnnnnnnnnnnnnnnnnnnnnnnnnnnnnnnnnnnnnnnnnnnnnnnnnnnnnnnnnnnnnnnnnnnnnnnnnnnnnnnnnnnnnnnnnnnnnnnnnnnnnnnnnnnnnnnnnnnnnnnnnnnnnnnnnnnnnnnnnnnnnnnnnnnnnnnnnnnnnnnnnnnnnnnnnnnnnnnnnnnnnnnnnnnnnnnnnnnnnnnnnnnnnnnnnnnnnnnnnnnnnnnnnnnnnnnnnnnnnnnnnnnnnnnnnnnnnnnnnnnnnnnnnnnnnnnnnnnnnnnnnnnnnnnnnnnnnnnnnnnnnnnnnnnnnnnnnnnnnnnnnnnnnnnnnnnnnnnnnnnnnnnnnnnnnnnnnnnnnnnnnnnnnnnnnnnnnnnnnnnnnnnnnnnnnnnnnnnnnnnnnnnnnnnnnnnnnnnnnnnnnnnnnnnnnnnnnnnnnnnnnnnnnnnnnnnnnnnnnnnnnnnnnnnnnnnnnnnnnnnnnnnnnnnnnnnnnnnnnnnnnnnnnnnnnnnnnnnnnnnnnnnnnnnnnnnnnnnnnnnnnnnnnnnnnnnnnnnnnnnnnnnnnnnnnnnnnnnnnnnnnnnnnnnnnnnnnnnnnnnnnnnnggaattacagaaagatatgcaaggaagtgcacaggcattggctgaagtagtgaaaaacacggagaacttcttaaaagagaatggtgaaaagctgtcacgggaagataaggctttgattgaacagaaacttaatgaagctaagataaagtgtgaacagcttaatttaaaagcagaacagtctaaaaaggaactggataaagttgtgacaacagcaatcaaggaagaaactgaaaaggtnnnnnnnnnnnnnnnnnnnnnnnnnnnnnnnnnnnnnnnnnnnnnnnnnnnnnnnnnnnnnnnnnnnnnnnnnnnnnnnnnnnnnnnnnnnnnnnnnnnnnnnnnnnnnnnnnnnnnnnnnnnnnnnnnnnnnnnnnnnnnnnnnnnnnnnnnnnnnnnnnnnnnnnnnnnnnnnnnnnnnnnnnnnnnnnnnnnnnnnnnnnnnnnnnnnnnnnnnnnnnnnnnnnnnnnnnnnnnnnnnnnnnnnnnnnnnnnnnnnnnnnnnnnnnnnnnnnnnnnnnnnnnnnnnnnnnnnnnnnnnnnnnnnnnnnnnnnnnnnnnnnnnnnnnnnnnnnnnnnnnnnnnnnnnnnnnnnnnnnnnnnnnnnnnnnnnnnnnnnnnnnnnnnnnnnnnnnnnnnnnnnnnnnnnnnnnnnnnnnnnnnnnnnnnnnnnnnnnnnnnnnnnnnnnnnnnnnnnnnnnnnnnnnnnnnnnnnnnnnnnnnnnnnnnnnnnnnnnnnnnnnnnnnnnnnnnnnnnnnnnnnnnnnnnnnnnnnnnnnnnnnnnnnnnnnnnnnnnnnnnnnnnnnnnnnnnnnnnnnnnnnnnnnnnnnnnnnnnnnnnnnnnnnnnnnnnnnnnnnnnnnnnnnnnnnnnnnnnnnnnnnnnnnnnnnnnnnnnnnnnnnnnnnnnnnnnnnnnnnnnnnnnnnnnnnnnnnnnnnnnnnnnnnnnnnnnnnnnnnnnnnnnnnnnnnnnnnnnnnnnnnnnnnnnnnnnnnnnnnnnnnnnnnnnnnnnnnnnnnnnnnnnnnnnnnnnnnnnnnnnnnnnnnnnnnnnnnnnnnnnnnnnnnnnnnnnnnnnnnnnnnnnnnnnnnnnnnnnnnnnnnnnnnnnnnnnnnnnnnnnnnnnnnnnnnnnnnnnnnnnnnnnnnnnnnnnnnnnnnnnnnnnnnnnnnnnnnnnnnnnnnnnnnnnnnnnnnnnnnnnnnnnnnnnnnggctctgcaaggacagatatcaagtcagcaggttgctgtagagaaactgaagaanacggctgaagtgcttttagatgccaggggatctttacttccagccaagaatgatatccagaaaacacttggatgacattgttgggagatacgaggatctgtccaagtctgttaatgaacgaaatgaaaaactccagataaccttgacccgttcactgagtgtgcaggatggcttggatgaaatgctggactggatgggaagtgtggaaagttctctgaaagaacaaggtcaagtgcctttaaactctgctgctcttcaggatatcatcagtaaaaacatnnnnnnnnnnnnnnnnnnnnnnnnnnnnnnnnnnnnnnnnnnnnnnnnnnnnnnnnnnnnnnnnnnnnnnnnnnnnnnnnnnnnnnnnnnnnnnnnnnnnnnnnnnnnnnnnnnnnnnnnnnnnnnnnnnnnnnnnnnnnnnnnnnnnnnnnnnnnnnnnnnnnnnnnnnnnnnnnnnnnnnnnnnnnnnnnnnnnnnnnnnnnnnnnnnnnnnnnnnnnnnnnnnnnnnnnnnnnnnnnnnnnnnnnnnnnnnnnnnnnnnnnnnnnnnnnnnnnnnnnnnnnnnnnnnnnnnnnnnnnnnnnnnnnnnnnnnnnggaatcaacttctgaatttttagaacacaagaaagatcttgaagttttgcatagtctcttgaaggagatatccagccatggcttaccaagtgataaggctttggtttttgaaaaaacaaataatttgtcaaagaaattcaaggaaatggaagataccatcaaagaaaannnnnnnnnnnnnnnnnnnnnnnnnnnnnnnnnnnnnnnnnnnnnnnnnnnnnnnnnnnnnnnnnnnnnnnnnnnnnnnnnnnnnnnnnnnnnnnnnnnnnnnnnnnnnnnnnnnnnnnnnnnnnnnnnnnnnnnnnnnnnnnnnnnnnnnnnnnnnnnnnnnnnnnnnnnnnnnnnnnnnnnnnnnnnnnnnnnnnnnnnnnnnnnnnnnnnnnnnnnnnnnnnnnnnnnnnnnnnnnnnnnnnnnnnnnnnnnnnnnnnnnnnnnnnnnnnnnnnnnnnnnnnnnnnnnnnnnnnnnnnnnnnnnnnnnnnnnnnnnnnnnnnnnnnnnnnnnnnnnnnnnnnnnnnnnnnnnnnnnnnnnnnnnnnnnnnnnnnnnnnnnnnnnnnnnnnnnnnnnnnnnnnnnnnnnnnnnnnnnnnnnnnnnnnnnnnnnnnnnnnnnnnnnnnnnnnnnnnnnnnnnnnnnggaagaatcaagtgcaatgatgcactggttacagaaaatgaacaaaactgcaacgaaatggcatcagtcacctgcacctacagatactgaagctgtgaagactcaagttgagcagaataagnnnnnnnnnnnnnnnnnnnnnnnnnnnnnnnnnnnnnnnnnnnnnnnnnnnnnnnnnnnnnnnnnnnnnnnnnnnnnnnnnnnnnnnnnnnnnnnnnnnnnnnnnnnnnnnnnnnnnnnnnnnnnnnnnnnnnnnnnnnnnnnnnnnnnnnnnnnnnnnnnnnnnnnnnnnnnnnnnnnnnnnnnnnnnnnnnnnnnnnnnnnnnnnnnnnnnnnnnnnnnnnnnnnnnnnnnnnnnnnnnnnnnnnnnnnnnnnnnnnnnnnnnnnnnnnnnnnnnnnnnnnnnnnnnnnnnnnnnnnnnnnnnnnnnnnnnnnnnnnnnnnnnnnnagattctgctgcaagaatttgccactcggaaacctcaatatgaacagctcacagcagctggtcagggcattctgagcagacctggagaagacccttctttacatgggattgnnnnnnnnnnnnnnnnnnnnnnnnnnnnnnnnnnnnnnnnnnnnnnnnnnnnnnnnnnnnnnnnnnnnnnnnnnnnnnnnnnnnnnnnnnnnnnnnnnnnnnnnnnnnnnnnnnnnnnnnnnnnnnnnnnnnnnnnnnnnnnnnnnnnnnnnnnnnnnnnnnnnnnnnnnnnnnnnnnnnnnnnnnnnnnnnnnnnnnnnnnnnnnnnnnnnnnnnnnnnnnnnnnnnnnnnnnnnnnnnnnnnnnnnnnnnnnnnnnnnnnnnnnnnnnnnnnnnnnnnnnnnnnnnnnnnnnnnnnnnnnnnnnnnnnnnnnnnnnnnnnnnnnnnnnnnnnnnnnnnnnnnnnnnnnnnnnnnnnnnnnnnnnnnnnnnnnnnnnnnnnnnagagagtcatgtccagcaccttcagtcagcctgtgcaagctctcatcaatttcagcaaatgtctagagattttcaggcttggctagatacaaagaaagaagagcaaaacaagtctcatccaatatccgccaaactcaatgtcttggagtcgttaattaaagatcataaagactttagtaaaactttgactgctcagtctcatatttatgaaaaaaccattgcagaaggtgaaaatctattattaaaaacacaagggtctgagaaggcagccttacagttacagcttaatacaattaaaaccagttgggatacatttaatnnnnnnnnnnnnnnnnnnnnnnnnnnnnnnnnnnnnnnnnnnnnnnnnnnnnnnnnnnnnnnnnnnnnnnnnnnnnnnnnnnnnnnnnnnnnnnnnnnnnnnnnnnnnnnnnnnnnnnnnnnnnnnnnnnnnnnnnnnnnnnnnnnnnnnnnnnnnnnnnnnnnnnnnnnnnnnnnnnnnnnnnnnnnnnnnnnnnnnnnnnnnnnnnnnnnnnnnnnnnnnnnnnnnnnnnnnnnnnnnnnnnnnnnnnnnnnnnnnnnnnnnnnnnnnnnnnnnnnnnnnnnnnnnnnnnnnnnnnnnnnnnnnnnnnnnnnnnnnnnnnnnnnnnnnnnnnnnnnnnnnnnnnnnnnnnnnnnnnnnnnnnnnnnnnnnnnnnnnnnnnnnnnnnnnnnnnnnnnnnnnnnnnnnnnnnnnnnnnnnnnnnnnnnnnnnnnnnnnnnnnnnnnnnnnnnnnnnnnnnnnnnnnnnnnnnnnnnnnnnnnnnnnnnnnnnnnnnnnnnnnnnnnnnnnnnnnnnnnnnnnnnnnnnnnnnnnnnnnnnnnnnnnnnnnnnnnnnnnnnnnnnnnnnnnnnnnnnnnnnnnnnnnnnnnnnnnnnnnnnnnnnnnnnnnnnnnnnnnnnnnnnnnnnnnnnnnnnnnnnnnnnnnnnnnnnnnnnnnnnnnnnnnnnnnnnnnnnnnnnnnnnnnnnnnnnnnnnnnnnnnnnnnnnnnnnnnnnnnnnnnnnnnnnnnnnnnnnnnnnnnnnnnnnnnnnnnnnnnnnnnnnnnnnnnnnnnnnnnnnnnnnnnnnnnnnnnnnnnnnnnnnnnnnnnnnnnnnnnnnnnnnnnnnnnnnnnnnnnnnnnnnnnnnnnnnnnnnnnnnnnnnnnnnnnnnnnnnnnnnnnnnnnnnnnnnnnnnnnnnnnnnnnnnnnnnnnnnnnnnnnnnnnnnnnnnnnnnnnnnnnnnnnnnnnnnnnnnnnnnnnnnnnnnnnnnnnnnnnnnnnnnnnnnnnnnnnnnnnnnnnnnnnnnnnnnnnnnnnnnnnnnnnnnnnnnnnnnnnnnnnnnnnnnnnnnnnnnnnnnnnnnnnnnnnnnnnnnnnnnnnnnnnnnnnnnnnnnnnnnnnnnnnnnnnnnnnnnnnnnnnnnnnnnnnnnnnnnnnnnnnnnnnnnnnnnnnnnnnnnnnnnnnnnnnnnnnnnnnnnnnnnnnnnnnnnnnnnnnnnnnnnnnnnnnnnnnnnnnnnnnnnnnnnnnnnnnnnnnnnnnnnnnnnnnnnnnnnnnnnnnnnnnnnnnnnnnnnnnnnnnnnnnnnnnnnnnnnnnnnnnnnnnnnnnnnnnnnnnnnnnnnnnnnnnnnnnnnnnnnnnnnnnnnnnnnnnnnnnnnnggagattccaggatgttccggagtccctgcttagctggatggtggacactgaggagcttgtggccaatcagaagcccccatcggctgagttcaaagtggtaaaagcccagatacaagaacaaaagnnnnnnnnnnnnnnnnnnnnnnnnnnnnnnnnnnnnnnnnnnnnnnnnnnnnnnnnnnnnnnnnnnnnnnnnnnnnnnnnnnnnnnnnnnnnnnnnnnnnnnnnnnnnnnnnnnnnnnnnnnnnnnnnnnnnnnnnnnnnnnnnnnnnnnnnnnnnnnnnnnnnnnnnnnnnnnnnnnnnnnnnnnnnnnnnnnnnnnnnnnnnnnnnnnnnnnnnnnnnnnnnnnnnnnnnnnnnnnnnnnnnnnnnnnnnnnnnnnnnnnnnnnnnnnnnnnnnnnnnnnnnnnnnnnnnnnnnnnnnnnnnnnnnnnnnnnnnnnnnnnnnnnngccttagaagatgacatcatcaatcacaataaacatttacaccaggctgttagcattggccagtccttaaaggttttgagctccagggaggataaagatatggtgcagagtaaattagacttctctcaagtgtggtacattgagattcaagagaaaagtcacagcaggtctgagctcctccagcaggccttatgtaatgctaagatttttggggaagatgaagttgaactgatgaactggctgaatgaagtgcatgacaaactgagcaagctctcagtccaggattacagcactgagggggtaagaagcagcagtctgaactnnnnnnnnnnnnnnnnnnnnnnnnnnnnnnnnnnnnnnnnnnnnnnnnnnnnnnnnnnnnnnnnnnnnnnnnnnnnnnnnnnnnnnnnnnnnnnnnnnnnnnnnnnnnnnnnnnnnnnnnnnnnnnnnnnnnnnnnnnnnnnnnnnnnnnnnnnnnnnnnnnnnnnnnnnnnnnnnnnnnnnnnnnnnnnnnnnnnnnnnnnnnnnnnnnnnnnnnnnnnnnnnnnnnnnnnnnnnnnnnnnnnnnnnnnnnnnnnnnnnnnnnnnnnnnnnnnnnnnnnnnnnnnnnnnnnnnnnnnnnnnnnnnnnnnnnnnnnnnnnnnnnnnnnggaactgaaaaaggaagctaagaacaacaaagccttactggactcccttaatgaagtgagcagtgctttgctggaactggtaccatggagggcaagagaaggacnnnnnnnnnnnnnnnnnnnnnnnnnnnnnnnnnnnnnnnnnnnnnnnnnnnnnnnnnnnnnnnnnnnnnnnnnnnnnnnnnnnnnnnnnnnnnnnnnnnnnnnnnnnnnnnnnnnnnnnnnnnnnnnnnnnnnnnnnnnnnnnnnnnnnnnnnnnnnnnnnnnnnnnnnnnnnnnnnnnnnnnnnnnnnnnnnnnnnnnnnnnnnnnnnnnnnnnnnnnnnnnnnnnnnnnnnnnnnnnnnnnnnnnnnnnnnnnnnnnnnnnnnnnnnnnnnnnnnnnnnnnnnnnnnnnnnnnnnnnnnnnnnnnnnnnnnnnnnnnnnnnnnnnnnnagaaaaaactggacaaagtactgaagaactatgataccatctgccagattaattcagaaaggtatctgcagctggaacgggcacagtccctggttaaccaattctgggaaacatatgaagaactttggccatggctgacagaaacacaatcagtcatctctcagcttcccgccccagcccttgaatatgaaactctaagacagcagcaggaagaacatcgnnnnnnnnnnnnnnnnnnnnnnnnnnnnnnnnnnnnnnnnnnnnnnnnnnnnnnnnnnnnnnnnnnnnnnnnnnnnnnnnnnnnnnnnnnnnnnnnnnnnnnnnnnnnnnnnnnnnnnnnnnnnnnnnnnnnnnnnnnnnnnnnnnnnnnnnnnnnnnnnnnnnnnnnnnnnnnnnnnnnnnnnnnnnnnnnnnnnnnnnnnnnnnnnnnnnnnnnnnnnnnnnnnnnnnnnnnnnnnnnnnnnnnnnnnnnnnnnnnnnnnnnnnnnnnnnnnnnnnnnnnnnnnnnnnnnnnnnnnnnnnnnnnnnnnnnnnnnnnnnnnnnnnnnnnnnnnnnnnnnnnnnnnnnnnnnnnnnnnnnnnnnnnnnnnnnnnnnnnnnnnnnnnnnnnnnnnnnnnnnnnnnnnnnnnnnnnnnnnnnnnnnnnnnnnnnnnnnnnnnnnnnnnnnnnnnnnnnnnnnnnnnnnnnnnnnnnnnnnnnnnnnnnnnnnnnnnnnnnnnnnnnnnnnnnnnnnnnnnnnnnnnnnnnnnnnnnnnnnnnnnnnnnnnnnnnnnnnnnnnnnnnnnnnnnnnnnnnnnnnnnnnnnnnnnnnnnnnnnnnnnnnnnnnnnnnnnnnnnnnnnnnnnnnnnnnnnnnnnnnnnnnnnnnnnnnnnnnnnnnnnnnncataagggaagaaatagatggactacaggaggagctggatatagttattaacctgggttctgaactcattgcggcatgtggggagcctgataaacccattgtcaagaagagtatagatgagnnnnnnnnnngcatgggattctctaataaagcttggaaagaccggattgacaaacttgaggaggcaatgcaggctgccgttcagtaccaggatggactgcagnnnnnnnnnnnnnnnnnnnnnnnnnnnnnnnnnnnnnnnnnnnnnnnnnnnnnnnnnnnnnnnnnnnnnnnnnnnnnnnnnnnnnnnnnnnnnnnnnnnnnnnnnnnnnnnnnnnnnnnnnnnnnnnnnnnnnnnnnnnnnnnnnnnnnnnnnnnnnnnnnnnnnnnnnnnnnnnnnnnnnnnnnnnnnnnnnnnnnnnnnnnnnnnnnnnnnnnnnnnnnnnnnnnnnnnnnnnnnnnnnnnnnnnnnnnnnnnnnnnnnnnnnnnnnnnnnnnnnnnnnnnnnnnnnnnnnnnnnnnnnnnnnnnnnnnnnnnnnnnnnnnnnnnnnnnnnnnnnnnnnnnnnnnnnnnnnnnnnnnnnnnnnnnnnnnnnnnnnnnnnnnnnnnnnnnnnnnnnnnnnnnnnnnnnnnnnnnnnnnnnnnnnnnnnnngtgctccagaatgatgtattagcccatcagtccacagaggaagctgttaataaagcaggaaatgatctaattgaatcaagtgcaggagaaagaagcagcaaccttcagaaacagctacaggttttaaatccacgctggcaaaatgttttggaaaaaactgaacaaaggaagcagcagctggatggtggctttgcgccaggnnnnnnnnnnnnnnnnnnnnnnnnnnnnnnnnnnnnnnnnnnnnnnnnnnnnnnnnnnnnnnnnnnnnnnnnnnnnnnnnnnnnnnnnnnnnnnnnnnnnnnnnnnnnnnnnnnnnnnnnnnnnnnnnnnnnnnnnnnnnnnnnnnnnnnnnnnnnnnnnnnnnnnnnnnnnnnnnnnnnnnnnnnnnnnnnnnnnnnnnnnnnnnnnnnnnnnnnnnnnnnnnnnnnnnnnnnnnnnnnnnnnnnnnnnnnnnnnnnnnnnnnnnnnnnnnnnnnnnnnnnnnnnnnnnnnnnnnnnnnnnnnnnnnnnnnnnnnnnnnnnnnnnnnnnnnnnnnnnnnnnnnnnnnnnnnnnnnnnnnnnnnnnnnnnnnnnnnnnnnnnnnnnnnnnnnnnnnnnnnnnnnnnnnnnnnnnnnnnnnnnnnnnnnnnnnnnnnnnnnnnnnnnnnnnnnnnnnnnnnnnnnnnnnnnnnnnnnnnnnnnnnnnnnnnnnnnnnnnnnnnnnnnnnnnnnnnnnnnnnnnnnnnnnnnnnnnnnnnnnnnnnnnnnnnnnnnnnnnnnnnnnnnnnnnnnnnnnnnnnnnnnnnnnnnnnnnnnnnnnnnnnnnnnnnnnnnnnnnnnnnnnnnnnnnnnnnnnnnnnnnnnnnnnnnnnnnnnnnncagttccatgaagcttggagtaaacttatggagtggctggaagagtcagaaaagtctttggnnnnnnnnnnnnnnnnnnnnnnnnnnnnnnnnnnnnnnnnnnnnnnnnnnnnnnnnnnnnnnnnnnnnnnnnnnnnnnnnnnnnnnnnnnnnnnnnnnnnnnnnnnnnnnnnnnnnnnnnnnnnnnnnnnnnnnnnnnnnnnnnnnnnnnnnnnnnnnnnnnnnnnnnnnnnnnnnnnnnnnnnnnnnnnnnnnnnnnnnnnnnnnnnnnnnnnnnnnnnnnnnnnnnnnnnnnnnnnnnnnnnnnnnnnnnnnnnnnnnnnnnnnnnnnnnnnnnnnnnnnnnnnnnnnnnnnnnnnnnnnnnnnnnnnnnnnnnnnnnnnnnnnnnnnnnnnnnnnnnnnnnnnnnnnnnnnnnnnnnnnnnnnnnnnnnnnnnnnnnnnnnnnnnnnnnnnnnnnnnnnnnnnnnnnnnnnnnnnnnnnnnnnnnnnnnnnnnnnnnnnnnnnnnnnnnnnnnnnnnnnnnnnnnnnnnnnnnnnnnnnnnnnnnnnnnnnnnnnnnnnnnnnnnnnnnnnnnnnnnnnnnnnnnnnnnnnnnnnnnnnnnnnnnnnnnnnnnnnnnnnnnnnnnnnnnnnnnnnnnnnnnnnnnnnnnnnnnnnnnnnnnnnnnnnnnnnnnnnnnnnnnnnnnnnnnnnnnnnnnnnnnnnnnnnnnnnnnnnnnnnnnnnnnnnnnnnnnnnnnnnnnnnnnnnnnnnnnnnnnnnnnnnnnnnnnnnnnnnnnnnnnnnnnnnnnnnnnnnnnnnnnnnnnnnnnnnnnnnnnnnnnnnnnnnnnnnnnnnnnnnnnnnnnnnnnnnnnnnnnnnnnnnnnnnnnnnnnnnnnnnnnnnnnnnnnnnnnnnnnnnnnnnnnnnnnnnnnnnnnnnnnnnnnnnnnnnnnnnnnnnnnnnnnnnnnnnnnnnnnnnnnnnnnnnnnnnnnnnnnnnnnnnnnnnnnnnnnnnnnnnnnnnnnnnnnnnnnnnnnnnnnnnnnnnnnnnnnnnnnnnnnnnnnnnnnnnnnnnnnnnnnnnnnnnnnnnnnnnnnnnnnnnnnnnnnnnnnnnnnnnnnnnnnnnnnnnnnnnnnnnnnnnnnnnnnnnnnnnnnnnnnnnnnnnnnnnnnnnnnnnnnnnnnnnnnnnnnnnnnnnnnnnnnnnnnnnnnnnnnnnnnnnnnnnnnnnnnnnnnnnnnnnnnnnnnnnnnnnnnnnnnnnnnnnnnnnnnnnnnnnnnnnnnnnnnnnnnnnnnnnnnnnnnnnnnnnnnnnnnnnnnnnnnnnnnnnnnnnnnnnnnnnnnnnnnnnnnnnnnnnnnnnnnnnnnnnnnnnnnnnnnnnnnnnnnnnnnnnnnnnnnnnnnnnnnnnnnnnnnnnnnnnnnnnnnnnnnnnnnnnnnnnnnnnnnnnnnnnnnnnnnnnnnnnnnnnnnnnnnnnnnnnnnnnnnnnnnnnnnnnnnnnnnnnnnnnnnnnnnnnnnnnnnnnnnnnnnnnnnnnnnnnnnnnnnnnnnnnnnnnnnnnnnnnnnnnnnnnnnnnnnnnnnnnnnnnnnnnnnnnnnnnnnnnnnnnnnnnnnnnnnnnnnnnnnnnnnnnnnnnnnnnnnnnnnnnnnnnnnnnnnnnnnnnnnnnnnnnnnnnnnnnnnnnnnnnnnnnnnnnnnnnnnnnnnnnnnnnnnnnnnnnnnnnnnnnnnnnnnnnnnnnnnnnnnnnnnnnnnnnnnnnnnnnnnnnnnnnnnnnnnnnnnnnnnnnnnnnnnnnnnnnnnnnnnnnnnnnnnnnnnnnnnnnnnnnnnnnnnnnnnnnnnnnnnnnnnnnnnnnnnnnnnnnnnnnnnnnnnnnnnnnnnnnnnnnnnnnnnnnnnnnnnnnnnnnnnnnnnnnnnnnnnnnnnnnnnnnnnnnnnnnnnnnnnnnnnnnnnnnnnnnnnnnnnnnnnnnnnnnnnnnnnnnnnnnnnnnnnnnnnnnnnnnnnnnnnnnnnnnnnnnnnnnnnnnnnnnnnnnnnnnnnnnnnnnnnnnnnnnnnnnnnnnnnnnnnnnnnnnnnnnnnnnnnnnnnnnnnnnnnnnnnnnnnnnnnnnnnnnnnnnnnnnnnnnnnnnnnnnnnnnnnnnnnnnnnnnnnnnnnnnnnnnnnnnnnnnnnnnnnnnnnnnnnnnnnnnnnnnnnnnnnnnnnnnnnnnnnnnnnnnnnnnnnnnnnnnnnnnnnnnnnnnnnnnnnnnnnnnnnnnnnnnnnnnnnnnnnnnnnnnnnnnnnnnnnnnnnnnnnnnnnnnnnnnnnnnnnnnnnnnnnnnnnnnnnnnnnnnnnnnnnnnnnnnnnnnnnnnnnnnnnnnnnnnnnnnnnnnnnnnnnnnnnnnnnngattccaagaagactcccagccgaccaggaagtcgagctggaagcaaagctggcagcagggccagcagccgccgaggcagtgatgcatcagactttgacatttcagaaatccagtccgtgtgctcagatgtggaaactgtcccccagacacacagacctacaccccgagcaggttctcggccatccacagccaagccttcaaaaatccccacgccccagaggaaatcacctgccagcaaattggacaagtcctcaaagagatagtgcaattggttctaccaaggcccttccttgagcatttattatttaaatttgaacaatgtaaaatatggtgtagaaattcttgtgaattattgcaagaggcgagtttaaaattctgcagatggccttatttgtgtatttgtctttttattttatctgtataatgtttttgtcagatattctggggttaaaatcacatcatatgtgaggaggaaaagtttaacatgaactaacatttctgcactgtaacgtgcagggcacacactaaactcagttactgtacctacaggtaagtctacatcctctctgacagccacagcactatatcaatccctgacgttaaggatacctcatgacattttcctgtttttatggaaactctgagaagctgaatgatacatgcgggggatattttttgagatgatttaaatgtaacccaaaagatggaagacagaaagataaacgcacccacacacagtctttgcagtatctgacagagaactcacaggaagttacttcaagcacttgccagtactatgatattcaagtaccttgcagcatttctgtgccattgctttcaatgaggccagaggcatcctggatattagacctattatactgtaagaatataagtataaagtgcattcatatacatgtgaggttttcttttgcttgagtggacagtagcacctgtatcattgaactcattttgtatcagagcaattttgcttgcagaaagctatgaaataaaacatgtcccttaactgcattgctatggaattaatttttttccccagggaaaattagtgtatttttttatgagcaatatcaaatttggagtgaccaaaagatacttaaaaatgggtttattttgatttctcatctgaaataatcatgttctggtattatatctatctatatttaataaatatatacatttta

SEQ ID NO: 18931 - DNA, 96 bp, Macaca Mulatta
gcctgagttctaccaagtatgccacaccaaaaaggactatgaagaaattggacctagcatttgtcgtcacaatccagtgtttggagtcatgtcgta

SEQ ID NO: 18932 - DNA, 600 bp, Macaca Mulatta
  misc_feature (1)...(600): n = A,T,C or G
agcaaacacaagatatcagaccagagaaagactgatttccagcgtcctgcaggggctgcggagccagagcccaaggacaggggcctgctgaggaggtccagcgcagctgctgacgtccaggaagaaaacctctatgctgccatgaaggacacacagcctgaggacggggtggagctggacagtcaggctgctgcatctgaagacccccaggatgtgacctacgcccagctgcagagcttgaccctcagacgggaggcaactgagcctcctccaacccaggaaggggaacctccagctgagcccagcgtctacgccaccctggccatccactagcccggaggggacccagaccccacactcagcaggagacttgggactgctgaaggcacgagagctgcccccagtggacaccagtgaaccccagtcagcctggacccctaacacagaccacgaggagacgctgggaacttgtgggactcacctgaactccaaagatgactaatataggccgnnnnnnnnnnnnnnnnnnnnnnnnnnnnnnnnnnnnnnnnnnnnnnnngggcggatcacaaggtccggagatcgagaccatcctgggta

SEQ ID NO: 18933 - DNA, 2167 bp, Macaca Mulatta
  misc_feature (1)...(2167): n = A,T,C or G
aggaaccaaaggaggaaaatggattgcagaaaatgaagacaaaaccgtcgaatcgagcaaagtgnnnnnnnnnnnnnnnnnnnnnnnnnnnnnnnnnnnnnnnnnnnnnnnnnnnnnnnnnnnnnnnnnnnnnnnnnnnnnnnnnnnnnnnnnnnnnnnnnnnnnnnnnnnnnnnnnnnnnnnnnnnnnnnnnnnnnnnnnnnnnnnnnnnnagttgccggccttctgatgcttctgctacaagatctcgacctctggccactggaccatctttccagtcccaccaagagaaaaccacagactctgggatcactgaaggcatgtcttcctgngcatatggcagctggtacctccatcactgtttaaaggctcacatatcagtcagggaaacgaggctgaggaaagagaggagccttgggaccacactgaaaaaactgaagaggagccggtctctggcagctcaggaagctgggaccagtcgagccagccagtgtttgagaatgtgaacgttaaatcttttgacagatgtactggccacttggctgagcacacacagtgtgggaagccacaggaaagtactgggaggggttcttttctcagagctgcccagggtagcggggacacatctaggcactgtctgcctaccctagcagatgccaaaggtctccaggacattgggggcactgtgaactacttctggggtattccattctgccctgatggagtagaccctaaccagtataccaaggtcattctctgccagttggaggtttatcaaaagagcctgaaaatggctcagaggcagctcttaaaaaaaaaagattttggggaaccagtgttacctagacctccttctctgatccagaatgaatgtggccaaggagagcaggctagtgaaaaaaatgaatgcatctcagaagatatgggagatgaagacaaagaggagaggcaggagtctagggcatctgactggcactcaaaaaccaaggatttccaggaaagctcaattaaaagcttgaaagagaaacttttgttggaggaagaaccaacaaccagtcatggtcagnnnnnnnnnnnnnnnnnnnnnnnnnnnnnnnnnnnnnnnnnnnnnnnnnnnnnnnnnnnnnnnnnnnnnnnnnnnnnnnnnnnnnnnnnnnnnnnnnnnnnnnnnnnnnnnnnnnnnnnnnnnnnnnnnnnnnnnnnngagacacaactaagttcctctgaaacttttgaccttgaaaaagaagtctctccaggtagcagagagatcttggatnnnnnnnnnnnnnnnnnnnnnnnnnnnnaggttggtaacaaggaagatgctaagaaggaagtacctatttctatcttctcatccagtaaccaggtatcctgcccgctatgtaaccaaagctttccacccacaaagattgaacgacatgccatgtactgcaatggtctgatgggagaagatacagnnnnnnnnnnnnnnnnnnnnnnnnnnnnnnnnnnnnnnnnnnnnnnnnnnnnnnnnnnnnnnnnnnnnnnnnnnnnnnngaatgagaagtgttatctctgtaaatccctggtcccatttagagagtatcagtgtcatgtggactcctgtctccagcttgcaaaggctgaccaaggagatgggcctgaagggagtggaagagcatgttcaactgtggaggggaagcggcagcagaggctgcggaacccaaaggnnnagggtgccctcaccagggatggaagaggcaggctgcagcagagagatgcagagttccttcacacatcgtgatttaaatgaatctcccatcaagtcttttgtttccatttcagaagccacagattgcttagtggactttaaaaagcaagttactgtccagccgggtcgtcggacacggaccaaagttggcagaggaagaaggagaaaattctgaatttctagggtccaaaagttgacaaagccattagtaggaggggtgggccatgttcattaagccatagtggtcccttgttcattgttgagtaagttttagccctgcagttttcaccaccagcacccactccgcattctggtttttatgttttttatgacctatgcagacaactgtgtatagtattctgttttataacagtttttttgaattcacttatagttaaaaatttaaatata

SEQ ID NO: 18934 - DNA, 756 bp, Macaca Mulatta
  misc_feature (1)...(756): n = A,T,C or G
ggggctcttcgttggtcgtgcttcccaacatggggcagtctattaaggatcacggagctgaatgctgccgcagctagaaatgctcaagaacgagctggaccagggaagtggagttcttgtccacgtccattgcccagctcaaagtggtacagaccaagtatgtggaagcgaaggactgtctgaacgtgctgaacaagagcaacgaggggaaagaattacttgtcccactgacgagttctatgtatgtccatgggaagctgcatgatgtggaagatgtgctcatcgatgtgggaactgggtattatgtagagaagacagctgaggatgccaaggactttttcaagaggaagatagattttctaaccaaacagatggagaaaatccaaccagctcttcaggaaaagcacgccatgaaacaggctgtcatggaaatgatgagtcagaagattcggcagctgacagccctgggagcagctcaggctactgctagggcctgagagtttttggacaaatggggcagagggacacggttttgggcatggcttcctggtgctgggaagggtcttgtgtttaatgccaataaatgtgccagctgggcgccancntagaatgnnnnnnnnnnnnnnaaaacttgtcggggcggcctcgggcgcttcnnnnnnnnnnnnnngaaccatttccttttgggcgccgcggggcccccatttagggataagttggaacacttggggtccataaacctggttttcgaaaaat

SEQ ID NO: 18935 - DNA, 293 bp, Macaca Mulatta
gaataggtggtctgaacgtggtgtctcactctgaaaagcaggaatgtaagacgatgaaagagacaatgtaatactgttggtccaaaagcatttaaaatcaatagatctgggattatgtggccttaggtagctgactgtacatctttccctaaatcgatccatgttaccacatagtagttttagtttaggactcaataacagtaaagtgtttactatgtgcaagggtattggagttcttatgaccacagatcatcggtactgttgtctcatgtagtgctgaaactgaaatggtc

SEQ ID NO: 18936 - DNA, 172 bp, Macaca Mulatta
agctttgagagcactgtgggccagggttcagacacatacatctacatcttcagggtgtgccgggaagctggcaaccacacttctggggcaggcctggtgcaaatcaacaaaagtaatgggaaggagacagtggtagggagactcaacgagactcacatcttcaacggaagta

SEQ ID NO: 18937 - DNA, 639 bp, Macaca Mulatta
  misc_feature (1)...(639): n = A,T,C or G
ggggggagatggctgagctgtacgtgaagccgggcaacaaggagcgcggctggaacgacccgccgcagttctcatacgggctgcagacccaggccagcggacacaggcgctcgctgctcaccaagagggtcgccgcaccccaggatggatcccccagagttcccgcatcagagacttctcctgggcctcccccaatggggcctccacctccttcaagtaaggctcccaggtccccacctgtggggagtggtcctgcctctggtatggagcccacaagtttcccagtcgagtctgaggctctgatggaggatgtgctgagacctttggaacaggcattggaagactgccgtggccacacaaggaagcaggtatgtgatgacatcagccgacgcctggcactgctgcaggaacagtgggctggaggaaagttgtcaatacctgtaaagaagagaatggctgtactggtgcaagagctttcaagccatcggtgggacgcagcagatgacatccaccgctcactcatggttgactatgtgactgaggtcagtcagtggatggtaggagttaaagattaattgcagaaaagaggagtctgttttcagaggaggcagcccatgaagagaaatctgcagccacacn

SEQ ID NO: 18938 - DNA, 771 bp, Macaca Mulatta
  misc_feature (1)...(771): n = A,T,C or G
ggattcaactatagtagtgttttaaaaagttaaatgaagaataaacgcaaatataaaagctctgactttgccctgtatgtatgatgacttcagtgtccaagatgaagtttaatacctgtaaaaactacgaagaagttcccctagcatttctaggccaaaccttgtaattgacttcagctatgtacgtggacaagcttagactgaaatgctaggtatatgtgttggcttcagtgtatgacccttcattgttaagctatgaaagtaaaactgtatttaactggcaatnnnnnnnnnnnnnnnnnnnnngagaagtgttggtctgtatagttctttgtattaagtgggattcattgtaatgcctttgcatttattctattgcctcaactgttacttgaagatggcgtaatatataatttatcctgtggtatcagtgataaaaatgatacctttctgtaggaggggtttatcataatatgctgcttcttgaaggcttgcacttccagaattgtgtttccttccgctgtgcccattnnnnnnnnnnnnnnnnnnnnnccatatatatcttggaccattcctgggcatttgcccccctccttgtctgtggaccataagcccgagtagtgacttccaagctgggtaatgtacaaattaaagtgaaaagattcttacctgggagaaattaatttgcatggcaaatataagaaagggggttctttaaggtagtttacaggaataactttaaacccattttaaactattgcctcccaaagt

SEQ ID NO: 18939 - DNA, 1276 bp, Macaca Mulatta
  misc_feature (1)...(1276): n = A,T,C or G
tgcacccctcccagcccagctccagaatggccctgccccccagtcccctggccatggaatatgtcaatgactttgacttgatgaagtttgaggtaaagcgggagccctctgagggccgtcctggcccccctacagcctcactgggctccacaccttacagctcagtgcctccttcacccaccttcagtgaaccaggcatggtgggggcgaccgagggcacccggccaggcctggaggagctgtactggctggctaccctgcagcagcagctggggtctggggaggcactggggctgagtcctgaagatgccatggagctgctgcagggtcagggcccagtccctgttgatgggcctcacggctactacccagggagcccagaggagacaggagcccagcacatccagnnnnnnnnnnnnnnnnnnnnnnnnnnnnnnnnnnngatgtctgtgcgggagctaaaccggcagctgcggggctgcggacgcgacgaggcgctgcggctgaagcagaggcgccgcacgctgaagaaccgcggctacgcgcaggcctgtcgctccaagcggctgcagcagcggcgcgggctggaggcggagcgcgcccgcttggccgcccagctggacgcgctgcgggcggaggtggcccgcctggcccgggagcgagatctctacaaggctcgctgtgaccggctaacctcgagcggtcccggtcccgggtccggggaactctcccacctctttctctgagccattcagagcaccttgtggtgtagtgggggctgggtggggtggcaccgcccaggaggcggctgcacagttctctgcatcgttaccagagcgccttctggtcctagccacgccctgtatgaccgcgcaaatatccccaaagcttttgggtcctcaagtcatgcccgaatttagatgctggtcattttctggagaggggtcccctccccttacgaacacagaaacccagcccacatgactagcacgctgagctctgcagggaccagtgccaggcactggggggtggaagtgtggtgacagtgaatgagaggtgggggagggttgcagctcccacctcagtttagtttttaattcaaggttttcaacctgtaacacattaaagctgtaattagcaataaggctgtattttcattctgaagcttgtaacctccccattttagcactacagtattttcaaggtttcaatacccaataactagacagactaggaactctatccaagagtgctttttccctgcccaaccctgtgg

SEQ ID NO: 18940 - DNA, 358 bp, Macaca Mulatta
aagcgccagtgggctgggcgggtgaaaaaggtgcaggctgccgtgggcgccagccccgcccttggccccagcgacaatccctgaacgcccaggctaacagccatgcgacccgactccaccccatgcctcctttttccgttcagcctgcagcgggagaccctgtccccgccccagccgtcctccaggggtgggccctagtttaataaagattcgccaagtttcaccgcatctgctggcctccctgtgtgatttcctctaagccccagcctcagtttctctttctgcccgcacactggccacacagttctcagccccctcctctctgtctgtgtttgcgtgtctgtatctttctctctgc

SEQ ID NO: 18941 - DNA, 781 bp, Macaca Mulatta
  misc_feature (1)...(781): n = A,T,C or G
cacagctagctgaagagaatgaacggctcaagcaggaaatcgagcgcctgaccagggaagtagaggcgactcgtcgagctctgatcgaccgaatggtgaatctgcaccaagcatgaacaattggggagcatcagtactccacttgggccacactacccaacctntcccacaagtggctactgaccaccctctcanctagtgccaatgatgtgaccctcaatcccacnatattcagggggaaggcttggagtagacaaaaggaaagggtctcagcttgtatatagagattgtacatttatttattactgtccatatctattaaagtgactttctatgagccaaggtcttttactttttcttcttgcctttaggggcttcagggggtttcccctcagctacagccaactgtttctttagatccaagagtttcgccacctccgcagcaacctggttcttgtctgccttttgtgctttcagttctcggacaatgttgccctaagataaaggggggtgggaagggtaacagtgaggcaagaaaaagatctatttaggattcagcttgtccagtctcccacagggcttaagctgcatacttgttttgtcacttcatccatcagcgcttgtatctgctgtggcccagctgttgtaacagtctctataactgttggctttggggatgtttttgcctggaggacaacaacaaagttagcaccagcaaccataaatatcccctaacctccagttttatacagcatctcagagggaaagtgattacctttaa

SEQ ID NO: 18942 - DNA, 2482 bp, Macaca Mulatta
  misc_feature (1)...(2482): n = A,T,C or G
ggcaccttctctctgcttattgaagctctccacacagattctcctgctgacctcgcnnnnnnnnnnnnnnnnnnnnnnnnnnnnnnnnnnnnnnnnnnnnnnnnnnnnnnnnnnnnnnnnnnnnnnnnnnnnnnnnnnnnnnnnnnnnnnnnnnnnnnnnnnnnnnnnnnnnnnnnnnnnnnnnnnnnnnnnnnnnnnnnnnnnnnnnnnnnnnnnnnnnnnnnnnnnnnnnnnnnnnnnnnnnnnnnnnnnnnnnnnnnnnnnnnnnnnnnnnnnnnnnnnnnnnnnnnnnnnnnnnnnnnnnnnnnnnnnnnnnnnncgatctgcctgccgggatgtgatgagcagcatggattttgtgacaagccaggggaatgcaagnnnnnnnnnnnnnnnnnnnnnnnnnnnnnnnnnnnnnnnnnnnnnnnnnnnnnnnnnnnnnnnnnnnnnnnnnnnnnnnnnnnnnnnnnnnnnnnnnnnnnnnnnnnnnnnnnnnnnnnnnnnnnnnnnnnnnnnnnnnnnnnnnnnnnnnnnnnnnnnnnnnnnnnnnnnnnnnnnnnnnnnnnnnnnnnnnnnnnnnnnnnnnnnnnnnnnnnnnnnnnnnnnnnnnnnnnnnnnnnnnnnnnnnnnnnnnnnnnnnnnnnnnnnnnnnnnnnnnnnnnnnnnnnnnnnnnnnnnnnnnnnnnnnnnnnnnnnnnnnnnnnnnnnnnnnnnnnnnnnnnnnnnnnnnnnnnnnnnnnnnnnnnnnnnnnnnnnnnnnnnnnnnnnnnnnnnnnnnnnnnnnnnnnnnnnnnnnnnnnnnnnnnnnnnnnnnnnnnnnnnnnnnnnnnnnnnnnnnnnnnnnnnnnnnnnnnnnnnnnnnnnnnnnnnnnnnnnnnnnnnnnnnnnnnnnnnnnnnnnnnnnnnnnnnnnnnnnnnnnnnnnnnnnnnnnnnnnnnnnnnnnnnnnnnnnnnnnnnnnnnnnnnnnnnnnnnnnnnnnnnnnnnnnnnnnnnnnnnnnnnnnnnnnnnnnnnnnnnnnnnnnnnnnnnnnnnnnnnnnnnnnnnnnnnnnnnnnnnnnnnnnnnnnnnnnnnnnnnnnnnnnnnnnnnnnnnnnnnnnnnnnnnnnnnnnnnnnnnnnnnnnnnnnnnnnnnnnnnnnnnnnnnnnnnnnnnnnnnnnnnnnnnnnnnnnnnnnnnnnnnnnnnnnnnnnnnnnnnnnnnnnnnnnnnnnnnnnnnnnnnnnnnnnnnnnnnnnnnnnnnnnnnnnnnnnnnnnnnnnnnnnnnnnnnnnnnnnnnnnnnnnnnnnnnnnnnnnnnnnnnnnnnnnnnnnnnnnnnnnnnnnnnnnnnnnnnnnnnnnnnnnnnnnnnnnnnnnnnnnnnnnnnnnnnnnnnnnnnnnnnnnnnnnnnnnnnnnnnnnnnnnnnnnnnnnnnnnnnnnnnnnnnnnnnnnnnnnnnnnnnnnnnnnnnnnnnnnnnnnnnnnnnnnnnnnnnnnnnnnnnnnnnnnnnnnnnnnnnnnnnnnnnnnnnnnnnnnnnnnnnnnnnnnnnnnnnnnnnnnnnnnnnnnnnnnnnnnnnnnnnnnnnnnnnnnnnnnnnnnnnnnnnnnnnnnnnnnnnnnnnnnnnnnnnnnnnnnnnnnnnnnnnnnnnnnnnnnnnnnnnnnnnnnnnnnnnnnnnnnnnnnnnnnnnnnnnnnnnnnnnnnnnnnnnnnnnnnnnnnnnnnnnnnnnnnnnnnnnnnnnnnnnnnnnnnnnnnnnnnnnnnnnnnnnnnnnnnnnnnnnnnnnnnnnnnnnnnnnnnnnnnnnnnnnnnnnnnnnnnnnnnnnnnnnnnnnnnnnnnnnnnnnnnnnnnnnnnnnnnnnnnnnnnnnnnnnnnnnnnnnnnnnnnnnnnnnnnnnnnnnnnnnnnnnnnnnnnnnnnnnnnnnnnnnnnnnnnnnnnnnnnnnnnnnnnnnnnnnnnnnnnnnnnnnnnnnnnnnnnnnnnnnnnnnnnnnnnnnnnnnnnnnnnnnnnnnnnnnnnnnnnnnnnnnnnnnnnnnnnnnnnnnnnnnnnnnnnnnnnnnnnnnnnnnnnnnnnnnnnnnnnnnnnnnnnnnnnnnnnnnnnnnnnnnnnnnnnnnnnnnnnnnnnnnnnnnnnnnnnnnnnnnnnnnnnnnnnnnnnnnnnnnnnnnnnnnnnnnnnnnnnnnnnnnnnnnnnnnnnnnnnnnnnnnnnnnnnnnnnnnnnnnnnnnnnnnnnnnnnnnnnnnnnnnnnnnnnnnnnnnnnnnnnnnnnnnnnnnnnnnnnnnnnnnnnnnnnnnnnnnnnnnnnnnnnnnnnnnnnnnnnnnnnnataatttaaatttcgttaaatatgtacaaaggcacttcgggtctatgtgactatattttttgtatataaatgtatttatggaatattgtgcaaatgttatttgagttttttacatgttttgttaatgaagtaaattccatttttaaaatatttttccaaaataaattttatga

SEQ ID NO: 18943 - DNA, 338 bp, Macaca Mulatta
agttctcacctaagtccttttataaagaattgctactccaatatatggtcagattagatgcaagaataaagcagttgtctgagtttaggtttctattttattaataaaaactaaaatggtacatactattggtcttttcattttcattgttttagtcatgtattcaagcacaaacttgaaatttcatagctgtaaggtcaagatttagacctaccaaataaaaccttgggccagcagtgttagggatttactcaccttttcccaaactataccataataattatttccttgatattctacttataaaatgaattagatgacattaaaaaggcaaacag

SEQ ID NO: 18944 - DNA, 832 bp, Macaca Mulatta
  misc_feature (1)...(832): n = A,T,C or G
ttgctctgccctttgcccggggttgctgtcgaggaccctgtgcaagactcggcctgtttttctttctccctgatggacagacccaaacacagccgcgacagcatcgtgaagggctgggnnnnnnnnnnnnnnnnnnnnnnnnnnnnnnnnnnnnnnnnnnnnnnnnnnnnnnnnnnnnnnnnnnnnnnnnnnnnnnnnnnnnnnnnnnnnnnnnnnnnnnnnnnnnnnnnnnnnnnnnnnnnnnnnnnnnnnnnnnnnnnnnnnnnnnnnnnnnnnnnnnnnnnnnnnnnnnnnnnnnnnnnnnnnnnnnnnnnnnngattactactttgtaaccagggaggtgatgcagcgtgacatagcagccggtgacttcattgagcatgccgagttctcagggaacctgtatggcacgagnagcaaggcggcggtgcaggccgtgcaggccatgaaccgcatctgcgtgctggacgtggacctgcagggtgtgcggaacatcaaggccaccgatctgcggcccatctacatctctgtgcagccgccctcactgcatgtgctggnnnnnnnnnnnnnnnnnnnnnnnnnnnnnnnnnnnnnnnnnnnnnnnnnnnnnnnnnnnnnnnnnnnnnnnnnnnnnnnnnnnncaaggagcccggcctttttgatgtggtcatcatcaacgacagtctggaccaggcctacgcggagctgaaggaggcgctctctgaggnaggaaatcaagaaagctcaaaggaccggcgcctgaggcttgctctctgttctcggcaccccaggcccatacaggaccagggcagcagcactgagccaccccct

SEQ ID NO: 18945 - DNA, 2510 bp, Macaca Mulatta
  misc_feature (1)...(2510): n = A,T,C or G
aaacggagcctcccggaaggggtgnnnnnnnnnnnnnnnnnnnnnnnnnnnnnnnnnnnnnnnnnnnnnnnnnnnnnnnnnnnnnnnnnnnnnnnnnnnnnnnnnnnnnnnnnnnnnnnnnnnnnnnnnnnnnnnnnnnnnnnnnnnnnnnnnnnnnnnnnnnnnnnnnnnnnnnnnnnnnnnnnnnnnnnnnnnnnnnnnnnnnnnnnnnnnnnnnnnnnnnnnnnnnnnnnnnnnnnnnnnnnnnnnnnnnnnnnnnnnnnnnnnnnnnnnnnnnnnnnnnnnnnnnnnnnnnnnnnnnnnnnnnnnnnnnnnnnnnnnnnnnnnnnnnnnnnnnnnnnnnnnnnnnnnnnnnnnnnnnnnnnnnnnnnnnnnnnnnnnnnnnnnnnnnnnnnnnnnnnnnnnnnnnnnnnnnnnnnnnnnnnnnnnnnnnnnnnnnnnnnnnnnnnnnnnnnnnnnnnnnnnnnnnnnnnnnnnnnnnnnnnnnnnnnnnnnnnnnnnnnnnnnnnnnnnnnnnnnnnnnnnnnnnnnnnnnnnnnnnnnnnnnnnnnnnnnnnnnnnnnnnnnnnnnnnnnnnnnnnnnnnnnnnnnnnnnnnnnnnnnnnnnnnnnnnnnnnnnnnnnnnnnnnnnnnnnnnnnnnnnnnnnnnnnnnnnnnnnnnnnnnnnnnnnnnnnnnnnnnnnnnnnnnnnnnnnnnnnnnnnnnnnnnnnnnnnnnnnnnnnnnnnnnnnnnnnnnnnnnnnnnnnnnnnnnnnnnnnnnnnnnnnnnnnnnnnnnnnnnnnnnnnnnnnnnnnnnnnnnnnnnnnnnnagacaaaggaggcccttctcagaatcctggaagatatgaaggaggaagactatctgaatttcatcctgttcagtggagatgtgtccacatggaaagagcacttagtccaggccacgcccgagaacctccaggaggccaagacgtttgtgaagagcatggaggataaaggaatgaccaacatcaatgatgggctgctgaggggcatcagtatgctgaacaaggcccgagaggagcacagagtaccggagaggagcacctccatcgtcatcatgctgaaagaaaaggatgccaatgttggtgannnnnnnnnnnnnnnnnnnnnnnnnnnnnnnnnnnnnnnnnnnnnnnnnnnnnnnnnnnnnnnnnnnnnnnnnnnnnnnnnnnnnnnnnnnnnnnnnnnnnnnnnnnnnnnnnnnnnnnnnnnnnnnnnnnnnnnnnnnnnnnnnnnnnnnnnnnnnnnnnnnnnnnnnnnnnncagggcttctatgaggaggtggccaacccactgctgacaggtgtggagatggagtaaaccgagaatgccatcctgggcctcacccagaacacttacaagcacttctatgacggctctgagattgtggtggctgggcgcctggtgggcgaggacgtgaacagctttaaggcggatgtgaagggccatgggnggccgccaacgacctgactttcacagaggaggtggacatgaaggagatggagaaggccctgcaggagcgggactacatcttcgggaattacatggagcggctctgggcctatctcaccatcgagcagctgctggagaagcnnnnnnnnnnnnnnnnnnnnnnnnnnnnnnnnnnnnnnnnnnnnnnnnnnnnnnnnnnnnnnnnnnnnnnnnnnnnnnnnnnnnnnnnnnnnnnnnnnnnnnnnnnnnnnnnnnnnnnnnnnnnnnnnnnnnnnnnnnnnnnnnnnnnnnnnnnnnnnnnnnnnnnnnnnnnnnnnnnnnnnnnnnnnnnnnnnnnnnnnnnnnnnnnnnnnnnnnnnnnnnnnnnnnnnnnnnnnnnnnnnnnnnnnnnnnnnnnnnnnnnnnnnnnnnnnnnnnnnnnnnnnnnnnnnnnnnnnnnnnnnnnnnnnnnnnnnnnnnnnnnnnnnnnnnnnnnnnnnnnnnnnnnnnnnnnnnnnnnnnnnnnnnnnnnnnnnnnnnnnnnnnnnnnnnnnnnnnnnnnnnnnnnnnnnnnnnnnnnnnnnnnnnnnnnnnnnnnnnnnnnnnnnnnnnnnnnnnnnnnnnnnnnnnnnnnnnnnnnnnnnnnnnnnnnnnnnnnnnnnnnnnnnnnnnnnnnnnnnnnnnnnnnnnnnnnnnnnnnnnnnnnnnnnnnnnnnnnnnnnnnnnnnnnnnnnnnnnnnnnnnnnnnnnnnnnnnnnnnnnnnnngtggtcgtcctacaccaggtgtggaagaaacatcctgtccaccgtgactttctaggcttctacgtggtggacagtcaccggatgtcagcacagacgcatgggctgctggnggcaattcttccaaccctttgactttaaagtctctgacatccggccaggctctgaccccacaaagccagatgccacattggtggtgaagaaccatcagctgactgtcacnccagaggctcccagaaagattacagaaaggatgccagcattggcacgaaggttgtctgctggttcgtccac

SEQ ID NO: 18946 - DNA, 838 bp, Macaca Mulatta
ggaagataatgagaagtaaggaagaaggaattctttatgtagatggggcctccaacagaaccattagtcccagaaaagctgacatcctggatgttgtgggaatgctgtatgttggtgggttacccatcaactacactacccgaagaattggtccagtgacctatagcattgacggctgcatcaggaatctccacatggcagaggcccctgctgatctggaagagcccacctccagcttccatatcgggacatgttttgcaaatgctcagaggggaacatattttgatggaacaggttttgccaaagcagttggtggattcaaagtgggattggaccttcttgtagaatttgaattccgcacaactagaacaactggagttcttctggggatcagtagtcaaaaaatggatggaatgggtattgaaatgattgatgaaaagctgatgtttcatgtggacaatggcgccggcagattcactgctgtctacgatgctggggttccagggcattttgtgtgatggacaatggcataaagtcactgccaacaagatcaaacaccgcatcgagctcacaagttcgatgggaaaccaggtgggaagcccaaagccctaaacccccagcatcctacaatcaagctgaacacaaatggacccctgtggttttgtttggagggctttcccaggatgaaccctcaaagcaagtttgggccctgaaccacccagcattccgttccgaggttgcgtcagatccctgaagctcaccaaaagcacgggcaagccactgggaagttaattttgccaaagccctggaactgaggggcggttcaacctgttatcag

SEQ ID NO: 18947 - DNA, 1535 bp, Macaca Mulatta
  misc_feature (1)...(1535): n = A,T,C or G
ttagctccgtcactgactccaagttcatcccctctgtctttcagtttggnnnnnnnnnnnnnnnnnnnnnnnnnnnnnnnnnnnnnnnnnnnnnnnnnnnnnnnnnnnnnnnnnnnnnnnnnnnnnnnnnnnnnnnnnnnnnnnnnnnnnnnnnnnnnnnnnnnnnnnnnnnnnnnnnnnnnnnnnnnnnnnnnnnnnnnnnnnnnnnnnnnnnnnnnnnnnnnnnnnnnnnnnnnnnnnnnnnnnnnnnnnnnnnnnntaaacaatcgtggggcctggaaaatgaggctttaattgtgagatgtcctagacaaggaaaacctagttacatcgtggattggtattactcacaaacaaacaaaagtattcccacccaggaaagaaatcgtgtgtttgcctcaggccaacttcttaagtttctaccagctgaagttgctgattctggtatttatacctgcattgtcagaagnnnnnnnnnnnnnnnnnnnnnnnnnnnnnnnnnnnnnnnnnnnnnnnnnnnnnnnnnnnnnnnnnnnnnnnnnnnnnnnnnnnnnnnnnnnnnnnnnnnnnnnnnnnnnnnnnnnnnnnnnnnnnnnnnnnnnnnnnnnnnnnnnnnnnnnnnnnnnnnnnnnnnnnnnnnnnnnnnnnnnnnnnnnnnnnnnnnnnnnnnnnnnnnnnnnnnnnnnnnnnnnnnnnnnnnnnnnnnnnnnnnnnnnnnnnnnnnnnnnnnnnnnnnnnnnnnnnnnnnnnnnnnnnnnnnnnnnnnnnnnnnnnnnnnnnnnnnnnnnnnnnnnnnnnnnnnnnnnnnnnnnnnnnnnnnnnnnnnnnnnnnnnnnnnnnnnnnnnnctttagtaatactcactgggattcaaagtttaatgagaggctttatgatgcgatactatgctgtacataaatgttattgcgtggattttaatccatgtttgcaaaatactttcaatatcatcagtggccttgannnnnnnnnnnnnnnnnnnnnnnnnnnnnnnnnnnnnnnnnnnnnnnnnnnnnnnnnnnnnnnnnnnnnnnnnnnnnnnnnnnnnnnnnnnnnnnnnnnnnnnnnnnnnnnnnnnnnnnnnnnnnnnnnnnnnnnnnnnnnnnnnnnnnnnnnnnnnnnnnnnnnnnnnnnnnnnnnnnnnnnnnnnnnnnnnnnnnnnnnnnnnnnnnnnnagtttcagcaatgggctggcttgtgtaaacacggttttaagaatagctgatgtaaaggaagaggatttattgctgcggtacgactgtctggccctgaatttgcatggcttgagaaggcacaccataagactaagtaggaaaaatccaagtaaggagtgtttctgagactttggtcacctgaactttctgtagcaagggtaagcggaatggagtgtggttccgagagatccatcaagacaatgggaatggcttgtgccataaaatgtacttctcttctttgggaaggtgtttgctatctggtctttgtagattgttcctgtttgctgggagcttctctgctgct

SEQ ID NO: 18948 - DNA, 606 bp, Macaca Mulatta
  misc_feature (1)...(606): n = A,T,C or G
agatggcagcagtgaagcagcagccaccagagagtggccatttaagggttgggacaggaagggtgtgttgggtggcatagaggttttgtattgagggccagtgatgatgttttgatatttatttcctgctacttaaatttgaatctgagtgaattgtacctatttctgatgatgtcggtcttgcaaagcgacagattcataaagtaatgatgaaatctttctttcttcccgtgtgtatttctaagaaatagagccaactgatttagtatgtaaataccaagagcaatttacctggtactaaacccgaaacccagtgcggacccttcccagccctcagcccacttcctttcctactgtcctggaacctgtctccattgcgtgatccagccctggttctggctgtggtcaccagatcccagtgaagggtaaagtgtgattaggcctcatttctttgtctttttcctactccgttcctggcatttgctgatttctagtgtatactctgtagtctctgtacgtgtttgattcccttccatggacactaaaagtatgttgnnnnnnnnnnnnnnnnnnnnnnnnnnnnnnnnnnnnnnnnnnnnnnnnnta

SEQ ID NO: 18949 - DNA, 182 bp, Macaca Mulatta
caggaaagcactatggggtgtacagttgtgaaggctgcaaagggttcttcaagaggacgataaggaaggatctcatctacacgtgtcgggataataaagactgcctcattgacaagcgccagcgcaaccgaggccagtactgtcgctatcagaagtgccttgtcatgggcatggagagggaa

SEQ ID NO: 18950 - DNA, 1823 bp, Macaca Mulatta
  misc_feature (1)...(1823): n = A,T,C or G
tctgaggaggacaaacagcttcaagatgaactggagatgctcgtggaacgactgggggnggagaaggacacatccctgtatcgaccagcgctggaggaattgcgaaggcaaattcgttcttctacaacttccatgacttcagtgcccaagcctctctaatnnnnnnnnnnnnnnnnnnnnnnnnnnnnnnnnnnnnnnnnnnnnnnnnnnnnnnnnnnnnnnnnnnnnnnnnnnnnnnnnnnnnnnnnnnnnnnnnnnnnnnnnnnnnnnnnnnnnnnnnnnnnnnnnnnnnnnnnnnnnnnnnnnnnnnnnnnnnnnnnnnnnnnnnnnnnnnnnnnnnnnnnnnnnnnnnnnnnnnnnnnnnnnnnnnnnnnnnnnnnnnnnnnnnnnnnnnnnnnnnnnnnnnnnnnnnnnnnnnnnnnnnnnnnnnnnnnnnnnnnnnnnnnnnnnnnnnnnnnnnnnnnnnnnnnnnnnnnnnnnnnnnnnnnnnnnnnnnnnnnnnnnnnnnnnnnnnnnnnnnnnnnnnnnnnnnnnnnnnnnnnnnnnnnnnnnnnnnnnnnnnnnnnnnnnnnnnnnnnnnnnnnnnnnnnnnnnnnnnnnnnnnnnnnnnnnnnnnnnnnnnnnnnnnnnnnnnnnnnnnnnnnnnnnnnnnnnnnnnnnnnnnnnnnnnnnnnnnnnnnnnnnnnnnnnnnnnnnnnnnnnnnnnnnnnnnnnnnnnnnnnnnnnnnnnnnnnnnnnnnnnnnnnnnnnnnnnnnnnnnnnnnnnnnnnnnnnnnnnnnnnnnnnnnnnnnnnnnnnnnnnnnnnnnnnnnnnnnnnnnnnnnnnnnnnnnnnnnnnnnnnnnnnnnnnnnnnnnnnnnnnnnnnnnnnnnnnnnnnnnnnnnnnnnnnnnnnnnnnnnnnnnnnnnnnnnnnnnnnnnnnnnnnnnnnnnnnnnnnnnnnnnnnnnnnnnnnnnnnnnnnnnnnnnnnnnnnnnnnnnnnnnnnnnnnnnnnnnnnnnnnnnnnnnnnnnnnnnnnnnnnnnnnnnnnnnnnnnnnnnnnnnnnnnnnnnnnnnnnnnnnnnnnnnnnnnnnnnnnnnnnnnnnnnnnnnnnnnnnnnnnnnnnnnnnnnnnnnnnnnnnnnnnnnnnnnnnnnnnnnnnnnnnnnnnnnnnnnnnnnnnnnnnnnnnnnnnnnnnnnnnnnnnnnnnnnnggagctcttcttgcctgtggcatagtgaactctggggtccggaatgagtgtgaccctgctctggcactgctctcagactatgttctccacaacagcaacaccatgagacttggttccatctttgggnnnnnnnnnnnntatgctggctcaaatcgtgaagatgtcctaacnnnnnnnnnnnnnnnnnnnnnnnnnnnnnnnnnnnnnnnnnnnnnnnnnnnnnnnnnnnnnnnnnnnnnnnnnnnnnnnnnnnnnnnnnnnnnnnnnnnnnnnnnnnnnnnnnnnnnnnnnnnnnnnnnnnnnnnnnnnnnnnnnnnnnnnnnnnnnnnnnnnnnnnnnnnnnnnnnnnnnnnnnnnnnnnnnnnnnnnnnnnnnnnnnnnnnnnnnnnnnnnnnnnnnnnnnnnnnnnnnnnnnnnnnngtcagagccattcctcagttttgccaacacactggtggatgtgtgtgcatatgcaggnatgcaggctctgggaatgtgctgaaggtgcagcagctgctccacatttgtagcgaacactttgactccaaagagannnnnnnnnnnnnnnnnnnnnnnnnnnnnnnnnnnnnnnnnnnnnnnnnnnccctgcagacatgggagcacatcagg

SEQ ID NO: 18951 - DNA, 345 bp, Macaca Mulatta
  misc_feature (1)...(345): n = A,T,C or G
ccccgcggcccgaggccaagagcgcgcagcccgcgacgggctggaagggcgagcgaccccgcagcgaggaggataacgagctgaacctccccaacctggcagccgcctactcgtccatcctgagctcgctgggcgagaacccccagcggcaagggctgctcaagacaccctggagggcggcctcggccatgcaattcttcaccaagggctaccaggagacaatctcagntcagatgtcctaaacgatgctatatttgatgaagatcatgatgagatggtgatcgtgaaggacatagacatgttttccatgtgtgagcatcacttggttccatttgttggaaaggt

SEQ ID NO: 18952 - DNA, 1356 bp, Macaca Mulatta
  misc_feature (1)...(1356): n = A,T,C or G
cgttgnnnnnnnnnnnnnnnnnnnnnnnnnnnnnnnnnnnnnnnnnnnnnnnnnnnnnnnnnnnnnnnnnnnnnnnnnnnnntttttttttttgccattgactactaatcaaaaataagcctcacctagaaaacagaaactgaaacttcaaacagagagagaggaaaaaaaaaacccgccaatgctacctctgtaaaataaaatagaagcaaaatgaatagtttcaagacagtcggctaaccaacaaaccaaatgcataagagaatactaaacagggtattaccctcgtgccgaattcggcacgaggtgggctccaagcagatgcagcagatccgcatgtcccttcgagggaaggccgtggtgctgatgggcaagaacaccatgatgcgcaaggccatccgagggcacctggaaaacaacccagctctggagaaactgctgcctcatatccgggggaatgtgggctttgtgttcaccaaggaggatctcactgagatcagggacatgttgctggccaataaggtgccagctgctgcccgtgctggtgccattgctccatgtgaagtcactgtgccagcccagaacactggactcgggcccgagaagacctcctttttccaggctttaggtatcaccactaaaatctccaggggcaccattgaaatcctgagtgatgtgcagctgatcaagactggagacaaagtgggagccagcgaagccacgctgctgaacatgctcaacatctcccccttctcctttgggctggtcatccagcaggtgtttgacaatggcagcatctacaatcctgaagtgcttgacatcacagaggaaactctgcattctcgcttcctggagggtgtccgcaatgttgccagtgtctgtctgcagattggctacccaactgttgcatcagtaccccattctatcatcaacgggtacaaacgagtcctggccttgtctgtggagacggattacaccttcccacttgctgaaaaagtcaagggccttcttggctgatccatcttgcctttgtggcctgcctgccccctgttggcttgctgccaccacaggctgctccctgcctgcttgctgtctggcagcccccaacctaaaggtttgaagcccaagggaaaaagttccgaaggcagttcggtaaccaggcatttccggggaacctgcgcccaccttttttacactagatccctccaaaaacaccaacctaatattttaatcccaccccctttttttttgccccaaaccccctgtccaacatcaacgcgccttctctttttcttttcaacaaaccctttcccaaaaacttacaccccgtcccctccaatttccacaatcacttat

SEQ ID NO: 18953 - DNA, 830 bp, Macaca Mulatta
aaaacttgtaatgtgtaaggaacaaaaatggtaaaaagggcttacccacaataataaaaatcccatcatcaattacatcatcacattaaaataagcccagaagttacaaaagtctgagacagaaaagacaaaagggacaaccacaaggtatttgttgaaaaaatgtttgtttgtgctctttgggcactttaattaaacattgcaaaatcaacatcttcctcttcttcatcagactctgcaaaatattttacttctttcctagcccgaccggttcgtggcagagaaggtggctcagaaggggaagtctgaggggaagatgtccacatctgaatcctgatcaaaggatgttttcttcggtttcttgctcgctgttttggatgttttcctgccagggttatagtcgccttcattttcagagccagatgctttccttttctttgcccctcggcctttaccttttggtgttgtagtcttctttggaacgccaaattctgaatctgagtcagagtttacagcctctactactttcttctgtttgggggctctcttgggcttaggggctgtatctgaagacggttttccctttttagcagctactgttttacttggaactttatctatctgtttcagaccaaatgatggtgagaaaacagaagcagaatcttcttcattactgtcaaatttagctgaatcatcttctgacttctgagaatatgaaggaaatgaaaagagatttccaaaatcctgactttttttgtcatgcaaagatttttctggagtggcttttgatttgcctggtgaaaatgtatattcatctttatctaaccccc

SEQ ID NO: 18954 - DNA, 135 bp, Macaca Mulatta
  misc_feature (1)...(135): n = A,T,C or G
tggggcagcagcctggaaaagttcttggggaccaaagaaggccaagcttgcctgccctgcattttatcanaggagcagggaagaaggaatcatcgaggcatgggggtccacactgcaatgtttttgtggaacatg

SEQ ID NO: 18955 - DNA, 476 bp, Macaca Mulatta
tgatcttaaaatgtttctcagtcactgatacgagacgcaaaggaccacactgtctctgcttccaggagtgtattttagaaatgctccatgatttactgaggacatagagatgatgctgctgtttaggtgccttttagcaagctatgcaaacaatcctgagaagatacatagtcagtctggcttctgagaatttagcaaatgaacagagtatctagttcatcagccgtccagtaaagcaacccaggaaactgattgggtctctttgcccaccatattaacattaaacattgatgttctgtattctgtactttactgcatctagcagattttcaacaactcattgatccaaagatatatgcacagtctgagcaccagttttggttttccttaagacttgaacccttttaatctgagtgtgattcattaaattggaccattgataagaatacacattgtatgtttctgtgcacatgact

SEQ ID NO: 18956 - DNA, 469 bp, Macaca Mulatta
acctcaggctgccgtcctggagcccacacagtcctcagtggagatggagcctgtggccccacagggggatctggccccacagcccagagagttgtcagaggatcaggtctgggcttctccaggccccggcagagtccagccccctcccaggccagccccaggccggggctcagcacccaggttgtcccagggcaggaagcggaaaccaagtccaggcccccaggccgtggaggggtctgaggcatgtggtgcacggagcattgaaacctgaagaagccccacgggaacacccgcgggccccactggccttccagacggccgcccgcctggccgagcctctgagcactttccgggagggaggaggctgcaggctgcctctgaggggcctgagggagggaggggccgacgtgccaggaggggcccagttagagtcaccgctgggctggcagaggccgtaccctccctccag

SEQ ID NO: 18957 - DNA, 1213 bp, Macaca Mulatta
  misc_feature (1)...(1213): n = A,T,C or G
ggttgacctgccttgggcttaggtagtagagtctgcatacctgtgggcctggcccggagaggacctcgtgagtcttctgacatggactctgaagcctcaaaccaagagaggtgtctgtctagccctgatagtcgggcagcttagaggagtggggaggagaactcagcctgagttcagtcaagatgtaagtagtagcaaggggaacatggtgcattcaggtcattttgtgtgggattctatagctcctgatgaaaccattctggggtaaaggagcttattctggaacatggcacccagaacctggtgcccagcaggaatttttggcctcttttgcccacttgcccttgcctgctcttccctcaccactgccctgactgccaacctatcctccttgtgtctcccacacttagtccctggatggtcgtcagatccgtgtggatcatgcaggcaagtctgctcggggaaccagaggaggtggctttggggcccatgggcgtggtcgcagctactctagaggtgnnnnnnnnnnnnnnnnnnnnnnnnnnnnnnnnnnnnnnnnnnnnnnnnnnnnnnnnnnnnnnnnnnnnnnnnnnnnnnnnnnnnnnnnnnncagaaaccagggtggttatgaccgctactcaggaggaaattacagagacaattatgacaactgaaatgagacatgcacataatgtaggtgagacttggatatcggcatcgagtaaacctgtttgtcacactctgtcatgactgtctcaccttatctggcaagattgctttgcatttctgctgccctcatacctcatccagccaacctaccaaacaccattcctaggccttccttgctctcaggtgcatgtcagagcacgtttgctagggggtgggatctgaaaacccatctcctataatcctctagtcttgtgtgggatggaggaaatgaaggggtgtccctgttgtccaaccctcagcatctgtatcagctttaggaggtgagcatgttgtcagctgtttcttcatgacatcacaattctccccctcttgctgttctcagatacacaaggaataatttctgatccaggatcgtccttccaaatggctgtatttataaaggtttttggagctgcactgaagcatcttattttatagcatatcaaccttttgtttttaaattgacctgacgaggtagttaaagatctttaacagttccatcttt

SEQ ID NO: 18958 - DNA, 834 bp, Macaca Mulatta
  misc_feature (1)...(834): n = A,T,C or G
ctgcaggcctcctggattgcctaatctggctatgcctgctctgtctaccttggcttccgagggcagtgcctttcccaaccattcccttattcctggctgtctgcatccgctgtggtccgcgcccatcacctgcacgatgctggcttttgacacgtacccgaagttaactccctctgcttctcagagtctattccgacaccctccaacaaggaggaaacacagcagaaatccaacctagagctgctccacatctccctgctgctcatccagtcgtggctggagcccgtgcagttcctcaggagtgtgtttgccaaccacctggtgcataccaactcgaacttcgacatctatctctacctaaagaaactagaggaaggcatccaaacgctgatggggaggctggaagacggcagcccccggactgggcagatcttcaagcagacctacagcaagtatgacacaaactcgcacaacgatgacacactgctcaagaactacaggctgctctactgcttcaggaaggacatgaacaaggtcgagacattcctgcgcaccgtgcggtgccgcgctgtggagggcagctgtggcttctagatgcctgggtggcatcccttgtgacccctcccaattgccactcctggccatggaaggtgccactccagtgtccaacagccttgtcctaataaaattaagttgcatcattttgtctgaaaaacnnnnnnnnnnnnnnnnnnnnnnnnnnnnnnnnnnnnnnnnnnnnnnnnnnnnnnnnnnnnnnnnnnnnnnnnnnnnnnnnnnnnnnnnnnnnnnnnnnnnnnnnnnnnnnngcggttg

SEQ ID NO: 18959 - DNA, 284 bp, Macaca Mulatta
  misc_feature (1)...(284): n = A,T,C or G
gcaggagttcaaagaaggacgcagagccagccacacagccccacaggtcctctttagccacagggaacctcctctggagctgaaagacacggacgccgctgtgggtgacaacattggctacatcacctttnnnnnnnngtgctgttccctcgtcacaccaatgccagcgctcgagacaacaccatcaacctgatccacacattccgggactacctgcactaccacatcaagtgctctaaggnaggcctatattcacacacgtatgcgggcaaaaacatctgact

SEQ ID NO: 18960 - DNA, 87 bp, Macaca Mulatta
ctgccattgcttttgtcctgctgcactggcttcctggagatagggaccgtctctgttttgttcatggctgaattgtttggtgcatat

SEQ ID NO: 18961 - DNA, 2487 bp, Macaca Mulatta
  misc_feature (1)...(2487): n = A,T,C or G
atgggacataaagtggttgtcttcgacatttctgtcgtcagagccttgtgggaaactcgtgtgaagaagcacaaagcttggcagaagaaggaggcggaaaggcttgagaagagtgccttggagaannnnnnnnnnnnnnnnnnnnnnnnnnnnnnnnnnnnnnnnnnnnnnnnnnnnnnnnnnnnnnnnnnnnnnnnnnnnnnnnnnnnnnnnnnnnnnnnnnnnnnnnnnnnnnnnnnnnnnnnnnnnnnnnnnnnnnnnnnnnnnnnnnnnnnnnnnnnnnnnnnnnnnnnnnnnnnnnnnnnnnnnnnnnnnnnnnnnnnnnnnnnnnnnnnnnnnnnnnnnnnnnnnnnnnnnnnnnnnnnnnnnnnnnnnnnnnnnnnnnnnnnnnnnnnnnnnnnnnnnnnnnnnnnnnnnnnnnnnnnnnnnnnnnnnnnnnnnnnnnnnnnnnnnnnnnnnnnnnnnnnnnnnnnnnnnnnnnnnnnnnnnnnnnnnnnnnnnnnnnnnnnnnnnnnnnnnnnnnnnnnnnnnnnnnnnnnnnnnnnnnnnnnnnnnnnnnnnnnnnnnnnnnnnnnnnnnnnnnnnnnnnnnnnnnnnnnnnnnnnnnnnnnnnnnnnnnnnnnnnnnnnnnnnnnnnnnnnnnnnnnnnnnnnnnnnnnnnnnnnnnnnnnnnnnnnnnnnnnnnnnnnnnnnnnnnnnnnnnnnnnnnnnnnnnnnnnnnnnnnnnnnnnnnnnnnnnnnnnnnnnnnnnnnnnnnnnnnnnnnnnnnnnnnnnnnnnnnnnnnnnnnnnnnnnnnnnnnnnnnnnnnnnnnnnnnnnnnnnnnnnnnnnnnnnnnnnnnnnnnnnnnnnnnnnnnnnnnnnnnnnnnnnnnnnnnnnnnnnnnnnnnnnnnnnnnnnnnnnnnnnnnnnnnnnnnnnnnnnnnnnnnnnnnnnnnnnnnnnnnnnnnnnnnnnnnnnnnnnnnnnnnnnnnnnnnnnnnnnnnnnnnnnnnnnnnnnnnnnnnnnnnnnnnnnnnnnnnnnnnnnnnnnnnnnnnnnnnnnnnnnnnnnnnnnnnnnnnnnnnnnnnnnnnnnnnnnnnnnnnnnnnnnnnnnnnnnnnnnnnnnnnnnnnnnnnnnnnnnnnnnnnnnnnnnnnnnnnnnnnnnnnnnnnnnnnnnnnnnnnnnnnnnnnnnnnnnnnnnnnnnnnnnnnnnnnnnnnnnnnnnnnnnnnnnnnnnnnnnnnnnnnnnnnnnnnnnnnnnnnnnnnnnnnnnnnnnnnnnnnnnnnnnnnnnnnnnnnnnnnnnnnnnnnnnnnnnnnnnnnnnnnnnnnnnnnnnnnnnnnnnnnnnnnnnnnnnnnnnnnnnnnnnnnnnnnnnnnnnnnnnnnnnnnnnnnnnnnnnnnnnnnnnnnnnnnnnnnnnnnnnnnnnnnnnnnnnnnnnnnnnnnnnnnnnnnnnnnnnnnnnnnnnnnnnnnnnnnnnnnnnnnnnnnnnnnnnnnnnnnnnnnnnnnnnnnnnnnnnnnnnnnnnnnnnnnnnnnnnnnnnnnnnnnnnnnnnnnnnnnnnnnnnnnnnnnnnnnnnnnnnnnnnnnnnnnnnnnnnnnnnnnnnnnnnnnnnnnnnnnnnnnnnnnnnnnnnnnnnnnnnnnnnnnnnnnnnnnnnnnnnnnnnnnnnnnnnnnnnnnnnnnnnnnnnnnnnnnnnnnnnnnnnnnnnnnnnnnnnnnnnnnnnnnnnnnnnnnnnnnnnnnnnnnnnnnnnnnnnnnnnnnnnnnnnnnnnnnnnnnnnnnnnnnnnnnnnnnnnnnnnnnnnnnnnnnnnnnnnnnnnnnnnnnnnnnnnnnnnnnnnnnnnnnnnnnnnnnnnnnnnnnnnnnnnnnnnnnnnnnnnnnnnnnnnnnnnnnnnnnnnnnnnnnnnnnnnnnnnnnnnnnnnnnnnnnnnnnnnnnnnnnnnnnnnnnnnnnnnnnnntaggtacaatctaggccttgaaggtggaaagaaaggctggaatatctgcccatgtattgggcacgggatgctcagatggtgcatgggtagctctagctgaggaagtgtgggcctggctgttcatgggaagtcttcagtggccttcatggatggccaccctgccctgagtggccaccttgggggtcctgggacacacctcagtaaagagcaaaggcaatgccctcgggatcccttcctccaagatggccatgtagggtaacggcgatgaccagtccacactgataaggagttcctagcaaggcttccttgtgggtaccacaggacaactctgcccatagcaaagatgcttcagtccagagggagcccatgggctgtttgaattttggagaggtgggattcattacaggactttgggctcttatgtcacatcacaagatttggagaaattatacacaatctcttatttttataccactgtcctgggctaaaataaacaggttgtggctgacggtgttaaagataaataagcttaaacatata

SEQ ID NO: 18962 - DNA, 1817 bp, Macaca Mulatta
  misc_feature (1)...(1817): n = A,T,C or G
catccccaacatccctggctcctgcaaggagaccttcaacctcttctattatgaggctgacagcgatgtggcctcagcctcctcccccttctggatggagaacccctacgtgaaagtggacaccatcgcaccagatgagagcttctcacggctggacgccggccgcgtcaacaccaaggtgcgcagctttgggccactttccaaggctggcttctacctggccttccaggaccagggcgcctgcatgtcgctcatctccgtgcgtgccttctacaagaagtgtgcatccaccaccgcaggcttcgcactcttccccgagaccctcactggggcggagcccacctcgctggtcattgctcctggcacctgcatccccaacgccgtggaggtgtcggtgccactcaagctctactgcaacggcgatggggagtggatggtgcctgtgggtgcctgcacctgtgccaccggccatgagccagctgccaaggagtcccagtgccgccnnnnnnnnnnnnnnnnnnnnnnnnnnnnnnnnnnnnnnnnnnnnnnnnnnnnnnnnnnnnnnnnnnnnnnnnnnnnnnnnnnnnnnnnnnnnnnnnnnnnnnnnnnnnnnnnnnnnnnnnnnnnnnnnnnnnnnnnnnnnnnnnnnnnnnnnnnnnnnnnnnnnnnnnnnnnnnnnnnnnnnnnnnnnnnnnnnnnnnnnnnnnnnnnnnnnnnnnnnnnnnnnnnnnnnnnnnnnnnnnnnnnnnnnnnnnnnnnnnnnnnnnnnnnnnnnnnnnnnnnnnnnnnnnnnnnnnnnnnnnnnnnnnnnnnnnnnnnnnnnnnnnnnnnnnnnnnnnnnnnnnnnnnnnnnnnnnnnnnnnnnnnnnnnnnnnnnnnnnnnnnnnnnnnnnnnnnnnnnnnnnnnnnnnnnnnnnnnnnnnnnnnnnnnnnnnnnnnnnnnnnnnnnnnnnnnnnnnnnnnnnnnnnnnnnnnnnnnnnnnnnnnnnnnnnnnnnnnnnnnnnnnnnnnnnnnnnnnnnnnnnnnnnnnnnnnnnnnnnnnnnnnnnnnnnnnnnnnnnnnnnnnnnnnnnnnnnnnnnnnnnnnnnnnnnnnnnnnnnnnnnnnnnnnnnnnnnnnnnnnnnnnnnnnnnnnnnnnnnnnnnnnnnnnnnnnnnnnnnnnnnnnnnnnnnnnnnnnnnnnnnnnnnnnnnnnnnnnnnnnnnnnnnnnnnnnnnnnnnnnnnnnnnnnnnnnnnnnnnnnnnnnnnnnnnnnnnnnnnnnnnnnnnnnnnnnnnnnnnnnnnnnnnnnnnnnnnnnnnnnnnnnnnnnnnnnnnnnnnnnnnnnnnnnnnnnnnnnnnnnnnnnnnnnnnnnnnnnnnnnnnnnnnnnnnnnnnnnnnnnnnnnnnnnncaggaagcagcgacacggctctgattcggagtacacggagaagctgcagcagtacnnnnnnnnnnnnnnnnnnnnnnnnnnnnnnnnnnnnnnnnnnnnnnnnnnnnnnnnnnnnnnnnnnnnnnnnnnnnnnnnnnnnnnnnnnnnnnnnnnnnnnnnnnnnnnnnnnnnnnnnnnggggagtttggggaagtgtgccgtggtcgactgaaacagcatggccgccgggaggtgtttgtggccatcaagacactgaaggtgggctacaccgagaggcagcggcgtgacttcctaagcgaggcctccatcatgggtcagtttgatcatcccaatataatacagctcgagggcgtggtcaccaaaaaaaaaccggttatgatcctcactgagttcatggaaaactgcgccctggactccttcctccg

SEQ ID NO: 18963 - DNA, 1032 bp, Macaca Mulatta
gctctgcctacttttagttgactcacaggccctggagaagcggctaacagtgtccggttagttaaaagcccattgccatttggtctggattttctactgtaagaagagtcatggctgatcatgtccccctgacccttcccttctttttttatgctcgttttcgctggggatggaattattgtgccattttccatcgtggaatatatataggctagggcatgtgtatgtgtctgctaatgtaaactttgtcatggtttccatttactaacagcatcagcaagaaataaatcagagagcaaggcatcgggggtgagtcttgtctaacattcccgaggtcagccagaccgctaacctggaaagcaggatgtagttctgccaggcaacttgtaaagctcatgcattttaagcagctgaaggaagaatcagaactaaccagtacctctgtatagaaatctaaaagaattttaccattcagttatttcaatgtgaacattggcacactgctcttaagaaactatgtatatctgagattttttgtgtatgtttttgactcttttgagtagtaatcatatgtgtcttcatagatgtacatatctcctcgcacaaatgaaggggaattcatttggaattcattttcatcattgggggtgtccttggtgtaaacaaaccatgctggttatgtggcttcaagttgtaaaaatgaaagtgactttaaaagaaaataggggctggtccagaatctccactgatcagactgtttttaagtaacttaagtaactttgggtctacaagtatatgtgaaaaaaatgagacttcctgggtgaggaaatgcattgtttaaaagtgcttgtgtgtgcgtgtgcgtgcgtgtgtgtgttgtgttgtgttttttaagggagggaatttatttactgttgcttgaaattactgtgtaaatatatgtctgataatgatttgctctttgacaactaaaattaggactgtataagtactagatgcatcactgggtgttgatcttacagaatatgatga

SEQ ID NO: 18964 - DNA, 935 bp, Macaca Mulatta
atagtatgatacgcacaggagaactccaactaaaaagagaggaatcttttggaagatggaagtgaatcacctgcaaaaagaatttgcccagaaaatcattctgccttattacgccgtctccaagatgtagctaatgaccgtggttcccactgaggttagtctcttgtattgaaactcttttcacaacatgtttagccgcatcctttaatgcatctagattatggagctttttcccttaatccagctgatcagttacagcctgttagtaacatgaggggatattttggtgagaaatgggacttaactccttccagtatccttagaacattttaattcatcccaactgtcttcttttccctaccattcagtgattactgtcaaggctgcttagaatccaaacttggatttttgactctgacaaagcttttaaaagtactacaagaaaatgatgtgtacccaaatgtgagcatacgaggcttctgttgacatactccaacagaagaactgtatttcaagttcactcctacctgttttgtggtcagctgtagtcctcataaaaagcaaaacaaaaattaggtattttgtcctaaaacacctggtaggagtgtgtgatttttacattcctgaaacagaacaaaggagagcgcacccaggtttggaggtcctaggtcactagccctcgtctcccattccctttgtgcacgtcttcccctctccccatttggtgtggtgcagtgtgaaaagtccttgattgttcgggtgtgcaatgtctgagtgaacctgtataagtggtggcactttagggctgtaaaatgcatgattttgtaacccagattttgctgtatattttgtgatagcactttctacaatgtgaacttcattaagtacaaaacttcccagctaaacatccaatattttctttaatgcttttgtaa

SEQ ID NO: 18965 - DNA, 154 bp, Macaca Mulatta
gttaaatggaagtggtcagctcaaaatgcccagccactgcctttctgctcagatgctggcacctccgcccccggggctgccacggctggcgctcccccctgccaccaaacccgccaccacctccgagggaggagccacgtcgccgacctcgcct

SEQ ID NO: 18966 - DNA, 694 bp, Macaca Mulatta
atctcaatcgattctgacctgctctgtgcctgtgaccttgctgaagaaaaaagccccagtcacgcaatatttaaactcacatatctaagcaatcacgactataaacacctctactttgaatcggacgctgctaccgtcaatgaaattgtgctcaaggttaactacatcctggaatcgcgagcaagcactgcccgggctgactactttgctcaaaaacaaagaaaactgaacagacgtacgagcttcagcttccagaaggagaagaaatccgggcagcagtgacactggcctccagcctcaatctgttccgtagctcagagcctgcctgccagggccaagtgccctagagcccacccagtgtcctgaagtcctcgggggaaggccagctcctggctcactggcacagggcaggcgggccctcggagaaggtgttggggggccccctaggaaggagtgctggggacattgccatggggcggaaacctgcttggcagtggctttgatgagtgatgcctgggggccagaccaccccctagaggagcctcgtgccacccagccaccttcactgcctgccaccctgcccgaggatgtacagagctgtgcccacacatttccttgcaacttgatcaaatttcttaaagcaaacaaagaacaaaaatgtacatttctggttttccttttcatcaacaggtgt

SEQ ID NO: 18967 - DNA, 87 bp, Macaca Mulatta
atagacgttttgctcctgatatttcgtcctatgtattgtctgatgacatcaagctacattccctccagctgctgcccatttaccaga

SEQ ID NO: 18968 - DNA, 216 bp, Macaca Mulatta
aggtatctgttactaaggctgaacaagaactgggatttgccatccaaacgtgctttatctctccatattcgaaccctgataggatgtctcattacaccattattgagaacatttgtcctaaagatgaatctgtgaaattctacagtcccaggagagtgcactttcctatcccgcaagccgacatggataagaagcgattcagctttgtcttcaagc

SEQ ID NO: 18969 - DNA, 207 bp, Macaca Mulatta
ggcaccaagtctaaaggaggcagaaggcaaagaacctgagctcttcctaagtagatccaggcctgtggcagccaaggccaagcaggcccatctcacaaccctgaagcacatacaagcaccctggtggaagaagcttggggaagaatctggagatgagattgatgttccaaaggatgagcttagtgtagaattagaaactttattcat

SEQ ID NO: 18970 - DNA, 551 bp, Macaca Mulatta
tggatgaatataaaattttattgtgtaattacttggttccattaaaattggttaacttgctagcttctctgttgagcatgccccctccagtgcccttgaagcaccaagaacactaattccactggttacatagaatcacatgcagaaagccatcagtcctttcctgagctgtggttctagattgctagacttgtttgatgctttctagccagtgtgcccagtagagaagggaataatgatcctcactgatgggcaagaggtggatagaggaatgtaaggatgattggtttcaaatgtaagactcattcaggcccatcttcaggcctagtccctggacaaagatttcctggatcctgcagtcagcctaatgggctgctaatctgatccccaggctgtgaaggactgggctctggatgaaggcatctaatgaaaatcacttacgggtgagaaccaaaaccttttatgagtttatgtcttcctatgagctttattaatgttgagtacaaatcactgcctccttggctaaaggtgtaaccttatggaagtgcttc

SEQ ID NO: 18971 - DNA, 1888 bp, Macaca Mulatta
  misc_feature (1)...(1888): n = A,T,C or G
acaactatgcagtcacagttatgattggtggagaaccatatactcttggactttttgatactgcaggnnnnnnnnnnnnnnnnnnnnnnnnnnnnnnnnnnnnnnnnnnnnnnnnnnnnnnnnnnnnnnnnnnnnnnnnnnnnnnnnnnnnnnnnnnnnnnnnnnnnnnnnnnnnnnnnnnnnnnnnnnnnnnnnnnnnnnnnnnnnnnnnnnnnnnnnnnnnnnnnnnnnnnnnnnnnnnnnnnnnnnnnnnnnnnnnnnnnnnnnnnnnnnnnnnnnnnnnnnnnnnnnnnnnnnnnnnnnnnnnnnnnnnnnnnnnnnnnnnnnnnnnnnnnnnnnnnnnnnnnnnnnnnnnnnnnnnnnnnnnnnnnnnnaaggcctaagaatgtatttgacgaagcaatattggctgccctggagcctccagaaccgaagaagagccgcaggtgtgtgctgctatgaacatctctccagagccctttctgcacagctnnnnnnnnnnnnnnnnnnnnnnnnnnnnnnnnnnnnnnnnnnnnnnnnnnnnnnnnnnnnnnnnnnnnnnnnnnnnnnnnnnnnnnnnnnnnnnnnnnnnnnnnnnnnnnnnnnnnnnnnnnnnnnnnnnnnnnnnnnnnnnnnnnnnnnnnnnnnnnnnnnnnnnnnnnnnnnnnnnnnnnnnnnnnnnnnnnnnnnnnnnnnnnnnnnnnnnnnnnnnnnnnnnnnnnnnnnnnnnnnnnnnnnnnnnnnnnnnnnnnnnnnnnnnnnnnnnnnnnnnnnnnnnnnnnnnnnnnnnnnnnnnnnnnnnnnnnnnnnnnnnnnnnnnnnnnnnnnnnnnnnnnnnnnnnnnnnnnnnnnnnnnnnnnnnnnnnnnnnnnnnnnnnnnnnnnnnnnnnnnnnnnnnnnnnnnnnnnnnnnnnnnnnnnnnnnnnnnnnnnnnnnnnnnnnntaattcattaaccagtggatagcccttaaggggaggaggacggattgattccacattccacttcctagatctagtttagaaaacatgttccccatctggtgctcttaggaaggagtatagtaaatgcctcatttaataacatactcctttttgaaagttgccttttctctccacccttgagtagatccagtatttgatgaaactcatgaaagtgggtggagcctgtcttgcccctcctcttttctatgacgcactatatgtgactgtgactttcaaggacatttgtttgccattcactgttttttttgggaagttgatttctaacttctttcactgataaatgaagaaaagtattgcacctttgaaatgcatcaaatgaattgagtttgtaatnnnnnnnnnnnnnnccctctcagtcattgtcttatatgcttagcgtagatttgcagctcggtagtatatggtgttcctagaatgcagctgaagacctggtatgtagaggaaatacgaggggtggtgctagaagacagacatctgtggaatgattcacatcctctcaagttaggaggatggaggcctgcttcattaagaagcnnnnnnnnnnnnnnnnnnnnnagaacacttaacaacatggggaccagtcaggggaatccccttatttctgttttgcatatgaggaaccctagagcagccaggtgaggctctctagtttaataaaaatcatggaaagagtcttaataaagactcttaataagtgctaatagggattttatcagcttattttggttgcagtttccaatttttaaaaatgttgaggtaatctttcccaccttcccaatcctaattcttgtagattcattagtgttgaaccaatgctttctcatgtctcaattctttgtatatgcattcttttcagatgtattaagcaaacaaaaacccttcaca

SEQ ID NO: 18972 - DNA, 177 bp, Macaca Mulatta
  misc_feature (1)...(177): n = A,T,C or G
ggggatctatagctaaaattaaaaacatataagcgtatcgtaaatcttgactatgtctgtgttcacctctaattctgtttggaataaggcttcaaatgctttccagaatgatgtgagttacaaataaatagaaaaagnnnnnnnnnnnnnnnnnnnnnnnnnnnnnnnnnnnnnnnn

SEQ ID NO: 18973 - DNA, 119 bp, Macaca Mulatta
agtcacctaaggtcctgcgagtacaagggtcgacccccaaaggcaggggcagagccagcatctgagagggaggtctcttgaccaatgggcagaatcttcactccatggcacatagcccc

SEQ ID NO: 18974 - DNA, 269 bp, Macaca Mulatta
atcctccagggagactcaggtgggcccctgatctgtgatggcgtcatccagggagtagactcctttgtgatccgggaatgtgccaccggccagttccccgacttcttcgcgcgggtagccctctacgtggactggatccgttccatactgcgccgcgtgggggctgagggccgcccctgagccgcccccacagcgctggccggaacccgagcccggctgcaaaccctggagggggatctttggacagaagcagctcttctccgaacact

SEQ ID NO: 18975 - DNA, 503 bp, Macaca Mulatta
  misc_feature (1)...(503): n = A,T,C or G
caggcccgggtggagcgcatggagcagttccagaaggagaaggaggaactggacaggggctgccgcgagtgcaagcgcaaggtggccgaatgccagaggaagctgaaggagctggaggtggctgagggcggcaaggcagagctggagcggctgcaggccgaggcacagcagctgcgcaaagaggagcggagctgggagcagaagctggaagagatgcgcaagaaggagagggacatgccctggaacgtggacannnnnnnnnnnnnnnnnnnnnnnnnnnnnnnnnnnnnnnnnnnnnnnnnnnnnnnnnnnnnnnnnnnnnnnnnnnnnnnnnnnnnnnnnnnnnnnnnnnnnnnnnnnnnnnnnnnnnnnnnnnnnnnnnnnnnnggcatgctccgccgctgggatgacagccaaaagtacctgtcagacaatgtccacctggtgtgcgaggagacggccaattacctggtcatctggtgcattgacctagaggtggagga

SEQ ID NO: 18976 - DNA, 321 bp, Macaca Mulatta
agtgcacgagcatagctgtgtctcggaaatggttggctttgggcagttcaggaggaggactccatctcattcagaaagaaggttggaagcacaggctttttctttcacacagggtaagattaagggcagctctgttgtataccatttggagtctttttcataaatgcaaatttctccaatataaataatcgtttggaataaaagaatgtaaaacgtgccctggtgcagtggctcacgcctgtaatcccagcgttttgggaggccaaggcgggtggattacctgaggtcaggagttggagaccagcctggccaacatggtga

SEQ ID NO: 18977 - DNA, 487 bp, Macaca Mulatta
cttttaaaatccagggaacagtccctggacagtatgaattatttgctaaacgcctctacactttctctttcagccaatttgacgacactgaggatccctgtgtggaaatcattctttggctgtctgaggaatatttttgtcaaccacatccctgtccctgtcactgaagccttggaagtccaggggcctgtcagtctgaatggctgtcctgaccactaacccatgcctgtttcacagcaaggaaattcaccttcaaaagcactgattacccaatgcacctcccaccccagctcgagatcattcttcactcaggacaccaaccagacaggtttaacagcaaacctaattttgaattctgaccatggatacccatcactttggcattcagtgctccacgtgtattttatatacaaatcccatttcttgaagataaaaacattgttattcaaacatgcacagaatgtttttggtaatattaatttccact

SEQ ID NO: 18978 - DNA, 216 bp, Macaca Mulatta
ccagagccagaactgagcccagtgagagcataccctggggcagcctggattcctggggggtccccggcagccacacgcagtcatgcattatccaactgcactcctcttcctcatcctggtcagtggggcccaggcctttcgcatctgcgccttcaacgcccagcggctgacactggccaaggtggccagggagcaggtgatggacaccttagttcg

SEQ ID NO: 18979 - DNA, 516 bp, Macaca Mulatta
  misc_feature (1)...(516): n = A,T,C or G
ttatgagaaggatattgaaggatttttcagaacaccttattcttttgtaatgttaaccttttaaagtttgactttgacactaacattaaggacttatatgtaaggtagctaatgcatcattctgcagagaagagtattcctttccacttataactaaataagacctgcttttgctggagctgggctaggctgagggatttccatactgaattttacaagcgggactggatttctctaaggnnaggcagaagactgatttttgaaaatatgtatttgggagatagtcacgtcctattgaataccttgtgctggtgctgccatcgaaaaatctggttacattctggggaggactgctaccactgcaggactgaaccgcttcggccgtgagatgagtgtctggcctgagcaggcacaccatgaatagatacacaacaatcaggcagctcggggatggaacctatggttctgtgctgctgggaagaagcattgagtctggggagctgattgctattaaaa

SEQ ID NO: 18980 - DNA, 2502 bp, Macaca Mulatta
  misc_feature (1)...(2502): n = A,T,C or G
ggtgacagagctggcacctctgggatcgttgttggaccggctacgtaagcaccagggccacttcctcctggggactctgagtcgctacgctgtgcaggtggctgagggcatgggctacctggagtccaagcgctttattcaccgtgacctggctgcccgcaatctactgttggctactcgcgacctggtcaagatcggggactttgggctgatgcgagcactacctcagaatgacgaccattacgtcatgcaggaacatcgcaaggtgcccttcgcctggtnnnnnnnnnnnnnnnnnnnnnnnnnnnnnnnnnnnnnnnnnnnnnnnnnnnnnnnnnnnnnnnnnnnnnnnnnnnnnnnnnnnnnnnnnnnnnnnnnnnnnnnnnnnnnnnnnnnnnnnnnnnnnnnnnnnnnnnnnnnnnnnnnnnnnnnnnnnnnnnnnnnnnnnnnnnnnnnnnnnnnnnnnnnnnnnnnnnnnnnnnnnnnnnnnnnnnnnnnnnnnnnnnnnnnnnnnnnnnnnnnnnnnnnnnnnnnnnnnnnnnnnnnnnnnnnnnnnnnnnnnnnnnnnnnnnnnnnnnnnnnnnnnnnnnnnnnnnnnnnnnnnnnnnnnnnnnnnnnnnnnnnnnnnnnnnnnnnnnnnnnnnnnnnnnnnnnnnnnnnnnnnnnnnnnnnnnnnnnnnnggacgctgtgtgtgggacccttccctcgcaacgtggtgatctctgtggccggcctgtcagcccaggacatcagccagcccctgcagaacagcttcatccacacggggcatggcgacagcgaccctcgccactgctggggcttcccagacaggattgacgannnnnnnnnnnnnnnnnnnnnnnnnnnnnnnnnnnnnnnnnnnnnnnnnnnnnnnnnnnnnnnnnnnnnnnnnnnnnnnnnnnnnnnnnnnnaccaacgtatgaccctgtgagcgaggaccaggaccccctgtccagcgacttcaagaggctgggcctgcggaagccaggcctgcctcgagggctgtggctggcaaagccctcagcacgggtgccgggcaccaaggccggccgaggcagcggggccgaggtcacgctttttgactttggtgaggagcccgtggtcccggccctgcggccctgtgcgccctccctggcgcagctggccatggacgcctgctccctgctggacgagaccccgcctcagagccccacgcgggcactgccccggcccctgcaccccnnnnnnnnnnnnnnnnnnnnnnnnnnnnnnnnnnnnnnnnnnnnnnnnnnnnnnnnnnnnnnnnnnnnnnnnnnnnnnnnnnnnnnnnnnnnnnnnnnnnnnnnnnnnnnnnnnnnnnnnnnnnnnnnnnnnnnnnnnnnnnnnnnnnnnnnnnnnnnnnnnnnnnnnnnnnnnnnnnnnnnnnnnnnnnnnnnnnnnnnnnnnnnnnnnnnnnnnnnnnnnnnnnnnnnnnnnnnnnnnnnnnnnnnnnnnnnnnnnnnnnnnnnnnnnnnnnnnnnnnnnnnnnnnnnnnnnnnnnnnnnnnnnnnnnnnnnnnnnnnnnnnnnnnnnnnnnnnnnnnnnnnnnnnnnnnnnnnnnnnnnnnnnnnnnnnnnnnnnnnnnnnnnnnnnnnnnnnnnnnnnnnnnnnnnnnnnnnnnnnnnnnnnnnnnnnnnnnnnnnnnnnnnnnnnnnnnnnnnnnnnnnnnnnnnnnnnnnnnnnnnnnnnnnnnnnnnnnnnnnnnnnnnnnnnnnnnnnnnnnnnnnnnnnnnnnnnnnnnnnnnnnnnnnnnnnnnnnnnnnnnnnnnnnnnnnnnnnnnnnnnnnnnnnnnnnnnnnnnnnnnnnnnnnnnnnnnnnnnnnnnnnnnnnnnnnnnnnnnnnnnnnnnnnnnnnnnnnnnnnnnnnnnnnnnnnnnnnnnnnnnnnnnnnnnnnnnnnnnnnnnnnnnnnnnnnnnnnnnnnnnnnnnnnnnnnnnnnnnnnnnnnnnnnnnnnnnnnnnnnnnnnnnnnnnnnnnnnnnnnnnnnnnnnnnnnnnnnnnnnnnnnnnnnnnnnnnnnnnnnnnnnnnnnnnnnnnnnnnnnnnnnnnnnnnnnnnnnnnnnnnnnnnnnnnnnnnnnnnnnnnnnnnnnnnnnnnnnnnnnnnnnnnnnnnnnnnnnnnnnnnnnnnnnnnnnnnnnnnnnnnnnnnnnnnnnnnnnnnnnnnnnnnnnnnnnnnnnnnnnnnnnnnnnnnnnnnnnnnnnnnnnnnnnnnnnnnnnnnnnnnnnnnnnnnnnnnnnnnnnnnnnnnnnnnnnnnnnnnnnnnnnnnnnnnnnnnnnnnnnnnnnnnnnnnnnnnnnnnnnnnnnnnnnnnnnnnnnnnnnnnnnnnggtggagcagctcttcgggctgggcctacggcccagaggggagtgccacaaagtgctggagatgttcgactggaacctggagcaggccggctgccaccttctgggctcctggggccctgcccaccacaagtga

SEQ ID NO: 18981 - DNA, 198 bp, Macaca Mulatta
gaaatattctatatcattggagctgtggtatttgtggtcatcatccttgtcatcatcctggctatatctctacacaagtgtaaaaaggcaagagtggggcggagctggaaggagaactccccactgaatgttgcataaaggaagcaccgttggagctactgcaaatgctgtattgcactgtgaccgagaacttttaag

SEQ ID NO: 18982 - DNA, 1137 bp, Macaca Mulatta
  misc_feature (1)...(1137): n = A,T,C or G
gggtgaccaataaatataaaatatggaaattggaattaactccacaccatagtatgcattgttatgcatacggtgcacctaattatgtataccagtgtagtctcaattatatctaaaagttattgtgactaacaagtatgctttgccttatttccacatttaaactaacttttaacgtaagggatttgtagtatcaacttgttgagcaatgactaaaagtcgagttttcaatgatcagaagcatcaattacttgtgtgcatgaatggaatgataactataaggaagtgaaaccactatattaacagaaataaataacaacaatatttttccatctaaaaggtttctagagaaaggaataagtgattaagttggcacccggacaaaaatctttgcattagtttcctgaggaaacccagttgaaaaacgtttatcctccaaaaccaaacaggtgtatagagatagtggaccctgagctacaaaactcagaataaatagtatatatactcgcgcgatcaaagtaaggagaagtaatatagataatttctatttcttcgtcagacgacctcctataacattgatgatgagcacgagtatacgatattatatttcgcccccactctagcttatgtagaattggctcatgtaaatagacataattgctgcaaaagcatcccacntccctctttctaaaaaattatatttttaatattgtccaaataatgatgaaaaagtcataacatatagtgtattatgacaagaaataacatcaagttccttatagtgtcgtcaaatgaaaggatgaatgtaaagagtctacatctcgggcttatattgaataacatttacatagccacttgtaatagatagtagaagacggggtaagagagagntgactatttaccctagattagatgtctttctcatatctcgaatagcatgatatatttagaatcacctagtatattattccctagacaattgaagacataataatggtggatgtaaacatagtgagagtatcgctgatgcggccgcttctcctgatacacctctctctataaaatataaatgtatatataacataaaaaaacattaatatctataaacgtaacctatattagacgatnatagtcctn

SEQ ID NO: 18983 - DNA, 285 bp, Macaca Mulatta
cactgaaactactttggagaatggattaatacatctgagaagcagagacacgacaatgaaggaaatgatgcatatatccaaattaaaagactttttgattaagtatatatcatcagctaagaatgtatagatttttatatttgtataataaatattcttctttcctaatttggttgtcttatgttcactcagattcatttctagcccctttgcacttatgaagtggacatttgtggtgcttgctttcattcagtgtttatatttttgatgtctttcattgtatca

SEQ ID NO: 18984 - DNA, 510 bp, Macaca Mulatta
  misc_feature (1)...(510): n = A,T,C or G
agtctcgctctgtggccaggctggagtgtagtggcgtaatctcggctcactgcccccctgcctcctgggttcaagcgattcccctgcctgtctcccgagtagctgggactagnnnnnnnnnnnnnnnnnnnnnnnnnnnnnnnnnnnnnnnnnnnnnnnnnnnnnnnnnnnnnnnnnnnnnnnnnnnnnnnnnnnnnnnnnnnnnnnnnnnnnnnnnnnnnnnnnnnnnnnnnnnnnnnnnnnnnnnnnnnnnnnnnnnnnnnnnnnnnnnnnnnnnnnnnnnnnnnnnnnnnnnnnnnnnnnnnnnnnnnnnnnnnnnnnnnnnnnnnaggtcaaagggagtgtgaacaatgtgatgaagactattggtcaaatgcacaaaagagcaagtgtgtgccgaaacaggtggaatatcttgcttatgatgaggccttgggattcacgcctgtcattctttctgtctttggggcatctgtggtcttggcaatcacaactgtgtatgtgatacac

SEQ ID NO: 18985 - DNA, 896 bp, Macaca Mulatta
  misc_feature (1)...(896): n = A,T,C or G
ggggcggcgtagtctcctgcagcgtttgcggtcagtctcgcaatattcggaagcaggaccgcggcgtggcctagcaagtcatggcgatgaaggccgtgtgcgtgttgaagggcgacagcccagtgcagggcaccatcaatttcgagcagaaggaaagtaatggaccagtgaaggtgtggggaagcattacaggattgactgaaggcctgcatggattccatgttcatcagtttggagataatacacaaggctgtaccagtgcaggtcctcactttaatcctctatccagacaacacggtgaggccaaaggatgaagagaggcatgttggagacctgggcaatgtgactgctggcaaagatggtgtggccaaggtgtctttcgaagattctgtgatctcgctctcaggagaccattccatcattggccgcacattggtggtccatgaaaaaagcaaatgacttgggcaaaggtggaaatgaacaaagtaaaaaagacaggtaaacgctgggagagtcgttctggccttgtgtgtgttaaattggggatccgccccaaataaaaacatttccccttgggaatagtaattccggaaggtctccattaaaactccactcctggtgtagtcactgcctaaccctagtttataaaatggtgacccttgtgactaaaaccattgtaaagcccatgggaaatactttcagaaagtcgtataatttggaggctgaaacactattgccctatagcttcccccgtgtaatatgtattaaacccccggtcttgcaaggcattcaccctccggcgaaagcaatatgattcattgggtgtgtttatgaaaaaaacctcttaatatttagnaaaaacggtcctgttgttctttaccaagttgaaccacccc

SEQ ID NO: 18986 - DNA, 434 bp, Macaca Mulatta
acttgagtgcaccaaatgagtgaatgctgaactcacttgcatcccttcatgtttctcagcttgtggattataaggatgatgaaatgtgaaagtctcccaacactctgagggtagtgagtgaatgccacccgtttgattttaatgtgctgctgcatgagactgtattgttgctaatggcacagtgtacccagatgtgaagtgtgatattctggttcatgtgtggagatggttatgtgaagctagacatgaatgtccctaagggtctgaatagacttgaactgtggaaatgctcttatcatgcatcctgaacccctgcctttggtcttgttttgaggaatacgatcttggagttcataccaactgactagcagttctgtccctattgaaaagaacgctattctactttggaagataatattagatcttttcaagta

SEQ ID NO: 18987 - DNA, 628 bp, Macaca Mulatta
ggggaatattcagctgtgttctgggaaaggtgcaatgagctccaggacatagagaagattatggctcagattgaaaggggagaggcgagaattcaaagaagaataagcatcaagaaagcacttgacacaaagattggacggtacaaagcaccttttcatcagctgagaatatcatacggtactaacaaaggaaaaaactatactgaagaagaagatcgttttctgatttgtatgcttcacaaacttggatttgacaaagaaaatgtttatgatgaattacgacagtgtattcgcaactctcctcagttcagatttgactggtttcttaagtccagacctgcaatggagctcccgaggagatgtaaacctttaattactttgattgaaaaaagaaaacctggaacctaaaagaaaaggataaggccaagaaaaaaaaacgaggaccagcccttcccccaaaaactaaaatgttggaacccctggcgggccaggaaaaaaaaaaaccggacctttgaaatgttttttgttcaaatcccaattttaaccacaatttcttattttcgggccttaaaaaattttggacaagcccatttttttgttttaaaaaacacggtgtccgttttttgac

SEQ ID NO: 18988 - DNA, 528 bp, Macaca Mulatta
tgaaaagatgaaaagtgagagttgaaaagagaaatgataatgcttccaaactgtagctgtctcagggcaatttctttatttataacatgaagcacaatggatttacagctctaggaacttagtactttggagcttttgcctctcatgctgacaacataacagaatgtgattgccttctccggattccgacaggctctgtcaatgtggagcacaaaaggagattttcgtataacttgttgaaaacgtgctctaagtcatggataggctaagattttttaaagatctgggggaataaaaagccaacagtaaaccccaggaaagggtttttagagaccgtgtgcatgctattaaaatatattgagattaatacatgaacatgcttaaaggtgataggaattactgagaaacttatggtggtggcattgccttttctaaacctgcagtgaaagctatttgactcatgtttgctgtgcctaaagaattgcttcaggaactgagcgtgtttatttatggtattcctgcagttag

SEQ ID NO: 18989 - DNA, 216 bp, Macaca Mulatta
ccctctaccaagccactccaagagccagcccctctctgctccacaaaaaccagggttcttggaaaagctccctgcctccccttgccactggtcccccatcaggcttgggagcgctggcatcccaaaggggcaatgggagaaaggggaggctgctgcattgtaggtgacaacgcaggacatgtgcttggtacaaaaagggcctgagaccttccacct

SEQ ID NO: 18990 - DNA, 645 bp, Macaca Mulatta
  misc_feature (1)...(645): n = A,T,C or G
ttaaaaaataacaatgaaattctttcgcatgcttctgcagcctttaaagtgttgaagttaactggagaatcaccagcatagccagagagaaagagactacagctttttagtggaaaagttgttgtgcgtggtgtcaccatacagttgccagtgtgattagtgcctaggggtctccatttagcagaaatggtaatgacagtgatatagcatctggaatctggttgggcagtaggggaggaaggtataaggaaaaatgtgagatttctacctttccgttttcatcctattgtggcatatgtgatttctctaacattatctgaataaattttccactcttggaaaggtagatttagcctcaagctgttttaatcttcaggaggctgccagcccctcctcttatttaattctgagttttgggggccagcctagggggaattccttcattttctttttaccccccaggggggtagnttgggagtgagtctacaagccataaagaataggactgcattggactaaaataaatgggaaaatcatggtttgaaaagcagctttggggagctgatgagtcattttgcaccaggcaataggggaaaattgtgacctccagcaaacacatgaatggttatttcccggagccggaaa

SEQ ID NO: 18991 - DNA, 208 bp, Macaca Mulatta
cagctttgggacccccgcccctggcttctcctccatgctgtatggaatgaagattgcaaatctggcctacgtcaccaagactcgggtcaggttcttcagactcgaccgctgggccgacgtgcggttcccagaaaagaggagaatgaagctggggtcagatatcagcaaacaccacaagtcactgctagccaagatcttttatgacagg

SEQ ID NO: 18992 - DNA, 349 bp, Macaca Mulatta
agactgagccgtccagcccgtcttcgcgcatcaatgccctcagccaccacagccccagtggctcgtccgacgccagcggtggctttggcctggccctgggcacccacgccaacggtctggactcgccacccatgtttgcaggcgccgggctgggaggcaccccatgccgcaagagctacgaggactgtgccagcggcatcatggaagactcggccatcaagtgcgagtacatgctcaacgccatccccaagcgcctgtgcctcgtgtgcggggacattgcctctggctaccactacggcgtcgcctcctgtgaggcttgcaaagccttcttcaagaggaccatccaagg

SEQ ID NO: 18993 - DNA, 685 bp, Macaca Mulatta
actgactttaaagggtggcgctctgtatggctgaccatggcgtgtgctgcattgatgagtttgacaaaatggccgaggccgaccgcacagccatccacgaggtcatggagcagcagaccatctccattgccaaggccggcatccttactacactcaatgcccgctgctccatcctggctgccgccaaccctgcctatgggcgctacaacccccgccgcagcctggagcagaacatacagctgcctgccgcgctgctctcccggtttgacctcctctggctgattcaggaccggcctgaccgagacaatgacctacggttggcccagcacatcacctatgtgcaccagcacagccggcagcccccctcccagttcgaacctctggacatgaagctcatgaggcgttacatagccatgtgccgcgagaagcagcccacagtgccagagtctctggctgactacatcacagcagcgtatgtggagatgaggcgagaggcttgggctagtaaggatgccacctacacttccgctcggaccctgctggctatcctgcgcctttccactgctctggcgcgtctgcgaatggtggacgtggtggagaaggaagatgtgaatgaagccatcaggctaatggagatgtcaaaggactctcttctgggagacaaggggcagacagctagggctca

SEQ ID NO: 18994 - DNA, 787 bp, Macaca Mulatta
  misc_feature (1)...(787): n = A,T,C or G
gggggagatcctcccacctcagcctcccacgcagctggggctataggcatgcaccaccatgnnnnnnnnnnnnnnnnnnnnnggtagagacagggtttcatcgnnnnnnnnnnnnnnnnnnnnnnnacctgagctcaagcaatctattnnnnnnnnnnnnnnnnnnnnnnnnnnnnnnnnnnnncagccaccacggccggccttctcatttgttttttataaggaagctatctcttcttccctacccaactaagggttttcttttccctttcgccactttgctcatgtcctatattccttcagcttcattaatggatccatttagaagcagtgaagaaggcgagtccgaaagctaaaaagaaatacctgcaggaatactcagagcgatctgagtattttcattagtttgttagctctttggagctttgaaactggaaagacccagggagtggtgtgaagaaagagactgagcagtaagaaacaggaacagtgagctaaaggagatggagtagtggggacaaattctggcacattctgtccacactctgggtagacagaagaagggaggatggaaccacccacagtggggggtatgtttggtgaacagccgtttttcccccccaacccagttgtaaacaaggtgggcctgaaattttgggggaaaaagaatgagacctttaaccaaattggaaaaaaaagggtggttttataataactttcgaaaagacacaggtgggggggtttaatttttgtgccttccnnnnnnnnnnnnnnngnnnnnnnnnnn

SEQ ID NO: 18995 - DNA, 1977 bp, Macaca Mulatta
  misc_feature (1)...(1977): n = A,T,C or G
agcctggggaggtcgagggcagcgagctgtgatcatgctactgcactccagcctgggcaacacagagagaccctgtctnnnnnnnnnnnnnnnnnnnnnnnnnnnnnnnnnnnnnnnnnnnnnnnnnnnnnnnnnnnnnnnnnnnnnnnnnnnnnnnnnnnnnnnnnnnnnnnnnnnnnnnnnnnnnnnnnnnnnnnnnnnnnnnnnnnnnnnnnnnnnnnnnnnnnnnnnnnnnnnnnnnnnnnnnnnnnnnnnnnnnnnnnnnnnnnnnnnnnnnnnnnnnnnnnnnnnnnnnnnnnnnnnnnnnnnnnnnnnnnnnnnnnnnnnnnnnnnnnnnnnnnnnnnnnnnnnnnnnnnnnnnnnnnnnnnnnnnnnnnnnnnnnnnnnnnnnnnnnnnnnnnnnnnnnnnnnnnnnnnnnnnnnnnnnnnnnnnnnnnnnnnnnnnnnnnnnnnnnnnnnnnnnnnnnnnnnnnnnnnnnnnnnnnnnnnnnnnnnnnnnnnnnnnnnnnnnnnnnnnnnnnnnnnnnnnnnnnnnnnnnnnnnnnnnnnnnnnnnnnnnnnnnnnnnnnnnnnnnnnnnnnnnnnnnnnnnnnnnnnnnnnnnnnnnnnnnnnnnnnnnnnnnnnnnnnnnnnnnnnnnnnnnnnnnnnnnnnnnnnnnnnnnnnnnnnnnnnnnnnnnnnnnnnnnnnnnnnnnnnnnnnnnnnnnnnnnnnnnnnnnnnnnnnnnnnnnnnnnnnnnnnnnnnnnnnnnnnnnnnnnnnnnnnnnnnnnnnnnnnnnnnnnnnnnnnnnnnnnnnnnnnnnnnnnnnnnnnnnnnnnnnnnnnnnnnnnnnnnnnnnnnnnnnnnnnnnnnnnnnnnnnnnnnnnnnnnnnnnnnnnnnnnnnnnnnnnnnnnnnnnnnnnnnnnnnnnnnnnnnnnnnnnnnnnnnnnnnnnnnnnnnnnnnnnnnnnnnnnnnnnnnnnnnnnnnnnnnnnnnnnnnnnnnnnnnnnnnnnnnnnnnnnnnnnnnnnnnnnnnnnnnnnnnnnnnnnnnnnnnnnnnnnnnnnnnnnnnnnnnnnnnnnnnnnnnnnnnnnnnnnnnnnnnnnnnnnnnnnnnnnnnnnnnnnnnnnnnnnnnnnnnnnnnnnnnnnnnnnnnnnnnnnnnnnnnnnnnnnnnnnnnnnnnnnnnnnnnnnnnnnnnnnnnnnnnnnnnnnnnnnnnnnnnnnnnnnnnnnnnnnnnnnnnnnnnnnnnnnnnnnnnnnnnnnnnnnnnnnnnnnnnnnnnnnnnnnnnnnnnnnnnnnnnnnnnnnnnnnnnnnnnnnnnnnnnnnnnnnnnnnnnnnnnnnnnnnnnnnnnnnnnnngggctcatatggtgtcgtcaagttggcctacaatgaaaatgacaatacctactatgnnnnnnnnnnnnnnnnnnnnnnnnnnnnnnnnnnnnnnnnnnnnnnnnnnnnnnnnnnnnnnnnnnnnnnnnnnnnnnnnnnnnnnnnnnnnnnnnnnnnnnnnnnnnnnnnnnnnnnnnnnnnnnnnnnnnnnnnnnnnnnnnnnnnnnnnnnnnnnnnnnnnnnnnnnnnnnnnnnnnnnnnnnnnnnnnnnnnnnnnnnnnnnnnnnnnnnnnnnnnnnnnnnnnnnnnnnnnnnnnnnnnnnnnnnnnnnnnnnnnnnnnnnnnnnnnnnnnnnnnnnnnnnnnnnnnnnnnnnnnnnnnnnnnnnnnnnnnnnnnnnnnnnnnnnnnnnnnnnnnnnnnnnnnnnnnnnnnnnnnnnnnnnnnnnnnnnnnnnnnnnnnnnnnnnnnnnnnnnnnnnnnnnnnnnnnnnnnnnnnnnnnnnnnnnnnnnnnnnnnnnnnnnnnnnnnnnnnnnnnnnnnnnnnnnnnnnnnnnnnnnnnnnnnnnnnnnnnnnnnnnnnnnnnnnnnnnnnnnnnnnnnnnnnnnnaggccttggatgtttgggccatgggcgtgacactatactgctttgtc

SEQ ID NO: 18996 - DNA, 443 bp, Macaca Mulatta
  misc_feature (1)...(443): n = A,T,C or G
ggtgaaacgtcggtctcgccgcagccaggtgggcttccagcaagtcggtgtggagacctatggtggcgggatctggagcacctggtttgaccgtgacctgactctggctggacgcgtcattgtcaagnagtgccctacctcaggtcggctggagcagcggctggtgcatgtggaacggcccattcttcgcatcccacacctggccatccatctgcagcaaaacatcaacgagaactttgggcctaacacagagatgcannnagtccccattcttgccacagccatccaggaggagctggagaaggggactcctgagccagggcctctcagtgctgnnnnngagcggcaccattcggtcctcatgtctctgctctgtgcccatctggggctgagccccaaggacatagtggagatggagctctgccttgcagacacccagcctg

SEQ ID NO: 18997 - DNA, 177 bp, Macaca Mulatta
  misc_feature (1)...(177): n = A,T,C or G
aggatcccaaggcccgactccctgaaacacttagagtcctgcggacagctcacctagctgcaatggctgcagnnnnnnnnnnnnnnnnnnnctggctattgccctgctctgcctaccttggcttcaagagggcagtgccttcccaaccattcccttatcctggctttttaacaacgc

SEQ ID NO: 18998 - DNA, 1725 bp, Macaca Mulatta
  misc_feature (1)...(1725): n = A,T,C or G
tgtttccatctcctgtcatcaatatttccattccagaaaacactttgatcaacagccgctttccaattccatcagcaacagatcctgacacaggcttcaatggtgtacagcattatgaattgttaaatgggcagagtgtttttggactggatatcgtggaaactccggagggagagaagtggccacaattgattgttcagcaaaacttggatagagaacagaaagatacctatgtgatgaaaatcaaagtagaggatggaggcactccacagaaatccagtacggccatactgcaggtcacagtaagtgatgtaaatgacaaccggccagtgtttaaagagggtcaagtggaggtgcatattccagagaatgctcctgtaggtacctctgtaattcagctccatgccactgatgcagatataggcagtaatgctgaaatccggtacatttttggtgcccaggtcgcccctgcaaccaaaagactctttgctttaaataatactactgggctgattacagttcagaggtccttagatagagaggagacagccattcacaaagtgacagtgctggctagtgatggcagctccactcctgctcgagcaacggttaccatcaatgtcaccgatgtaaatgataaccctcctaatatagacctcaggtacattataagtcccatcaatggcaccgtgtatttatctgagaaagatcctgtcaatacaaagattgccctaattacagtttcagataaggacacagatgtgaatggcaaagtgatctgttttattgaaagagaggtcccatttcatttaaagnnnnnnnnnnnnnnnnnnnnnnnnnnnnnnnnnnnnnnnnnnnnnnnnnnnnnnnnnnnnnnnnnnnnnnnnnnnnnnnnnnnnnnnnnnnnnnnnnnnnnnnnnnnnnnnnnnnnnnnnnnnnnnnnnnnnnnnnnnnnnnnnnnnnnnnnnnnnnnnnnnnnnnnnnnnnnnnnnnnnnnnnnnnnnnnnnnnnnnnnnnnnnnnnnnnnnnnnnnnnnnnnnnnnnnnnnnnnnnnnnnnnnnnnnnnnnnnnnnnnnnnnnnnnnnnnnnnnnnnnnnnnnnnnnnnnnnnnnnnnnnnnnnnnnnnnnnnnnnnnnnnnnnnnnnnnnnnnnnnnnnnnnnnnnnnnnnnnnnnnnnnnnnnnnnnnnnnnnnnnnnnnnnnnnnnnnnnnnnnnnnnnnnnnnnnnnnnnnnnnnnnnnnnnnnnnnnnnnnnnnnnnnnnnnnnnnnnnnnnnnnnnnnnnnnnnnnncccagttgtcatttctccaccgtctaatacttcctttaagttggtgcccctctcagccattcctggctccgtggtagcagaagtttttgcagtggatgttgacactggaatgaatgccgaactaaagtatactatagtgagtggaaacaacaaaggcttatttcggattgatccagtaacaggtaacattactctggaagaaaaaccagcacctactgatgtgggattgcatcgtttggtggtcaacataagtgacctggggtaccctaagtctttgcacacgcttgtgcttgtattcctttatgttaacgatactgctggaaatgcctcctatatctatgacttgatccgcaggactatggagaccccgaagagcaggaacataggggatagtagccaaccctatcaaaatgaggactatctaaccatcatgat

SEQ ID NO: 18999 - DNA, 1601 bp, Macaca Mulatta
gggacacacagctcttctactccaccactgtctatcttgcctgctgacacccagccaccatgtgggagcttgtggctctcttgctgctcaccctagcctatttattttggcccaagagaaggtgccctggtgccaagtatcctaagagcctcctgtccctgcccctggtgggcagcctgccattcctccccagacatggccatatgcataacaactttttcaagctgcagaaaaaatatggccccatctattccgttcgtatgggcaccaagactacagtgattgttggccaccgccagctggccaaggaggtgcttattaagaagggcaaggacttctctgggcggcctcaagtgacaactctagacatcctgtccaacaatcgtaagggtattgcctttgctgagtacggcgcacattggcagctgcatcgaaggctggcgatggccacctttgccctgttcaaggatggcgatcagaagctggagaagatcttttgtcaggaaatcagtacattgtgtgatatgctggccacccacaacggacagaccatagacatctcctttcctgtcttcgtggcgataaccaatgtcatctccttgatctgctttaacatctccttcaagaaatgggggaccctggatttgaaagatcgctacattaatttacaatgaaaggcatccataagactgcccttggtgcaaatggagagcctggtggacctattcccctggttgaaggttttccccaacaaaactctggaaaaattaaagaggcatgttaaaacacgaaatgatctgctgactaaaatatttgaaaattacaaggagaaattccacagcgactctatcaccaacatgctggacgtactgatgcaagccaagatgaattcagataatggcaacgctggcccagatcaagactcagagctgctttcagataaccacattctcaccaccataggggacatctttggggctggcgtggagaccaccacctctgtggtgaaatggatcgtggccttcctgctgcacaatcctcaggtgaagaagaagctctacgaggagattgaccagaatgtgggtttcagccgcacaccaaccatcagtgaccgtaaccgtctcctcctgctggaggccaccatccgagaggtgcttcgcatcaggcccgtggcccctatgctcatcccccacaaggccaacgttgactccagcatcggtgagtttgctgtggacaagggcacacacgttatcatcaatctgtgggcgctgcatcacaatgagaaggagtggcaccagccggaccagttcatgcctgagcgtttcttgaatccagcggggacccagcttatctcaccatcattaagctacttgcccttcggagcaggacctcgctcctgtataggtgagatcctggcccgccaggagctcttcctcatcatggcctggctgttgcagaggttcgacctggaggtgccagatgatgggcagctgccctccctggaaggcaacccaaaggtggtctttctgatcgactctttcaaagtgaagatcaaggtgcgccaggcctggagggaagcccaggctgagggtagcacctaa

SEQ ID NO: 19000 - DNA, 658 bp, Macaca Mulatta
cgaggcgctccctgggatcacatggtacctgctccagtgccgcgtgcggcccgggaaccctgggctgttggcgcctgcgcagagccctctgtcccagggaaaggctcgggcaaaaggcggctgagattggcagagtgaaatattactgccgagggaacgtagcagggaacacgtctcgcctctttgcgactcggtgccccgtttctccccatcacctacttacttcctggttgcaacctctctctctctgggacttgtgcactgggagctccagattcgctaccccgcagcgctgcggagtcggcaggcagaggcaccccgtacgctgcagagacccgacgctccttgctaccttctagccagaattactgcaggctaattccccctacacactctctttgctcttcccatgcaaagcagaactccgttgcctcaacgtccaacccttctccagggctgcagtccggccaccccaagaccttgctgcagggtgcttcggatcctgatcgtgagtcgcggggtcctctccccgcccttagccagtgcccagggggcaacagcggtgatcgcaacctctagtttgagtcaaggtccagtttgcatgaccgctctcagccagagaagacatgacgaccctggactccaacaacaacacagg

SEQ ID NO: 19001 - DNA, 138 bp, Macaca Mulatta
ccagctgtctgtgagatgtgtggtatcgtgggtacaagggaagccttcttctccaagaccaagaggttctgcagcgtctcctgctccaggagctactcctccaactccaagaaagccagtatcttggctagattacag

SEQ ID NO: 19002 - DNA, 806 bp, Macaca Mulatta
  misc_feature (1)...(806): n = A,T,C or G
gggtgctcgcttcggcagcacatatactaaaattggaacgatacagagaagattagcatggcccctgcgcaaggatgacacgcaaattcgtgaagcgttcnnnnnnnnnnnnnnnnnnnnnnnngtcattcctacactggccaagattacagtacccagggaaatgttgggaagatttctttagatcagattgattcgctttctaccaaatccttcccaccttgcatgcgtcagttacataaagccttgcgggaaaatcaccatcttcgtcatggaggccgaatgcagtatggcctattcctgaaaggcattggtttaactttggaacaggcattgcagttctggaagcaagaatttatcaaaggaaagatggatccagacaagtttgataaaggttactcttacaacatccgtcatagctttggaaaggaaggcaagaggacagactatacacctttcagttgcttgaagattattctatccaatccaccaagccaaggggattatcatgggtgcccattccgtcacagtgatccagagctgctgaaagcaaaagttgcagtcatacagatctctcctggagggatagccangattttgggattaagcaagggggacacatttaccaggtagccctgtcaaaaatacctttgagatgaaacacaatggtggatgaattgtggctttttcctttgaatccatcctaataccggttcctttggtgaagaacccaaccgtattccttaaagtgggggggtaaagaacctttaaggaaggggagcccttttcccaacccgggaaaacca

SEQ ID NO: 19003 - DNA, 746 bp, Macaca Mulatta
gggctccccctcccggccaagatgtctgacatggaggatgatttcatgtgcgatgatgaggaggactacgacctggaatactctgaagatagtaactccgagccaaatgtggatttggaaaatcagtactataattccaaagcattaaaagaagatgacccaaaagcagcgttaagcagtttccaaaaggttttggaacttgaaggtgaaaaaggagaatggggatttaaagcactgaaacaaatgattaagattaacttcaagttgacaaactttccagaaatgatgaatagatataaacagctattgacctatattcggagtgcagtcacaagaaattattctgaaaaatccattaattctattcttgattatatctctacttctaaacagatggatttactgcaggaattctatgaaacaacactggaagccttgaaagatgctaagaatgatagactgtggtttaagacaaacacaaagcttggaaaattatatttagaacgagaggaatatggaaagcttcaaaaaattttacgccagttacatcagtcctgccagactgatgatggagaagatgatctgaaaaaaagtacacagttagtagaaatatatgctttgggaaattcaaatgtaccccgcgcagaaaaaataacaaaaaactttaaggcactctatggaacaggtgactttcacatcaaagtcgtggccatcccctccatccaactgggattatgggggagtta

SEQ ID NO: 19004 - DNA, 563 bp, Macaca Mulatta
actgagggagtgtgtgtgagacacacacagaaatgggggatgccagtcagacccagagcacctcagagattctgatgacctccccctctctctccacagccccttggatctccctccgtggagatgacaccgggtccctcctgcccaccccgggggaggcccaggatgctgattcgaaggatataaatgtgatcccagccactgcctgaccatctgccattccgactgctaaaagcgaatgtagtcaggcccctttcatgctgtgagacctcctggaacactggcatctctgagcctccagaaggggtcctgggccctgttgtcctccctctggagccccgtcctgtggtctgcctcagtttcccctcctaatacatatggctcttttccacctcgataatataacacgagtttgggcccgaatcagtgtgttctcatcatttttcaggcaggggaggtaagggaataaatcaggggactgaatggccgctgaggctcagatctctcctacaggtaacatgctgccacgggggaacctgccagttttatacatcaggtcatgt

SEQ ID NO: 19005 - DNA, 685 bp, Macaca Mulatta
  misc_feature (1)...(685): n = A,T,C or G
ctaggctctgtggctaggcaggccgagtggaaccctgcctccatgccagcatctggggacaaggaaggctggcatccagtgaggaggctggcgcatgttgggaggctgctggctgtacagacccgcgaggggaggagaggggctgctgcgtaggggtgtggagcagggagctggctcccctgagagctaggcagggcgtccgcagcctaggcctctggcagcagctctttgcccatctctttggacagtggccaccctgcacaatggagccgatgaggcccagggccctcctagctgcttacaatttggaaaagtgtggccgggaannnnnnnnnnnnnnnnnnnnnnnnnnnnnnnnnnnnnnnnnnncannnnnnnnnnnnnnncccagtaggtcaagaccagccagggcaacatgatgagaccctgtctctacaaaaaattgttttaaacaattagcctggcgtggtagcgcacgcctgtgnnnnnnnnnnnnnnnnnnnatcatttatgcttgggagattaaggctgcagtgagtcctgattgtatcactgtnnnnnnnnnnnnnnnnnngagcaagaccgtgttttgaaaagaaaaaccctgggaaaagtatggctataagtcctgcgattcagtcctagcaagaagcaagaattctgagatcctccagagagtcgagca

SEQ ID NO: 19006 - DNA, 1149 bp, Macaca Mulatta
  misc_feature (1)...(1149): n = A,T,C or G
ttcacttggaggaaagagagaaggaaggaagctgaggacttagcagggtnnngtatcactggacaggccatggctccacggtcccggcgacgaaggcacaggaaacctccctcatcagtggctcccatcattatgaccccaaccacaattgtgacccctatgcctctgaccccctcaaaaccgggccctagcattgacacacttggcttcttctccttggatgataatgttcctggcctatcgcagctgatccttcaaaagctgaacatgaaaagctatgaagaatacaagnnnnnnnnnnnnnnnnnnnnnnnnnnnnnnnnnnnnnnnnnnnnnnnnnnnnnnnnnnnnnnnnnnnnnnnnnnnnnnnnnnnnnnnnnnnnnnnnnnnnnnnnnnnnnnnnnnnnnnnnnnnnnnnnnnnnnnnnnnnnnnnnnnnnnnnnnnnnnnnnnnnnnnnnnnnnnnnnnnnnnnnnnnnnnnnnnnnnnnnnnnnnnnnnnnnnnnnnnnnnnnnnnnnnnnnnnnnnnnnnnnnnnnnnnnnnnnnnnnnnnnnnnnnnnnnnnnnnnnnnnnnnnnnnnnnnnnnnnnnnnnnnnnnnnnnnnnnnnnnnnnnnnnnnnnnnnnnnnnnnnnnnnnnnnnnnnnnnnnnnnnnnnnnnnnnnnnnnnnnnnnnnnnnnnnnnnnnnnnnnnnnnnnnnnnnnnnnnnnnnnnnnnnnnnnnnnnnnnnnnnnnnnnnnnnnnnnnnnnnnnnnnnnnnnnnnnnnnnnnnnnnnnnnnnnnnnnnnnnnnnnnntacagtcatcaggagttggtatcctctttgcagattctggtggaactggatacacacatcactgcctatggggctaatcctttcatgtccctcaaacctgaacaggtctattccaaccccaacaagcagccagtatactgcagtgcatattatatcatgtttcttggaagctcctgtcagctggataatagtcaattagaagagaaagtgcttggtaggatttaaatagatcatgactggacatctggaaaatggggaggttgtgatgaaattaccctgctaatttcaaagtcttgcaaactttgaaaaacactatattctaaacctcattgactgtttgggtaaaaattctaa

SEQ ID NO: 19007 - DNA, 408 bp, Macaca Mulatta
tgttctgaagttccatcctccggcagaggtggaggtggagcattgtaggggagcagggaactcccagcagcttctcacacctgacacccagcctccagcaaagctttgcaggcaccctgggctcagtgtgtgggagggaggctgttgcaaggttataggaaataccagtttcaggcttggggtggaagtgtgctgcttggcctgtggttggagaggtctccattgtcattcagtcatcccttgatttcaactgttgctggaccctaactgccagttgaggaaattattttggccaagaagaatatgctgaattcatatagagctgggaaagatctcactaatacaggaagttcttaaggacataggctcagaaatgggactgtagtaacatttgttagcagatactca

SEQ ID NO: 19008 - DNA, 298 bp, Macaca Mulatta
  misc_feature (1)...(298): n = A,T,C or G
gagacatcactggcctataataaatgggttaatttatgtaacaaaattgccttggcttgttaactntattagacattctgatgtntgcattgtgtaaatactgttgtattggaaaagcatgccgagatggaatattgtaattcagtctcctttttagtagtcaaatggtaaaatgcagcataagaatataagtcttcaagttagatatgtgtattagctttttataagtctgctcttgccagtttgactttgagatacattggagccaactgtgaactttagtttttaaattacagtt

SEQ ID NO: 19009 - DNA, 816 bp, Macaca Mulatta
  misc_feature (1)...(816): n = A,T,C or G
gggagtcccaagatggcggccaccatgaagaaggcggctgcagaagatgtgaatgttactttcgaagatcaacaaaagataaacaaatttgcacggaatacaagtagaatcacagagctgaaggaagaaatagaagtaaaaaagaaacaactccaaaacctagaagatgcttgtgatgacatcatgcttgcagacgatgactgcttaatgataccttatcaaattggtgatgtcttcattagccattctcaagaagaaacacaagaaatgttagaagaagcaaagaaaaatttgcaagaagaaattgatgccttagaatccagagtggaatcaattcagcgggtgttagcagatttgaaagttcagttgtatgcaaaatttgggagcaacataaaccttgaagctgatgaaagttaaacattttataatatttttttatttgtttaataaacttgaatattgtttaaaatgataattttccttcttcaaatgacatggaaagcnnnnnnnnnnnnnnnnnnnnnnnatttatttaatggaaacttgcctattttcacatgtctgcttatttattttatatttttaaaagaagacagtattcacctatgtattttgcataacgattatatcaagtctaggaagcttcatgtcatttaaatcagttaagcaatctttcctgtttctatattatttagaatatttgttgttgcaattttcacctaagaaaatttaacagttgttgtcatgttgttttctgtctgatttttattgctgtccaaatgaggggaaaagcacgaccaaaagatgtacaggtcc

SEQ ID NO: 19010 - DNA, 181 bp, Macaca Mulatta
  misc_feature (1)...(181): n = A,T,C or G
tgccattgccccaaatggagccttacagttggcaagtccaggcacagatggagtacagggacttcagacattaaccatgacaaattcaggtagtactcagcaaggtacaactattcttcagtatgcgcagacctctgatggacagcagatacttgtgcccagcaatcaggtggttgtacan

SEQ ID NO: 19011 - DNA, 458 bp, Macaca Mulatta
atactgttccccagtggaggcccctggcacaggggacagccctggccatctttctttggtgtctggctgtttcgtcaactctcatcttctggtggctcagagccataaggtgagttgattacacaatgccttgtacatgatatagaggcatcaagcaaaatttgacagaaattttaaaatatgaaattgtatagcttttccaagatggtaaaacccacgttagtcatcagtaacattctctattatttttaagaactttggaatactgtcattatggctaagggaacaaatgtgataaattgtgtaacctagtctcttctctacatggtgatgcatttcagcaattataaattaatatcaatgaccaaaagtaatttaaaagcatgagatatttgcaatttcattcattgggcacatatcaaagtataattttgattttaaatggtcacccatttatt

SEQ ID NO: 19012 - DNA, 1169 bp, Macaca Mulatta
  misc_feature (1)...(1169): n = A,T,C or G
ggtgctgctcctacgtgggtcgccgcggcgggggcccccaggccatctccatcggcaagaactgtgacaagttcggcatcgtggtccacgagctgggccacgtcgtcggcttctggcacgaacacactcggccagaccgggaccgccacgtttccatcgttcgtgagaacatccagccagnnnnnnnnnnnnnnnnnnnnnnnnnnnnnnnnnnnnnnnnnnnnnnnnnnnnnnnnnnnnnnnnnnnnnnnnnnnnnnnnnnnnnnnnnnnnnnnnnnnnnnnnnnnnnnnnnnnnnnnnnnnnnnnnnnnnnnnnnnnnnnnnnnnnnnnnnnnnnnnnnnnnnnnnnnnnnnnnnnnnnnnnnnnnnnnnnnnnnnnnnnnnnnnnnnnnnnnnnnnnnnnnnnnnnnnnnnnnnnnnnnnnnnnnnnnnnnnnnnnnnnnnnnnnnnnnnnnnnnnnnnnnnnnnnnnnnnnnnnnnnnnnnnnnnnnnnnnnnnnnnnnnnnnnnnnnnnnnnnnnnnnnnnnnnnnnnnnnnnnnnnnnnnnnnnnnnnnnnnnnnnnnnnnnnnnnnnnnnnnnnnnnnnnnnnnnnnnnnnnnnnnnnnnnnnnnnnnnnnnnnnnnnnnnnnnnnnnnnnnnnnnnnnnnnnnnnnnnnnnnnnnnnnnnnnnnnnnnnnnnnnnnnnnnnnnnnnnnnnnnnnnnnnnnnnnnnnnnnnnnnnnnnnnnnnnnnnnnnnnnnnnnnnnnnnnnnnnnnnnnnnnnnnnnnnnnnnnnnnnnnnnnnnnnnnnnnnnnnnnnnnnnnnnnnnnnnnnnnnnnnnnnnnnnnnnnnnnnnnnnnnnnnnnnnnnnnnnnnnnnnnnnnnnnnnnnnnnnnnnnnnnnnnnnnnnnnnnnnnnnnnnnnnnnnnnnnnnnnnnnnnnnnnnnnnnnnnnnnnnnnnnnnnnnnnnnnnnnnnnnnnnnnnnnnnnnnnnnnnnnnnnnnnnnnnnnnnnnnnnnnnnnnnnnnnnnnnnnnnnnnnagccatctgcgggggtgatgtgaaaaaggactatggccacattcaatcacccaactacccagatgattaccggcccagcaaagtctgcatctggcggatccaggtgtctgagggtttccacgtgggcctcacattccagtcctttga

SEQ ID NO: 19013 - DNA, 6125 bp, Macaca Mulatta
  misc_feature (1)...(6125): n = A,T,C or G
ggaggagttgagagaacggagcggacgccatggcgaccaacatcgagcagatttttaggtctttcgtggtcagcaaattccgggaaattcaacaggagctttccagnnnnnnnnnnnnnnnnnnnnnnnnnnnnnnnnnnnnnnnnnnnnnnnnnnnnnnnnnnnnnnnnnnnnnnnnnnnnnnnnnnnnnnnnnnnnnnnnnnnnnnnnnnnnnnnnnnnnnnnnnnnnnnnnnnnnnnnnnnnnnnnnnnnnnnnnnnnnnnnnnnnnnnnnnnnnnnnnnnnnnnnnnnnnnnnnnnnnnnnnnnnnnnnnnnnnnnnnnnnnnnnnnnnnnnnnnnnnnnnnnnnnnnnnnnnnnnnnnnnnnnnnnnnnnnnnnnnnnnnnnnnnnnnnnnnnnnnnnnnnnnnnnnnnnnnnnnnnnnnnnnnnnnnnnnnnnnnnnnnnnnnnnnnnnnnnnnnnnnnnnnnnnnnnnnnnnnnnnnnnnnnnnnnnnnnnnnnnnnnnnnnnnnnnnnnnnnnnnnnnnnnnnnnnnnnnnnnnnnnnnnnnnnnnnnnnnnnnnnnnnnnnnnnnnnnnnnnnnnnnnnnnnnnnnnnnnnnnnnnnnnnnnnnnnnnnnnnnnnnnnnnnnnnnnnnnnnnnnnnnnnnnnnnnnnnnnnnnnnnnnnnnnnnnnnnnnnnnnnnnnnnnnnnnnnnnnnnnnnnnnnnnnnnnnnnnnnnnnnnnnnnnnnnnnnnnnnnnnnnnnnnnnnnnnnnnnnnnnnnnnnnnnnnnnnnnnnnnnnnnnnnnnntggtgttgagagtcatctgagccagtcgtaacaatgtcagtggagtatcagatgaagtctgtgctgaaatctgtggagagcacatctccagagccatccaagatcatgttggtagagcccccagtagcaaaagtgttagagccttcagaaacccttgtggtatcatcagagacacctactgaggtgtaccctgagccaagcacatcaacaacaatggattttccagagtcatctgcaattgaagcgctaagattgccagagcagcctgtagacgtaccatcggagattgcagattcatccatgacaagaccgcaggagttgccggagctgcctaagaccacagcgttggagctgcaggagtcgtcggtggcctcagcgatggagttgccggggccacctgcgacctccatgccggagttgcaggggccccctgtgactccagtgccggagttacctgggccctctgctaccccggtgccagagttgccagggcccctttctaccccagtgcctgagttgccagggccccctgcgacagcagtgcctgagttgccagggccctctgtgacaccagtgccacagttgtcgcaggaattgccagggcttccagcaccatccatggggttggagccaccacaggaggtaccagagccacctgtgatggcacaggagttgccagggctgcctttggtgacagcagcagtagagttgccagagcagcctgcggtaacagtagcaatggagttgaccgaacaacctgtgacgacgacagagttggagcagcctgtggggatgacaacggtggaacatcctgggcatcctgaggtgacaacggcaacagggttgctggggcagcctgaggcaacgatggtgctggagttgccaggacagccagtggcaacaacagcgctggagttgccggggcagcctnnnnnnnnnnnnnnnnnnnnnnnnnnnnnnnnnnnnnnnnnnnnnnnnnnnnnnnnnnnnnnnnnnnnnnnnnnnnnnnnnnnnnnnnnnnnnnnnnnnnnnnnnnnnnnnnnnnnnnnnnnnnnnnnnnnnnnnnnnnnnnnnnnnnnnnnnnnnnnnnnnnnnnnnnnnnnnnnnnnnnnnnnnnnnnnnnnnnnnnnnnnnnnnnnnnnnnnnnnnnnnnnnnnnnnnnnnnnnnnnnnnnnnnnnnnnnnnnnnnnnnnnnnnnnnnnnnnnnnnnnnnnnnnnnnnnnnnnnnnnnnnnnnnnnnnnnnnnnnnnnnnnnnnnnnnnnnnnnnnnnnnnnnnnnnnnnnnnnnnnnnnnnnnnnnnnnnnnnnnnnnnnnnnnnnnnnnnnnnnnnnnnnnnnnnnnnnnnnnnnnnnnnnnnnnnnnnnnnnnnnnnnnnnnnnnnnnnnnnnnnnnnnnccatgggctcccaaatgctagcgtccaaccccatggactcccagatgctagcatccaacaccatggactcccagatgttagcgtctagcaccatggactcccagatgttagcaactagtaccatgaactcccaaaatgttagcaactagctccatggactcccagatgttagcaactagcactatggactcccagatgttagcaaccagttccatggactcccagatgttagcaaccagctccatggactcccagatgttagcaaccagctccatggactcccagatgttagcaaccagctccatggactcccagatgttagcaaccagcaccatggattctcagatgttagcaaccagcaccatggactcccagatgttagcaactagctcaatggattcccagatgttagcatctggcactatggactctcaaatgttagcttctggcaccatggatgctcagatgttagcgtctggtaccatggatgcccagatgttagcatctagtacccaagattctgctatgttgggttcaaaatctcctgatccctataggttagctcaggatccttacaggttagctcaggatccctataggttgggccatgacccctatagattaggtcatgatgcttacaggttaggacaggacccttatagattaggccatgatccctacagactaactcctgatccctataggatgtcacctagaccctataggatagcacccaggtcctatagaatagcacccaggccatataggttagcacctagacccctgatgttagcatctagacgttctatgatgatgtcctatgctgcagaacgttccatgatgtcatcttacgaacgctctatgatgtcttatgagcggtctatgatgtcccctatggctgagcgctctatgatgtcagcctacgagcgctctatgatgtcagcctatgagcgctctatgatgtcccctatggctgagcgctctatgatgtcagcttatgaacgctctatgatgtcagcttagaacgctccannnnnnnnnnnnnnnnnnnnnnnnnnnnnnnnnnnnnnnnnnnnnnnnnnnnnnnnnnnnnnnnnnnnnnnnnnnnnnnnnnnnnnnnnnnnnnnnnnnnnnnnnnnnnnnnnnnnnnnnnnnnnnnnnnnnnnnnnnnnnnnnnnnnnnnnnnnnnnnnnnnnnnnnnnnnnnnnnnnnnnnnnnnnnnnnnnnnnnnnnnnnnnnnnnnnnnnnnnnnnnnnnnnnnnnnnnnnnnnnnnnnnnnnnnnnnnnnnnnnnnnnnnnnnnnnnnnnnnnnnnnnnnnnnnnnnnnnnnnnnnnnnnnnnnnnnnnnnnnnnnnnnnnnnnnnnnnnnnnnnnnnnnnnnnnnnnnnnnnnnnnnnnnnnnnnnnnnnnnnnnnnnnnnnnnnnnnnnnnnnnnnnnnnnnnnnnnnnnnnnnnnnnnnnnnnnnnnnnnnnnnnnnnnnnnnnnnnnnnnnnnnnnnnnnnnnnnnnnnnnnnnnnnnnnnnnnnnnnnnnnnnnnnnnnnnnnnnnnnnnnnnnnnnnnnnnnnnnnnnnnnnnnnnnnnnnnnnnnnnnnnnnnnnnnnnnnnnnnnnnnnnnnnnnnnnnnnnnnnnnnnnnnnnnnnnnnnnnnnnnnnnnnnnnnnnnnnnnnnnnnnnnnnnnnnnnnnnnnnnnnnnnnnnnnnnnnnnnnnnnnnnnnnnnnnnnnnnnnnnnnnnnnnnnnnnnnnnnnnnnnnnnnnnnnnnnnnnnnnnnnnnnnnnnnnnnnnnnnnnnnnnnnnnnnnnnnnnnnnnnnnnnnnnnnnnnnnnnnnnnnnnnnnnnnnnnnnnnnnnnnnnnnnnnnnnnnnnnnnnnnnnnnnnnnnnnnnnnnnnnnnnnnnnnnnnnnnnnnnnnnnnnnnnnnnnnnnnnnnnnnnnnnnnnnnnnnnnnnnnnnnnnnnnnnnnnnnnnnnnnnnnnnnnnnnnnnnnnnnnnnnnnnnnnnnnnnnnnnnnnnnnnnnnnnnnnnnnnnnnnnnnnnnnnnnnnnnnnnnnnnnnnnnnnnnnnnnnnnnnnnnnnnnnnnnnnnnnnnnnnnnnnnnnnnnnnnnnnnnnnnnnnnnnnnnnnnnnnnnnnnnnnnnnnnnnnnnnnnnnnnnnnnnnnnnnnnnnnnnnnnnnnnnnnnnnnnnnnnnnnnnnnnnnnnnnnnnnnnnnnnnnnnnnnnnnnnnnnnnnnnnnnnnnnnnnnnnnnnnnnnnnnnnnnnnnnnnnnnnnnnnnnnnnnnnnnnnnnnnnnnnnnnnnnnnnnnnnnnnnnnnnnnnnnnnnnnnnnnnnnnnnnnnnnnnnnnnnnnnnnnnnnnnnnnnnnnnnnnnnnnnnnnnnnnnnnnnnnnnnnnnnnnnnnnnnnnnnnnnnnnnnnnnnnnnnnnnnnnnnnnnnnnnnnnnnnnnnnnnnnnnnnnnnnnnnnnnnnnnnnnnnnnnnnnnnnnnnnnnnnnnnnnnnnnnnnnnnnnnnnnnnnnnnnnnnnnnnnnnnnnnnnnnnnnnnnnnnnnnnnnnnnnnnnnnnnnnnnnnnnnnnnnnnnnnnnnnnnnnnnnnnnnnnnnnnnnnnnnnnnnnnnnnnnnnnnnnnnnnnnnnnnnnnnnnnnnnnnnnnnnnnnnnnnnnnnnnnnnnnnnnnnnnnnnnnnnnnnnnnnnnnnnnnnnnnnnnnnnnnnnnnnnnnnnnnnnnnnnnnnnnnnnnnnnnnnnnnnnnnnnnnnnnnnnnnnnnnnnnnnnnnnnnnnnnnnnnnnnnnnnnnnnnnnnnnnnnnnnnnnnnnnnnnnnnnnnnnnnnnnnnnnnnnnnnnnnnnnnnnnnnnnnnnnnnnnnnnnnnnnnnnnnnnnnnnnnnnnnnnnnnnnnnnnnnnnnnnnnnnnnnnnnnnnnnnnnnnnnnnnnnnnnnnnnnnnnnnnnnnnnnnnnnnnnnnnnnnnnnnnnnnnnnnnnnnnnnnnnnnnnnnnnnnnnnnnnnnnnnnnnnnnnnnnnnnnnnnnnnnnnnnnnnnnnnnnnnnnnnnnnnnnnnnnnnnnnnnnnnnnnnnnnnnnnnnnnnnnnnnnnnnnnnnnnnnnnnnnnnnnnnnnnnnnnnnnnnnnnnnnnnnnnnnnnnnnnnnnnnnnnnnnnnnnnnnnnnnnnnnnnnnnnnnnnnnnnnnnnnnnnnnnnnnnnnnnnnnnnnnnnnnnnnnnnnnnnnnnnnnnnnnnnnnnnnnnnnnnnnnnnnnnnnnnnnnnnnnnnnnnnnnnnnnnnnnnnnnnnnnnnnnnnnnnnnnnnnnnnnnnnnnnnnnnnnnnnnnnnnnnnnnnnnnnnnnnnnnnnnnnnnnnnnnnnnnnnnnnnnnnnnnnnnnnnnnnnnnnnnnnnnnnnnnnnnnnnnnnnnnnnnnnnnnnnnnnnnnnnnnnnnnnnnnnnnnnnnnnnnnnnnnnnnnnnnnnnnnnnnnnnnnnnnnnnnnnnnnnnnnnnnnnnnnnnnnnnnnnnnnnnnnnnnnnnnaagacagttagagctcgaagtcgaaccccaagtcgccggagtcggagtcatactccaagtcgtcgacgaaggtctagatctgtggtaggagaaggagctttagcattttcccannnnnnnnnnnnnnnnnnnnnnnnnnnnnnnnnnnnnnnnnnnnnnnnnnnnnnnnnnnnnnnnnnnnnnnnnnnnnnnnnnnnnnnnnnnngagccgcacccccagtcgtcggagccgcaccccaagccgccggagaaggtcgaggtctgtggtaagacgacgaagcttcagtatctcaccagtcagattaaggcgatcaagaacacccttgagaagaaggtttagcagatctcccatccgtcgtaaaagatccaggtcttctgaacgaggcagatcacccaaacgtctgacagatttgg

SEQ ID NO: 19014 - DNA, 447 bp, Macaca Mulatta
aggtgatcgaggcctcaagggggatcatggagtgggccagcccgggctgcctggggccccagggcaggggggtgcccctggtcccccgggcctccctggtgcagctggcttaggcaaacccggtttggatgggcttcctggggccccaggagacaagggtgagtctgggcctcctggagttccaggccccaggggggagccaggcgctgtgggcccaaaaggaccccctggagtagatggtgtgggggtcccaggggcagcagggttgccagggccacagggcccatcaggggccaaaggggaaccagggacccggggcccccctgggctgataggccccactggctatgggatgccaggactgccaggccccaagggggataggggcccagctggggtcccagggctcttgggggacagggatgagccaggggaggatggggagcc

SEQ ID NO: 19015 - DNA, 535 bp, Macaca Mulatta
ccatgatgctgcagccgggcccgcagctctacgacgtgatggacgctgtgccagcacggcgctggaaggagttcgtgcgcaccctggggctgcgcgaggcggagatcgaagccgtggaggtggagatcggccgcttccgagaccagcagtacgagatgctcaagcgctggcgccagcagcagcccgcgggcctgggcgccgtctacgcggccctggagcgcatggggctggacggctgcgcggaggacttgcgcagccgcctgcagcgcggcccgtgacacggcgcccactggccacctaggcctctggtggcccttgcagaagccctaagtacagttacttatgcgtgtagacattttatgtcacttattaagccgctggcacggtcctgcgtagccgcaccagccggccccacccctgctcgcccctatcactccagccaaagcgaagaagcacgaaggaatgtcgggagggggtcaagacatttctcagtttctcggccggagtttggctgagatcgtggtattaaatctgt

SEQ ID NO: 19016 - DNA, 932 bp, Macaca Mulatta
aactatggaggaaatcacagctgctgcagtaaagtctggggcccatagtttcatctctggactccctcggggctatgacacagaggtaggcgaggctggaagccagctgtccgggggtcagcgacaggcagtggcgttggcccgagcattgatccggaagccatgtgtacttatcctggatgatgccaccagtgccctggatgcaaacagccagttacgggtggagcagctcctgtatgaaagtcctgagcggtattctcgctcagtgcttctcatcacccagaacctcagcctggtggagcaggctgaccacatcctctttctggaaggaggcactatccgggaggggggaacccaccagcagctcatggagaaaaaggggtgctactgggccatggtacaggctcctgcagatgctccagaatgaaagccttctcagacctgcacactccatctccctcccttttcttctctctgtggtggagaaccacagctgcagagtaggcagctgcctctagaaggagttacttgaaatttactttgagtttgttacctcccttccaagctcctcatgataatgcagacttcctggaggacaaacacagggtttgcagctcagagccgtggcctctccaaggtggcagatggcgcgggcgcggccagagaaagtggaggggtgaacggagggactgggcgcgcctcacaactcaccacctcgcccgcttcggtccttcctggctcgcctggctgcgaagcggcacccctgtttccagcagatgcccaagcctggaagtacctcttactgtaacccatcgccaagggggcttctgaaggcgcccgtcgctttcttgctttcttcggacaacccttgacccatcgttctcccgaacccccataaagggacagctcgagagcggtccccaatatgatag

SEQ ID NO: 19017 - DNA, 574 bp, Macaca Mulatta
accacttgaaccagtgaacttgtaaaacaaagtgcctcccgagggccacgcccagcccactcactgtccaaatctggtcgctagagatccagggtgtgcccttacctctccgtctggacgtttcagtatgtcagtgtcttagctgttctcactgaccttcatcataagaggtcataataaaccagtgaagtgctaaaaaaacatgacaggcgattgcacagcctctgtgttgctgcttttgcaatttacgcagcttgttttagagcaattctccttcaaatcagaataataccaggagcctttgctaatcagctgtatttaaggtttctgaattaaatctgcttaaaagatgaataaacctccattgcttatctagacatgtgctttacctcaatgcacaaaattgtctcacacagatggtctcctgtgtcatctgatgaaatgcggtctaacagctgcgacttgggtgggatagagctcaggcgctgatagaagaggggcttggcacggttagcggggaccaagattacatcaaataatgccctgtgaataagcttttttaaaaatcacttcc

SEQ ID NO: 19018 - DNA, 429 bp, Macaca Mulatta
ctttgcctacccacagctgaaggaggactggcagtttgtggccatggtagtggaccgcctcttcctgtggactttcatcatcttcaccagcgttggaaccctagtcattttcctggacgccacgtaccacttgccccctccagacccctttccttgaagactggagggtcgagacccaggccctctaccagttgaagtgagagtttggtgatactgtcaagccatatccttctctgcctcttaactccttcactaggaatccgggcctcttatttcgtttctggggactgcattggactgagggctgggtaggcaggtgtcttggacccacctgaaatgcactatcatctgatttcctctttgggatcttgaagaagctcttttgggtatcaacacctaggttgccagtgaaatagaacaaagaacagg

SEQ ID NO: 19019 - DNA, 284 bp, Macaca Mulatta
ggcccctgtctagcagccccctggtgcgtgtcaaggaggagccccccagcccgcctcagagcccccgggtagaggaggcgagtcccgggcgcccatcttccgtggacaccctcttgtccccgaccgccctcattgactccatcctgcgggagagtgaacctacccccgcctccgccacagccctcacggatgccaggggccacacggacaccgagggccggcctccctcacccccgcccacctccacccctgaaaagtgcctcagcgtagcctgcctggacaag

SEQ ID NO: 19020 - DNA, 171 bp, Macaca Mulatta
  misc_feature (1)...(171): n = A,T,C or G
nagatccaaaaggtaattctggcacttggagactatatgggagcaacttgtcatgcctgtattggtggaacaaatgttcgaaatgaaatgcaaaaactgcaggccgaagcaccacatattgttgttggtacacctgggagagtttttgatatgttaaacagaagatatctt

SEQ ID NO: 19021 - DNA, 621 bp, Macaca Mulatta
  misc_feature (1)...(621): n = A,T,C or G
ggggtctctcttctcagacactgttggtagtaatttctgtgtgnnnnnnnnnnnnnnnnnnnnnnnnnngacttatagtggttatccaagaggttctaacattcacatgcaatttggtgtggccatttagccattaatgagttaatggcacagaacatgttgatatttgaagtgttttctccccttttcccataacgtaaatacataatgtgtgttccaggatttgttcaggtttttcccccctcctaatcttgtacataacttgtattatgtgtaagttaaacattttattttgaacttggaaagttcccagtgatttcattcagcagggtattttctgccttgttggtaagtgacaaaaaatatgggaagtatttgctgccagttggtagatggtgcccttatggtagaatgaggaaaatgtcagcaaaagcatgttttattatctttacttttttgggggggggttgaagggggtagctagccagaacatcattgtaatcttaaaacataagatgctttttttagatgatcaactaaaatagctggaagacagtactttaaaaacagatagttgtaagattataaaatgcaaatgttacttatgttttctattttttc

SEQ ID NO: 19022 - DNA, 292 bp, Macaca Mulatta
ggaagggaatctttatctttctggttggcttgaccagtcacgttgggagaaaagagagagtgccaggagaccccgagggcagccagttcctactttggactgagaggagggagccccaggctggagcagcatgaggcccagcaagaagggcttggggtctgaggaagcagacatttcatgctgtgaggccttgcaccaggtgggggccacagcaccagcagcatctttactgggcagggcccagccctccactgcagaagcatctggaagcaccaccttgtctccacagagc

SEQ ID NO: 19023 - DNA, 1514 bp, Macaca Mulatta
  misc_feature (1)...(1514): n = A,T,C or G
tgatgacggcctgcgcgtgcggctcggcctgaaggggctagcggaggacttgcagggctggtgaggggcggggcaggcggcgcggtgggggcgggccgagcccggaggccggatgagcggacacgacccgacgcgcggagccatgcannnnnnnnnnnnnnnnnnnnnnnnnnnnnnnnnnnnnnnnnnnnnnnnnnnnnnnnnnnnnnnnnnnnnnnnnnnnnnnnnnnnnnnnnnnnnnnnnnnnnnnnnnnnnnnnnnnnnnnnnnnnnnnnnnnnnnnnnnnnnnnnnnnnnnnnnnnnnnnnnnnnnnnnnnnnnnnnnnnnnnnnnnnnnnnnnnnnnnnnnnnnnnnnnnnnnnnnnnnnnnnnnnnnnnnnnnnnnnnnnnnnnnnnnnnnnnnnnnnnnnnnnnnnnnnnnnnnnnnnnnnnnnnnnnnnnnnnnnnnnnnnnnnnnnnnnnnnnnnnnnnnnnnnnnnnnnnnnnnnnnnnnnnnnnnnnnnnnnnnnnnnnnnnnnnnnnnnnnnnnnnnnnnnnnnnnnnnnnnnnnnnnnnnnnnnnnnnnnnnnnnnnnnnnnnnnnnnnnnnnnnnnnnnnnnnnnnnnnnnnnnnnnnnnnnnnnnnnnnnnnnnnnnnnnnnnnnnnnnnnnnnnnnnnnnnnnnnnnnnnnnnnnnnnnnnnnnnnnnnnnnnnnnnnnnnnnnnnnnnnnnnnnnnnnnnnnnnnnnnnnnnnnnnnnnnnnnnnnnnnnnnnnnnnnnnnnnnnnnnnnnnnnnnnnnnnnnnnnnnnnnnnnnnnnnnnnnnnnnnnnnnnnnnnnnnnnnnnnnnnnnnnnnnnnnnnnnnnnnnnnnnnnnnnnnnnnnnnnnnnnnnnnnnnnnnnnnnnnnnnnnnnnnnnnnnnnnnnnnnnnnnnnnnnnnnnnnnnnnnnnnnnnnnnnnnnnnnnnnnnnnnnnnnnncaggccttgatagattcctgtgcaggccctggctccctggccatggagcctcatgtgcgcatgatcacactgtatgacaacgaagaggnnnnnnnnnnnnnnnnnnnnnnnnnnnnnnnnnnnnnnnnnnnnnnnnnnnnnnnnnnnnnnnnnnnnnnnnnnnnnnnnnnnnnnnnnnnnnnnnnnnnnnnnnnnnnnnnnnnnnnnnnnnnnnnnnnnnnnnnnnnnnnnnnnnnnnnnnnnnnnnnnnnnnnnnnnnnnnnnnnnnnnnnnnnnnnnnnnnnnnnnnnnnnnnnnnnnnnnnnnnnnnnnnnnnnnnnnnnnnnnnnnnnnnnnnnnnnnnnnnnnnnnnnnnnnnnnnnnnnnnnnnnnnnnnnnnnnnnnnnnggatctcatggtgcggaatgactccccttgtggaaccaccattggacctatcttggcttctcggctggggctgcgggtgctagatttaggcagcccccaactggccatgcactctatccgggagatggcctgtactacaggagtcctccagaccctcaccctcttcaagg

SEQ ID NO: 19024 - DNA, 839 bp, Macaca Mulatta
  misc_feature (1)...(839): n = A,T,C or G
gggatcactttgcaaataggggctaagatatcaaattacctatattggcattgctgaattacaaactctatatctgtaatataaagtgtttgagtttttaattgggctgttatgatgagtagtttattttgaaaaagctctatgagctctaagtaactgcatggttttttgtttcatgtaatataggacacccttcacattctcaaggaatatattccaaaacatttttgtgaatatctaagtttgtgaaactactacagcatgatacagtaaggtgtaattacagaatttacaaaatgtaaatggcctctagagagttttatggaatacctggttaataacgtaggcatttgcaaaaccacactgagttacaactgccagccctcctcattgccttacataccagccctcccacttctgaagttcaaattagtgcttcggaaatgtagaatttattatttgtcatnnnnnnnnnnnnnnnnnnncatagattgagaacagttgaactcttaaatcctcagatgccaggggtctgctctagcatcagtaagtatttagcagaaactaactccgtaatgaatggaattcaattccacacatggtttgttcaagcacacttaataagtagcctattttttaaacgtctttttaaaatgtaaatatttggatgaagtttttctttgttttgatatattcatttgctacaccaactatgttttcgagaattacattcttttgaacaacttggtttcagaatatgtaaaatgactttaaggattttgtgtatcaaacctgtccccagatgtgtgagaataatatgttcataaagcatggatctc

SEQ ID NO: 19025 - DNA, 551 bp, Macaca Mulatta
  misc_feature (1)...(551): n = A,T,C or G
gatgatcacagccgtgttaaactgcagaatgctgagaatgattatattaatgccagtttagttgacatagaagaggcacaaaggagttacatcttaacacaggcaagnnnnnnnnnnnnnnnnnnnnnnnnnnnnnnnnnnnnnnnnnnnnnnnnnnnnnnnnnnnnnnnnnnnnnnnnnnnnnnnnnnnnnnnnnnnnnnnnnnnnnnnnnnnnnnnnnnnnnnnnnnnnnnnnnnnnnnnnnnnnnnnnnnnnnnnnnnnnnnnnnnnnnnnnnnnnnnnnnnnnnnnnnnnnnnnnnnnnnnnnnnnnnnnnnnnnnnnnnnnnnnnnnnnnnnnnnnagtggtgaaaccagaacaatatctcactttcattatactacctggccagattttggagtccctgaatcaccagcttcatttctcaatttcttgtttaaagtgagagaatctggctccttgaaccctgaccatgggcctgcggtgatccactgtagtgcaggcattgggcgctctggcaccttctctctggtagacacttgtcttgttttg

SEQ ID NO: 19026 - DNA, 174 bp, Macaca Mulatta
agaaatgtgaggcagctttcgccacgaaggatcggctgcgggcgcacacagttcgacacgaggagaaggtgccatgtcacgtgtgtggcaagatgctgagctcggcttatatttcggaccacatgaaggtgcacagccagggccctcaccatgtctgtgagctctgcaacaaag

SEQ ID NO: 19027 - DNA, 1008 bp, Macaca Mulatta
  misc_feature (1)...(1008): n = A,T,C or G
agcccatgctgcatggattcctgnaggctataactcgccntagtgacagggtgcccagaggccccctgacccagctcctgctccactgggggccccggggctccccaacggcctcctttcaggagatgaagacttctcctccattgcggacatggacttctcagccctgctgagtcagatcagctcctaaggggtgatgcctaccctccccagagcactggcttgcaggggattgaagccctcccagagcacttacggattctggtggggtgtgttccagctgcccccaactttggtgatgtcttccttggagggggaaggcatattttattcttttattggcagtacctgtatctatctctctttttggaggtgcttaagcagaagcattaacttctctggaaagggggaagctggggaaactcaaactcttcccctgtcctgatggtcagctcccttctctgtatggaactatggggtcccccatccccatcctgcagcttctagtactctcctagagagagaagcaggctagaggtaaggcctttgagcccacacagccttattatcaagtgtcttccatcatggattcattacaccttgaaataacgccccaggtaccagcccctctatggcattggcattgtcgctgtgcctaacaccagcatttgaggggctggccttcgtgccccacagaggtctctgccggctctttccttgctcagctgtggctgaaggaaaccagtggaacaacgctggctctctcaaggatccagagggggtttggtctgggacttccctgctctccctcttctcaagtgccttaattgagggcaagttgttaaagagagtcggggagagcaggctggcagctctccagtcaggaggcatagttttcaccgaagaatcaagcacttggactcttgctctttctactcctgaattaataaatctgttgccnnnnnnnnnnnnnnnnnnnnnnnnnnnnnnnnnnnnnnnccgcctcgc

SEQ ID NO: 19028 - DNA, 1927 bp, Macaca Mulatta
  misc_feature (1)...(1927): n = A,T,C or G
gtatgtccagagcctcctggacataatggagttcctggacaaggaccccgaggaccatcgtaccctgagccagtngttcactgatgccctggtcaccatccggaaccggcacaacgacgtggtgcccaccatggcacaaggcgtgcttgagtacaaggacacctatggtgatgaccccgtctccaaccagaacatccagtacttcctggaccgcttcnnnnnnnnnnnnnnnnnnnnnnnnnnnnnnnnnnnnnnnnnnnnnnnnnnnnnnnnnnnnnnnnnnnnnnnnnnnnnnnnnnnnnnnnnnnnnnnnnnnnnnnnnnnnnnnnnnnnnnnnnnnnnnnnnnnnnnnnnnnnnnnnnnnnnnnnnnnnnnnnnnnnnnnnnnnnnnnnnnnnnnnnnnnnnnnnnnnnnnnnnnnnnnnnnnnnnnnnnnnnnnnnnnnnnnnnnnnnnnnnnnnnnnnnnnnnnnnnnnnnnnnnnnnnnnnnnnnnnnnnnnnnnnnnnnnnnnnnnnnnnnnnnnnnnnnnnnnnnnnnnnnnnnnnnnnnnnnnnnnnnnnnnnnnnnnnnnnnnnnnnnnnnnnnnnnnnnnnnnnnnnnnnnnnnnnnnnnnnnnnnnnnnnnnnnnnnnnnnnnnnnnnnnnnnnnnnnnnnnnnnnnnnnnnnnnnnnnnnnnnnnnnnnnnnnnnnnnnnnnnnnnnnnnnnnnnnnnnnnnnnnnnnnnnnnnnnnnnnnnnnnnnnnnnnnnnnnnnnnnnnnnnnnnnnnnnnnnnnnnnnnnnnnnnnnnnnnnnnnnnnnnnnnnnnnnnnnnnnnnnnnnnnnnnnnnnnnnnnnnnnnnnnnnnnnnnnnnnnnnnnnnnnnnnnnnnnnnnnnnnnnnnnnnnnnnnnnnnnnnnnnnnnnnnnnnnnnnnnnnnnnnnnnnnnnnnnnnnnnnnnnnnnnnnnnnnnnnnnnnnnnnnnnnnnnnnnnnnnnnnnnnnnnnnnnnnnnnnnnnnnnnnnnnnnnnnnnnnnnnnnnnnnnnnnnnnnnnnnnnnnnnnnnnnnnnnnnnnnnnnnnnnnnnnnnnnnnnnnnnnnnnnnnnnnnnnnnnnnnnnnnnnnnnnnnnnnnnnnnnnnnnnnnnnnnnnnnnnnnnnnnnnnnnnnnnnnnnnnnnnnnnnnnnnnnnnnnnnnnnnnnnnnnnnnnnnnnnnnnnnnnnnnnnnnnnnnnnnnnnnnnnnnnnnnnnnnnnnnnnnnnnnnnnnnnnnnnnnnnnnnnnnnnnnnnnnnnnnnnnnnnnnnnnnnnnnnnnnnnnnnnnnnnnnnnnnnnnnnnnnnnnnnnnnnnnnnnnnnnnnnnnnnnnnnnnnnnnnnnnnnnnnnnnnnnnnnnnnnnnnnnnnnnnnnnnnnnnnnnnnnnnnnnnnnnnnnnnnnnnnnnnnnnnnnnnnnnnnnnnnnnnnnnnnnnnnnnnnnnnnnnnnnnnnnnnnnnnnnnnnnnnnnnnnnnnnnnnnnnnnnnnnnnnnnnnnnnnnnnnnnnnnnnnnnnnnnnnnnnnnnnnnnnnnnnnnnnnnnnnnnnnnnnnnnnnnnnnnnnnnnnnnnnnnnnnnnnnnnnnnnnnnnnnnnnnnnnnnnnnnnnnnnnnnnnnnnnnnnnnnnnnnnnnnnnnnnnnnnnnnnnnnnnnnnnnnnnnnnnnnnnnnnnnnnnnnnnnnnnnnnnnnnnnnnnnnnnnnnnnnnnnnnnnnnnnnnnnnnnnnnnnnnnnnnnnnnnnnnnnnnnnnnnnnnnnnnnnnnnnnnnnnnnnnnnnnnnnnnnnnnnnnnnnnnnnnnnnnnnnnnnnnnnnacccttcccctaagcacacgggggttaaagctgtgtgtccctcccagtggctgtggcagtgacagtgacacccacacccacagtaaagaggagactgaatgag

SEQ ID NO: 19029 - DNA, 1229 bp, Macaca Mulatta
  misc_feature (1)...(1229): n = A,T,C or G
ctcagcaggcgccggcgggtactgagcttcaggncagccagctccctcccggtctcgccttccctcgcggtcagcatgaaagccttcagtcccgtgaggtccgttaggaaaaacagtctgtcggaccacagcctgggcatctcccggagcaaaaccccggtggacgacccgatgagcctgctgtacaacatgaacgactgctactccaagctcaaggaactggtgcccagcatcccccagaacaagaaggtgagcaagatggaaatcctgcagcacgtcatcgactacatcttggacctgcagatcgccctggactcgcatcccactattgtcagcctccatcaccagagacccgggcagaaccaggcgtccaggacgccgctgaccaccctcaacacggacatcagcatcctgtccttgcaggcttctgaattcccttctgagttaatgtcaaatgacagcaaagcactgtgtggctgagtaagcggtgttcatgacnnnnnnnnnnnnnnnnncnnnnnnnnnnnnnnnnnnnnnnntccacagaatcttttaagtgctgaacttttcaaccatttcacaaggaggacaagttgaacggacctttttnnnnnnnnnnnnnnnntggaaggaaaactaagaatgatcatcttcccagggtgttctctcacctggactgagatattcgttatttatgaaaaagacttttaaatgccctttctgcagttggaaggttttctttatatactattcccacccatggggagcgaaaacgtttaaatcacagggaattgcccaatctaagcagacttttgccttttccaccgtgggcgtgaatacccaagattcatattcagccttaaagaaccttggggcgacaacttttgaccacccacgaagcggggaatcacatcagctatctgaggaacctgacctaaaaattcgtttgggacagtaatctacacgggagattatccctaacaggggacgcatcccggtaccacggggaaatattngacatcagaactggaaggaccgacgtctccacacgatagtagacatcagacacagcaaatatccgagaaaaagggaaaaacaaacaacaagagaagtgagaaagaaaaagacagaaaaagaataaagatgttgagaaatattgaaaaggatttgagaattaggagatgataagatgttgtgtgtatataggaaacatagattaaattatatta

SEQ ID NO: 19030 - DNA, 438 bp, Macaca Mulatta
  misc_feature (1)...(438): n = A,T,C or G
tgcgaaggagcgggacaccatgaaggaggacggcggcgcggagttctcggctcgctccaggaagaggaaggcaaacgtggccgttnnnnnnnnnnnnnnnnnnnnnnnnnnnnnnnnnnnnnnnnnnnnnnnnnnnnnnnnnnnnnnnnnnnnnnnnnnnnnnnnnnnnnnnnnnnnnnnnnnnnnnnnnnnnnnnnnnnnnnnnnnnnnnnnnnnnnnnnnnnnnnnnnnnnnnnnnnnnnnnnnnnnnnnnnnnnnnnnnnnnnnnnnnnnnnnnnnnnnnnnnnnnnnnnnnnnnnnnnnnnnnnnnnnnnnnnnnnnnnnnnaaatcatgttaaacaaggaaaagacatacttaagggatcagcactttcttgagcaacaccctcttctgcagccaaaaatgcgagcaatttttctggattggttaatggaggt

SEQ ID NO: 19031 - DNA, 374 bp, Macaca Mulatta
ggattcagggacaatccccctcaattcaacgtgtactttaaatattgatattttagatgaaaatgacaataccccttctttccctaaatcaacactctttgttgatgttttggaaaacatgagaattggtgaactcgtgtcctctgttactgcaactgattccgattcaggtgacaatgcctgttttatattacagtattactgggactaacaaccacggaacttttagcattagcccaaacactgggagtatttttcttgccaaaaaattggactttgaaacacagtctttgtataaattaaatataacagcaaaagaccaaggaagacctcctcgttcatctacaatgtcagtggttattcacgtgagggac

SEQ ID NO: 19032 - DNA, 2592 bp, Macaca Mulatta
  misc_feature (1)...(2592): n = A,T,C or G
cggagtgtgagaaactcatggcattctacgagcgcctggaggagctggatgctgacaaggcagagatgagggcctcgcggatcttacatggactgggattcacgcctgccatgcagcgcaagaagctaaaagacttcagtgggggctggaggatgagggttgcccttgccagnnnnnnnnnnnnnnnnnnnnnnnnnnnnnnnnnnnnnnnnnnnnnnnnnnnnnnnnnnnnnnnnnnnnnnnnnnnnnnnnnnnnnnnnnnnnnnnnttttaagcgcatcttggtcctcgtctcccattccacaggattttctgaatggtgtctgtaccaacatcattcacaagcgcaacaagaaactgaagtattacacgnggtaattatgatcagtatgtgaagacgcggctagagctggaggagaaccagatgaagaggtttcactgggagcaagatcagattgcacacatgaagnnnnnnnnnnnnnnnnnnnnnnnnnnnnnnnnnnnnnnnnnnnnnnnnnnnnnnnnnnnnnnnnnnnnnnnnnnnnnnnnnnnnnnnnnnnnnnnnnnnnnnnnnnnnnnnnnnnnnnnnnnnnnnnnnnnnnnnnnnnnnnnnnnnnnnnnnnnnnnnnnnnnnnnnnnnnnnnnnnnnnnnnnnnnnnnnnnnnnnnnnnnnnnnnnnnnnnnnnnnnnnnnnnnnnnngaatttggaattgaccttgacacacgagtggctctggtagggcccaatggagcagggaagtcaactcttctgaagctgctaactggagannnnnnnnnnnnnnnnnnnnnnnnnnnnnnnnnnnnnnnnnnnnnnnnnnnnnnnnnnnnnnagcatttacaagagcagctggacttagatctctcgcctttggagtacatgatgaagtgctacccagagatcaaggagaaggaagaaatgaggaagatcattgggcgatacggtcttactgggaaacaacaggnnnnnnnnnnnnnnnnnnnnnnnnnnnnnnnnnnnnnnnnnnnnnnnnnnnnnnnnnnnnnnnnnnnnnnnnnnnnnnnnnnnnnnnnnnnnnnnnnnnnnnnnnnnnnnnnnnnnnnnnnnnnnnnnnnnnnnnnnnnnnnnnnnnnnnnnnnnnnnnnnnnnnnnnnnnnnnnnnnnnnnnnnnnnnnnnnnnnnnnnnnnnnnnnnnnnnnnnnnnnnnnnnnnnnnnnnnnnnnnnnnnnnnnnnnnnnnnnnnnnnnnnnnnncttccagttacgtctgtccatgtctggactcggctggccgttccctccagccccttgctggttacttactctgagtgtgatgcagtcagaggcaccagcgggttagcgcaagggcccaagccctggatttggcccgcggaggagcttaggatcctcgttttctgggttttggtgatgttggaggagtacccccagcccaccgccccgattcctttttgcttctggtttggagctctggaccaggaccttcgtcctggtcagtttttaaataattatttaacagtgtaacttttagacctgcgtgacatctacaaagcgcccaataaagaaagaggaagccacggtccctaccttccttctcgggtctctggggccttctcctccctgcggtgccaacatgcactgccctcagcaggagctggatccagcgtcagtgtgtggatgggaaccgaagactagtccgtaggagctcgaagaacgttctccctttactgcggatttgaaattgcaccttttctcaggcctgtgattcacagactttaacgtgaatcagaatcacctggagcactcatgagatcagattgccagatctcgcctcagggtttctggttcagtaggttttgggggagaccaagaacgtgaacatttctaacaagtttccaggtgatgctgttgttgctggtccaggggctgtatttggaaaaccactgtccaggagcgtggttttccgattgtgatctgaggttctgccccaactgcatagaagttgggctgcttgttaaaaacgcaggccaggtgcggtggctcacacctgtaattccagcgcttcgggaggctgaggcaggtggatcannnnnnnnnnnnnnnnnnnnnnnnnnnnnnnnnnnnnnnnnnnnnnnnnnnnnnnnnnnnnnnnnnnnnnnnnnnnnnnnnnnnnnnnnnnnnnnnnnnnnnnnnnnnnnnnnnnnnnnnnnnnnnnnnnnnnnnnnnnnnnnnnnnnnnnnnnnnnnnnnnnnnnnnnnnnnnnnnnnnnnnnnnnnnnnnnnnnnnnnnnnnnnnnnnnnnnnnnnnnnnnnnnnnnnnnnnnnnnnnnnnnnnnnnnnnnnnnnnnnnnnnnnnnnnnnnnnnnnnnnagaagttcaagaccagcctgggcaaagtagggagaccccatctctacaaataataataaaacgaaccgggcatggtaccatgtgcctgtggtcccagctgctctggaaagaggaggctcacttgagcccaggaggttgaggctgcagtgagcagagaacgtgccactacactccagcctgaggacagaccgagacactgtctcaaaaa

SEQ ID NO: 19033 - DNA, 106 bp, Macaca Mulatta
  misc_feature (1)...(106): n = A,T,C or G
nagccgccgggatcctcctgaggtacctgcaggagcagaaccggccctacagcgcccaggatgtgttcgggaacctgcagcgggaacacggactgggcaaggcggt

SEQ ID NO: 19034 - DNA, 730 bp, Macaca Mulatta
cagactctgtgcacatcgaagatgctgaggctgtggagcagctgcgagaagctctgcatgaggccctgctggagtacgaagccggccgggctggccccggagggggtgctgagcggcggagggcgggcaggctgctgctcacgctaccgctcctccgccagacagcgggcaaagtgctggcccatttctatggggtgaagctggaaggcaaggtgcccatgcacaagctcttcttggaaatgctcgaggccatgatggactgaggcaaggggtggtcctggtgggggttctggcaggacctgcctagcatggggtcagccccaagggctggggcggagctggggtctgggcagtgccacagcctgctggcaaggccagggcaatgccatcagcccctgggaacaggccccacgccctcccctcccccctcctagggggtgtcagaagctgggaacgtgtgtccagactctgggcacagtgctgccccttgcaagccataacgtgcccccagagtgtagggggccttgcggaagccatagggggctgcaggggatgtgtgggaggcagaagcctatctcagggagggaaggggatggaggccacagtctcccagtgggtgatgcttttgctgctgcttaatcctaccccctcttcagagcagagtgggacttggagagcaaaggcccataccccttcgctcctcctctcatcatttgcattgggcattagt

SEQ ID NO: 19035 - DNA, 800 bp, Macaca Mulatta
gggagtgggcaggtcctgggggaccagacggtctcggacaatgagctccaggaaatgtctgatcagggaagtaagtacctcaataaggaaattcaaaatgctgtcaacggggtgaaagagataaagactctcatagaaaagacaaatgaagagcgcaagacactgctcagcaacctagaggaagccaagaagaagaaagaggatgcccttttctccctatgagcccctgaacttccacgccatgttccagcccttccttgagatgatacatgaggctcagcaggccatggacatccacttccacagcccggccttccagcacccgcccacggaattcatacgagaaggtgacgacgaccggactgtgtgccgggagatccgccacaactccacgggctgcctgcggatgaaggaccagtgtgacaagtgccgggagatcttgtctgtggactgttcggccaacaaccccgcccaggctcagctgcggcgggagctcagtgagtccctccagggcgctgagaggttgaccaggaaatacaacgagctgctgcagtcctacaagtggaagatgctcaacacctcctccttgctggagcagctggaacaagcagtttaactgggtgtccccagctggcaaaacctcacgcaatgcgaaaaaccaagtactattctgcggggtccaccccggttggccttcccaacactttcgggaatcaagggtgttccctttccgggggttcacctgaaaggtgggttccctggaaacccccttttttaacttcctgaatatccccattcat

SEQ ID NO: 19036 - DNA, 472 bp, Macaca Mulatta
  misc_feature (1)...(472): n = A,T,C or G
ttggtagccaacctggccccgttcctagccgcggcccaggttaccagtcccagggacgccaagcctaattccgaggtattcctgggcccaaatcccgcgcaggagcagtttcctggcttcgcgttggcctcatcattccgaagnccagcactgntaacatgctgttcaggaacatgttaggataaggcgatgaggcttggaggcctttgggtcttcacttggtttcacgtggggagctctgggcgctaggatccctttcggagatctgaacactgtttctttgaagcaccgaaactcttcctgctgtggaccctgagtttatcaacccattgcccttggctgacagaaaagccctcagagcgatcttggaagcaccccctggccgcagtgctccctgttccacaggagccaagccagtgctccgccctcacaccgaagggtagactgcatcacctgccacgtttcctctaag

SEQ ID NO: 19037 - DNA, 788 bp, Macaca Mulatta
  misc_feature (1)...(788): n = A,T,C or G
gggatgaagtttaatcctgtaaaaactacgaagaagttcccctagcatttctaggccaaaccttgtaattgacttcagctatgtacgtggacaagcttagactgaaatgctaggtatatgtgttggcttcagtgtatgacccttcattgttaagctatgaaagtaaaactgtatttaactggcaatnnnnnnnnnnnnnnnnnnnnngagaagtgttggtctgtatagttctttgtattaagtgggattcattgtaatgcctttgcatttattctattgcctcaactgttacttgaagatggcgtaatatataatttatcctgtggtatcagtgataaaaatgatacctttctgtaggaggggtttatcataatatgctgcttcttgaaggcttgcacttccagaattgtgtttccttctgctgtggcattnnnnnnnnnnnnnnnnnnnnnccctatatatcttgaccagtcctgggcattttgccccccctccttgtctggggaccataaagccccgaatatcgactttcaaagcctgggtaatggtacaaatttaaaagtggaaaacaatttttttcgcggggaagaaataaattttccaaggcccctaatatttaagggaagggcggctttttttttagcggtctgtgtttccgcggcaattaactcttttaaacaccgctcttttgcgcatctttgtttggccctccacaaagagtaaaggtgtggtggtgcggacagtgtatttatccccggatacactttttccggcgcagcgtcacgtgt

SEQ ID NO: 19038 - DNA, 724 bp, Macaca Mulatta
atgccaatcaccaggtgatctactgctttaagttatagactgttacttgtagatttccatgtaatcattgaggttatcacccagattagaaagacatatttgttatcagtgtatgttctaattgagagcattccagtagtatcaaacaataatgtctactgtttatagtccacttaataaaaatagaagcatttaccatttgccttaggctgataggaatgtggatattcttgaccaaatatatcagcatctagttgaaatgaccaaatagcattcttagacttatgtattatgaatataattgatatttaaattaatgtcttgttcacatatgtgtattttcatatttgatttttaaatgtacattataacctgtatggtattttatttaaaggggataaacagccaaatagcaaataggtcactgaatgataagatttgcaccttagaacaatagtcattttaaggataacaagtaaacgtctgaaagcacgaggggctttgtttgccttcacctcatagaagtctttgatcttgaaccaatgcttttggatctcattgttgatatacctgaatttactctgtaggagactttaacttcacttcatgctgatgatgtatcaatttcattttatagaaagatttaaagtttttttctggtagtgatatatgtcaaattacatttcctactgcagtatttgagcagggacagtcattttttaat

SEQ ID NO: 19039 - DNA, 719 bp, Macaca Mulatta
  misc_feature (1)...(719): n = A,T,C or G
ggcccccagagagaagccctacccatggacacagaggtgtatgagagcccctatgcggaccctgaggagatcaggcccaaggaggtttacctggaccgaaagctgctgacgctggaagacaaagaactgggctctggtaattttggaactgtgaaaaagggctactaccaaatgaaaaaagttgtgaaaacagtggctgtgaaaattctgaaaaacgaggccaatgaccccgctcttaaagacgagttattagcagaagcaaatgtcatgcagcagctggacaacccgtacatcgtgcgcatgatcgggatatgcgaggccgagtcctggatgctggttatggagatggcagaacttggtcccctcaaaaggtatttgcagcagaacannnnnnnnnnnnnnnnnnnnnnnnnnnnnnnnnnnnnnnnnnnnnnnnnnnnnnnnnnnnnnnnnnnnnnnnnnnnnnnnnnnnnnnnnnnnnnnnnnnnnnnnnnnnnnnnnnnnnnnnnnnnnnnnnnnnnnnnnnnnnnnnnnnnnnnnnnnnnnnnnnnnnnnnnnnnnnnnnnnnnnnnnnnnggcccagacccatggaaagtggcctgtcaagtggtacgctccggaatgcatcaactactacaagttctccagcaaaagcgatgtctggagctttggagtgttgatgtgggaagcattctcctatgggcagaagccgtatcgag

SEQ ID NO: 19040 - DNA, 1216 bp, Macaca Mulatta
  misc_feature (1)...(1216): n = A,T,C or G
ccaccctggggcgacttcaggggtgccacattctctacgtgctcggagttaatagcacctcctccaagcactcgcgaacggcgcccccctgcctggaaagataccgcgatccctccagaggagttgagggacagaggccgagggggctcttccgccagcaccggaggaacaaagaggaggggctggctggtcacagagggtggggcggccgcgtgcacttggccgctgcggagagtgggagagcagggagagagcagcggggagcagcnnnnnnnnnnnnnnnnnnnnnnnnnnnnnnnnnnnnnnnnnnnnnnnnnnnnnnnnnnnnnnnnnnnnnnnnnnnnnnnnnnnnnnnnnnnnnnnnnnnnnnnnnnnnnnnnnnnnnnnnnnnnnnnnnnnnnnnnnnnnnnnnnnnnnnnnnnnnnnnnnnnnnnnnnnnnnnnnnnnnnnnnnnnnnnnnnnnnnnnnnnnnnnnnnnnnnnnnnnnnnnnnnnnnnnnnnnnnnnnnnnnnnnnnnnnnnnnnnnnnnnnnnnnnnnnnnnnnnnnnnnnnnnnnnnnnnnnnnnnnnnnnnnnnnnnnnnnnnnnnnnnnnnnnnnnnnnnnnnnnnnnnnnnnnnnnnnnnnnnnnnnnnnnnnnnnnnnnnnnnnnnnnnnnnnnnnnnnnnnnnnnnnnnnnnnnnnnnnnnnnnnnnnnnnnnnnnnnnnnnnnnnnnnnnnnnnnnnnncatccccgattgaaagatccaccgaggctctgagacgcctccggaaacttagatcatcaatcaccgaaggtcctacagggctacaactgcccccaccacaacccaccccgctttcgtagttttaatttagaaaatagagcttttaaaaatgacctgccttttgaagtagatatacgccttcccccactaccgtaaatttccatttatgtcatcttttatatattgttannnnnnnnnnnnnnnnnnnnnnnnncaccgcttctgccttttcactgtgttggagttttcgggagtgagtactcacgtcctaagtgcacatttatgtgagcacttcttgcgagcctcgcagcctgaggaagctgtcgacatcattacaggcttttgtgaactaggcaagctcagaggggttactggcttctcttgagtcacattgctagcaaatggcagaaccaaagctcaaataaaaataaaataattttcattcgttcac

SEQ ID NO: 19041 - DNA, 810 bp, Macaca Mulatta
ggcctcctgcacaccatatacccagttgcccagtggggagggagagctgggaaccaatttgagtgtgtgggggtctgggtgtttggtggagctggggttggggctggcttggtgatgagtgtatttcctgtcactttcaggagaaagtggatgaggaggggctgaagaaactgatgggcaacctggatgagaacagtgaccagcaggtggacttccaggagtatgctgttttcctggccctcatcactgtcatgtgcaatgacttcttccagggttgcccggaccgaccctgaagcagaactcctgactccttgctatggacctcttgggcccaggactctcgatgcctttgagttttgtattcaataaactttttttgtctgttgataatattttaattgctcagtgatgttctataacctggctggctcagctggagtgctgggaaatgagggcctcctggatcctgctgccttctgggctctgactctcctggaaatctctccaaggccagagctgtactttaggtctcaattttgggatttcaaataccagcaaaaatttggaaatcgagataggttgctgacttttattttgtcaaataaagacattaaaaaaggcaattaccatctaccatcactatcatttcataaaaagataaaatttcaattccaataaaggagaaaaggtataagttcagaataaagacagaccttaacatttaatactgcaagtaatgagttgtaccaggatctgctcaagagatatgaattagtctaatcaacctcacaaagctttatttaaaggatt

SEQ ID NO: 19042 - DNA, 419 bp, Macaca Mulatta
  misc_feature (1)...(419): n = A,T,C or G
cccactcctcagcctcccctccccgaagctgcagccgggaccgcagccatgagaggaaccgggacagacttcgagatcgggagcgggatcgagacagagaccgagagcgggacagggatcgggatcgggatcgagatcgagatcgagatcgagaccgggaacgggacagggatcgggagcgggatcgagaccgagaccgagagggtcctttccgcagnggtcggactccttccctgaacggcgagcccctaggaaagggaatactctctatgtatacggagaagacatgacgcctacccttctccgtggggccttctctccttttggaaacatcattgacctctccatggacccacccagaaanctgtgccttcgtcacctatgaaaagatggagtcagcagatcaggccgttgctgag

SEQ ID NO: 19043 - DNA, 614 bp, Macaca Mulatta
gggagagacctgctatagcgccattcccaaggcatcctcagacgccagcaaggtgacctctaagggggcagggctctcgaaggcctttgtgggccagaagagttccttcctggtggactgcagcaaagctggctccaacatgctgctgatcggggaaggtgggcagagaaaagggggacacctagtttggttgtcatttagcaaaggggatgacttaaaatcagcttaatctctttcagtgcccgtgttaatgtatttggctatcagatcactagcactgctttactgctcctcactgccaacaccaccatgctctgtggccttcttacgcttctcagagggcagagtggatgtggtggcagccgggcccgtatgtctcccaagtacctgtaccctcgctctgatgattatttcttgcagagtcaccacacgagaccatcccggcagtcatggttttgctttagatttccaagtccgtttcagtcccttcctaggtctgaagaaattctgcagtggtgagcagttccccacttgccaaagatccctttaaccaacactagcccttgtttttagcacatgctccagcccttcatcggcctggggagtcttacaaa

SEQ ID NO: 19044 - DNA, 617 bp, Macaca Mulatta
cccctgggcctttttcctcatgggccctgaggaggagggagactctgctgctataactgaggatgatttcgtgctggtactgggctaggacctcaaccccagggattcccaggaagcagaactctccagaagaagggctttgatcattccagctcctctgggctctagcctcaggcctaccactgatcctgctaccctcttaaagaccagcctggtacctgtcttcccaccagccagggctctgagatcagagctggggtggaagggagccactctgaacgccacgcctggcccagtcagtgctgcctgcgctgcatatgaaataaaacccactacacaccagggagagcgggtgtcctgtgtctgctgtctggcttgggcaggaaagcccagaagatactcaccagggtgcagggatggggccattctggcccagacctttattggggaaaatgctgggggtcacttggtcttgctcttgcctttacccggaggtagctggaagggccgctctagtgcagtcaacttgctgctgagcctttcctcgctggccttgagctgctcttccaccagctgctggagctcctccagctccttgttcatttgggtcttgatgt

SEQ ID NO: 19045 - DNA, 827 bp, Macaca Mulatta
aatctggcttctcagagaagcacaagtttagagggtttgaagaaggtggacagattctgtgttctcaacttcccaggagtggggctgtgtctgaccacatctaggatgggaaaacttacaacttgaggtctgacttttcttttttcctccccatctttttatctttctccttcccaagaattgaagaggagctgggcagcaaggctaagtttgccggcaggaacttcagaaaccccctggccaagtaagctgtgggcaggcaagcccttcggtcacctgttggctaaatagacccctccccttgtgtcagctcgggcagcttgaggccccgaccaacgcttgcaggggtccctgctagttagcgcccctcacccgccgccgtggagtccgtgccgcttccttagaacttctacagaaccgagctccctggagccctgtttggcagctctagctttgccgtcgtgtaattggcccaaatcactgtttttctcgccttactttccaccaagtgtctggagtcatgtgagcctcgtgtcatctccgaggtggccacaggcaagatgcctggtggttttgtgcttaaaataaaaagcctcagtgacccatgagaatactccgtgtgcctgtgtatgtttggaacaatctgggtctgtccttcatgttcagggggcctggcgaaagggtgttggcctttgagaactaacgtttggtgtcgtaacagcaagggatgaggatccattgaggacattttcctgggtccttgggaagggaactagaggcaaaggcaagaaaagagacatacgcggtccctctagggtagtggggtc

SEQ ID NO: 19046 - DNA, 445 bp, Macaca Mulatta
caaaccaccttagggagactctgtctaacattttcctctctcccaggcagcggaggagtggaagtacgttgcaatggtgatggaccacattctcctcggagtcttcatgctcgtctgcatcatcggaaccctagccgtgtttgcaggtcgactcattgaattaaatcagcaaggatgagcagaaagtgagctgagcctagctctgccccagaacctaccagagcaaagaagggcaggagaggaagatttgtctgcttgctacactcgcacttatcaaacgtgtaatcttctgtacttattattgataagatttacctttatgtaagtttataaccttgaagtgttttcacattgcttctccatttagttctgctgtctccctgaagagtgaaccctctttagtaaatgaaactaggaactaaaaaagtgttcatttccagtgtct

SEQ ID NO: 19047 - DNA, 968 bp, Macaca Mulatta
atttggagaattatacactctctaggtgctatcatatacccatccttgtgtgtatgatcagtgaaggccagagaatactgttgctatgaaataaataagtggataaaattggaaatagcccgcctaatttgctgtgaaagctctctggggtgtgaggagtcagtggtaccttattcatcatacatagcaagaatgggcgattgcctcgtatatctgtcagtttaccccaatgggggagagtgataataaaaaccatggtgaatactccaatatgaccattttggtgatgctagtatccataccatgttttgaaggtttataagtgagaatagtcccccgtgccgttggaagtataaagttttcaggatctgtttcgatggtgaggccaacagaaaatctgcaagggtggtgattgggccaaggattactgttctttgcaagtttttccagccatttgggaaaatctcctcgattgcgtttattgggaaccctgttgtaaggttatccggctgtacactctccattggcgtgggatgtagatagaacccggaattctggcggcatccccttaaggctttggaaccatttatacaattttggtccttttagatctcataatcgctggttaaaggtggtttggttgacttgtggtgtccccacgaacttggccttgatgacgaggtcggaattgcagaaggctgtttgtgggtggggtaggacacaggtgcaggccctgcagggggctatcagccacagcaacaacaggatgccggaagccaggggctcaaagggggccatggtgggttctctcgtgtctctctgggcactggatctgcggcgatggcggcagggcctgagcgctagaggataaatgtccacgctaggggcgggggtggcagcgggtgcggaaaccacaggcctccaggcttcctggatgcattactcatccaccgcaccatcagtgcccc

SEQ ID NO: 19048 - DNA, 100 bp, Macaca Mulatta
aagccagtgaagaaaaagaagataaaacgagaggttaagattctggagaaccttcgtggtggaacaaatatcattaagctgattgacactgtaaaggacc

SEQ ID NO: 19049 - DNA, 1695 bp, Macaca Mulatta
  misc_feature (1)...(1695): n = A,T,C or G
ncagggctggcgttgtgaccccagggatcaccgaggaccagctgtggagagccaagtatgtgtatgactctgccttccatccggacacaggggagaaggtggtcctgattggccgcatgtcagcccaggtgcccatgaacatgaccatcaccggctgcatgctcaccttctacaggcaggtcttnnnnnnnnnnnnnnnnnnnnnnnnnnnnnnnnnnnnnnnnnnnnnnnnnnnnnnnnnnnnnnnnnnnnnnnnnnnnnnnnnnnnnnnnnnnnnnnnnnnnnnnnnnnnnnnnnnnnnnnnnnnnnnnnnnnnnnnnnnnnnnnnnnnnnnnnnnnnnnnnnnnnnnnnnnnnnnnnnnnnnnnnnnnnnnnnnnnnnnnnnnnnnnnnnnnnnnnnnnnnnnnnnnnnnnnnnnnnnnnnnnnnnnnnnnnnnnnnnnnnnnnnnnnnnnnnnnnnnnnnnnnnnnnnnnnnnnnnnnnnnnnnnnnnnnnnnnnnnnnnnnnnnnnnnnnnnnnnnnnnnnnnnnnnnnnnnnnnnnnnnnnnnnnnnnnnnnnnnnnnnnnnnnnnnnnnnnnnnnntgatcatggacactctggagaagaaagacttcctgaagnnnnnnnnnnnnnnnnnnnnnnnnnnnnnnnnnnnnnnnnnnnnnnnnnnnnnnnnnnnnnnnnnnnnnnnnnnnnnnnnnnnnnnnnnnnnnnnnagctccataaacgtaagcaagctggaaccagagctgagagctcagatccatgagcaaaaccccagcgtagaagtggtctactacaacaaggggctttgaggagggtcagcctctgtcccctccctcagttccttgggctgctgctttagtggagtcatgtcacccctgccacttgcctatctgcctagcactgggtaggggccttggtgggcagatggccattgagggtagcaacctattagggtgggggaggtaccaccataaggcttttcctcccctctctggtttcaaagagcagaacgcataacccctccctcctgtgcttgagtgtccacacatatacatacatgatacatatgtgcatttgtacattgggtcctgaaagctaggagcaggcatgctagccnnnnnnnnnnnnnnnnnnnnnnnnnnnnnnnnnnnnnnnnnnnnnnnnnnnnnnnnnnnnnnnnnnnnnnnnnnnnnnnnnnnnnnnnnnnnnnnnnnnnnnnnnnnnnnnnnnnnnnctcatcccttctagacataggaggagccccaggatctcaggtcatagacttatagacactagtaggccaaagtggactgaatccttcaggtttctgatatctagctccccaagctgactgggctggcagaggagaacatgtttggacaagggaggcaggggacttatgcatccctcagtgccatcccctgtattctggaatagctctgtttcacctcctcctctctaccagacgaaggagcgcctgtgtcctgtactgccctcgctgtctcccccagcaccctactcggcagcgtgggcatcttaaggcacagtcttaggagttcctggtgtgctctgacatcatgacctcaaatctaaatcctacaatcccaactccttttcccaaacaaaaagccacagaggcagagcaagcattcccctttaagagctcccactgcaccccctccccaggg

SEQ ID NO: 19050 - DNA, 324 bp, Macaca Mulatta
cctttgtccagggtgccccatctagacttccagccctttggaaccctttctgcgctttgctggtggctcctgagcacggtgggattggtgcaggtcagcactgaacagcacctgtatgagggtggagtcggtgtggggaggagggtacattggggtcagggctggtgggactagtgacagtgctgggaggtggaagagtccttggggaacagggccgaaggcaatgagagtcctctggggttgggacaggggtggctggagagtcctttagggccacctggggcagtggtggtggaagagtctgctgggtcagggctggaggag

SEQ ID NO: 19051 - DNA, 304 bp, Macaca Mulatta
gttatgcatatggagtaaaagtcggtgctagcaaccctcatcatggttaaccaaagtaacttcacaatagcaagtcaacataattgtatcaccagggcaacaaaatattaagtaagtaaccaattcgaattgccaactattaaaggatgtaggggatgtttcacagggcatagcaaccgtctttgaagtctaggaaacttaaaagatttcttttaacaagcattcatgtcttctaggacagttttataataacagcaaatagtaggattgtacattgtcacacagacttccatgtatatccatg

SEQ ID NO: 19052 - DNA, 847 bp, Macaca Mulatta
caggacggtcggatcttcatcggcaccttcaaggcttttgacaagcacatgaatttgatcctctgtgactgtgatgagttcaggaagatcaagtgagaagtggactgtggggggcggagactggaggatgggaatggattgagtgggtgggccaagcagtagaggtggtgatgtagctagttggttcttctctgtttattctccagttttagagggcagacttaaatggggacattgaacactaagaaatctttttcagtccagcaaaccttgctctctaggtctagcaaagtacaagttgtgaagggctgctaggctttttgtttctctgactttgtatgcccctgggtactggggtaaagggctctcatgttctccccacaggtgtgtgaggggggagagcttgagtttctggcctcattgcctatttgtaaagctgtagcctaaagggctctcccaatgcagcctggtctgaaactgctttaagaagcctctgaccctcttcagggtaagtgctgagctccccatgtgggtttggggccagtgatttttgttggcatttatacaaacaattggagatattttctacttcgctacaattacataagttattggctaactcccttgtcttgagtctcacagatgttaagcttttggcccattaaaagataagatctagcttcccatcatgttttacattcaaggctacttgaggcactaaaagatgatgtgacttccgtggttatcagctcttttgtcacatgcagtgtccatattatgttgtccctcgctttgaattccctttgatgctccttggggctgatttcttctgtggcccaaggtcaag

SEQ ID NO: 19053 - DNA, 976 bp, Macaca Mulatta
  misc_feature (1)...(976): n = A,T,C or G
ggattctagaggccggaggcggccgacnnnnnnnnnnnnnnnnnnnnnnnnnnnnnnnnnngttttcctttcattaagggtttttagtttctggttgggttgacactaacttttcttaagatgctgtgagaaccatttcatccaaatgccaaataaacttgtgttctggaaaaaaataaaacaacattaaaatannnnnnnnnnnnnnnnnnttatattatatttaaatattatgtgatttactgtttatattnnnnnnnnnnnnnnnnnnnnntatagtctttttaattcatttatttgttgacagaaattatattttttgtgtctctccctcccccctcttttttattactttttttcatccatttcttctgtttttttcgtgtgctttatttttgggttttattcatctttttttaatattatttttttctgtcggtgatttcatttgttaaaacacacttttgctcttttttttcttcccctattattatttattttggtttgtgcggcttttttttaccctttccagtatttatgttctttccnnnnnnnnnnnnnnnnnnnnnnnatccggctcgtttttcctttttttcttaccattttcctgtggttttgtgcgatatttatactttttttttgctcttctcctccctttttttctgttattttttagtttgagtannnnnnnnnnnnnnnnnnnnnnncttcnnnnnnnnnnnnnnnnnnnttcttgtctttctcttgctatctaaatcttttnattcattgtatgttacgctttccattggtctctttcctnacctttgtgattcactttctttttttatattttatgcttctcaccatcacttttttattcctcattttgtattcatatacttgtttttttttcttattctcttcttttctattttctttctctttttttgtttggcatttctctatgtgtgttttttctggtttatattatccg

SEQ ID NO: 19054 - DNA, 270 bp, Macaca Mulatta
  misc_feature (1)...(270): n = A,T,C or G
tcagcggcaagaggaaatccgggaaggacttcgtgaccgaggcgctgcagagcannnnnnnnnnnnnnnnnnnnnnnnnnnnnnnnnnnnnnnnnnnnnnnnnnnnnnnnnnnnncaggagcatggcttgaacttccagagactcctggacgccagcacctacaaggaggcctttcggaaggacatgatccgctggggagaggagaaacgccaggctgacccaggcttcttttgcaggaagattgtggagggcatctctcagcccatctg

SEQ ID NO: 19055 - DNA, 221 bp, Macaca Mulatta
gatgagggaacaactggatgtggcccaacgcgcctatgaggacctggagttccagcaactggagcgggagagccggcaggaggaggaggatcgggaccgccctgggccccaggcgccagaccccaaggtccaggaacttcaggccagcacggcgcagcacagagtgagtcatgcccgaccagcgctgccccctttgctgttcctctctgtctcccctgctc

SEQ ID NO: 19056 - DNA, 648 bp, Macaca Mulatta
  misc_feature (1)...(648): n = A,T,C or G
ctgcagacaaagtcaaatcntgactggtatcaggaagcattaacattgttggaaccccattggctgtgagagcacttacccctatttcaatagctcatggtacacctgtaatgagactatcaatgcctactcagcaggcatctggccagactcctcctcgagttatcagtgcagtcataaaggggccagaggttaaatcggaagcagtggcaaaaaagcaagaacatgatgtgaaaactttgcagctagtagaagaaaaaccggcagatggaaataagacagtgacccacgtagtggttgtcagtgcaccttcagctattgcccttcctgtaactatgaaaacagaaggactagtgacatgtgagaaataaaatagcagctccaccgtggacttcatgctgttagtggcagtactgacataaacatttgcaagggaagtcatcaagaaaagtcaaagaagactttaaaacatttttaatgcatatacgaaaacaatcagacttactggaaataaattacctatcccatgtttcagtgggaaatgaactacatattgagatgctgacagaaaactgcctcttaccagtaggaaacaactgaacccatcaataagaaaaaggattgacagggaccagcagctcactacga

SEQ ID NO: 19057 - DNA, 237 bp, Macaca Mulatta
ggggaggcggacgttggaagggtgtgggcctcggctgggaccgttcatgtagcagcaaccggcggcggctgccgcagagcagcgttcggttttgtgtttaaattttgaaaactgtgcaatgtattaataacgtctttttatatctaaatgtattctgcacgagaaggtacactggtcccaaggtgtaaagctttaagagtcatttatataaaatgtttaatctctgctgaaactcag

SEQ ID NO: 19058 - DNA, 947 bp, Macaca Mulatta
gcgtgtctcaccaatagatgattcaagaacatcatttaaatgcacaatttttcattctcttttttggctaaatttcttcatactcaactttcagattctttaatctccagctcagctccaacaattcaacgctgttctatctgaaaaagtgcacatcgtgccttctctacttcgctcttggaacataatttctcatggcagtgtttaagaccactctgtggaggttaatttctgggaccttagggataatatgcctttcgttgatggctacattgggaattctgttgaaaaattcttttactaaactgagtgttgagccagcatatactccaggacccaacatagaactccagaaagactctgactgctgttcttgccacgaaaaatgggttgggtaccgatgcaactgttacttcatttccagtgaagagaaaacgtggaacgaaagtaggcatttctgcgcctctcagaaatccagtctgcttcagcttcaaaacagagatgagctggattttatgagctccagtcaacatttttactggattggactctcttatagtgaggaacacaccgcctggttgtgggagaatggctccgcactctcccagtatctatttccatcgtttgaaacttttaaaccaaagaactgcatagcatataattcaaagggaaatgctttagacgaatcctgtgaaactaaaaatcgttatatctgtaagcaacagctcatttaaacgtttcttggggcagagaaggtggagagtaaagacccaacattactaataatgacacagttacctgttatattgttactaattgtctacttctggagtctataaaatgttttcaaacagtgtcttacacaattgtcatagatgtgaaacaatgtgttttaaaattgatgaaatttgtgtatctacatttgaaattataaaattaatatgaag

SEQ ID NO: 19059 - DNA, 749 bp, Macaca Mulatta
  misc_feature (1)...(749): n = A,T,C or G
atcctcagagagaggatgatgatgcnnnnnnnnnnnnnnnnnncacacttaaaaaantttttgggggaaaactttttttacggcaacaaggcacaatttttgcacaacacgggggttttcaacaaccaatgggcccaaaatttcccccgttcccccgaaaaagttaaaaaccaaagaagtcttggaatcggggaagatgaatttgttccttcagatgggttagataaagatgaatatacattttcaccaggcaaatcaaaagccactccagagtaagtaatgctatttagtgatgtggtatagttagttgtaaacatttgccacagatattatagtgagctcttctaagaaattgttactctaggcaaggtcttcttcatgaaggaatcaatcttgttaatattgcagctgttcccatcacagttgctgtagtttaaaggaaggattggcaaactttttccataaagggctccatagtaaatgttttaggctttgtgggccatattgtctatgtcacatcttcttaatgctgccattctagtaaaaaagcaggcataaatgatacgtaaataaatgagtgtagccatgttccaatgaagtattatttacaaaaataggcagcaggcccatgggatatagttggacaanccctggttttgagaaaacttactaagtccttagaattgggtggcatgtttcttccctaaatttgggctcgatagattttccttgctattggtgagcatgaa

SEQ ID NO: 19060 - DNA, 858 bp, Macaca Mulatta
  misc_feature (1)...(858): n = A,T,C or G
gggacactgatctggtgttcacggtgttgctgcacctgaagaatgagctaaaccgaggagatttttttcatgacccttcgaaatcagcccatggccctgagtttgtaccgacagttctgtaagcatcaggagctagagacgctgaaggacctttacaatcaggatgacaatcaccaggaattgggcagcttccacatccgagccagctatgctgcagaagagcgtattgaggggcgagtagcagctctgcaaacagccgccgatgccttctacaaggccaagaatgagtttgcagccaaggctacagaggatcaaatgcgactcctacggctgcagcggcgcctggaagacgagctggggggccagttcctagacctgtctctacatgacacggttaccaccctcattcttggcggtcacaacaagcgtgcagagcagctggcacgtgacttccgcatccctgacaagaggctctggtggttgaagctgactgccctggcagatttggaagactgggaagaactagagaagttttcccagagccagaaatccccccttggctacctggcctttttgtggagattctgcctgaaaccaccccaaccaaattctcaagccccaaaaggtatgccttccccgtggggggtcccccaaccaaaaaggtccacgcctttttgctttcttggtctggccgaaaggtggctcccagccctgcccgattgaggggcccctcgcaatcacccggccaaagcggaggctgtaactgcgaacccccttgcgatttatctacccctcgccccccgntgacagcccactcctacgtggggtggccacctaccactttgagataaaaaaatt

SEQ ID NO: 19061 - DNA, 315 bp, Macaca Mulatta
acagagctggagaatgacagcctgaccaatggggacctgaagagcaagctgaagcaagagaacacgcagctggtgcacaggtcagggaggcagggcgctgggggcttggctgtgactctgggaaacaaaggggggtccttcttgctgagacctccgggaggaggcagcctcatgcctttgcagctctgagggtctgtgatgcatcagcctcttgtcacgtggccctgcccacatgtggtgcccagtataggaccttagggacagggacacaggttggagctcgaccttggctctaggccagatggattccacccc

SEQ ID NO: 19062 - DNA, 185 bp, Macaca Mulatta
aaagataaaagtatgtctcaatagtaaaacataacaagatctttcaggaaagacggattgcattagaaacagacagtatatttatagtcacaagagcccagcagggcctcaacgttggggcaggctggccagcccgtcatgttcctcaaaagcacccttgacatcaagtctccttcccctttacc

SEQ ID NO: 19063 - DNA, 688 bp, Macaca Mulatta
tgtatgtagttggatttcctggagtctaaaggtatccatctgcagaaattgaggcccaaattgaatttggattcaagtggattctaaatactttgcttatcttgaagaaagaagcttcataaggaataaacaagttgaatagagaaaacactgattgataataggcattttagtggtctttttaatgttttctgctgtgaaacatttcaagatttattgatttttttttttcactctccccatcacactcacacgcacgctcacactttttatttgccataatgaaccgtccagcccctgtggagatctcctatgagaacatgcgttttctgataactcacaaccctaccaatgctactctcaacaagttcacagaggaacttaagaagtatggagtgacgactttggttcgagtttgtgatgctacatatgataaagctccagttgaaaaagacaggaatccacgttctaatggcgtagtgagaaaatgactggattgaccatagtctgtttgagtcagtaatgttggtgcattttagggagtattagaggaagtaagctcttgactaaggattgggcatttgatgatggagctccaccccctaatcagatagtagatgattggttaaacctgttaaaaaccaaatttcgtgaagagccaggttgctgtgttgcagtgcattgtgtt

SEQ ID NO: 19064 - DNA, 191 bp, Macaca Mulatta
  misc_feature (1)...(191): n = A,T,C or G
tcaagcttatcgactacncgttaccggcacgaggtcgtgccaaattccngaagcaatcttcctgctaaggccattggacacagaatccgagtgatgctgtacccctcaaggatttaaactaacgaaaaatcaataaataaacgtggatttgtgctcttgtatttttgttaagtggattaaagaacttacta

SEQ ID NO: 19065 - DNA, 668 bp, Macaca Mulatta
agatttctgttgatcagcactcactctcaacaggcattccctctgacattcagacctaactgagaagaaacatgtgcatgtaccttattccacgatagtggcagttttacacaactgtttagctctgctgcccatggctttgcattttccctcaggttccacttaaaagcatagcaggagggaacctcactgctggaacatatttgaatatgtttgctgtggttttagcaaataattaggaaacctaaatggggtccatcattccacctgtgagcattaagtgtatgggaacctctgtaccattatgtttgggttttaaacgagacttcacttgtcagaagctgacttctgtgtaaatggatttggaggctcagggctggagttgaactggtgtaggtgggtcagctttaggagtggcctgcagaggttgattgttgttgacacagtgtttgttcagagtggacagacaaggttattttaagactgctcctgcggagacctctcccaagaacaactcccaagctcccagttgcttcgagttaggaacgattggaggagagtgctaccaattacttaagtgtgggtcgtctgccttcagacatgccttcccaggtctgtctttttggcatctttagtatttccatctttcctgacttttcccttcagcc

SEQ ID NO: 19066 - DNA, 1456 bp, Macaca Mulatta
  misc_feature (1)...(1456): n = A,T,C or G
ctggctcgagaaggaagtcagccgtctcgctctgggtctccaggcctgcgaccgcccgccagtcgtcccgagnnnnnnnnnnnnnnnnnnnnnnnnnnnnnnnnnnnnnnnnnnnnnnnnnnnnnnnnnnnnnnnnnnnnnnnnnnnnnnnnnnnnnnnnnnnnnnnnnnnnnnnnnnnnnnnnnnnnnnnnnnnnnnnnnnnnnnnnnnnnnnnnnnnnnnnnnnnnnnnnnnnnnnnnnnnnnnnnnnnnnnnnnnnnnnnnnnnnnnnnnnnnnnnnnnnnnnnnnnnnnnnnnnnnnnnnnnnnnnnnnnnnnnnnnnnnnnnnnnnnnnnnnnnnnnnnnnnnnnnnnnnnnnnnnnnnnnnnnnnnnnnnnnnnnnnnnnnnnnnnnnnnnnnnnnnnnnnnnnnnnnnnnnnnnnnnnnnnnnnnnnnnnnnnnnnnnnnnnnnnnnnnnnnnnnnnnnnnnnnnnnnnnnnnnnnnnnnnnnnnnnnnnnnnnnnnnnnnnnnnnnnnnnnnnnnnnnnnnnnnnnnnnnnnnnnnnnnnnnnnnnnnnnnnnnnnnnnnnnnnnnnnnnnnnnnnnnnnnnnnnnnnnnnnnnnnnnnnnnnnnnnnnnnnnnnnnnnnnnnnnnnnnnnnnnnnnnnnnnnnnnnnnnnnnnnnnnnnnnnnnnnnnnnnnnnnnnnnnnnnnnnnnnnnnnnnnnnnnnnnnnnnnnnnnnnnnnnnnnnnnnnnnnnnnnnnnnnnnnnnnnnnnnnnnnnnnnnnnnnnnnnnnnnnnnnnnnnnnnnnnnnnnnnnnnnnnnnnnnnnnnnnnnnnnnnnnnnnnnnnnnnnnnnnnnnnnnnnnnnnnnnnnnnnnnnnnnnnnnnnnnnnnnnnnnnnnnnnnnnnnnnnnnnnnnnnnnnnnnnnnnnnnnnnnnnnnnnnnnnnnnnnnnnnnnnnnnnnnnnnnnnnnnnnnnnnnnnnnnnnnnnnnnnnnnnnnnnnnnnnnnnnnnnnnnnnnnnnnnnnnnnnnnnnnnnnnnnnnnnnnnnnnnnnnnnnnnnnnnnnnnnnnnnnnnnnnnnnnnnnnnnnnnnnnnnnnnnnnnnnnnnnnnnnnnnnnnnnnnnnnnnnnnnnnnnnnnnnnnnnnnnnnnnnnnnnnnnnnnnnnnnnnnnnnnnnnnnnnnnnnnnnnnnnnnnnnnnnnnnnnnnnnnnnnnnnnnnnnnnnnnnnnnnnnnnnnnnnnnnnnnnnnnnnnnnnnnnnnnnnnnnnnnnnnnnnnnnnnnnnnnnnnnnnnnnnnnnnnnnncgactgtgatatgagtgacagcagctgcagcagccttgccgcgaccctgttggccaaccatagcctgcgcgagctggacctcagcaacaactgcctgggggacgcgggcgtcctgcagctggtggagagtgtccggcagccgggctgcctcctggagcagctgg

SEQ ID NO: 19067 - DNA, 544 bp, Macaca Mulatta
  misc_feature (1)...(544): n = A,T,C or G
nttcaatgcccagatgcgcctgggggggctgacccaggcccctggcaacccggtgttggctgtgcagattaaccaggacaagaattttgcctttttggagttccgctcagtggacgagactacccaggccatggcctttgacggcatcatcttccagggccagtcactaaagatccgcaggcctcatgactaccagccgcttcctggcatgtcagagaacccctccgtctatgtgcctggggttgtgtccactgtggtccctgactctgcccacaagctgttcatcgggggcttacccaactacctgaacgatgaccaggtcaaagagctgctgacatcctttgggcccctcaaggccttcaacctggtcaaggacagtgccacggggctctccaagggctacgccttctgtgagtacgtggacatcaacgtcacggatcaggccattgcggggctgaacggtatgcagctgggggataagaagctgctggtgcagagggcgagtgtgggagccaagaatgccacgctggtgagccccccggca

SEQ ID NO: 19068 - DNA, 832 bp, Macaca Mulatta
  misc_feature (1)...(832): n = A,T,C or G
tgtcctaacccactcctcaccaaggtacgctcaggaaaattgagttgtcccagctgctgaacctgggagcgattcctccaccgagtctctggcagtaaaaacagcccagggtgacccacgctctcacacggcccctctgggcagcatctgcaggcggagatgcagggcctcaaggaccaggtacaggagctgcaccgagacctcaccaagcaccactcgctcatcaaggcggagatcatgggagacgtcctgagcaagtccctgcaactggacgtgcagatcgcctcggagcacacctccttagagggcatgagggtcgtcttccaggaggtagccctcccaaagactctaactccagtcccacctgtcaggggacacctgggctaccccaacagtaagcagggaaagaggacctggcttgtgccctataggactctcatgtggcagggtctggagcctgggagtctttgctgcttggaatcacgtggacctggctggngggtgctttgtagatccgagtagctagagatagcagtgccaccactgtaaattccagctcactgccacatccaatgtccagcttttctctttcagatttgggaggaatcctatcagcaagtggctaatgagcaggagatttatgaanngtcccaggaagtggctgctgagtgaacccccntgtcccgagcntacccacatgctagcaggggaggaagtcagggtcggccactaaccagatgcaaatccccacactcctcaccttagcgcttgactgtgcctccnggctgctacacggccccaaatgatgcatgtggggtcaggactcattgan

SEQ ID NO: 19069 - DNA, 158 bp, Macaca Mulatta
cagacggcgctgagcgcggcggcggcgggagcgacgtcgagtgtctccgggcacccgtctgtggccaagcagccagcagcctagcagccataaggcttgccgccggcggccaagcagccaaccatgctcaatatggggcctctctccagcagactgcg

SEQ ID NO: 19070 - DNA, 759 bp, Macaca Mulatta
acatgccgtggtcttcttctctgacgtcaccaagatgacatctttcaccaacctcaaaatgtggatccaagaatgcaatgggcatgctgtgcccccactagtccccaaagtgcttgtggggaacaagtgtgacttgagggaacagatccaggtgccctccaacttagccctgaaatttgctgatgcccacaacatgctcttgtttgagacatcggccaaggaccccaaagagagccagaacgtggagtcgattttcatgtgcctggcttgccgattgaaggcccagaaatccctgctatatcgtgatgctgagaggcagcaggggaaggtgcagaaactggagttcccacaggaagctaacagtaaagcttcctgtccttgttgaaaccaaacggtgtaaatacaagataaattatcactggagtttttctttcccttttttctgtgcctgcataatgctgacacctgcttgtttccatacaaattgatatcaaaataaaatttgtatagattatcacatggctttttgtcttgctttcctccaagccattcctgattgtgatgagtggaacaggcagtttgtcttactagagtaatattccccatgccagtggcacactccctgccagctttctaggctctctgaaattctcatcgcttgagtcaattcttcaggacgaattcattctctcactcagtgtaatcagtgggcagaaacacctggtggggttggggcacaggccagatatgtttttctag

SEQ ID NO: 19071 - DNA, 301 bp, Macaca Mulatta
  misc_feature (1)...(301): n = A,T,C or G
ttgctgctagtttcggttcgcggcagcggcggttgtagtctcggcggcagcggcggagacactagcactatgtcggaggagcagttcggcggggannnnnnnnnnnnnnnnnnnnnnnnnnnnnnnnnnnnnnnnnnnnnnnnnnnnnnnnnnnnnnnnnnnnnnnnnnnnnnnnnnnnnnnnnnnnnnnnnnnnnnnnnnnnnnnnnnnnnnnnnnnnccgcgtctggaggcaccgaagggggcagcgccgagtcggagggggcgaagattgacgccagtaagaacgaggaggatgaagg

SEQ ID NO: 19072 - DNA, 807 bp, Macaca Mulatta
  misc_feature (1)...(807): n = A,T,C or G
gggagctgcagtcttggacggtaatcatggtggacatgatggagttaccgaggtcgcgcatcaacgtcggcgtgctagctcagttcatcgacaagcctgtctgcttcgtagggaggctggaaaagattcatcccactggaaaaatgcttattctttcagatggagaaggaaaaaatggaaccatcgagttgatggaaccccttgatgaagaaatctctggaattatggaagtggttggaaaagtaaccaccaaggccaccatcttgtgtacatcttatgtccagtttaaagaagataaccatccttttgatcttggactttacaatgaagctgtgaaaattatccatgagtttcctcagttttatcctttagggattgtgcaacatgattgatcgtgatggattttcatacaattgcaaatgagctatattaaagactattaaaggaagcccttcttgtttgagggagagatttctgtgctttctcatttaatttactctttttaagatattccaacctagagtttttgatggaactgatatattgacagttctcacctaagtccttttataaagaattgctactccaatatatggtcagattagatgtaagaataaagcagttgtctgagtttaggtttctattttattaataaaaactaaaatggacagaagaaagaaaagacnaacaaaaaaaaaaacatggtcgggccgccctcgggccccttcaagaagccttttctaagaccatttcgttttgggcgcccccgggcccccagttagggtaaagtggaaccatggggtccta

SEQ ID NO: 19073 - DNA, 70 bp, Macaca Mulatta
ttctcagaatgaagtgtaccctaactagccgaggaagaactatgaacataaagtctgcaacatggaaggt

SEQ ID NO: 19074 - DNA, 1172 bp, Macaca Mulatta
  misc_feature (1)...(1172): n = A,T,C or G
ttgaaagactgccttactttccccatttcagtgccagggcaggggcccttggagtgacttggccggagtctggggcccgaccaccctgccctctctcaggacccgggctttctgctgtgcagaccctcgtgggcagcctcccctcggaactcggacaccatggcttcannncagaggctcggggtggtctgggggcccctccgctgcagtctgcccgatccctgccgggccccgccccctgcctcaagcacttcccgctcgacctgcgcacgtctatggatggcaaatgcaaggagatcgccgagnnggagctgttcacccgctcgctggccgagagtgagctccgtagtgccccgtatgagttccccgaggagagccccattgaacagctggaggagcggcggcagcggctggagcggcagatcagccaggatgtcaagngctggagccggacatcctgcttcgggccaagcaagatttcctgaagacagacagtgactcggacctacagnnnnnnnnnnnnnnnnnnnnnnnnnnnnnnnnnnnnnnnnnnnnnnnnnnnnnnnnnnnnnnnnnnnnnnnnnnnnnnnnnnnnnnnnnnnnnnnnnnnnnnnnnnnnnnnnnnnnnnnnnnnnnnnnnnnnnnnnnnnnnnnnnnnnnnnnnnnnnnnnnnnnnnnnnnnnnnnnnnnnnnnnnnnnnnnnnnnnnnnnnnnnnnnnnnnnnnnnnnnnnnnnnnnnnnnnnnnnnnnnnnnnnnnnnnnnnnnnnnnnnnnnnnnnnnnnnnnnnnnnnnnnnnnnnnnnnnnnnnnnnnnnnnnnnnnnnnnnnnnnnnnnnnnnnnnnnnnnnnnnnnnnnnnnnnnnnnnnnnnnnnnnnnnnnnnnnnnnnnnnnnnnnnnnnnnnnnnnnnnnnnnnnnnnnnnnnnnnnnnnnnnnnnnnnnnnnnnnnnnnnnnnnnnnnnnnnnnnnnnnnnnnnnnnnnnnnnnnnnnnnnnnnnnnnnnnnnnnnnnnnnnnnnnnnnnnnnnnnnnnnnncccagaaagtcattctgctaccgccggctgcagtacctgagctccaagttccagatgcacgtgctactcaatgagatgaaggaactggccgcccagaagaaagtgccacaccgagatttctacaacatccgcaaggtg

SEQ ID NO: 19075 - DNA, 833 bp, Macaca Mulatta
  misc_feature (1)...(833): n = A,T,C or G
gggcctcctttcgagcctctaccctggccgccgcgcgggagagaggccgagatggcagatgagattgccaaggctcaggtcgctcggcctggtggcgacacgatcttcgggaagatcatccgcaaggaaataccagccaaaatcatttttgaggatgaccggtgccttgctttccacgacatttcccctcaagcaccaacacattttctggtgatacccaagaaacatatatcccagatttctgcagcagaagatgatgatgaaagtcttcttggacacttaatgattgttggcaagaaatgtgctgctgatctgggcctgaataagggttatcgaatggtggtgaatgaaggttcagatggtggacagtctgtctatcacgttcatctccatgttcttggaggtcggcagatgcatttggcctcctggttaagcacgttttggggataattttctcttctctaggcaatgattaaggtttggcaagttccagtatgttaaagtaacccacttattttttgcctgtgtatggagagattccagaaattatttttaaacccccttactttataaaaggactttgtttgcttgggctntnnnctattactgtatgtcttatatttaattaacacttgtcgggccgccctcgggccctcgagaaaaccttttccagaaccctttccgtttgggcggcgcgggggcccccgttatggtaaaagggaaacgggggtcattaagcttgtttttcctaagggagaaaccctgggtcctaggaaataaagggccttgggaatttccccccccaattaaaaaaaaggccccggggggggcaa

SEQ ID NO: 19076 - DNA, 71 bp, Macaca Mulatta
tgtcatgcatcctacacatactttgggcaagcaatatcctattacccgggtaatagaatttattactctag

SEQ ID NO: 19077 - DNA, 2473 bp, Macaca Mulatta
  misc_feature (1)...(2473): n = A,T,C or G
ctccatcctcccccttgaggacatggaactttccggtgaacctgtacctgaggggaccccggaaaccaccaacatgagcatcatccagcacagcagctccgaacaaggcaagtccggatgcacatgcctannnnnnnnnnnnnnnnnnnnnnnnnnnnnnnnnnnnnnnnnnnnnnnnnnnnnnnnnnnnnnnnnnnnnnnnnnnnnnnnnnnnnnnnnnnnnnnnnnnnnnnnnnnnnnnnnnnnnnnnnnnnnnnnnnnnnnnnnnnnnnnnnnnnnnnnnnnnnnnnnnnnnnnnnnnnnnnnnnnnnnnnnnnnnnnnnnnnnnnnnnnnnnnnnnnnnnnnnnnnnnnnnnnnnnnnnnnnnnnnnnnnnnnnnnnnnnnnnnnnnnnnnnnnnnnnnnnnnnnnnnnnnnnnnnnnnnnnnnnnnnnnnnnnnnnnnnnnnnnnnnnnnnnnnnnnnnnnnnnnnnnnnnnnnnnnnnnnnnnnnnnnnnnnnnnnnnnnnnnnnnnnnnnnnnnnnnnnnnnnggtccaagcagtgaagaaagtttaacaacagctgcagctgcaaccgaagtgtccctcagtacttttgaggatgaggaagccagtggggtccccacagatggcctggcccccctcacagccaccatgacccctgagcaggcagtcacttctgnnnnnnnnnnnnnnnnnnnnnnnnnnnnnnnnnnnnnnnnnnnnnnnnnnnnnnnnnnnnnnnnnnnnnnnnnnnnnnnnnnnnnnnnnnnnnnnnnnnnnnnnnnnnnnnnnnnnnnnnnnnnnnnnnnnnnnnnnnnnnnngctcagagagaacatgtgggaatgaaaggacaggctgagcccaaaggagaaaagnnnnnnnnnnnnnnnnnnnnnnnnnnnnnnnnnnnnnnnnnnnnnnnnnnnnnnnnnnnnnnnnnnnnnnnnnnnnnnnnnnnnnnnnnnnnnnnnnnnnnnnnnnnnnnnnnnnnnnnnnnnnnnnnnnnnnnnnnnnnnnnnnnnnnnnnnnnnnnnnnnnnnnnnnnnnnnnnnnnnnnnnnnnnnnnnnnnnnnnnnnnnnnnnnnnnnnnnnnnnnnnnnnnnnnnnnnnnnnnnnnnnnnnnnnnnnnnnnnnnnnnnnnnnnnnnnnnnnnnnnnnnnnnnnnnnnnnnnnnnnnnnnnnnnnnnnnnnnnnnnnnnnnnnnnnnnnnnnnngggtgaccctggcaacagaggcttacctggacccccggggaaannnnnnnnnnnnnnnnnnnnnnnnnnnnnnnnnnnnnnnnnnnnnnnnnnnnnnnnnnnnnnnnnnnnnnnnnnnnnnnnnnnnnnnnnnnnnnnnnnnnnnnnnnnnnnnnnnnnnnnnnnnnnnnnnnnnnnnnnnnnnnnnnnnnnnnnnnnnnnnnnnnnnnnnnnnnnnnnnnnnnnnnnnnnnnnnnnnnnnnnnnnnnnnnnnnnnnnnnnnnnnnnnnnnnnnnnnnnnnnnnnnnnnnnnnnnnnnnnnnnnnnnnnnnnnnnnnnnnnnnnnnnnnnntccttgatcaatatcacccatggattcatgaatttctcggacattcctgagctggtggggcctccgnnnnnnnnnnnnnnnnnnnnnnnnnnnnnnnnnnnnnnnnnnnnnnnnnnnnnnnnnnnnnnnnnnnnnnnnnnnnnnnnnnnnnnnnnnnnnnnacagggcgagaagggagagccaggtgccatcctgacaggggacattcctctggaaaggctgatggggaaaaagnnnnnnnnnnnnnnnnnnnnnnnnnnnnnnnnnnnnnnnnnnnnnnnnnnnnnnnnnnnnnnnnnnnnnnnnnnnnnnnnnnnnnnnnnnnnnnnnnnnnnnnnnnnnnnnnnnnnnnnnnnnnnnnnnnnnnnnnnnnnnnnnnnnnnnnnnnnnnnnnnnnnnnnnnnnnnnnnnnnnnnnnnnnnnnnnnnnnnnnnnnnnnnnnnnnnnnnnnnnnnnnnnnnnnnnnnnnnnnnnnnnnnnnnnnnnnnnnnnnnnnnnnnnnnnnnnnnnnnnnnnnnnnnnnnnnnnnnnnnnnnnnnggtgttaaaggagagaaaggatcctggggccttcctggctcaaagggagaaaaaggcgaccagggagcccagggaccaccaggnnnnnnnnnnnnnnnnnnnnnnnnnnnnnnnnnnnnnnnnnnnnnnnnnnnnnnnnnnnnnnnnnnnnnnnnnnnnnnnnnnnnnnnnnnnnnnnnnnnnnnnnnnnnnnnnnnnnnnnnnnnnnnnnnnnnnnnnnnnnnnnnnnnnnnnnnnnnnnngccagaaaggggagacagtcgttgggccccaaggacccccaggtgctcctggtctgcctgggccacctggctttggaagacctggtgatcctgggccaccgggacccccagggccaccaggacctccggctatcctgggagcag

SEQ ID NO: 19078 - DNA, 2470 bp, Macaca Mulatta
  misc_feature (1)...(2470): n = A,T,C or G
ttaagctggaccgacctagatttgaacgtgttcttgggcccgtgctcagacatcctcaaacgaaacatccagcagtacaacagttttgtgtcacctgtctgtctgaaatctgactcctgtgcctcccttttctcctctccccaatccatgcttcactcatgcagtctgctttattttccctacttgcagcgccaagtggccactggcatcgcagcttcctgtctgtttatatattgaaagttgcttttattgcaccattttcaatttggagcattaactgaatgctcatacacagttaaataaatagaaagagttctatggagactttgctgttactgcttctctttgtgcagtgttagtattcaccctgggcagtgagtgccatgctttttggtgagggcagatcccagcacctattgaattactgtagagtaatgatataacagtgcgaagattttgttttttaagtgacataattttccagttctaagcatatttagactgtggccatatatgctgtatttctttgtagaataaatggtttctcatcatgctctaaagattagggaaaatggatatagaaaatcttaatatagtagaaagacatctgcctgtgattaaactagtttaagggtggaaaaatgcccatttttgctaattatcaatgggatatgattggttcaatttttttttccagaatttttgtttgccaagctaatctgcctggttttttatatcttgttattaatgtttcttctccaattctgaaatacttttaagtgtggctatctatacctgccttttaagtttgaaactaactcatagactacaaatattggttagtatttaactacatctgcctcggctcacaaattctgattagacctttatccagctagtgccaaataattgatcagatgctgaattgagaataagaattggaggtctgcaatcttggttgttaatttagagcttttggttaaattatgtccttcagctgactccagtataatctcctctgcttattaaactgattccaggagattggatttgctatgactagatacagatggagcaaatgtcctaaccgagaaaagaggtgatgctgctaaagggagaaatggcaggtggacaaagttcagtgttgggaattttccctgtgagattcactggggcatgagattttggaagaagttttttactttggtttagtctttttttcctttttatttcagaatttctggtgggttgatggtagggtataatgtgtctgtgttgtttcaaattggtctaaaaggctgtcctgctgaaagtcctgctttcctatctagcatttatttctctggcaaacttttctttctttcctttcgtttttaaagtaaacttgtgtattgagtcttaattgtatttcagtattttccagccttacgtgttacattattccaatgatacccaacagtttatttttattatttatttaaacaaactttcacagttctgtaatgtaggcacttttattttcgttgtgatttatatataaggtaatgtagggttatatttgggagtgactgcaagcgtttttccatctgtgtgcaacgaactgactctgattattgatcccctctcctgccctttcctaggtaatttaaattggtcatggtagatttttttcatacatttgaaaaacttttaggttgttaccaagtatgaagtataaatctggggaagaggctttatgtgcattttagggtgggtaagaaagccaccttgttacaaatcttttaatttccaaaataatctatattaaatgagagttttctgatctgtactttgtgtttagctacctttttatatttaaaaagttaaaaatgaaaattatgttcttacaagcttaaagcttgatttgatctttgtttaaatgccaaaatgtacttaaatgagttacttagaatgccataaaattgcagtttcatgtatgtatataatcatgctcatgtatatttagatacatataatgcctttctaagtgaattttactctttaatcatttggactttgctgtttactccccttctgtaagtttttaattaaaaaatttaaagataagttctacatttaaaacaatggatcaccatctaaaagcctttatcctttgtgtgaatcctaagagtaatatgtgaagaaatccacgaaattggggcaataattttgtcttagttgatattcaaggcttttaaaagtcattattcctgggcttggtaagtgaatttatgagatttactgctgtagaaagtatagatggccaaaggaccgttttgtattgcttcctgattacccagtctgattataccatgtgtgctaatatactttttttgttatagattgtcttaatggtaggtcaagtaataaaaagagatgaaataattttgaaaannnaaaaaaaanannnannnnnnnnccttgttcggcc

SEQ ID NO: 19079 - DNA, 830 bp, Macaca Mulatta
gggggttagataaagatgaatatacattttcaccaggcaaatcaaaagccactccagaaaaatctttgcatgacaaaaaaagtcaggattttggaaatctcttttcatttccttcatattctcagaagtcagaagatgattcagctaaatttgacagtaatgaagaagattctgcttctgttttctcaccatcatttggtctgaaacagatagataaagttccaagtaaaacagtagctgctaaaaagggaaaaccgtcttcagatacagcccctaagcccaagagagcccccaaacagaagaaagtagtagaggctgtaaactctgactcagattcagaatttggcgttccaaagaagactacaacaccaaaaggtaaaggccgaggggcaaagaaaaggaaagcatctggctctgaaaatgaaggcgactataaccctggcaggaaaacatccaaaacagcgagcaagaaaccgaagaaaacatcctttgatcaggattcagatgtggacatcttcccctcagacttccccttctgagccaccttctctgccacgaaccggtcgggctaggaaagaagtaaaatattttgcagagtctgatgaagaagaggaagatgttgattttgcaatgtttaattaaagtgcccaaagagcacaaacaaacattttttcaacaaataccttgtggttgtcccttttgtcttttctgtctcagacttttgtaacttctgggcttattttaatgtgatgatgtaattgatgatgggatttttattattgtgggtaagccctttttaccatttttgttccttacacattacaagtttt

SEQ ID NO: 19080 - DNA, 193 bp, Macaca Mulatta
actgggagctggggccgtgtcaatggcaggtgaggtgcagtgaggggagagagggatcatctggggaggctggaggccctggctctgctgagcacgccagggctgcctacagaagggaggtgggagagctcgcaagtgctgggcacgtgggggacacctgccccgtggtgctgctgacccctcgcgggctgct

SEQ ID NO: 19081 - DNA, 252 bp, Macaca Mulatta
gggtgggaggagccagcggccggggaggttctggtctgttctgcctcgcggcagccgcccccttctgcgcggtcacgccgagccagcgcctgggcctggaacagggccgtagtccccccagcttcgcccaccacctctctaccatggacccccgcaaagtgaacgagcttcgggcctttgtgaaaatgtgtaagcaggacccgagcgttctgcacaccgaggaaatgcgcttcctgagagagtgggtggaga

SEQ ID NO: 19082 - DNA, 119 bp, Macaca Mulatta
ggtattgatgacgtcactggtgagccattagtccagcaggaggatgataaacctgaagcagttgctgccaggctaagacagtacaaagacgtggcaaagccagtcattgaattatacaa

SEQ ID NO: 19083 - DNA, 502 bp, Macaca Mulatta
  misc_feature (1)...(502): n = A,T,C or G
cccaccctgcctgacggtcactttgatggngggatcctgtacgacacatacccactctcggaggaaacctggcacacacaccagttcaacttcatcaagnagaaccatgcctttcgcctgctaaagccggggggtgtcctcacctactgcaacctcacctcctggggggagctgatgaagtccaagtactcagacatcaccaccatgtttgaggtgcgcccacctggagttccctgtgggtctccaggcagtgaccttgggtgggggtgggaagggactgctggagccaccttgctacctggggagggtcccttcctgaccccctgggtgggctggactgtgctggttcatttagaaaccaaagtcctttgcctggcgcggcggctgccaggagtggtggctcaggtctgtaatctcagcactgtgggaggctgaggtgggcagattgcttgagcctaggagttcaagaccagcctgggcaacagagcaagacctcatcttt

SEQ ID NO: 19084 - DNA, 1257 bp, Macaca Mulatta
  misc_feature (1)...(1257): n = A,T,C or G
ggagtaaaaatggtttaaagaagaggaaactgacaannnnnnnnnnnnnnnnnnnnnnnnnnnnnnnnnnnnnnnnnnnnnnnnnnnnnnnnnnnnnnnnnnnnnnnnnnnnnnnnnnnnnnnnnnnnnnnnnnnnnnnnnnnnnnnnnnnnnnnnnnnnnnnnnnnnnnnnnnnnnnnnnnnnnnnnnnnnnnnnnnnnnnnnnnnnnnnnnnnnnnnnnnnnnnnnnnnnnnnnnnnnnnnnnnnnnnnnnnnnnnnnnnnnnnnnnnnnnnnnnnnnnnnnnnnnnnnnnnnnnnnnnnnnnnnnnnnnnnnnnnnnnnnnnnnnnnnnnnnnnnnnnnnnnnnnnnnnnnnnnnnnnnnnnnnnnnnnnnnnnnnnnnnnnnnnnnnnnnnnnnnnnnnnnnnnnnnnnnnnnnnnnnnnnnnnnnnnnnnnnnnnnnnnnnnnnnnnnnnnnnnnnnnnnnnnnnnnnnnnnnnnnnnnnnnnnnnnnnnnnnnnnnnnnnnnnnnnnnnnnnnnnnnnnnnnnnnnnnnnnnnnnnnnnnnnnnnnnnnnnnnnnnnnnnnnnnnnnnnnnnnnnnnnnnnnnnnnnnnnnnnnnnnnnnnnnnnnnnnnnnnnnnnnnnnnnnnnnnnnnnnnnnnnnnnnnnnnnnnnnnnnnnnnnnnnnnnnnnnnnnnnnnnnnnnnnnnnnntgcagtgctggagtgggacggacgggaacattcattgccctggacaggcttttgcagcatattcgggatcatgagtttgtcgacatcttagggctggtgtcagaaatgaggtcataccggatgtctatggtacagacagagnnnnnnnnnnnnnnnnnnnnnnnnnnnnnnnnnnnnnnnnnnnnnnnnnnnnnnnnnnnnnnnnnnnnnnnnnnnnnnnnnnnnnnnnnnnnnnnnnnnnnnnnnnnnnnnnnnnnnnnnagaggacatgatgtgcacccatcctcccttgcttccagattgttttagggggccctgatagtcattattctaaaaagaggccctgctttgtactatgtggccaaggagataatttatctcacagaagcaccgggaagacttagccttaaagagcctacagtgtctttttggactctttcacttcgggacatttaataatggaccaaattcaatagaacaccaggaaggtcaagacgctctccaaagggcaggaagtacggcacttccgaagagtttcgttggccctttgctggttgggctga

SEQ ID NO: 19085 - DNA, 563 bp, Macaca Mulatta
  misc_feature (1)...(563): n = A,T,C or G
acaggcatgtaatgaatttactacacatgtgatgaaccttctccgagaacagagtagaacacgtcccatttctccaaaagagattgaaagaatggtgggcatcatccatcgaaaatttagttccattcaaatgcaactcaaacaaagcacttgtgaagcagttatgattttaagatcaaggttcctcgatgccangacggaaaaggcgtaacttcagtaaacaggccacagaaatcttgaatgaatatttttactcacacctcagcaacccctaccccagtgnnnnnnnnnnnnnnnnnnnnnnnnnnnnnnnnnnnnnnnnnnnnnnacagagtcttataaaggatccaaaagaaagagggaacaaaggttctgacatccggcaaactagcgtgtatccaattggtttggcaacaaacgaatcaggtacaagaagaatatcggcaagtttcaggaagaagccaacctctatgctgcaaagacggccgtgacagctgcacacgcagtagcagcagctgtgcagaacaaccagaccaattcgcccaccacaccaaattccggtn

SEQ ID NO: 19086 - DNA, 1232 bp, Macaca Mulatta
  misc_feature (1)...(1232): n = A,T,C or G
ttatcggcaggggaggtgagcagatttcacggattcaagcagaatctggttgcaaaattcagattgcttcannnnnnnnnnnnnnnnnnnnnnnnnnnnnnnnnnnnnnnnnnnnnnnnnnnnnnnnnnacaagccaaacggctcctgggacagattgtggaccgctgtcgaaatggacctggctttcataatgacatagacagcaacagcacaatccaggagattctcattcccgcatctaaagtgggtctggtcatcggcagaggaggnnnnnnnnnnnnnnnnnnnnnnnnnnnnnnnnnnnnnnnnnnnnnnnnnnnnnnnnnnnnnnnnnnnnnnnnnnnnnnnnnnnnnnnnnnnnnnnnnnnnnnnnnnnnnnnnnnnnnnnnnnnnnnnnnnnnnnnnnnnnnnnnnnnnnnnnnnnnnnnnnnnnnnnnactttcggggtgtacgtggtgacttcagctcccgagtgggaggaggcagtatagaggtatnnnnnnnnnnnnnnnnnnnnnnnnnnnnnnnnnnnnnnnnnnnnnnnnnnnnnnnnnnnnnnnnnnnnnnnnnnnnnnnnnnnnnnnnnnnnnnnnnnnnnnnnnnnnnnnnnnnnnnnnnnnnnnnnnnnnnnnnnnnnnnnnnnnnnnnnnnnnnnnnnnnnnnnnnnnnnnnnnnnnnnnnnnnnnnnnnnnnccaggaaagagacggctttggaggcctggcagcagccagaggaagaggtcgtggccgtggcgactggagcgtgggagcccctggtggcgtccaggagataacatacacggtgccagccgataagtgtggccttgtcataggcaaagnnnnnnnnnnnnnnnnnnnnnnnnnnnnnnnnnnnnnnnnnnnnnnnnnnnnnnnnnnnnnnnnnnnnnnnnnnnnnnnnnnnnnnnnnnnnnnnnnnnnnnnnnnnnnnnnnnnnnnnnnnnnnnnnnnnnnnnnnnnnnnnnnnnnnnnnnnnnnnnnnnnnnnnnnnnnnnnnnnnnnnnnnnnnnnnnnnnnnnnnnnnnnnnnnnnnnnnnnnnnnnnnnnnnnnnnnnnnnnnnnnnnnnnnnnnnnnnnnnnnnnnnnnnnnnnnnnnnnnnnnnnnnnnnnnnnnnnnnnnnnnnnnnnnnnnnnagtggtcctccggcctttctgacccagggctggggcagcacctaccaggcgtggcagcagcccacacagcaggtcccaa

SEQ ID NO: 19087 - DNA, 653 bp, Macaca Mulatta
  misc_feature (1)...(653): n = A,T,C or G
tttttttttttttcggacttgtgctgtattagattctctttattcactggntccatttctacaacaaatacatccaaaacactatataataaaattatttacaacatttccaaatgagaagattgcttttgcccccactactgctattcacacacagtacttccacagcacaatacgtcattaggatatctaaaaatgctcaccctgtactctaggctgcttaggaaatgtgaaaactaataacatttataatgtttttagcccctttcaatacaagacaacattttagaaaccttgaacttcaacttgcaacaccaaaagggctcaacaatcctgctttccccattgcactttatgaaacaggttgcagggactaggaaaagggccacattattaaaattactaactgtacagaaattgatttaaaaaagtcacagctcaaaattgctctttgtaaaagtcacacacatttacaagtatcaagtcgccgtcctgcttgtttacttggattttcttcgcttggattgcaccgcactggttatgtctttagtagagctggaggctgacgcaggtcgagaagatcgtttacgatgtccattttccacactttcagaagccacagttggctcttcagttcgggagttcttcggctc

SEQ ID NO: 19088 - DNA, 384 bp, Macaca Mulatta
  misc_feature (1)...(384): n = A,T,C or G
agaagcgagatgagcgcagtgtgaagagcacagctgtgcgggtggtagactttggcagtgccacctttgaccatgagcaccatagcaccattgtctccactcgccattaccgagcaccagaggtcatccttnnnnnnnnnnnnnnnnnnnnnnnnnnnnnnnnnnnnnnnnnnnnnnnnnnnnnnnnnnnnnnnnnnnnnnnnnnnnnnnnnnnnnnnnnnnnnnnnnnnnnnnnnnnnnnnnnnnnnnnnnnnnnnnnnnnnnnnnnnnnnnnnnnnnnnnnnnnnnnnnnagaaagcagaaatatttttaccggggtcgcctggattgggatgagaacacatcagctgggcgctatgttcgtgagaactgcaaaccgctgcg

SEQ ID NO: 19089 - DNA, 404 bp, Macaca Mulatta
  misc_feature (1)...(404): n = A,T,C or G
gccgagggccctgtggtgacagcccagtataactgccttggctgtgtgcatcctatatcaacgcagagcccagacctggagcccattctgagacacggcgttcagtactttaacaacaagactcaacattcctccctcttcacgcttagtgaagtaaaacgggcccaaagacaggtnnnnnnnnnnnnnnnnnnnnnnnnnnnnnnnnnnnnnnnnnnnnnnnnnnnnnnnnnnnnnnnnnnnnnnnnnnnnnnnnnnnnnnnnnnnnnnnnnnnnnnnnnnnnnnnnnnnnnnnnnnnnnnnnnnnnnnnnnnnnnnnnnnnnnnnnnnnnnnnnnnnnnnnnnnnnnnnnnnnnnnnnnnnnnaggggaggattttgtacaaccaccttccaagatttgcgt

SEQ ID NO: 19090 - DNA, 554 bp, Macaca Mulatta
gtggcttctgggaaggcttaataatagccagtttggaatttgttcaaacctgtaatgactttgtaaacaaagatgaccatcaaccctttctcacatctatagtgccaataaagcgggaagtataagatttaataggagggtttaaggttcatgagacccatggaaagatgtgttctgagatggttgctgcgaagatcataataaagtctttttaatagtcagtctaaacaaaatggttggggatgtcatgttttttgcccgattcaacttttgttctgcttaaacattaatggcaaatctagaactcttcgaatcctacaactttgcaatttttttttctacaaatgtctaacatccaaaacgtgagagttgggaaaaggactttgctcctgtagattttttcatattacttctctatatcatatattctaaatagctatcacttcagcagtcttttgcctattggttatgttagtatcacattacttccagcctttcaattactccatgttttatttaatatccattaaagtctatgaatctcaaaaaaaaaa

SEQ ID NO: 19091 - DNA, 149 bp, Macaca Mulatta
ggcctgcgtccgaactttctatgagacacctctccagttgctggagaaggtcaagaatgtctttaatgaaacaaagaatcttcttgacaaggactggaatattttcagcaagaactgcaacaacagctttgctgaatgctccggccaag

SEQ ID NO: 19092 - DNA, 1726 bp, Macaca Mulatta
  misc_feature (1)...(1726): n = A,T,C or G
ctgttggtgcaaacgatgttgccaactcctttggtacggccgtgggctctggtgtggtgaccttgaggcaggcgtgcattttagcttcaatatttgaaaccaccggctccgtattactaggagccaaagtaggagaaaccattcgcaaaggtatcattgacgtgaacctgtacaacgagacggtggagacgctcatggctggggaagttagtgccatggttggtnnnnnnnnnnnnnnnnnnnnnnnnnnnnnnnnnnnnnnnnnnnnnnnnnnnnnnnnnnnnnnnnnnnnnnnnnnnnnnnnnnnnnnnnnnnnnnnnnnnnnnnnnnnnnnnnnnnnnnnnnnnnnnnnnnnnnnnnnnnnnnnnnnnnnnnnnnnnnnnnnnnnnnnnnnnnnnnnnnnnnnnnnnnnnnnnnnnnnnnnnnnnnnnnnnnnnnnnnnnnnnnnnnnnnnnnnnnnnnnnnnnnnnnnnnnnnnnnnnnnnnnnnnnnnnnnnnnnnnnnnnnnnnnnnnnnnnnnnnnnnnnnnnnnnnnnnnnnnnnnnnnnnnnnnnnnnnnnnnnnnnnnnnnnnnnnnnnnnnnnnnnnnnnnnnnnnnnnnnnnnnnnnnnnnnnnnnnnnnnnnnnnnnnnnnnnnnnnnnnnnnnnnnnnnnnnnnnnnnnnnnnnnnnnnnnnnnnnnnnnnnnnnnnnnnnnnnnnnnnnnnnnnnnnnnnnnnnnnnnnnnnnnnnnnnnnnnnnnnnnnnnnnnnnnnnnnnnnnnnnnnnnnnnnnnnnnnnnnnnnnnnnnnnnnnnnnnnnnnnnnnnnnnnnnnnnnnnnnnnnnnnnnnnnnnnnnnnnnnnnnnnnnnnnnnnnnnnnnnnnnnnnnnnnnnnnnnnnnnnnnnnnnnnnnnnnnnnnatcgcccgtctccacggcaccttcggcttcgacggccataccaggagcgacggtcatgtgtaccacaccgtgcacaaagactcggggctctacaaagacctgctgcacaaaatccacatcgacaggggccccgaggagaagccggcccaggaaagcaactacaggctgctgcgccgtaacaacagttacacctgctacaccgcagccatctgcgggctgccagtgcacgccaccttccgagctgcggactcatcggccccagaggacagcgagaagctggtgggcgacaccgtgtcctactccaagaagagactgcgctacgacagctactcgagctactgcaatgcggtggcagaggcggagatcgaggcggaggagggtggcgtggagatgaaactggcgtcagagctggccgatcctgaccagccacgagaggaccctgcggaggaggagaaggaggagaaggacgcgcccgaggtgcatctcctgttccatttcctgcaagtcctcaccgcctgtttcgggtcgtttgctcacggcggcaatgacgtgagnnnnnnnnnnnnnnnnnnnnnnnnnnnnnnnnnnnnnnnnnnnnnnnnnnnnnnnnnnnnnnnnnnnnnnnnnnnnnnnnnnnnnnnnnnnnnnnnnnnnnnnnnnnnnnnnnnnnnnnnnnnnnnnnnnnnnnnnnnnnnnnnnnnnnnnnnnnnnnnnnnnnnnnnnnnnnnnnnnnnnnncagcggcttcacgatcgagctggcctcagccttcacggtggtgatcgcctccaacattgggcttccagtcagcactacgcactgcaagg

SEQ ID NO: 19093 - DNA, 648 bp, Macaca Mulatta
  misc_feature (1)...(648): n = A,T,C or G
acatggatcttgtctctttngaggtctgttgtagaagagaaaacacatagacggtgaagacacagaacatgctcagtcagcatccttacccagagatggcaacatctattaagaccaatgcaataccttttcatcttcaacaaatgttgtttcgtctgtttttgatccttggcattgtcaaaaacttagctgcaggtccagtgtatatttttccttatttttcccttttagctatctgctaaaatgagtaaatgccacaactgtacttttccaaagaaacagaactattgacaatttatagcctgtcatgcaggtcatgtttcaaatcaaggctgaaattttcaacagctatgggaaaaactaatgtaaaacagaaacattgtacaatattagtgttttttaaaagaaactgttagttcattatcgagtatactaaatatctgtgaaagattaaatgtattagttctaatcttacttttgatttcgggagcccaaaataaagcaagtgttannnnnnnnnnnnnnnnnnnnnnnnnnnnnnnnnnnnnnnnnnnnnnnnnnnnnnnnnnnnnnnnnnnnnnnnnnnnnnnnnnnnnnnnnnnnnnnnnnnnnnnnnnnnnnnnnnnnnngcgttacccaacttaatcg

SEQ ID NO: 19094 - DNA, 2919 bp, Macaca Mulatta
  misc_feature (1)...(2919): n = A,T,C or G
tccgagcgcccctgtgcgccccggcccgcgccccgccggcatggacgtccatacccgctggaaannnnnnnnnnnnnnnnnnnnnnnnnnnnnnnnnnnnnnnnnnnnnnnnnnnnnnnnnnnngggcgccgcctccgagccgcgcagnnnnnnnnnnnnnnnnnnnnnnnnnnnnnnnnnnnnnnnnnnnnnnnnnnnnnnnnnnnnnnnnnnnnnnnnnnnnnnnnnnnnnnnnnnnnnnnnnnnnnnnnnnnnnnnnnnnnnnnnnnnnnnnnnnnnnnnnnnnnnnnnnnnnnnnnnnnnnnnnnnnnnnnnnnnnnnnnnnnnnnnnnnnnnnnnnnnnnnnnnnnnnnnnnnnnnnnnnnnnnnnnnnnnnnnnnnnnnnnnnnnnnnnnnnnnnnnnnnnnnnnnnnnnnnnnnnnnnnnnnnnnnnnnnnnnnnnnnnnnnnnnnnnnnnnnnnnnnnnnnnnnnnnnnnnnnnnnnnnnnnnnnnnnnnnnnnnnnnnnnnnnnnnnnnnnnnnnnnnnnnnnnnnnnnnnnnnnnnnnnnnnnnnnnnnnnnnnnnnnnnnnnnnnnnnnnnnnnnnnnnnnnnnnnnnnnnnnnnnnnnnnnnnnnnnnnnnnnnnnnnnnnnnnnnnnnnnnnnnnnnnnnnnnnnnnnnnnnnnnnnnnnnnnnnnnnnnnnnnnnnnnnnnnnnnnnnnnnnnnnnnnnnnnnnnnnnnnnnnnnnnnnnnnnnnnnnnnnnnnnnnnnnnnnnnnnnnnnnnnnnnnnnnnnnnnnnnnnnnnnnnnnnnnnnnnnnnnnnnnnnnnnnnnnnnnnnnnnnnnnnnnnnnnnnnnnnnnnnnnnnnnnnnnnnnnnnnnnnnnnnnnnnnnnnnnnnnnnnnnnnnnnnnnnnnnnnnnnnnnnnnnnnnnnnnnnnnnnnnnnnnnnnnnnnnnnnnnnnnnnnnnnnnnnnnnnnnnnnnnnnnnnnnnnnnnnnnnnnnnnnnnnnnnnnnnnnnnnnnnnnnnnnnnnnnnnnnnnnnnnnnnnnnnnnnnnnnnnnnnnnnnnnnnnnnnnnnnnnnnnnnnnnnnnnnnnnnnnnnnnnnnnnnnnnnnnnnnnnnnnnnnnnnnnnnnnnnnnnnnnnnnnnnnnnnnnnnnnnnnnnnnnnnnnnnnnnnnnnnnnnnnnnnnnnnnnnnnnnnnnnnnnnnnnnnnnnnnnnnnnnnnnnnnnnnnnnnnnnnnnnnnnnnnnnnnnnnnnnnnnnnnnnnnnnnnnnnnnnnnnnnnnnnnnnnnnnnnnnnnnnnnnnnnnnnnnnnnnnnnnnnnnnnnnnnnnnnnnnnnnnnnnnnnnnnnnnnnnnnnnnnnnnnnnnnnnnnnnnnnnnnnnnnnnnnnnnnnnnnnnnnnnnnnnnnnnnnnnnnnnnnnnnnnnnnnnnnnnnnnnnnnnnnnnnnnnnnnnnnnnnnnnnnnnnnnnnnnnnnnnnnnnnnnnnnnnnnnnnnnnnnnnnnnnnnnnnnnnnnnnnnnnnnnnnnnnnnnnnnnnnnnnnnnnnnnnnnnnnnnnnnnnnnnnnnnnnnnnnnnnnnnnnnnnnnnnnnnnnnnnnnnnnnnnnnnnnnnnnnnnnnnnnnnnnnnnnnnnnnnnnnnnnnnnnnnnnnnnnnnnnnnnnnnnnnnnnnnnnnnnnnnnnnnnnnnnnnnnnnnnnnnnnnnnnnnnnnnnnnnnnnnnnnnnnnnnnnnnnnnnnnnnnnnnnnnnnnnnnnnnnnnnnnnnggtccccctgggagcggaggtttgaagggcgagccgggagacgtggggcctcaggnnnnnnnnnnnnnnnnnnnnnnnnnnnnnnnnnnnnnnnnnnnnnnnnnnnnnnnnnnnnnnnnnnnnnnnnnnnnnnnnnnnnnnnnnnnnnnnnnnnnnnnnnnnnnnnnnnnnnnnnnnnnnnnnnnnnnnnnnnnnnnnnnnnnnnnnnnnnnnnnnnnnnnnnnnnnnnnnnnnnnnnnnnnnnnnnnnnnnnnnnnnnnnnnnnnnnnnnnnnnnnnnnnnnnnnnnnnnnnnnnnnnnnnnnnnnnnnnnnnnnnnnnnnnnnnnnnnnnnnnnnnnnnnnnnnnnnnnnnnnnnnnnnnnnnnnnnnnnnnnnnnnnnnnnnnnnnnnnnnnnnnnnnnnnnnnnnnnnnnnnnnnnnnnnnnnnnnnnnnnnnnnnnnnnnnnnnnnnnnnnnnnnnnnnnnnnnnnnnnnnnnnnnnnnnnnnnnnnnnnnnnnnnnnnnnnnnnnnnnnnnnnnnnnnnnnnnnnnnnnnnnnnnnnnnnnnnnnnnnnnnnnnnnnnnnnnnnnnnnnnnnnnnnnnnnnnnnnnnnnnnnnnnnnnnnnnnnnnnnnnnnnnnnnnnnnnnnnnnnnnnnnnnnnnnnnnnnnnnnnnnnnnnnnnnnnnnnnnnnnnnnnnnnnnnnnnnnnnnnnnnnnnnnnnnnnnnnnnnnnnnnnnnnnnnnnnnnnnnnnnnnnnnnnnnnnnnnnnnnnnnnnnnnnnnnnnnnnnnnnnnnnnnnnnnnnnnnnnnnnnnnnnnnnnnnnnnnnnnnnnnnnnnnnnnnnnnnnnnnnnnnnnnnnnnnnnnnnnnnnnnnnnnnnnnnnnnnnnnnnnnnnnnnnnnctgtgggactcccgggtccagctggccctgtgggtccccctggagaagacggagataaggtaaggcgaatccagagtgacccatggctgggcctggctgggcaggcgggtgnggtcctcccgggcctacaggtcctcaaggccccatcggacagccgggtccctctgnggagctgacggcgagccagggcctcggggccagcagggccttttcgggcagaaaggtgatgaaggtcccagaggctttcctggaccccctgggccagtggggcttcagg

SEQ ID NO: 19095 - DNA, 468 bp, Macaca Mulatta
  misc_feature (1)...(468): n = A,T,C or G
nagggttgcaaaactgcgtgatgaaattatggccttaagaaacgaatgttcttctgtgtacagcaaaggacgcatgctgacaacagaacagacaaagctcatgatatcaggaatcactcaaagtttaaactcaggatttgcgcagaccttacaccctagtctcacctcagggctgacccagagtttaacaccttccctaacctcttctagtatgacttctggcctgtcatcagggatgacttcccgcctgactccatctgtcactccagcttatacacctggtttcccatcaggatcagttccaaatttcagttcaggagtagagccaaattcactgcaaactctgaagctgatgcagatccgaaaaccccttctaaagtcttctttgctagatcaaaatttaacagaagaggaaatcaacatgaaatttgttcaggatcttttgaactgggttgaagagatgcaggt

SEQ ID NO: 19096 - DNA, 640 bp, Macaca Mulatta
tactgtgcttcaaataaatagaaaaatagttataatattgatcttcaactttgccattcatgcttctatgcacattaggctaggtattccacattgaaagcatgagagtgtctaggcctttgaatggcatatgccatttctgggaaatttatctggaggctaagtattgctttctacaaataactgccccctttgttttaaaaagaagaaatgcatattgaagtagtttcatgatttgtttggcatataggaagcacgctggtgctaagtattttttaaatggttatgtaagcaaagctgaactgtaaatcttcattcaggaatatgtattaagattgtggaatgggtgtaagacaattggtaggaggtgaaagtgggtttgattaaatggatcttttatggccctatgatctatcctttacttgaaagcttttgaaaagtggaaagatcattttgttgcatttccccatttcttgtttttaaaagaccaacaaatttcaagcccaataaatggcttgtattgaacttttacatttgaattaaagattgttaaacatgaagccttttcatgtattcaagtgatttataaagatggggtgtagtctaaaaaatgaaacttgaaaataagaaggtttagtaa

SEQ ID NO: 19097 - DNA, 530 bp, Macaca Mulatta
gctagatcaagagaccctgagagcagagagcaaatcccagtgttgctgatagggcttctgcttctctcgtgtgtgcctcagctctgaagaagttcctgagaatgggttatggatgtcatgttagctgtgagtcttcccacaggtggcacttcaaaaggcagcaccactgggtgccggcacttatttgaaaatggaactttgggagaagtatccttgccagtggctctgtaacttaacagatgacaattaggcttttgtcattgtcgccatcatatggaagataatgtttacatccttttaaacatctttttatatgacagttccttaggatttggtaagccttccaagttgtagcttttaatgtaagtgctgaggtggtaataaaatgttacctccagtcttatggtcattttgagtctatatttttgccatcttattgtatcctcactttttagggggggttttagattctattagccacaaaggcttgaggtttctctttagcaattttctattcaaaactttggaaa

SEQ ID NO: 19098 - DNA, 219 bp, Macaca Mulatta
cattacatttttgagaaaatgactttgttgttttaacttaaggaggcacttttcattttaagcattttgtttcttactgcagaatgaaagattgtgtgccattagagccatttcaggcatcagcaaacggtgctcctataaatgtaccagcaccctcctcattgctgatgctagtagcctttctccttctctctttacctttcaaaaatgatgaaatat

SEQ ID NO: 19099 - DNA, 1048 bp, Macaca Mulatta
  misc_feature (1)...(1048): n = A,T,C or G
aacataagggaattcatgctggagagaaatcctatagatatgaagaatgtggcagagtctttacccgctcctcagcccttactaaagaagagaattcatgctggagagaaaccctataaatgtgaagaatgtggcagagtctttacccactcctcaaccctcataaaacacaagagaattcatactggagagaaaccctacaaatgtgaagaatttggcagagcctttaaaaacttctcagaccttacgaaacgtaagataattcatactgtagagagaccatacaaatgtgaagaatatggaaaagtctgtaagtggttctcagagcttacaaaacataagagaattcatactagagagaaaccttacaaatgtgaagactgtggcaaagcatatacatggtcctcaggtcttactaatcataagagaactcgtgctggagacaaaccatacacatgtgaagaatatggcacagcctttnnnnnnnnnnnnnnnnnnnnnnnnnnnnnnnnnnnnnnnnnnnnnnnnnnnnnnnnnnnnnnnnnnnnnnnnnnnnnnnnnnnnntaaacataagggaattcatgctggagagaaatcctatagatatgaagaatgtggcagagtctttacccgctcctcagcccttactaaagaagagaattcatgctggagagaaaccctataaatgtgaagaatgtggcagagtctttacccactcctcaaccctcataaaacacaagagaattcatactggagagaaaccctacaaatgtgaagaatttggcagagcctttaaaaacttctcagaccttacgaaacgtaagataattcatactgtagagagaccatacaaatgtgaagaatatggaaaagtctgtaagtggttctcagagcttacaaaacataagagaattcatactagagagaaaccttacaaatgtgaagactgtggcaaagcatatacatggtcctcaggtcttactaatcataagagaactcgtgctggagacaaaccatacacatgtgaagaatatggcacagcctttt

SEQ ID NO: 19100 - DNA, 603 bp, Macaca Mulatta
ggggaaatgaaggtcagcgatcttgataggaaagtgtctgacctggagaatgaagccaagaagcaggaggctgccatcatggactataatcgggatatcgaggagatcatgaaggacattcgcaatctggaagacatcaggaagaccttaccatctggctgcttcaacaccccgtccattgaaaagccctagcgtcattagggctggaaggcagcatccctctgacaggggggcagttgtgaggccacagagtgccttaacacaaagattacatttttcagaccccactcctctgctgctgtccatcactgtccttttgaaccaggaaaagtcacaaagtttaaagagaagcaaattaaacatcctgaatcgggaacaaagggttttatctaataaagtctctcttccactcacgttgctaccttacccacactttcccttctgatttgcgtgaggacgtggcatcctacattactgtacagtggcataagcacatcgtgtgagcccgtgtatgctggggcagagcaagtagccctcccctgtctcatcgataccagcagaacctcctcagtctcagtactcgtttctatgaagggaaagttt

SEQ ID NO: 19101 - DNA, 1699 bp, Macaca Mulatta
  misc_feature (1)...(1699): n = A,T,C or G
gtactactgctggattctaaagcacaacaaacagagttggagtggatttcctctccacccaatgggnnnnnnnnnnnnnnnnnnnnnnnnnnnnnnnnnnnnnnnnnnnnnnnnnnnnnnnnnnnnnnnnnnnnnnnnnnnnnnnnnnnnnnnnnnnnnnnnnnnnnnnnnnnnnnnnnnnnnnnnnnnnnnnnnnnnnnnnnnnnnnnnnnnnnnnnnnnnnnnnnnnnnnnnnnnnnnnnnnnnnnnnnnnnnnnnnnnnnnnnnnnnnnnnnnnnnnnnnnnnnnnnnnnnnnnnnnnnnnnnnnnnnnnnnnnnnnnnnnnnnnnnnnnnnnnnnnnnnnnnnnnnnnnnnnnnnnnnnnnnnnnnnnnnnnnnnnnnnnnnnnnnnnnnnnnnnnnnnnnnnnnnnnnnnnnnnnnnnnnnnnnnnnnnnnnnnnnnnnnnnnnnnnnnnnnnnnnnnnnnnnnnnnnnnnnnnnnnnnnnnnnnnnnnnnnnnnnnnnnnnnnnnnnnnnnnnnnnnnnnnnnnnnnnnnnnnnnnnnnnnnnnnnnnnnnnnnnnnnnnnnnnnnnnnnnnnnnnnnnnnnnnnnnnnnnnnnnnnnnnnnnnnnnnnnnnnnnnnnnnnnnnnnnnnnnnnnnnnnnnnnnnnnnnnnnnnnnnnnnnnnnnnnnnnnnnnnnnnnnnnnnnnnnnnnnnnnnnnnnnnnnnnnnnnnnnnnnnnnnnnnnnnnnnnnctgtggccgtgggttctacaagtcttcctctcaagatcttcagtgctctcgttgtccaactcacagtttttctgataaagaaggctcctccagatgtgaatgtgaagatgggtattacagggctccatctgacccaccgtacgttgcatgcacaagnnnnnnnnnnnnnnnnnnnnnnnnnnnnnnnnnnnnnnnnnnnnnnnnnnnnnnnnnnnnnnnnnnnnnnnnnnnnnnnnnnnnnnnnnnnnnnnnnnnnnnnnnnnnnnnnnnnnnnnnnnnnnnnnnnnnnnnnnnnnnnnnnnnnnnnnnnnnnnnnnnnnnnnnnnnnnnnnnnnnnnnnnnnnnnnnnnnnnnnnnnnnnnnnnnnnnnnnnnnnnnnnnnnnnnnnnnnnnnnnnnnnnnnnnnnnnnnnnnnnnnnnnnnnnnnnnnnnnnnnnnnnnnnnnnnnnnnnnnnnnnnnnnnnnnnnnnnnnnnnnnnnnnnnnnnncagctccctcgcaagtgagcggagtaatgaaggagagagtgctgcagcggagtgtcgagctttcctggcaggaaccagagcatcccaatggagtcatcacagaatatgaaatcaagtattacgagaaannnnnnnnnnnnnnnnnnnnnnnnnnnnnnnnnnnnnnnnnnnnnnnnnnnnnnnnnnnnnnnnnnnnnnnnnnnnnnnnnnnnnnnnnnnnnnnnnnnnnnnnnnnnnnnnnnnnnnnnnnnnnnnnnnnnnnnnnnnnnnnnnnnnnnnnnnnnnnnnnnnnnnnnnnnnnnnnnnnnnnnnnnnnnnnnnnnnnnnnnnnnnnnnnnnnnnnnnnnnnnnnnnnnnnnnnnnnnnnnnnnnnnnnnnnnnnnnnnnnnnnnnnnnnnnnnnnnnnnnnnnnnnnnnnaggcactgtggttatagcaaagctgaccaagaaggggatgaagagctttactttcat

SEQ ID NO: 19102 - DNA, 215 bp, Macaca Mulatta
ggattggagtttggaatcctgccttcgatgtcaccccccatgacctcatcactggcggcatcatcacagaactgggggtctttgcccctgaggagctccgggcagccctaaccaccaccatctcttccaggaatggaaccctagatggaccccagatgtaaccaacacagctctccctagcctgcctctctaggttttttaatacttttcttgaa

SEQ ID NO: 19103 - DNA, 121 bp, Macaca Mulatta
agatcactatgttgtggttggggcccagagagatgcgtggggccccggagctgcaaaatccagtgtggggacagctctcctgttgaaacttgcccagatgttctcagatatggtcttaaaa

SEQ ID NO: 19104 - DNA, 673 bp, Macaca Mulatta
  misc_feature (1)...(673): n = A,T,C or G
gaaggaatgtatttgttgtaaattttgtagcactgtttacagttttcctccatgttatttatgaattttatattccgtgaatgtatattgtcttgtaatgttgcataatgttcactttttatagtgtgtcctttattctaaacagtaaagtggttttatttctatnnnnnnnnnnnnnnnnnnnnnnnnnnnnnnnnnnnnnnnnnnnnnnnnnnnnnnnnnnnnnnnnnnnnnnnnnnnnnnnnnnnnnnnnnnnnnnnnnnnnnnnnnnnnnnnnnnnnnnnnnnnnnnnnnnnnnnnnnnnnnnnnnnnnnnnnnnnnnnnnnnnnnnnnnnnnnnnnnnnnnnnnnnnnnnnnnnnnnnnnnnnnnnnnnnnnnnnnnnnnnnnnnnnnnnnnnnnnnnnnnnnnnnnnnnnnnnnnnnnnnnnnnnnnnnnnnnnnnnnnnnnnnnnnnnnnnnnnnnnnnnnnnnnnnnnnnnnnnnnnnnnnnnnnnnnnnnnnnnnnnnnnnnnnnnnnnnnnnnnnnnnnnnnnnnnnnnnnnnnnnnnnnnnnnnnnnnnnnnnnnnnnnnnnnnnnnnnnnnnnnnnnnnnnnnnnnnnnnnnnnnnnnnnnnnnnnnnnnnnnnnnnnnnnnnnnnnnnnnnnnnnnnnnnnnnnnnnnnnnnnnnnnnnn

SEQ ID NO: 19105 - DNA, 144 bp, Macaca Mulatta
atggaaaaagagctaaaactatttagcatctgggaagtagatgaagtccctttgccgggattaaccaaagaattgtgggatcaaatctataatttccaagccaagcctgatgatcttattctggcaacttacccaaagtcaggt

SEQ ID NO: 19106 - DNA, 971 bp, Macaca Mulatta
  misc_feature (1)...(971): n = A,T,C or G
ggatagtagtgttttaaaaagttaaatgaagaataaacgcaaatataaaagctctgactttgccctgtatgtatgatgacttcagtgtccaagatgaagtttaatacctgtaaaaactacgaagaatttcccctagcatttctaggccaaaccttgtaattgacttcagctatgtacgtggataagcttagactgaaatgctaggtatatgtgtaggcttcagtgtatgacccttcattgttattctatgaaagcgaaactgtatttaactggtaatgnnnnnnnnnnnnnnnnnnngaccactgttggtctggtacagttcctttgtattatggggggattttattgtaaaggctttcgcatttgattttatttggccccaagggggtttttttaataaagtttgtcttttattaacccaatctgggtggtattgagggccatcaaacgtttaaacttttccagataaaagggtgccgcaatcttaatatccttttttgttgtcacacagaccatattatccctccaaagaaatattgatttcccctcctcgccagtgttgctacttctttatgtttttttttgagaaacctccattgttgacaatttccaacaaacgcacctcttagctcatacgacaccccccacccacaccgatatcatgcgacaaaattttaaaatttttccccgtttatgtctgccccacttcccccatttttgtggatccccgacatccaacaactttaatagttctttataatatagtgtctcgatatcggcccggatcacacaccgtagccttggagatttgacagtcaaacaatttgctgcagcaagaggtgaattgtctgtaataacgaaccgagtatagagcgatgggcgtgaggaacggattggttgtaatagttatgtaaagacgcccgctgttttattgcgctatattattaattattttcccgcctcccccaccc

SEQ ID NO: 19107 - DNA, 326 bp, Macaca Mulatta
ctttcagagatgtatccatattacgcttcttgatttgtagacttatatgtaacattcacctaatgttttgtgttcttttttccccacagatgctgtacccctcaaggatttaaactaacgaaaaatcaataaataaacgtggatttgtgctcttgtatttttgttaagtggattaaagaacttactaccttaaattgatttgctacatgcttaaaatgatggaggtttcccggcatttttggagtacaaggagatcagagacgtgattaaaattacagggcgagttcagagatttagaagggagcgggttttaattcgagtatctt

SEQ ID NO: 19108 - DNA, 105 bp, Macaca Mulatta
tcccaataaagcggaattcatcagagccaagtatcagatgttagcattcgtccatcgcttgccctgccgggatgacgatagtgtgactgccaaagatcttagcaa

SEQ ID NO: 19109 - DNA, 734 bp, Macaca Mulatta
ggggcggcgtagtctcctgcagcgtttgcggtcagtctcgcaatattcggaagcaggaccgcggcgtggcctaggaagtcatggcgatgaaggccgtgaaagtaatggaccagtgaaggtgtggggaagcattacaggattgactgaaggcctgcatggattccatgttcatcagtttggagataatacacaaggctgtaccagtgcaggtcctcactttaatcctctatccagacaacacggtgggccaaaggatgaagagaggcatgttggagacctgggcaatgtgactgctggcaaagatggtgtggccaaggtgtctttcgaagattctgtgatctcactctcaggagaccattccatcattggccgcacattggtggtccatgaaaaagcagatgacttgggcaaaggtggaaatgaagaaagtaaaaagacaggaaacgctggaggtcgtctggcttgtggtgtaattgggatcgcccaataaacattcccttggatgtagtctggagcccattaactcatctggtatcctgctagctgtaaaaatgtatcttgactaactttaaacctggaatcttaagagggtaattgggtgacgtttgcttaaacccggtaatggaaaaacgggtttgatgatcaccttgggaaaattttgagaagtttttaaaaaacagtccaattaaacatggcttgggtttccattggaaggaaagcaaccgacagcaaga

SEQ ID NO: 19110 - DNA, 273 bp, Macaca Mulatta
gagaaataaaccttgaaaggtaagctgaagctgaggtgtgagaggctttatatggtaagctgagaagattgtacactgtccactagggagtgaggagacagttcaagttttaaaactgaaggagtgatggtagtaacacatctgtgttttagatagttaagcaacagctgtgtggaaggtaggaggagagatcacagcagtgtactggggctgggggatatcagtgttcacatagagaatctgatcaaaactacaagtcctatccccaggaaa

SEQ ID NO: 19111 - DNA, 175 bp, Macaca Mulatta
taggcgtgggctttgccactaggcaggtgggaaatgtgaccaaaccaacagtaattatcagtcaggaaggagacaaagtggtcatcaggactctcagcacattcaagaacacggagattagtttccacctgggagaagagtttgatgaaaccactgcagatgatagaaactgtaa

SEQ ID NO: 19112 - DNA, 690 bp, Macaca Mulatta
  misc_feature (1)...(690): n = A,T,C or G
aaagatcagggagtactttgngcgagtttggggagattgaggccattgaacttccagtggatccaagagttgaacaaaagacgaggttttgtgtttatcacctttaaagaagaagaacctgtgaagaaggttctggagaaaaagttccatactatcagtggaagcaagtgtgagatcaaggtggcccagcccaaagaagtctatcagcagcagcagtatggctctgggggccgtggaaaccgcaaccgagggaaccgaggcagcggaggtggcggtggaggtggaggtcagagtcagagttggaatcagggctacggcaactactggaaccagggctacggctaccagcagggctacgggcctggctatggcggctacgactactcgccctatggctattacggctacggccccggctacgactacagtcagggtagtacaaactacggcaagagccagcgacgtggtggccatcagaataactacaagccatactgaggcggcagcaggagcgaccaactgaccgcacacatgctttgtttggatatggagtgaacacaattatgtaccaaatttaacttggcaaactttctatggcctgtcccatgtgcatcttatttaaaatctcccccatggaaattactctctaattactattccagagtctagttgttaggcgcgtgtggtgtc

SEQ ID NO: 19113 - DNA, 143 bp, Macaca Mulatta
gtgccgatgcaagaccccagagcagctatgcagcggggatccttgcctgccaacgtcccaacccctcgaggcttgttaggagatgctccgaatgatccacggggaggcactttactttctgtaactggagaggtagaacctag

SEQ ID NO: 19114 - DNA, 455 bp, Macaca Mulatta
atgaggagcgggaaggcctcctgcaccctggagaccgtgtgggaagacaagcacaagtatgaggaggccgagcggcgcttctacgagcacgaggccatgcaggcggccgcctccgcccagcagctgccagccgaggggccagctatgaatgggcccggccaggacgaccctgaggacactgatgaggcagaggcccctgacggcagcagcaggagtgatcccaggaagagccaggacggcaggaagcccctgcagaaaaagagaaagcgctcccccaagagtgggctcggcccggcggccccggccctcctggggctcttggctgaacccgtgtggctggacaagtcacttttcgaccaggcagagagttcctactgccagaagctggcagacgtggctgcccaggcagcccagcctccctgctttgcccccttgggggtcctgcacccatggaa

SEQ ID NO: 19115 - DNA, 405 bp, Macaca Mulatta
ccttccgggtagacgcccagtgacccgcccggccggccttctgccgctgcccccttgtacagaatcgaactctgcacttctctctcctttacgagacgaaaaggaaaagcaaaccagaatcttatttatattgttataaaatattccaagatgagcctctggccccctgagccttcttgtaaatacctgcctccctcccccatcaccgaacttccccccctcccctatttaaaccactctctctcccccacaggccttttttggcctcctgatttgttctgttcctgtctcagatccaagagggcaaagctgagctggcttctgtggtgtgtgctcgtttggggggtggggtggaaatactgtcaaggctgggggggccacctctccatctgggcagtttgtggt

SEQ ID NO: 19116 - DNA, 300 bp, Macaca Mulatta
  misc_feature (1)...(300): n = A,T,C or G
aggaggaagacgaggtgcctgacgacgagaccgtcaaccagatgatcgcccggcacgaggaggagtttgatctgttnnngcgcatggacctggaccgcaggcgcgaggaggcccgcaaccccaagcggaagccgcgcctcatggaggaggacgagctcccttcgtggatcatcaaggatgatgcggaggtggagcgcctgacctgtgaggaggaggaggagaagatgtttggccgcggctcccgccaccgcaaggaggtggactacagcgactcactgacagagaagcagtggctcaagg

SEQ ID NO: 19117 - DNA, 788 bp, Macaca Mulatta
  misc_feature (1)...(788): n = A,T,C or G
gggaaacattctgggttgggaaccagggaggcgccctggttggttttccccagttgtatcatagtgccaagcaggcctgattcttgcgattattctcaaatcacctcctgtgttgtgctgggagcaggactgattaaattacggaaaatgcctgtaaagtctgagtaagaaacttcatgctggcctgtgtgatacgagagtcagcatcgttaaaggaaaccgcggcttccatctgtgccatacttgttctgtatttgaaatgagctcaaattggtttttgtttttaatttctatgaaggatccatctttgtatatttacatgctttgaggggtgaaaatttttttgggaaattgagtttgaagcactctggcacacacacacaatgattccctccttccgtcactccacgcagctggcagagagcagtgatcaccagcgtgagtggtgtatgtaggacacttggataaatttttttttaggttttttttaggttttttttaggtttttttgctttacagttagaatacattgttgtacttataccccttattaatgatcagctatatagtatttatatacaagtgataatacagattttgtaactttagtttttaaaaagggaaaagtttttggttccggaaaattttttgtttacccttttttccagaaataaaaaagaaatttcacattnnnnnnnnnnnnnnnnnnntcttaaacccatgtgggcaccatttggaatgggtgaaatggggggcccacgggaaagggcacccatatggcgtttgaa

SEQ ID NO: 19118 - DNA, 1543 bp, Macaca Mulatta
  misc_feature (1)...(1543): n = A,T,C or G
agatgctggctatgagtttgacatctgcttcacctcagtacagaagagagcgatccggaccctctggacagtgctagatgccattgatcagatgtggctgccagtggtgaggacttggcgcctcaatgagcggcactatgggggtctaaccggtctcaataaagcagaaactgctgcaaagcatggtgaggcccaggtgaagatctggaggcgctcctatgatgtcccaccacatccgatggagcccgaccaccctttctacagcaacatcaataagnnnnnnnnnnnnnnnnnnnnnnnnnnnnnnnnnnnnnnnnnnnnnnnnnnnnnnnnnnnnnnnnnnnnnnnnnnnnnnnnnnnnnnnnnnnnnnnnnnnnnnnnnnnnnnnnnnnnnnnnnnnnnnnnnnnnnnnnnnnnnnnnnnnnnnnnnnnnnnnnnnnnnnnnnnnnnnnnnnnnnnnnnnnnnnnnnnnnnnnnnnnnnnnnnnnnnnnnnnnnnnnnnnnnnnnnnnnnnnnnnnnnnnnnnnnnnnnnnnnnnnnnnnnnnnnnnnnnnnnnnnnnnnnnnnnnnnnnnnnnnnnnnnnnnnnnnnnnnnnnnnnnnnnnnnnnnnnnnnnnnnnnnnnnnnnnnnnnnnnnnnnnnnnnnnnnnnnnnnnnnnnnnnnnnnnnnnnnnnnnnnnnnnnnnnnnnnnnnnnnnnnnnnnnnnnnnnnnnnnnnnnnnnnnnnnnnnnnnnnnnnnnnnnnnnnnnnnnnnnnnnnnnnnnnnnnnnnnnnnnnnnnnnnnnnnnnnnnnnnnnnnnnnnnnnnnnnnnnnnnnnnnnnnnnnnnnnnnnnnnnnnnnnnnnnnnnnnnnnnnnnnnnnnnnnnnnnnnnnnnnnnnnnnnnnnnnnnnnnnnnnnnnnnnnnnnnnnnnnnnnnnnnnnnnnnnnnnnnnnnnnnnnnnnnnnnnnnnnnnnnnnnnnnnnnnnnnnnnnnnnnnnnnnnnnnnnnnnnnnnnnnnnnnnnnnnnnnnnnnnnnnnnnnnnnnnnnnnnnnnnnnnnnnnnnnnnnnnnnnnnnnnnnnnnnnnnnnnnnnnnnnnnnnnnnnnnnnnnnnnnnnnnnnnnnnnnnnnnnnnnnnnnnnnnnnnnnnnnnnnnnnnnnnnnnnnnnnnnnnnnnnnnnnnnnnnnnnnnnnnnnnnnnnnnnnnnnnnnnnnnnnnnnnnnnnnnnnnnnnnnnnnnnnnnnnnnnnnnnnnnnnnnnnnnnnnnnnnnnnnnnnnnnnnnnnnnnnnnnnnnnnnnnnnnnnnnnnnnnnnnnnnnnnnnnnnnnnnnnnnnnnnnnnnnnnnnnnnnnnnnnnnnnnnnnnnnnnnnnnnnnnnnnnnnnnnnnnnnnnnnnnnnnnnnnnnnnnnnnnnnnnnnnnnnnnnnnnnnnnnnnnnnnnnnnnnnnnnnnnnnnnnnnnnnnnnnnnnnnnnnnnnnnnatgggtccagtattcacctgcgcttaactgtactaaatcctttttccagatcagtataataaaggagtgatgtgcaata

SEQ ID NO: 19119 - DNA, 144 bp, Macaca Mulatta
agaaactagacacaatgtgcgacgaagacgagaccaccgccctcgtgtgcgacaatggctccggcctggtgaaagccggcttcgccggggatgacgcccctagggccgtgttcccgtccatcgtgggccgcccccgacaccagg

SEQ ID NO: 19120 - DNA, 1153 bp, Macaca Mulatta
  misc_feature (1)...(1153): n = A,T,C or G
ggggtcacagcactctcttgaaaactgcagcttccttctcaccttgaagaataatcctagaacttacaaaatgtgtgatgcttttgtaggtacctggaagcttgtctccagtgaaaactttgatgattatatgaaagaagtaggagtgggctttgccaccatttatgtggcaggcatggccaaacctaacatgatcatcagtgtgaatggggatgtgatcaccattaaatccgaaagtacctttaaaaatactgagatttccttcaaactgggtcaggaatttgacgaagtcaccgcagatgacaggaaagtcaagagcaccataaccttagatgggggtgtcctggtacatgtgccaaaatgggatggacaatcggccaccatcaggacagaagccagaggatgacagagccggtgatcggagtgcatcctgggaagggcgtggcgtccccccgtgagtcttagtgagagagccatagacccacacagggcccttggcaccccccatctggccgccctgctctcttgtagcgccgacaggaacactgcgcgtccgggaaggtcccttccgtttcgacgccagcggaggctctcccatggcgtggtccgccacggggacccgcgaccacagtgccccggccggcgcgtatatgtgcgcgcgagcaagcgcgccgtngcgtgttcgtatatgttccccnccgttgagtgggatagcgtctcncaccggtggtgaggtggacagctgcaccgcgctccctgagccggcgcacctgtccgcgagcancgcctccttctcgcgtggtggcaggctgcacgcccaggcggggcggacatggcgcctgccatcggggggcgcgcgaacgcccgcctccgcagcgtagttgtgtgcctcccacgtccgcgcccgccatatcagctggggctgcaacgcggcgcacgcgtcggtgcccgtgccgccctttacccccgcgtcgctccgctctcactcncgcagtgctggacgcgctgccactcacatgacggcgtgtgccccccgcgccctccgactgcccggggcacgcctggaccccccgccgcctctgcgcgggcaccgttgcgccctgcggntgtgtgcccctgctcggatttcgcccccgctacgccacggcagtcg

SEQ ID NO: 19121 - DNA, 827 bp, Macaca Mulatta
  misc_feature (1)...(827): n = A,T,C or G
gacgatggcggcggtagcactgcttgcgtgtgagtgcacctcactcacatgtgctggagaatctggtaaaagcaccattgtgaagcagatgaggatcctgcatgttaatgggtttaatggagatgagaaggcacccaagtgcaggacatcaaaaacaacctgaaagaggcgatcgaaaccatttgttgggcgcgatgagcaacctggtggcccccgtggagctggncaaccctgagaaccagttcagagtggactacattctgagtgtgatgaacgtgcctgactttgacttccctcccgaattctacgagcatgccaaggctctgtgggaggacgaaggagtacgtgcctgctatgaacgctccaacgagtaccagctgattgactgtgcccagtacttcctggacaagatcgatgtgatcaagcaggctgactatgtgccgagcgaacaggacctggttcgctgccgcgtcctgacttctggaatcttcgagaccaagttccaggtggacaaagtcaacttccacatgtttgacgtgggtgggcagcgcgatgaacgccgcaagtggatccagtgcttcaatgatgtgactgccatcatcttcgtgggtgggcagcagcagctacaacatggttcatccgggaggagcaccagacaaacgcgtgcaggaggtctgaaccttttaggcctttggaccacgcatggtgggaccccctgtgaaactggcgctcaaaggagattgttgttaaaagtctgtggaatcgaatgagcgcttcgaatggcggactatccaggtgttcgagcggagacggtaccggagtttcaa

SEQ ID NO: 19122 - DNA, 715 bp, Macaca Mulatta
  misc_feature (1)...(715): n = A,T,C or G
gggcaggaggtggtgctccagaaatagagttggccctacgattaactgaatattcacgaacactgagtggtatggaatcctactgcgttcgtgcttttgcagatgctatggaggtcattccatctacactagctgaaaatgccggcctgaatcccatttctacagtaacagaactaagaaaccggcatgcccagggagaaaaaacttcaggcattaatgtccgaaagggtggtatttccaacattttggaggaactggttgtccagcctctgttagtgtcagtcagtgctctgactcttgcaactgaaactgttcggagcattctgaaaatcgatgatgtggtaaacactcgataatctggataactgactagcaccattatggtcaccagtattgctgctggcgtggaagatgatcaccttggtgttccttgtttggaagattatttcctctgaatttttgggcttggtcttccagttggcatttgcctgaagttgtattgaaacaatttaatgaaaatattaaatatnttggtttcaaaaggcagattgatttatcttctcccaacattctgttatttctgatactttttgaaaaaactaataaaagaaagcgtaaaaacataagttttacatgtttgagggaaaaaagatgggccccagttatgcctccaaccactgaataaaaatggcttcatttggggcaatttaaaaat

SEQ ID NO: 19123 - DNA, 8142 bp, Macaca Mulatta
  misc_feature (1)...(8142): n = A,T,C or G
ggtgaatggtgtggacatgaagctgcctgtggtgctggccaacggtcagatccgagcctcccagcatggttcagacgttgtgattgagaccgacttcggcctgcgtgtggcctacgaccttgtgtactatgtgcgggtcaccatccccggaaactactaccagcagatgtgtggcctgtgtgggaactacaacggcgaccccaaggatgacttccagaagcccaacggctcacaggcaggcaacgccaatgacttcggcaactcctgggaggaggcggtacctggctctccctgcctgccgccacccacctgcccgccagggagcgagggctgcgaaaccagcaagtgtcctcccgagcaggagaagaagtatgagaaggaggagttctgtgggttcctctccagcgccacagggccactggcctcctgccacaagctggtggatcccacagggtcccttgcaagattgcgtctttgatctctgcctgggtggtgggaacctgagcattctctgcagcaacatccatgcctatgtgagtgcttgccaggcggctggaggccacgtgaagccctggaggacggaaactttctgtnnnnnnnnnnnnnnnnnnnnnnnnnnnnnnnnnnnnnnnnnnnnnnnnnnnnnnnnnnnnnnnnnnnnnnnnnnnnnnnnnnnnnnnnnnnnnnnnnnnnnnnnnnnnnnnnnnnnnnnnnnnnnnnnnnnnnnnnnnnnnnnnnnnnnnnnnnnnnnnnnnnnnnnnnnnnnnnnnnnnnnnnnnnnnnnnnnnnnnnnnnnnnnnnnnnnnnnnnnnnnnnnnnnnnnnnnnnnnnnnnnnnnnnnnnnnnnnnnnnnnnnnnnnnnnnnnnnnnnnnnnnnnnnnnnnnnnnnnnnnnnnnnnnnnnnnnnnnnnnnnnnnnnnnnnnnnnnnnnnnnnnnnnnnnnnnnnnnnnnnnnnnnnnnnnnnnnnnnnnnnnnnnnnnnnnnnnnnnnnnnnnnnnnnnnnnnnnnnnnnnnnnnnnnnnnnnnnnnnnnnnnnnnnnnnnnnnnnnnnnnnnnnnnnnnnnnnnnnnnnnnnnnnnnnnnnnnnnnnnnnnnnnnnnnnnnnnnnnnnnnnnnnnnnnnnnnnnnnnnnnnnnnnnnnnnnnnnnnnnnnnnnnnnnnnnnnnnnnnnnnnnnnnnnnnnnnnnnnnnnnnnnnnnnnnnnnnnnnnnnnnnnnnnnnnnnnnnnnnnnnnnnnnnnnnnnnnnnnnnnnnnnnnnnnnnnnnnnnnnnnnnnnnnnnnnnnnnnnnnnnnnnnnnnnnnnnnnnnnnnnnnnnnnnnnnnnnnnnnnnnnnnnnnnnnnnnnnnnnnnnnnnnnnnnnnnnnnnnnnnnnnnnnnnnnnnnnnnnnnnnnnnnnnnnnnnnnnnnnnnnnnnnnnnnnnnnnnnnnnnnnnnnnnnnnnnnnnnnnnnnnnnnnnnnnnnnnnnnnnnnnnnnnnnnnnnnnnnnnnnnnnnnnnnnnnnnnnnnnnnnnnnnnnnnnnnnnnnnnnnnnnnnnnnnnnnnnnnnnnnnnnnnnnnnnnnnnnnnnnnnnnnnnnnnnnnnnnnnnnnnnnnnnnnnnnnnnnnnnnnnnnnnnnnnnnnnnnnnnnnnnnnnnnnnnnnnnnnnnnnnnnnnnnnnnnnnnnnnnnnnnnnnnnnnnnnnnnnnnnnnnnnnnnnnnnnnnnnnnnnnnnnnnnnnnnnnnnnnnnnnnnnnnnnnnnnnnnnnnnnnnnnnnnnnnnnnnnnnnnnnnnnnnnnnnnnnnnnnnnnnnnnnnnnnnnnnnnnnnnnnnnnnnnnnnnnnnnnnnnnnnnnnnnnnnnnnnnnnnnnnnnnnnnnnnnnnnnnnnnnnnnnnnnnnnnnnnnnnnnnnnnnnnnnnnnnnnnnnnnnnnnnnnnnnnnnnnnnnnnnnnnnnnnnnnnnnnnnnnnnnnnnnnnnnnnnnnnnnnnnnnnnnnnnnnnnnnnnnnnnnnnnnnnnnnnnnnnnnnnnnnnnnnnnnnnnnnnnnnnnnnnnnnnnnnnnnnnnnnnnnnnnnnnnnnnnnnnnnnnnnnnnnnnnnnnnnnnnnnnnnnnnnnnnnnnnnnnnnnnnnnnnnnnnnnnnnnnnnnnnnnnnnnnnnnnnnnnnnnnnnnnnnnnnnnnnnnnnnnnnnnnnnnnnnnnnnnnnnnnnnnnnnnnnnnnnnnnnnnnnnnnnnnnnnnnnnnnnnnnnnnnnnnnnnnnnnnnnnnnnnnnnnnnnnnnnnnnnnnnnnnnnnnnnnnnnnnnnnnnnnnnnnnnnnnnnnnnnnnnnnnnnnnnnnnnnnnnnnnnnnnnnnnnnnnnnnnnnnnnnnnnnnnnnnnnnnnnnnnnnnnnnnnnnnnnnnnnnnnnnnnnnnnnnnnnnnnnnnnnnnnnnnnnnnnnnnnnnnnnnnnnnnnnnnnnnnnnnnnnnnnnnnnnnnnnnnnnnnnnnnnnnnnnnnnnnnnnnnnnnnnnnnnnnnnnnnnnnnnnnnnnnnnnnnnnnnnnnnnnnnnnnnnnnnnnnnnnnnnnnnnnnnnnnnnnnnnnnnnnnnnnnnnnnnnnnnnnnnnnnnnnnnnnnnnnnnnnnnnnnnnnnnnnnnnnnnnnnnnnnnnnnnnnnnnnnnnnnnnnnnnnnnnnnnnnnnnnnnnnnnnnnnnnnnnnnnnnnnnnnnnnnnnnnnnnnnnnnnnnnnnnnnnnnnnnnnnnnnnnnnnnnnnnnnnnnnnnnnnnnnnnnnnnnnnnnnnnnnnnnnnnnnnnnnnnnnnnnnnnnnnnnnnnnnnnnnnnnnnnnnnnnnnnnnnnnnnnnnnnnnnnnnnnnnnnnnnnnnnnnnnnnnnnnnnnnnnnnnnnnnnnnnnnnnnnnnnnnnnnnnnnnnnnnnnnnnnnnnnnnnnnnnnnnnnnnnnnnnnnnnnnnnnnnnnnnnnnnnnnnnnnnnnnnnnnnnnnnnnnnnnnnnnnnnnnnnnnnnnnnnnnnnnnnnnnnnnnnnnnnnnnnnnnnnnnnnnnnnnnnnnnnnnnnnnnnnnnnnnnnnnnnnnnnnnnnnnnnnnnnnnnnnnnnnnnnnnnnnnnnnnnnnnnnnnnnnnnnnnnnnnnnnnnnnnnnnnnnnnnnnnnnnnnnnnnnnnnnnnnnnnnnnnnnnnnnntgtgggccagtgtggctgcctccacgatgaccgctactacccgctgggccagaccttctaccctggccccgggtgtgattccctttgccactgccgggagggcggcctggtgtcctgtcaaccctccagctgcggcccacatgagacctgccggccatccggtggcaacttgggctgtgtggccgtggactctgccacctgtcaggcgtcaggagatctttttattccaccttcgatggccgccgcttcgacttcatgagcacctgcctgtatgtgctggctcagacctgcggcacccgtcctggcctgnnnnnnnnnnnnnnnnnnnnnnnnnnnnnnnnnnnnnnnnnnnnnnnnnnnnnnnnnnnnnnnnnnnnnnnnnnnnnnnnnnnnnnnnnnnnnnnnnnnnnnnnnnnnnnnnnnnnnnnnnnnnnnnnnnnnnnnnnnnnnnnnnnnnnnnnnnnnnnnnnnnnnnnnnnnnnnnnnnnnnnnnnnnnnnnnnnnnnnnnnnnnnnnnnnnnnnnnnnnnnnnnnnnnnnnnnnnnnnnnnnnnnnnnnnnnnnnnnnnnnnnnnnnnnnnnnnnnnnnnnnnnnnnnnnnnnnnnnnnnnnnnnnnnnnnnnnnnnnnnnnnnnnnnnnnnnnnnnnnnnnnnnnnnnnnnnnnnnnnnnnnnnnnnnnnnnnnnnnnnnnnnnnnnnnnnnnnnnnnnnnnnnnnnnnnnnnnnnnnnnnnnnnnnnnnnnnnnnnnnnnnnnnnnnnnnnnnnnnnnnnnnnnnnnnnnnnnnnnnnnnnnnnnnnnnnnnnnnnnnnnnnnnnnnnnnnnnnnnnnnnnnnnnnnnnnnnnnnnnnnnnnnnnnnnnnnnnnnnnnnnnnnnnnnnnnnnnnnnnnnnnnnnnnnnnnnnnnnnnnnnnnnnnnnnnnnnnnnnnnnnnnnnnnnnnnnnnnnnnnnnnnnnnnnnnnnnnnnnnnnnnnnnnnnnnnnnnnnnnnnnnnnnnnnnnnnnnnnnnnnnnnnnnnnnnnnnnnnnnnnnnnnnnnnnnnnnnnnnnnnnnnnnnnnnnnnnnnnnnnnnnnnnnnnnnnnnnnnnnnnnnnnnnnnnnnnnnnnnnnnnnnnnnnnnnnnnnnnnnnnnnnnnnnnnnnnnnnnnnnnnnnnnnnnnnnnnnnnnnnnnnnnnnnnnnnnnnnnnnnnnnnnnnnnnnnnnnnnnnnnnnnnnnnnnnnnnnnnnnnnnnnnnnnnnnnnnnnnnnnnnnnnnnnnnnnnnnnnnnnnnnnnnnnnnnnnnnnnnnnnnnnnnnnnnnnnnnnnnnnnnnnnnnnnnnnnnnnnnnnnnnnnnnnnnnnnnnnnnnnnnnnnnnnnnnnnnnnnnnnnnnnnnnnnnnnnnnnnnnnnnnnnnnnnnnnnnnnnnnnnnnnnnnnnnnnnnnnnnnnnnnnnnnnnnnnnnnnnnnnnnnnnnnnnnnnnnnnnnnnnnnnnnnnnnnnnnnnnnnnnnnnnnnnnnnnnnnnnnnnnnnnnnnnnnnnnnnnnnnnnnnnnnnnnnnnnnnnnnnnnnnnnnnnnnnnnnnnnnnnnnnnnnnnnnnnnnnnnnnnnnnnnnnnnnnnnnnnnnnnnnnnnnnnnnnnnnnnnnnnnnnnnnnnnnnnnnnnnnnnnnnnnnnnnnnnnnnnnnnnnnnnnnnnnnnnnnnnnnnnnnnnnnnnnnnnnnnnnnnnnngtgaacggtgtgctgacagcgttgcctgtctccgaggccaacgggcggatttcagtgtttttggtgcatccaaggcactgctggtggctgactttggactgcaagtcagctatgactggaattggcgggtagatgtgacgctgcccagcagctatcatggcgcagtgtgcgggctctgtggtaacatggaccgcaaccctaacaatgaccaggccttccctaatggcaccctggctccctccatacccatctggggcagcagctggcgagtcccaggctgggacccactgtgttgggatgtatgtccgggatcctgcccaacgtgccctgaggacaagctggaacagtacaagggccctggcttttgcggacccctggtccctggcgcagggggccccttcgccacctgccatgctcatgtgccacctgagagcttcttcaagggctgtgtcctggacgtctgcatgggtggaggggcccacgacattctttgcaaggcactggcttcctacgtggccgcctgccaggccgctggggttgtcatggaagactggcgggcacaggtcggctgtgngagatcacctgcccagaaaacagccactatgaggtctgcggcccaccctgcccggccagctgtccgtcccctgcgccccctgcgaccccagccgtatgcgagggtccctgtgtggagggctgccagtgcgacgtgggtttcgtgctaagtgctgaccgctgtgttcccctaaacaacggctgcggctgctgggccaacggcacctaccatgaggcgggcagtgagttttgggctgatggcacctgttcccacaggtgccgctgcgggcctgggggcggctcgctggtctgcacacctgccagctgtgggctgggtgaagtgtgtggcctcctgccatccggccagcacggctgccagcccgtcagcacagctgagtgccaggcctggggtgacccccattatgtcactctggatgggcaccgattcgatttccaaggcaactgcgagtacctgctgagtgcaccctgccacggaccaccctccggggctgcgaacttcactgtcactgtagccaatgagcaccggggcagccaggctgtcagctacacccgcagtgtcaccctgcaaatctacaaccacagcctgacactgagtgcccgctggccccggcagctacaggtnnnnnnnnnnnnnnnnnnnnnnnnnnnnnnnnnnnnnnnnnnnnnnnnnnnnnnnnnnnnnnnnnnnnnnnnnnnnnnnnnnnnnnnnnnnnnnnnnnnnnnnnnnnnnnnnnnnnnnnnnnnnnnnnnnnnnnnnnnnnnnnnnnnnnnnnnnnnnnnnnnnnnnnnnnnnnnnnnnnnnnnnnnnnnnnnnnnnnnnnnnnnnnnnnnnnnnnnnnnnnnnnnnnnnnnnnnnnnnnnnnnnnnnnnnnnnnnnnnnnnnnnnnnnnnnnnnnnnnnnnnnnnnnnnnnnnnnnnnnnnnnnnnnnnnnnnnnnnnnnnnnnnnnnnnnnnnnnnnnnnnnnnnnnnnnnnnnnnnnnnnnnnnnnnnnnnnnnnnnnnnnnnnnnnnnnnnnnnnnnnnnnnnnnnnnnnnnnnnnnnnnnnnnnnnnnnnnnnnnnnnnnnnnnnnnnnnnnnnnnnnnnnnnnnnnnnnnnnnnnnnnnnnnnnnnnnnnnnnnnnnnnnnnnnnnnnnnnnnnnnnnnnnnnnnnnnnnnnnnnnnnnnnnnnnnnnnnnnnnnnnnnnnnnnnnnnnnnnnnnnnnnnnnnnnnnnnnnnnnnnnnnnnnnnnnnnnnnnnnnnnnnnnnnnnnnnnnnnnnnnnnnnnnnnnnnnnnnnnnnnnnnnnnnnnnnnnnnnnnnnnnnnnnnnnnnnnnnnnnnnnnnnnnnnnnnnnnnnnnnnnnnnnnnnnnnnnnnnnnnnnnnnnnnnnnnnnnnnnnnnnnnnnnnnnnnnnnnnnnnnnnnnnnnnnnnnnnnnnnnnnnnnnnnnnnnnnnnnnnnnnnnnnnnnnnnnnnnnnnnnnnnnnnnnnnnnnnnnnnnnnnnnnnnnnnnnnnnnnnnnnnnnnnnnnnnnnnnnnnnnnnnnnnnnnnnnnnnnnnnnnnnnnnnnnnnnnnnnnnnnnnnnnnnnnnnnnnnnnnnnnnnnnnnnnnnnnnnnnnnnnnnnnnnnnnnnnnnnnnnnnnnnnnnnnnnnnnnnnnnnnnnnnnnnnnnnnnnnnnnnnnnnnnnnnnnnnnnnnnnnnnnnnnnnnnnnnnnnnnnnnnnnnnnnnnnnnnnnnnnnnnnnnnnnnnnnnnnnnnnnnnnnnnnnnnnnnnnnnnnnnnnnnnnnnnnnnnnnnnnnnnnnnnnnnnnnnnnnnnnnnnnnnnnnnnnnnnnnnnnnnnnnnnnnnnnnnnnnnnnnnnnnnnnnnnnnnnnnnnnnnnnnnnnnnnnnnnnnnnnnnnnnnnnnnnnnnnnnnnnnnnnnnnnnnnnnnnnnnnnnnnnnnnnnnnnnnnnnnnnnnnnnnnnnnnnnnnnnnnnnnnnnnnnnnnnnnnnnnnnnnnnnnnnnnnnnnnnnnnnnnnnnnnnnnnnnnnnnnnnnnnnnnnnnnnnnnnnnnnnnnnnnnnnnnnnnnnnnnnnnnnnnnnnnnnnnnnnnnnnnnnnnnnnnnnnnnnnnnnnnnnnnnnnnnnnnnnnnnnnnnnnnnnnnnnnnnnnnnnnnnnnnnnnnnnnnnnnnnnnnnnnnnnnnnnnnnnnnnnnnnnnnnnnnnnnnnnnnnnnnnnnnnnnnnnnnnnnnnnnnnnnnnnnnnnnnnnnnnnnnnnnnnnnnnnnnnnnnnnnnnnnnnnnnnnnnnnnnnnnnnnnnnnnnnnnnnnnnnnnnnnnnnnnnnnnnnnnnnnnnnnnnnnnnnnnnnnnnnnnnnnnnnnnnnnnnnnnnnnnnnnnnnnaacagtcactacgagctctgcgcggacacctgctccctgggctgcgcggctctcagtgcccctctgcagtgcccagatgagtgtgctgaaggctgccagtgtgacgccggcttcctctacaacggtgaagcctgcgtgcccatccagcagtgcggctgctaccnnnnnnnnnnnnnnnnnnagccggagcagacagtcctcattgacgactgtcggcagcagtgtacgtgccatgtgcgtaaaggcgtggtgtgccaggaacacagctgcaagccggggcaggtgtgccagccctccggaggcgtcctgagctgcatcaccaaa

SEQ ID NO: 19124 - DNA, 87 bp, Macaca Mulatta
agctgtaaaactaccatagaagctatccatggattgatgtctcaggttattaaggataaactgtttaatcaaattaacatctcttaa

SEQ ID NO: 19125 - DNA, 1383 bp, Macaca Mulatta
  misc_feature (1)...(1383): n = A,T,C or G
atgatgttaagaggaaacctgaagcaagtgcgcattgagaaaaacccggcccgccttcgcgccctggagtccgcggcgggcgagagcgagccggcggccgcggcagccatggcgctcgcgcttgcgggggagccggcaccgcccgcggccgcgccgccggaggaccacccggacgaggagctggggttcactatcgacatcaagagtttcctcaagccgggcgagaagacgtacacgcagcgctgtcgcctcttcgtggggaacctgcccaccgacatcacggaggaggagttcaagaggctcttcgaacgctatggcgagcccagcgaagacttcttcannnnnnnnnnnnnnnnnnnnnnnnnnnnnnggaatccagaacactggctgaaattgcaaaagcagagctggatggcactattttgaagagcagacctctacgaattcgctttgctacgcatggagctgccttaactgtcaagaacctttctccagttgtttccaatgagctgctagagcaagcattttctcagtttggtcctgtagagaaagctgttgtggttgtggatgatcgcggtagagccacgggaaaaggttttgtagaatttgcagcaaaacctcctgcacgaaaggctctggaaagatgtggtgatggggcattcttgctaacaacacccctcgtccagtcattgtggaacccatggagcagtttgatgatgaagatggcttgccagagaagctgatgcagaaaactcaacaatatcataagnnnnnnnnnnnnnnnnnnnnnnnnnnnnnnnnnnnnnnnnnnnnnnnnnnnnnnnnnnnnnnnnnnnnnnnnnnnnnnnnnnnnnnnnnnnnnnnnnnnnnnnnnnnnnnnnnnnnnnnnnnnnnnnnnnnnnnnnnnnnnnnnnnnnnnnnnnnnnnnnnnnnnnnnnnnnnnnnnnnnnnnnnnnnnnnnnnnnnnnnnnnnnnnnnnnnnnnnnnnnnnnnnnnnnnnnnnnnnnnnnnnnnnnnnnnnnnnnnnnnnnnnnnnnnnnnnnnnnnnnnnnnnnnnnnnnnnnnnnnnnnnnnnnnnnnnnnnnnnnnnnnnnnnnnnnnnnnnnnnnnnnnnnnnnnnnnnnnnnnnnnnnnnnnnnnnnnnnnnnnnnnnnnnnnnnnnnnnnnnnnnnnnnnnnnnnnnnnnnnnnnnnnnnnnnnnnnnnnnnnnnnagatgcgtttagcccagcacctgctggtaaccaaggtcctcctccaatgatgggtacgaatatgaacaacagagcaactatacctggcccaccaatgggtcctggtcctgccatgggaccagaaggagccgcaaatatgggaactccaatgatgccagataatggatcagt

SEQ ID NO: 19126 - DNA, 140 bp, Macaca Mulatta
aaactctcctccagggtcttcctggatcacaacgccctccccgacaccctgaaagtcacctatgactccttctgcagcaatggagtgaccctcaaggaccagtccagaggtgactgtgacggcgtgcagatcaatgtccc

SEQ ID NO: 19127 - DNA, 766 bp, Macaca Mulatta
ggacagacatgtggagcatcggggtcatctgctacatcctagtcagtggcctttcccccttcatgggagacaacgataatgaaaccttggccaacgttacctcagccacctgggatttcgacgacgaggcattcgatgagatctccgacgatgccaaggatttcatcagcaatctgctgaagaaagatatgaaaaaccgcctggactgcacacagtgccttcagcatccatggctaatgaaagataccaagaacatggaggccaagaaactctccaaggaccggatgaagaagtacatggcaagaaggaaatggcagaaaacgggcaatgctgtgagagccattggaagactgtcctctatggcaatgatctcagggctcagtggcaggaaatcctcaacagggtcaccaaccagcccgctcaatgcagaaaaactagaatctgaagaagatgtgtcccaagctttccttgaggctgttgctgaggaaaagcctcatgtaaaaccctatttctctaagaccattcgtgatttagaagttgtggagggaagtgctgctagatttgactgccagattgaaggatacccggaaccccaagggttgtctggtttcaaagatgaaccagtccatcaagggagttcccggcctccttcccgaatagaacttaccaatgaagggaccgggaaaacctgcctccttttaatttttttaaccttgaagttttttgggtgggggggaatgaaataaatggcccccaaggtatacct

SEQ ID NO: 19128 - DNA, 790 bp, Macaca Mulatta
gggaaagttcagtgctttgtggtccaactggcacccttttgaggtttttgttgtgtgctaaattgctttgtccttaaataggagagactcaaaaacaagatttcaggaaaattgcaacagctggacaatggaactccccctgctttcttctgttttgttcttttaattactatttatagcctcagttaccttctgaattctgaagtgtatatctccatgttactgaaaacgagaaaactcttatttcctgatactccacagtcttgccttcccaggtgattgagaacataaagaatgttacatttattttaccctaaatgatcttttacccctattagctgatctttgtgttttccctcaactttattaattacagttattgtatttttagcatccagtcttacttaaaatgaatatattaaacagctaccagtgttgtgatacctcatccttgaaaggcttaattgatttgtgttttaaacttcaatttttccagcaccgcagaaaatggcgtttataattttttgtgcacacaaaccttggattcccctaataagttgcctattgtttcatagcatgcaagcattggccttttttcatcctacctcattacaggggaaactcctggcttatttataacggatttatagaatcattttccatatccgggggacaaaggccgaaaagaaatgcagaagcttgaatctatgaaattaacccttggaaaccccatataccttgaataaagggcaattctcttgtggcacggctaacttcaagcccaaaaaaa

SEQ ID NO: 19129 - DNA, 761 bp, Macaca Mulatta
  misc_feature (1)...(761): n = A,T,C or G
gggtggaatggaatgtatctctgttttctatcctcttggctcttggtggaattgaattcatcttgtgtcttattcaagtaataaatggagtgcttggaggcatatgtggcttttgctgctctcgccaacagcaatatgactgctaaaagaaccaccccaggacagagccacaatcttcctctatttcattgtaatttatatattttacttgtattcatttgtaaaactttgtactggtgtaacatactcctcatattctacttttacaaaggcctgtaaagactggcatcttcacaggatgtcagtgtttacatttagtaaacttnnnnnnnnnnnnnnnnnnnaatgaggaaacaaaccaccctctgggggtaatttacagactgagtgagagtcctcagtatatctgagataaactctataatgttttggataaaaataacattccaatcactattgtatatatgtgcatgtattttttaaattaaagatgtctagttgctttttatgagaccaagagggagaaaatccgacaacctggaaagatttttgttttccctgcttgtatgatgtttcccattcatacacctataaatctctaacaagaggcccttttaaattgcccttggtgtttctgtggagaaaacaaatatttttactttaaaagcgggaaaggaactgnatttgaagaaattgtttcccaattcccacaattggaaatgccattcacaaaaaccttaccaaatgggcctggccttagt

SEQ ID NO: 19130 - DNA, 949 bp, Macaca Mulatta
  misc_feature (1)...(949): n = A,T,C or G
atgaagttgaaatagatgggaagacatatcaagngtgaaaccaatccgtaatctaaatggacattcaattgggcaatatagaatacatgctggaaaaacagtgccgattgtgaaaggaggggaggcaacaagaatggaggnnaggaaggagaagtatatgcaattgaaacctttggtagtacaggaaaaggtgttgttcatgatgatatggaatgttcacattacatgaaaaattnnnnnnnnnnnnnnnnnnnnnnaggcttccaagaacaaaacacttattaaatgtcatcaatgaaaactttggcacccttgccttctgccgcagatggctggatcgcttgggagaaagtaaatacttgatggctctgaagaatctgtgtgacttgggcattgtagatccatatccaccattatgtgacattaaaggatcatatacagcgcaatttgaacataccatcctgttgcgtccaacatgtaaagaagttgtcagcagaggagatgactattaaacttagtccaaagccacctcaacacctttattttctaagctttgttggaaaacattataccagaattaatttgnnnnnnnnnnnnnnnnnnnnnnnnnnnnnnnnnnnnnnnnnnnnnnnnnnnnnnnnnnnnnnnnnnnnnnnnnnnnnnnnnnnnctaatgtaattaaccaacgaaaaagctttcaggacttttaaatgctaactgtttttccccttcctgtctaggacaatgctataaagctcaaattagttaggaatgacttatacgttttgttttgaatacctaagagatactttttggatatttatattgccatattcttacttgaatgctttgaatgactacatccagttctgcacctataccctctggtgttgctttttaaccttcctggaatccattttctaaaaaataaagacattttcagatctga

SEQ ID NO: 19131 - DNA, 177 bp, Macaca Mulatta
atgctggcctggagggatggtgaactggaagcagaaacgtcataatctctctcccttcttgccatgcaggtgtggatgtgtgggggccgcatggaggacatcccctaataacagggtgggccatatctacaggaagtatgtgccctacaaggtcccggccggagtcagcctggcccg

SEQ ID NO: 19132 - DNA, 594 bp, Macaca Mulatta
ctaagacgctgcctggcagctcttctgcgcagagctacttgggaggctgggcaccaggccccagcaagggcaaccctagccacacacgcaggtccgaggctcttagaattccaggtcggcaccaaagagtatcaggaaagcaagaaaaactgtcagctccacgggcgtcccagatgcatgcccaggacttcaggaaggaacaggtcaggtcatgattggcagagaagctggatcatcaggggccggcagcacctgctgtgatgttttccttaggaaggtgagcttgagggagacaggtttccagccttggccagctggagtatagcctgagactcaatgggaaataagaggtaggaacgtcagtagttcagggccaggtctggaaagtcatgattggctgggggttgtggggagataacagggcccaggcctgactgctgcgggacagctttacagtgacagccagctagggcctgcgagaggcagtgaaacagctcagctccagcaagcccacctttctgatccccagggctgagacccagctgttaaactggctggggtttcatctagtccaaggcctctgggtacaggctt

SEQ ID NO: 19133 - DNA, 1238 bp, Macaca Mulatta
  misc_feature (1)...(1238): n = A,T,C or G
agggccgggcctggccttcatcgcctacccgcgggctgtcacactgatgccagtggccccactctgggctgccctgttcttcttcatgctgttgctgcttggtctcgacagccaggtttgcatggagctctgggacagggagccaggagggcggcagggtgagggctgcaggcaaggaaaggggtggnnnnnnnnnnnnnnnnnnnnnnnnnnnnnnnnnnnnnnnnnnnnnnnnnnnnnnnnnnnnnnnnnnnnnnnnnnnnnnnnnnnnnnnnnnnnnnnnnnnnnnnnnnnnnnnnnnnnnnnnnnnnnnnnnnnnnnnnnnnnnnnnnnnnnnnnnnnnnnnnnnnnnnnnnnnnnnnnnnnnnnnnnnnnnnnnnnnnnnnnnnnnnnnnnnnnnnnnnnnnnnnnnnnnnnnnnnnnnnnnnnnnnnnnnnnnnnnnnnnnnnnnnnnnnnnnnnnnnnnnnnnnnnnnnnnnnnnnnnnnnnnnnnnnnnnnnnnnnnnnnnnnnnnnnnnnnnnnnnnnnnnnnnnnnnnnnnnnnnnnnnnnnnnnnnnnnnnnnnnnnnnnnnnnnnnnnnnnnnnnnnnnnnnnnnnnnnnnnnnnnnnnnnnnnnnnnnnnnnnnnnnnnnnnnnnnnnnnnnnnnnnnnnnnnnnnnnnnnnnnnnnnnnnnnnnnnnnnnnnnnnnnnnnnnnnnnnnnnnnnnnnnnnnnnnnnnnnnnnnnnnnnnnnnnnnnnnnnnnnnnnnnnnnnnnnnnnnnnnnnnnnnnnnnnnnnnnnnnnnnnnnnnnnnnnnnnnnnnnnnnnnnnnnnnnnnnnnnnnnnnnnnnnnnnnnnnnnnnnnnnnnnnnnnnnnnnnnnncctcagggccaagggcaccatggnnagcgctggcagcacctgacccagcccatctggggcctccaccacttggagtaccgagctcaggatgcggatgtcaggggcctgaccaccctgaccccagtgtccgagagcagcaaggtcgtcgtggtggagagtgtcatgtgacagcccagctcacatcaccagctcacctctggtagccatagcagcccctgcttcagccccacccaccccatccctccagggggcctgcctttccctgacacttttggggtctgcctggaggaggaggggagaaagcaccatgagtgctcactaaaacaactttttccatttttaataaaacgccaaaaatatcacagcccaccaaa

SEQ ID NO: 19134 - DNA, 3216 bp, Macaca Mulatta
  misc_feature (1)...(3216): n = A,T,C or G
agagctgaagtattgataacaccaaggaaatctatcacgatttgaaaagataagcaaaagtttgatttccagacactacagaannnnnnnnnnnnnnnnnnnnnnnnnnnnnnnnnnnnnnnnnnnnnnnnnnnnnnnnnnnnnnnnnnnnnnnnnnnnnnnnnnnnnnnnnnnnnnnnnnnnnnnnnnnnnnnnnnnnnnnnnnnnnnnnnnnnnnnnnnnnnnnnnnnnnnnnnnnnnnnnnnnnnnnnnnnnnnnnnnnnnnnnnnnnnnnnnnnnnnnnnnnnnnnnnnnnnnnnnnnnnnnnnnnnnnnnnnnnnnnnnnnnnnnnnnnnnnnnnnnnnnnnnnnnnnnnnnnnnnnnnnnnnnnnnnnnnnnnnnnnnnnnnnnnnnnnnnnnnnnnnnnnnnnnnnnnnnnnnnnnnnnnnnnnnnnnnnnnnnnnnnnnnnnnnnnnnnnnnnnnnnnnnnnnnnnnnnnnnnnnnnnnnnnnnnnnnnnnnnnnnnnnnnnnnnnnnnnnnnnnnnnnnnnnnnnnnnnnnnnnnnnnnnnnnnnnnnnnnnnnnnnnnnnnnnnnnnnnnnnnnnnnnnnnnnnnnnnnnnnnnnnnnnnnnnnnnnnnnnnnnnnnnnnnnnnnnnnnnnnnnnnnnnnnnnnnnnnnnnnnnnnnnnnnnnnnnnnnnnnnnnnnnnnnnnnnnnnnnnnnnnnnnnnnnnnnnnnnnnnnnnnnnnnnnnnnnnnnnnnnnnngagccaacggactgaagtcctgtgtcattgtgatccgggtcctgagggacctgtgcactcgcgtgcccacctggggtcccctccgaggctgctctcgagctcctgtgtgagaaatccattggcacagccaacagaccgatgggtgctgacgaggccctgcgaagagtgctggagtgcctggcgtcgggcatcgtgatgccagncagatggttctggcatttatgacccttgtgaaaaagaagccactgatgctattgggcatctagacagacagcaacgggaagatatcacacagnnnnnnnnnnnnnnnnnnnnnnnnnnnnnnnnnnnnnnnnnnnnnnnnnnnnnnnnnnnnnnnnnnnnnnnnnnnnnnnnnnnnnnnnnnnnnnnnnnnnnnnnnnnnnnnnnnnnnnnnnnnnnnnnnnnnnnnnnnnnnnnnnnnnnnnnnnnnnnnnnnnnnnnnnnnnnnnnnnnnnnnnnnnnnnnnnnnnnnnnnnnnnnnnnnnnnnnnnnnnnnnnnnnnnnnnnnnnnnnnnnnnnnnnnnnnnnnnnnnnnnnnnnnnnnnnnnnnnnnnnnnnnnnnnnnnnnnnnnnnnnnnnnnnnnnnnnnnnnnnnnnnnnnnnnnnnnnnnnnnnnnnnnnnnnnnnnnnnnnnnnnnnnnnnnnnnnnnnnnnnnnnnnnnnnnnnnnnnnnnnnnnnnnnnnnnnnnnnnnnnnnnnnnnnnnnnnnnnnnnnnnatgggcttgccgacgggtgccgaaggcagggactctagcaagggggaggactcggctgaggagactgaggcgaagccagctgtggtggcccccgccccagtggtagaagctgtctcaacccctagtgcggcctttccctcagatgccactgccgaggcaggggccaatcctgacaaagcacggcaagaacccagtcatggagctgaacgagaaaaggcgggggctcaagtacgagctcatctccgagaccggtggcagccacgacaagcgcttcgtcatggaggtnaggttgaagtggatggacagaagttccaaggtgctggttccaacaaaaaggtggcgaaggcgtacgctgcccttgctgccctagaaaagcttttccctgacacccctctcgcccttgatgccaacaaaaagaagagagccccagtacccgtcagagggggaccgaaatttgctgctaagnagccacataaccctggcttcggcatgggaggccccatgcacaatgaagtgcccccaccccccaaccttcgagggcggggaagaggcgggaacatccggggacgagggcgcgggcgaggatttggtggcgccaaccacggaggctacatgaatgcnnnnnnnnnnnnnnnnnnnnnnnnnnnnnnnnnnnnnnnnnnnnnnnnnnnnnnnngtgactttttcacagactgctacggcgatacatgattttgggtcttcctagagcgtctaaaagtattgcacacaaaatcaactttttactccaatttcctccaactccaaaacccaaagtgtccgtgctgtgtccctgtgcttcactgggtttctcaaccgtggcttttcaccgcagcttgtctgaaactcttagcctgcagaatttaagacaatggcagtttttatcgtgatttgcctttgaacttggtcctattgaagttcacactaagtggaaaacaattttttcagagaatgtatttttgtgcagaattgcacagaattctagagacagcgttgttcggcatcaaggcaaaagcccacctttgctttttatggaaagcattactttatttaaagagacagacattgacgcattttaatctacctttgtcttaatttacagcaggttttgtatgaatttttaaccttttaacaaactcccaaatctggttgatgcctttgacagtgatgaaaagcgatttcaccannnnnnnnnnnnnnnnnnnnnnnnnnnnnnnnnnnnnnnnnnnnnnnnnnnnnnnnnnnnnnnnnnnnnnnnnnnnnnnnnnnnnnnnnnnnnnnnnnnnnnnnnnnnnnnnnnnnnnnnnnnnnnnnnnnnnnnnnnnnnnnnnnnnnnnnnnnnnnnnnnnnnnnnnnnnnnnnnnnnnnnnnnnnnnnnnnnnnnnnnnnnnnnnnnnnnnnnnnnnnnnnnnnnnnnnnnnnnnnnnnnnnnnnnnnnnnnnnnnnnnnnnnnnnnnnnnnnnnnnnnnnnnnnnnnnnnnnnnnnnnnnnnnnnnnagtttattgggactttaaaagtaatcaaggagaaagaaccgcgatgttccctgcttcttcagtaaagggctggtttttccttgggcagaggtggtgctgctgcatgtgcagctgccacagactccaaaggcatagaagtttctgtctacaaacacacacacagtcattctggctctttactgaggcccccgttttctggcaggtgtcctccttggaa

SEQ ID NO: 19135 - DNA, 139 bp, Macaca Mulatta
  misc_feature (1)...(139): n = A,T,C or G
gcccatgcaggtgctgttttccggtgaggccacccaccgcaagtactattccactacccacggtgctctgctctctggccagcgcgaggctgcccgcctcatcgagatgtaccgagacctcttccagcangggacctga

SEQ ID NO: 19136 - DNA, 639 bp, Macaca Mulatta
taggctattgtaggttacactgtgagatcttcagtgattcagcttcgacataagagccacctaggtgtttcattacagactttttaaaccagtatcgtttttcagagctttgctaattcattgtatttttgaaagttttaaaacttcttttaatgtggagagttaatccagttcagcaaggtggttctggaaataccaagggtgaataatagccaagacgcttaggaaaaataggagtatttgctctagcagctgtcaaggcctaactaatataaagctaaagttaaccctgttacaggaatagggatagaataacaggcatttgaagactcttcagagacagcgttggagatcagtgttggaggagagggactttttcataaaggtgtgaaacagccattggaatcataaatatagcaatacatccatgacccaactatatatcaagattttaaataaaggcagtattactgattgtttcttttgcctcaagcatcagtaaggcttggtgggccacaatgttgacatcctatcctggatgcccatgtgtccaacgatctctgttcacacaagagaccctggagtgtttactactgcttcggtgatgtgggtatcagtatagtatgcatatacttcaca

SEQ ID NO: 19137 - DNA, 744 bp, Macaca Mulatta
  misc_feature (1)...(744): n = A,T,C or G
gggggcggaccggcttccggttccggtggggcgccgggtttagagctctgaaaggcccgcgatgcctctacacaagtatcccgtgtggctctggaagcggctgcggctgcgagagggcatctgtgcccgcctgcctggccactacctgcgctccctggaggaggagcggacgcccactcccgtgcactataggcctcatggggtcaagttcaagatcaaccccaagaacgggcagcgggagcgtgtggaggacgtgcctatccccatctactttccccccgagtcccagcgggggttgtggggcggcgagggctggatcctgggccaaagatacgccaacgacgacaagctctccaagaggctgaagaaggtgtggaagccacagctgtttgagcgagagctctacagtgagatcctggacaagaagttcacggtgaccgtgaccatgcggaccctggacctcatcgatgaggcttacgggttcgactttttcattctcaagaccccgaaggaagacctgtgctccaagttccgggatggacctgaaacgaagggatgccggctgccggctttgcccggcagggaacccccggctggccccccgagggaacccctaagcggcgggggcggcccctcttgcgacacaggtaccaggggatttgtgcccttcccccaaacgaaggaaggcgcccacccgcggccggggcccccacgggttggnagaggaggggcctcactgagagt

SEQ ID NO: 19138 - DNA, 975 bp, Macaca Mulatta
  misc_feature (1)...(975): n = A,T,C or G
ctctttgaggccatactgaatgactaggtggtctaccctacctggctccatgaagatgccacagggatcctcaaatctttcatgaccaagaaccccaccatgcgcttgggcagcctgactcagggaggtgagcacgccatcttgagacatccgttttttaaggaaatcgactgggcccagctgaaccatcgccaactggaaccacctttcagacccagaatcaaatcccgagaagatgtcagtaattttgaccctgacttcataaaggaagagccagttttaactccaattgatgagggacatcttccaatgattaaccaggatgagtttagaaacttttcctacgtgtcttcagaattgcaaccgtagccttatggggagtgagagagagggcacaagaacccgaagggaatagagattttctaggaatttcctctatgggaccttcccagcatcagccttagaacaagaaccttaccttcaaggagcaagtggagaactctgtgaaggatggaactttaagatatcaactatttcgagtccagagggagccgtggcagtagaaatcgttgacactgaaatgagattttatgaagtatactgctccacctatgagcatctgtggctatgggcttgggatgttaacaggagccaaaaggagggaaagtgtgaagaataaagtagatctgagaaattctgagccaatcaggcttcttaattcaagacacaaaccaagactttctgtcaactgtgctgtgctcttctttaagccaatgaaccccaattcctggcagtctacaagaagtctcttaatgctaatgaagaatttaaaggtctttttaagaaaatgaagggctttccaaatagaatgatttactctgaagaaagaaaaaatggtatctctgaaactcacaacctaaagcccaatcttgaaaatatgttgtgcnaccagacaactgcttcagcttcttctct

SEQ ID NO: 19139 - DNA, 3476 bp, Macaca Mulatta
  misc_feature (1)...(3476): n = A,T,C or G
tggagcccctgcgggtgctggagctgtacagcggcgtgggcggcatgcaccacgcgctgagagnnnnnnnnnnnnnnnnnnnnnnnnnnnnnnnnnnnnnnnnnnnnnnnnnnnnnnnnnnnnnnnnnnnnnnnnnnnnnnnnnnnnnnnnnnnnnnnnnnnnnnnnnnnnnnnnnnnnnnnnnnnnnnnnnnnnnnnnnnnnnnnnnnnnnnnnnnnnnnnnnnnnnnnnnnnnnnnnnnnnnnnnnnnnnnnnnnnnnnnnnnnnnnnnnnnnnnnnnnnnnnnnnnnnnnnnnnnnnnnnnnnnnnnnnnnnnnnnnagattacaaaaattaccaaagtatattcttttggaaaatgttaaaggttttgaagtatcttctacaannnnnnnnnnnnnnnnnnnnnnnnnnnnnnnnnnnnnnnnnnnnnnnnnnnnnnnnnnnnnnnnnnnnnnnnnnnnnnnnnnnnnnnnnnnnnnnnnnnnnnnnnnnnnnnnnnnnnnnnnnnnnnnnnnnnnnnnnnnnnnnnnnnnnnnnnnnnnnnnnnnnnnnnnnnnnnnnnnnnnnnnnnnnnnnnnnnnnnnnnnnnnnnnnnnnnnnnnnnnnnnnnnnnnnnnnnnnnnnnnnnnnnnnnnnnnnnnnnnnnnnnnnnnnnnnnnnnnnnnnnnnnnnnnnnnnnnnnnnnnnnnnnnnnnnnnnnnnnnnnnnnnnnnnnnnnnnnnnnnnnnnnnnnnnnnnnnnnnnnnnnnnnnnnnnnnnnnnnnnnnnnnnnnnnnnnnnnnnnnnnnnnnnnnnnnnnnnnnnnnnnnnnnnnnnnnnnnnnnnnnnnnnnnnnnnnnnnnnnnnnnnnnnnnnnnnnnnnnnnnnnnnnnnnnnnnnnnnnnnnnnnnnnnnnnnnnnnnnnnnnnnnnnnnnnnnnnnnnnnnnnnnnnnnnnnnnnnnnnnnnnnnnnnnnnnnnnnnnnnnnnnnnnnnnnnnnnnnnnnnnnnnnnnnnnnnnnnnnnnnnnnnnnnnnnnnnnnnnnnnnnnnnnnnnnnnnnnnnnnnnnnnnnnnnnnnnnnnnnnnnnnnnnnnnnnnnnnnnnnnnnnnnnnnnnnnnnnnnnnnnnnnnnnnnnnnnnnnnnnnnnnnnnnnnnnnnnnnnnnnnnnnnnnnnnnnnnnnnnnnnnnnnnnnnnnnnnnnnnnnnnnnnnnnnnnnnnnnnnnnnnnnnnnnnnnnnnnnnnnnnnnnnnnnnnnnnnnnnnnnnnnnnnnnnnnnnnnnnnnnnnnnnnnnnnnnnnnnnnnnnnnnnnnnnnnnnnnnnnnnnnnnnnnnnnnnnnnnnnnnnnnnnnnnnnnnnnnnnnnnnnnnnnnnnnnnnnnnnnnnnnnnnnnnnnnnnnnnnnnnnnnnnnnnnnnnnnnnnnnnnnnnnnnnnnnnnnnnnnnnnnnnnnnnnnnnnnnnnnnnnnnnnnnnnnnnnnnnnnnnnnnnnnnnnnnnnnnnnnnnnnnnnnnnnnnnnnnnnnnnnnnnnnnnnnnnnnnnnnnnnnnnnnnnnnnnnnnnnnnnnnnnnnnnnnnnnnnnnnnnnnnnnnnnnnnnnnnnnnnnnnnnnnnnnnnnnnnnnnnnnnnnnnnnnnnnnnnnnnnnnnnnnnnnnnnnnnnnnnnnnnnnnnnnnnnnnnnnnnnnnnnnnnnnnnnnnnnnnnnnnnnnnnnnnnnnnnnnnnnnnnnnnnnnnnnnnnnnnnnnnnnnnnnnnnnnnnnnnnnnnnnnnnnnnnnnnnnnnnnnnnnnnnnnnnnnnnnnnnnnnnnnnnnnnnnnnnnnnnnnnnnnnnnnnnnnnnnnnnnnnnnnnnnnnnnnnnnnnnnnnnnnnnnnnnnnnnnnnnnnnnnnnnnnnnnnnnnnnnnnnnnnnnnnnnnnnnnnnnnnnnnnnnnnnnnnnnnnnnnnnnnnnnnnnnnnnnnnnnnnnnnnnnnnnnnnnnnnnnnnnnnnnnnnnnnnnnnnnnnnnnnnnnnnnnnnnnnnnnnnnnnnnnnnnnnnnnnnnnnnnnnnnnnnnnnnnnnnnnnnnnnnnnnnnnnnnnnnnnnnnnnnnnnnnnnnnnnnnnnnnnnnnnnnnnnnnnnnnnnnnnnnnnnnnnnnnnnnnnnnnnnnnnnnnnnnnnnnnnnnnnnnnnnnnnnnnnnnnnnnnnnnnnnnnnnnnnnnnnnnnnnnnnnnnnnnnnnnnnnnnnnnnnnnnnnnnnnnnnnnnnnnnnnnnnnnnnnnnnnnnnnnnnnnnnnnnnnnnnnnnnnnnnnnnnnnnnnnnnnnnnnnnnnnnnnnnnnnnnnnnnnnnnnnnnnnnnnnnnnnnnnnnnnnnnnnnnnnnnnnnnnnnnnnnnnnnnnnnnnnnnnnnnnnnnnnnnnnnnnnnnnnnnnnnnnnnnnnnnnnnnnnnnnnnnnnnnnnnnnnnnnnnnnnnnnnnnnnnnnnnnnnnnnnnnnnnnnnnnnnnnnnnnnnnnnnnnnnnnnnnnnnnnnnnnnnnnnnnnnnnnnnnnnnnnnnnnnnnnnnnnnnnnnnnnnnnnnnnnnnnnnnnnnnnnnnnnnnnnnnnnnnnnnnnnnnnnnnnnnnnnnnnnnnnnnnnnnnnnnnnnnnnnnnnnnnnnnnnnnnnnnnnnnnnnnnnnnnnnnnnnnnnnnnnnnnnnnnnnnnnnnnnnnnnnnnnnnnnnnnnnnnnnnnnnnnnnnnnnnnnnnnnnnnnnnnnnnnnnnnnnnnnnnnnnnnnnnnnnnnnnnnnnnnnnnnnnnnnnnnnnnnnnnnnnnnnnnnnnnnnnnnnnnnnnnnnnnnnnnnnnnnnnnnnnnnnnnnnnnnnnnnnnnnnnnnnnnnnnnnnnnnnnnnnnnnnnnnnnnnnnnnnnnnnnnnnnnnnnnnnnnnnnnnnnnnnnnnnnnnnnnnnnnnnnnnnnnnnnnnnnnnnnnnnnnnnnnnnnnnnnnnnnnnnnnnnnnnnnnnnnnnnnnnnnnnnnnnnnnnnnnnnnnnnnnnnnnnnnnnnnnnnnnnnnnnnnnnnnnnnnnnnnnnnnnnnnnnnnnnnnnnnnnnnnnnnnnnnnnnnnnnnnnnnnnnnnnnnnnnnnnnnnnnnnnnnnnnnnnnnnnnnnnnnnnnnnnnnnnnnnnnnnnnnnnnnnnnnnnnnnnnnnnnnnnnnnnnnnnnnnnnnnnnnnnnnnnnnnnnnnnnnnnnnnnnnnnnnnnnnnnnnnnnnnnnnnnnnnnnnnnnnnnnnnnnnnnnnnnnnnnnnnnnnnnnnnnnnnnnnnnnnnnccttaattcagaattgaaaatatacagtaacaagcataaaattcacatcttaatgaagatgtatctaccagtgtcattcaattagcagatgtatatgtatgcataattaatttggaaaatgttattttatggaatatctgctatatgcttttggtaataatgctatatataaaatttgcactggaaattctttttcctgat

SEQ ID NO: 19140 - DNA, 360 bp, Macaca Mulatta
ccagccactaactggggcgtacacagtaaccctggatggacgagggccctcgagggtcatctccaaacatgacctgggccacttcatgctgcactgcctcaccactgatgagtacgacggccacagcacctacccctcccaccagtaccagtagcactctgtccccatctgggagggtggcattctgggacatgaggaacagaggaaaggggcaataaatgttgagccaagagcttcaaattattctagagaaaccgactctgtgactcctctctctgcctctgtctgagtattttggtgtgtctgcctgcctctgtgtaagatttgcttagtatgcattcattcatttgttcagtaaca

SEQ ID NO: 19141 - DNA, 247 bp, Macaca Mulatta
agctcacagctattgtggtgggaaaggagggtggttggtggatgtcacagcttgggctttatctaccccagcagtgggaactccacagcccccgggctacttaacagcaagacagtccggagctgtagcagacctgattgagcctttgcagcagctaggagcatggcctagggtgggaggcaccattgtccagcggctgagtttcccagggaccttggagatacccgcagccctcattgcaggggaa

SEQ ID NO: 19142 - DNA, 602 bp, Macaca Mulatta
  misc_feature (1)...(602): n = A,T,C or G
cacagggtttcacaaactggactaaacgagattttaaccagtttattaaagctaatgagaagtatggaagagannnnnnnnnnnnnnnnnnnnnnnnnnnnnnnnnnnnnnnnnnnnnnnnnnnnnnnnnnnnnnnnnnnnnnnnnnnnnnnnnnnnnnnnnnnnnnnnnnnnnnnnnnnnnnnnnnnnnnnnnnnnnnnnnnnnnnnnnnnnnnnnnnnnnnnnnnnnnnnnnnnnnnnnnnnnnnnnnnnnnnnnnnnnnnnnnnnnnnnnnnnnnnnnnnnnnnnnnnnnnnnnnnnnnnnnnnnnnnnnnnnnnnnnnnnnnnnnnnnnnnnnnnnnnnnnnnnnnnnnnnnnnnnnnnnnnnnnnnnnnnnnnnnnnnnnnnnnnnnnnnnnnnnnnnnnnnnnnnnnnnnnnnnnnnnnnnnnnnnnnnnnnnnnnnnnnnnnnnnnnnnnnnnnnnnnnnnggaattccagagacgctgtaatactctgatttcattgatnnnnnnnnnnnnnnnnnnnnnnnnnnnnnnnnnnnnnnnnnnnnnnnnnnacgggcaactaaaactccaatggtaaaattttcagcattttccta

SEQ ID NO: 19143 - DNA, 3710 bp, Macaca Mulatta
  misc_feature (1)...(3710): n = A,T,C or G
gtggcaccgcgtggccgtggctgtgaagggccagtctgtcaccctcattgttgactgcaagaagcgagtcacccggccactcccacgaagtgctcgtccagtattggacacccatggagtgataatctttggtgcccgtatcctggatgaagaagtctttgagnnnnnnnnnnnnnnnnnnnattgtcccaggggtccaagcagcctatgaatcatgtgaacagaaggagctggaatgcgaggggggccagagggcaagaccccaaaaccaacagcctcacagagcccagagatctccagagcagcaaccatcaagacttcataggccacaaaatcaggaaccccagcgccaggnnnnnnnnnnnnnnnnnnnnnnnnnnnnnnnnnnnnnnnnnnnnnnnnnnnnnnnnnnnnnnnnnnnnnnnnnnnnnnnnnnnnnnnnnnnnnnnnnnnnnnnnnnnnnnnnnnnnnnnnnnnnnnnnnnnnnnnnnnnnnnnnnnnnnnnnnnnnnnnnnnnnnnnnnnnnnnnnnnnnnnnnnnnnnnnnnnnnnnnnnnnnnnnnnnnnnnnnnnnnnnnnnnnnnnnnnnnnnnnnnnnnnnnnnnnnnnnnnnnnnnnnnnnnnnnnnnnnnnnnnnnnnnnnnnnnnnnnnnnnnnnnnnnnnnnnnnnnnnnnnnnnnnnnnnnnnnnnnnnnnnnnnnnnnnnnnnnnnnnnnnnnnnnnnnnnnnnnnnnnnnnnnnnnnnnnnnnnnnnnnnnnnnnnnnnnnnnnnnnnnnnnnnnnnnnnnnnnnnnnnnnnnnnnnnnnnnnnnnnnnnnnnnnnnnnnnnnnnnnnnnnnnnnnnnnnnnnnnnnnnnnnnnnnnnnnnnnnnnnnnnnnnnnnnnnnnnnnnnnnnnnnnnnnnnnnnnnnnnnnnnnnnnnnnnnnnnnnnnnnnnnnnnnnnnnnnnnnnnnnnnnnnnnnnnnnnnnnnnnnnnnnnnnnnnnnnnnnnnnnnnnnnnnnnnnnnnnnnnnnnnnnnnnnnnnnnnnnnnnnnnnnnnnnnnnnnnnnnnnnnnnnnnnnnnnnnnnnnnnnnnnnnnnnnnnnnnnnnnnnnnnnnnnnnnnnnnnnnnnnnnnnnnnnnnnnnnnnnnnnnnnnnnnnnnnnnnnnnnnnnnnnnnnnnnnnnnnnnnnnnnnnnnnnnnnnnnnnnnnnnnnnnnnnnnnnnnnnnnnnnnnnnnnnnnnnnnnnnnnnnnnnnnnnnnnnnnnnnnnnnnnnnnnnnnnnnnnnnnnnnnnnnnnnnnnnnnnnnnnnnnnnnnnnnnnnnnnnnnnnnnnnnnnnnnnnnnnnnnnnnnnnnnnnnnnnnnnnnnnnnnnnnnnnnnnnnnnnnnnnnnnnnnnnnnnnnnnnnnnnnnnnnnnnnnnnnnnnnnnnnnnnnnnnnnnnnnnnnnnnnnnnnnnnnnnnnnnnnnnnnnnnnnnnnnnnnnnnnnnnnnnnnnnnnnnnnnnnnnnnnnnnnnnnnnnnnnnnnnnnnnnnnnnnnnnnnnnnnnnnnnnnnnnnnnnnnnnnnnnnnnnnnnnnnnnnnnnnnnnnnnnnnnnnnnnnnnnnnnnnnnnnnnnnnnnnnnnnnnnnnnnnnnnnnnnnnnnnnnnnnnnnnnnnnnnnnnnnnnnnnnnnnnnnnnnnnnnnnnnnnnnnnnnnnnnnnnnnnnnnnnnnnnnnnnnnnnnnnnnnnnnnnnnnnnnnnnnnnnnnnnnnnnnnnnnnnnnnnnnnnnnnnnnnnnnnnnnnnnnnnnnnnnnnnnnnnnnnnnnnnnnnnnnnnnnnnnnnnnnnnnnnnnnnnnnnnnnnnnnnnnnnnnnnnnnnnnnnnnnnnnnnnnnnnnnnnnnnnnnnnnnnnnnnnnnnnnnnnnnnnnnnnnnnnnnnnnnnnnnnnnnnnnnnnnnnnnnnnnnnnnnnnnnnnnnnnnnnnnnnnnnnnnnnnnnnnnnnnnnnnnnnnnnnnnnnnnnnnnnnnnnnnnnnnnnnnnnnnnnnnnnnnnnnnnnnnnnnnnnnnnnnnnnnnnnnnnnnnnnnnnnnnnnnnnnnnnnnnnnnnnnnnnnnnnnnnnnnnnnnnnnnnnnnnnnnnnnnnnnnnnnnnnnnnnnnnnnnnnnnnnnnnnnnnnnnnnnnnnnnnnnnnnnnnnnnnnnnnnnnnnnnnnnnnnnnnnnnnnnnnnnnnnnnnnnnnnnnnnnnnnnnnnnnnnnnnnnnnnnnnnnnnnnnnnnnnnnnnnnnnnnnnnnnnnnnnnnnnnnnnnnnnnnnnnnnnnnnnnnnnnnnnnnnnnnnnnnnnnnnnnnnnnnnnnnnnnnnnnnnnnnnnnnnnnnnnnnnnnnnnnnnnnnnnnnnnnnnnnnnnnnnnnnnnnnnnnnnnnnnnnnnnnnnnnnnnnnnnnnnnnnnnnnnnnnnnnnnnnnnnnnnnnnnnnnnnnnnnnnnnnnnnnnnnnnnnnnnnnnnnnnnnnnnnnnnnnnnnnnnnnnnnnnnnnnnnnnnnnnnnnnnnnnnnnnnnnnnnnnnnnnnnnnnnnnnnnnnnnnnnnnnnnnnnnnnnnnnnnnnnnnnnnnnnnnnnnnnnnnnnnnnnnnnnnnnnnnnnnnnnnnnnnnnnnnnnnnnnnnnnnnnnnnnnnnnnnnnnnnnnnnnnnnnnnnnnnnnnnnnnnnnnnnnnnnnnnnnnnnnnnnnnnnnnnnnnnnnnnnnnnnnnnnnnnnnnnnnnnnnnnnnnnnnnnnnnnnnnnnnnnnnnnnnnnnnnnnnnnnnnnnnnnnnnnnnnnnnnnnnnnnnnnnnnnnnnnnnnnnnnnnnnnnnnnnnnnnnnnnnnnnnnnnnnnnnnnnnnnnnnnnnnnnnnnnnnnnnnnnnnnnnnnnnnnnnnnnnnnnnnnnnnnnnnnnnnnnnnnnnnnnnnnnnnnnnnnnnnnnnnnnnnnnnnnnnnnnnnnnnnnnnnnnnnnnnnnnnnnnnnnnnnnnnnnnnnnnnnnnnnnnnnnnnnnnnnnnnnnnnnnnnnnnnnnnnnnnnnnnnnnnnnnnnnnnnnnnnnnnnnnnnnnnnnnnnnnnnnnnnnnnnnnnnnnnnnnnnnnnnnnnnnnnnnnnnnnnnnnnnnnnnnnnnnnnnnnnnnnnnnnnnnnnnnnnnnnnnnnnnnnnnnnnnnnnnnnnnnnnnnnnnnnnnnnnnnnnnnnnnnnnnnnnnnnnnnnnnnnnnnnnnnnnnnnnnnnnnngggagatcctggtgctgtaggtgccccggggaagacaggcccggtgggtcctgccggtccagcagggaaacctggccctgatggtctgagggggctcccaggctcagtggngggtcagcaaggccgacctggagctacaggccaggctgggcccccaggtcctgtggngggacccccagggctgcctggtctccggggcgatgctggagccaagggagagaaggnagggccacccaggtctcattggactgattgggcccccgggtgagcagggagagaagggagatcggggacttcctgggcctcagggctcccctgggcagaagggcgagannnnnnnnnnnnnnnnnnnnnnnnnnnnnnnnnnnnnnnnnnnnnnnnnnnnnnnnnnnnnnnnnnnnnnnnnnnnnnnnnnnnnnnnnnnnggcccagccggacccaagggagagaagggtgtgcagggccctccaggacacccg

SEQ ID NO: 19144 - DNA, 1347 bp, Macaca Mulatta
  misc_feature (1)...(1347): n = A,T,C or G
ccgctcgggcactccgcctgcacccggggacagcggggagatggcttctctttaaatctaggtcctattgtgtcttgagggaggactttaagaatgaccgagagctatttaaagacgcaatcccaggttccttgcactccatggcagcctctccttgcaccttctcctgcctctccacactccaggtgccctcaggtttgtgtctcccccgccgcatcgtggtgggtgtcacagaccctctgcagcccctggctgccctggactgtgcagggatgcctgactccagggaaacctgagagcaagaaggttaatggactgtgtattgtaacttgatcctcacgagctgtgagcacagtcgaggtgtgaggacacggcctcctgttggagtcgcattttctccatcagggcacatgggcggcttcctcaagcccaaaggagctcccaggcacatgggggccgccggtaacaggggcagccggccaaaggcccctttccagtcacagcactgaagttgcaacttttttcttgtaattgttttgctactaagataatttcagaagttcagtctattttttcagcggatactgccgccaccaagaatccaaaacctatttttgacttggagagacttgcttttgttggttccgcccatggagacgacgacagtgtttctgtataataaagtgtctgccggctcacgggccaggatcctctcggtgggatgggccccatagacaggaggccctgcaggcccgtgcgggccactgtctgctgccacctgccagggtggcagagtgannnnnnnnnnnnnnnnnnnnnnnnnnnnnnnnnnnnnnnnnnnnnnnnnnnnnnnnnnnnnnnnnnnnnnnnnnnnnnnnnnnnnnnnnnnnnnnnnnnnnnnnnnnnnnnnnnnnnnnnnnnnnnnnnnnnnnnnnnnnnnnnnnnnnnnnnnnnnnnnnnnnnnnnnnnnnnnnnnnnnnnnnnnnnnnnnnnnnnnnnnnnnnnnnnnnnnnnnnnnnnnnnnnnnnnnnnnnnnnnnnnnnnnnnnnnnnnnnnnnnnnnnnnnnnnnnnnnnnnnnnnnnnnnnnnnnnnnnnnnnnnnncagggctgctatggggcatccagggctgtgggggtctggaggaggggacatgaggtgagaggtatcctggccgagggcggggggcagcgggggtctccctccggacctacctcagggagctgagcgtgcaggcgctccagggcaggcctgggacagagtcaaggcccagagaataaaggtagctaatctcataataatatttttattagaatgttctgatgataaaaataaaacttgttttctt

SEQ ID NO: 19145 - DNA, 1296 bp, Macaca Mulatta
  misc_feature (1)...(1296): n = A,T,C or G
atgaacaagctgagtggaggcggcgggcgcaggactcgggtggaagggggccagctggggggcgaggagtggacccgccacgggagctttgtcaataagcccacgcggggctggctgcatcccaacgacaaagtcatgggacccggggtttcctacttggttcgnnnnnnnnnnnnnnnnnnnnnnnnnnnnnnnnnnnnnnnnnnnnnnnnnnnnnnnnnnnnnnnnnnnnnnnnnnnnnnnnnnnnnnnnnnnnnnnnnnnnnnnnnnnnnnnnnnnnnnnnnnnnnnnnnnnnnnnnnnnnnnnnnnnnnnnnnnnnnnnnnnnnnnnnnnnnnnnnnnnnnnnnnnnnnnnnnnnnnnnnnnnnnnnnnnnnnnnnnnnnnnnnnnnnnnnnnnnnnnnnnnnnnnnnnnnnnnnnnnnnnnnnnnnnnnnnnnnnnnnnnnnnnnnnnnnnnnnnnnnnnnnnnnnnnnnnnnnnnnnnnnnnnnnnnnnnnnnnnnnnnnnnnnnnnnnnnnnnnnnagcctgccacattctggagtgtcccgaagggcttgcccaggatgtcatcagcaccattggccaggcctttgagttgcgcttcaaacaatacctcaggaacccacccaaactggtcacccctcatgacagnnnnnnnnnnnnnnnnnnnnnnnnnnnnnnnnnnnnnnnnnnnnnnnnnnnnnnnnnnnnnnnnnnnnnnnnnnnnnnnnnnnnnnnnnnnnnnnnnnnnnnnnnnnnnnnnnnnnnnnnnnnnnnnnnnnnnnnnnnnnnnnnnnnnnnnnnnnnnnnnnnnnnnnnnnnnnnnnnnnnnnnnnnnnnnnnnnnnnnnnnnnnnnnnnnnnnnnnnnnnnnnnnnnnnnnnnnnnnnnnnnnnnnnnnnnnnnnnnnnnnnnnnnnnnnnnnnnnnnnnnnnnnnnnnnnnnnnnnnnnnnnnnnnnnnnnnnnnnnnnnnnnnnnnnnnnnnnnnnnnnnnnnnnnnnnnnnnnnnnnnnnnnnnnnnnnnnnnnnnnnnnnnnnnnnnnnnnnnnnnnnnnagcccttggaggatgctcttcgggtgcctccacctccccagtcagtgtccatggttgagcagctccgaggggagccctggttccatgggaagctgagtcggcgggaggctgaggcactgctgcagctcaacggggacttcctggtgcgggagagcacgaccacacctggccagtatgtgctcactggcttgcagagtgggcagcccaagcatctgctactggtggaccctgagggtgtgg

SEQ ID NO: 19146 - DNA, 8039 bp, Macaca Mulatta
  misc_feature (1)...(8039): n = A,T,C or G
gggaccgtgacctcagacccctatgactttgccaactcatgggctctgagcagtggagaacagtggtgtgaacgggcatctcctcccagcagctcgtgcaacatctcctctggggaagtgcagaaggnnnnnnnnnnnnnnnnnnnnnnnnnnnnnnnnnnnnnnnnnnnnnnnnnnnnnnnnnnnnnnnnnnnnnnnnnnnnnnnnnnnnnnnnnnnnnnnnnnnnnnnnnnnnnnnnnnnnnnnnnnnnnnnnnnnnnnnnnnnnnnnnnnnnnnnnnnnnnnnnnnnnnnnnnnnnnnnnnnnnnnnnnnnnnnnnnnnnnnnnnnnnnnnnnnnnnnnnnnnnnnnnnnnnnnnnnnnnnnnnnnnnnnnnnnnnnnnnnnnnnnnnnnnnnnnnnnnnnnnnnnnnnnnnnnnnnnnnnnnnnnnnnnnnnnnnnnnnnnnnnnnnnnnnnnnnnnnnnnagggacagctcctcgatgaaggcctctgcgtggagagcaccgagtgtccctgcatgcattccggaaagcgctaccctcctggtgcctccctctctcgagactgcaacacctgnnnnnnnnnnnnnnnnnnnnnnnnnnnnnnnnnnnnnnnnnnnnnnnnnnnnnnnnnnnnnnnnnnnnnnnnnnnnnnnnnnnnnnnnnnnnnnnnnnnnnnnnnnnnnnnnnnnnnnnnnnnnnnnnnnnnnnnnnnnnnnnnnnnnnnnnnnnnnnnnnnnnnnnnnnnnnnnnnnnnnnnnnnnnnnnnnnnnnnnnnnnnnnnnnnnnnnnnnnnnnnnnnnnnnnnnnnnnnnnnnnnnnnnnnnnnnnnnnnnnnnnnnnnnnnnnnnnnnnnnnnnnnnnnnnnnnnnnnnnnnnnnnnnnnnnnnnnnnnnnnnnnnnnnnnnnnnnnnnnnnnnnnnnnnnnnnnnnnnnnnnnnnnnnnnnnnnnnnnnnnnnnnnnnnnnnnnnnnnnnnnnnnnnnnnnnnnnnnnnnnnnnnnnnnnnnnnnnnnnnnnnnnnnnnnnnnnnnnnnnnnnnnnnnnnnnnnnnnnnnnnnnnnnnnnnnnnnnnnnnnnnnnnnnnnnnnnnnnnnnnnnnnnnnnnnnnnnnnnnnnnnnnnnnnnnnnnnnnnnnnnnnnnnnnnnnnnnnnnnnnnnnnnnnnnnnnnnnnnnnnnnnnnnnnnnnnnnnnnnnnnnnnnnnnnnnnnnnnnnnnnnnnnnnnnnnnnnnnnnnnnnnnnnnnnnnnnnnnnnnnnnnnnnnnnnnnnnnnnnnnnnnnnnnnnnnnnnnnnnnnnnnnnnnnnnnnnnnnnnnnnnnnnnnnnnnnnnnnnnnnnnnnnnnnnnnnnnnnnnnnnnnnnnnnnnnnnnnnnnnnnnnnnnnnnnnnnnnnnnnnnnnnnnnnnnnnnnnnnnnnnnnnnnnnnnnnnnnnnnnnnnnnnnnnnnnnnnnnnnnnnnnnnnnnnnnnnnnnnnnnnnnnnnnnnnnnnnnnnnnnnnnnnnnnnnnnnnnnnnnnnnnnnnnnnnnnnnnnnnnnnnnnnnnnnnnnnnnnnnnnnnnnnnnnnnnnnnnnnnnnnnnnnnnnnnnnnnnnnnnnnnnnnnnnnnnnnnnnnnnnnnnnnnnnnnnnnnnnnnnnnnnnnnnnnnnnnnnnnnnnnnnnnnnnnnnnnnnnnnnnnnnnnnnnnnnnnnnnnnnnnnnnnnnnnnnnnnnnnnnnnnnnnnnnnnnnnnnnnnnnnnnnnnnnnnncaaaaggagcctatcctgtcggcctcccatggtcaagctggtgtgtcccgctgnnnnnnnnnnnnnnnnnnnnnnnnnnnnnnnnnnnnnnnnnnnnnnnnnnnnnnnnnnnnnnnnnnnnnnnnnnnnnnnnnnnnnnnnnnnnnnnnnnnnnnnnnnnnnnnnnnnnnnnnnnnnnnnnnnnnnnnnnnnnnnnnnnnnnnnnnnnnnnnnnnnnnnnnnnnnnnnnnnnnnnnnnnnnnnnnnnnnnnnnnnnnnnnnnntgtctgtcgggaccggaagtggaactgcacagaccacgtgtgtgacgccacgtgctccacgatcggcatggcccactacctcaccttcgacgggctcaaatacatgttccccggggagtgccagtacgttctggtgcannnnnnnnnnnnnnnnnnnnnnnnnnnnnnnnnnnnnnnnnnnnnnnnnnnnnnnnnnnnnnnnnnnnnnnnnnnnnnnnnnnnnnnnnnnnnnnnnnnnnnnnnnnnnnnnnnnnnnnnnnnnnnnnnnnnnnnnnnnnnnnnnnnnnnnnnnnnnnnnnnnnnnnnnnnnnnnnnnnnnnnnnnnnnnnnnnnnnnnnnnnnnnnnnnnnnnnnnnnnnnnnnnnnnnnnnnnnnnnnnnnnnnnnnnnnnnnnnnnnnnnnnnnnnnnnnnnnnnnnnnnnnnnnnnnnnnnnnnnnnnnnnnnnnnnnnnnnnnnnnnnnnnnnnnnnnnnnnnnnnnnnnnnnnnnnnnnnnnnnnnnnnnnnnnnnnnnnnnnnnnnnnnnnnnnnnnnnnnnnnnnnnnnnnnnnnnnnnnnnnnnnnnnnnnnnnnnnnnnnnnnnnnnnnnnnnnnnnnnnnnnnnnnnnnnnnnnnnnnnnnnnnnnnnnnnnnnnnnnnnnnnnnnnnnnnnnnnnnnnnnnnnnnnnnnnnnnnnnnnnnnnnnnnnnnnnnnnnnnnnnnnnnnnnnnnnnnnnnnnnnnnnnnnnnnnnnnnnnnnnnnnnnnnnnnnnnnnnnnnnnnnnnnnnnnnnnnnnnnnnnnnnnnnnnnnnnnnnnnnnnnnnnnnnnnnnnnnnnnnnnnnnnnnnnnnnnnnnnnnnnnnnnnnnnnnnnnnnnnnnnnnnnnnnnnnnnnnnnnnnnnnnnnnnnnnnnnnnnnnnnnnnnnnnnnnnnnnnnnnnnnnnnnnnnnnnnnnnnnnnnnnnnnnnnnnnnnnnnnnnnnnnnnnnnnnnnnnnnnnnnnnnnnnnnnnnnnnnnnnnnnnnnnnnnnnnnnnnnnnnnnnnnnnnnnnnnnnnnnnnnnnnnnnnnnnnnnnnnnnnnnnnnnnnnnnnnnnnnnnnnnnnnnnnnnnnnnnnnnnnnnnnnnnnnnnnnnnnnnnnnnnnnnnnnnnnnnnnnnnnnnnnnnnnnnnnnnnnnnnnnnnnnnnnnnnnnnnnnnnnnnnnnnnnnnnnnnnnnnnnnnnnnnnnnnnnnnnnnnnnnnnnnnnnnnnnnnnnnnnnnnnnnnnnnnnnnnnnnnnnnnnnnnnnnnnnnnnnnnnnnnnnnnnnnnnnnnnnnnnnnnnnnnnnnnnnnnnnnnnnnnnnnnnnnnnnnnnnnnnnnnnnnnnnnnnnnnnnnnnnnnnnnnnnnnnnnnnnnnnnnnnnnnnnnnnnnnnnnnnnnnnnnnnnnnnnnnnnnnnnnnnnnnnnnnnnnnnnnnnnnnnnnnnnnnnnnnnnnnnnnnnnnnnnnnnnnnnnnnnnnnnnnnnnnnnnnnnnnnnnnnnnnnnnnnnnnnnnnnnnnnnnnnnnnnnnnnnnnnnnnnnnnnnnnnnnnnnnnnnnnnnnnnnnnnnnnnnnnnnnnnnnnnnnnnnnnnnnnnnnnnnnnnnnnnnnnnnnnnnnnnnnnnnnnnnnnnnnnnnnnnnnnnnnnnnnnnnnnnnnnnnnnnnnnnnnnnnnnnnnnnnnnnnnnnnnnnnnnnnnnnnnnnnnnnnnnnnnnnnnnnnnnnnnnnnnnnnnnnnnnnnnnnnnnnnnnnnnnnnnnnnnnnnnnnnnnnnnnnnnnnnnnnnnnnnnnnnnnnnnnnnnnnnnnnnnnnnnnnnnnnnnnnnnnnnnnnnnnnnnnnnnnnnnnnnnnnnnnnnnnnnnnnnnnnnnnnnnnnnnnnnnnnnnnnnnnnnnnnnnnnnnnnnnnnnnnnnnnnnnnnnnnnnnnnnnnnnnnnnnnnnnnnnnnnnnnnnnnnnnnnnnnnnnnnnnnnnnnnnnnnnnnnnnnnnnnnnnnnnnnnnnnnnnnnnnnnnnnnnnnnnnnnnnnnnnnnnnnnnnnnnnnnnnnnnnnnnnnnnnnnnnnnnnnnnnnnnnnnnnnnnnnnnnnnnnnnnnnnnnnnnnnnnnnnnnnnnnnnnnnnnnnnnnnnnnnnnnnnnnnnnnnnnnnnnnnnnnnnnnnnnnnnnnnnnnnnnnnnnnnnnnnnnnnnnnnnnnnnnnnnnnnnnnnnnnnnnnnnnnnnnnnnnnnnnnnnnnnnnnnnnnnnnnnnnnnnnnnnnnnnnnnnnnnnnnnnnnnnnnnnnnnnnnnnnnnnnnnnnnnnnnnnnnnnnnnnnnnnnnnnnnnnnnnnnnnnnnnnnnnnnnnnnnnnnnnnnnnnnnnnnnnnnnnnnnnnnnnnnnnnnnnnnnnnnnnnnnnnnnnnnnnnnnnnnnnnnnnnnnnnnnnnnnnnnnnnnnnnnnnnnnnnnnnnnnnnnnnnnnnnnnnnnnnnnnnnnnnnnnnnnnnnnnnnnnnnnnnnnnnnnnnnnnnnnnnnnnnnnnnnnnnnnnnnnnnnnnnnnnnnnnnnnnnnnnnnnnnnnnnnnnnnnnnnnnnnnnnnnnnnnnnnnnnnnnnnnnnnnnnnnnnnnnnnnnnnnnnnnnnnnnnnnnnnnnnnnnnnnnnnnnnnnnnnnnnnnnnnnnnnnnnnnnnnnnnnnnnnnnnnnnnnnnnnnnnnnnnnnnnnnnnnnnnnnnnnnnnnnnnnnnnnnnnnnnnnnnnnnnnnnnnnnnnnnnnnnnnnnnnnnnnnnnnnnnnnnnnnnnnnnnnnnnnnnnnnnnnnnnnnnnnnnnnnnnnnnnnnnnnnnnnnnnnnnnnnnnnnnnnnnnnnnnnnnnnnnnnnnnnnnnnnnnnnnnnnnnnnnnnnnnnnnnnnnnnnnnnnnnnnnnnnnnnnnnnnnnnnnnnnnnnnnnnnnnnnnnnnnnnnnnnnnnnnnnnnnnnnnnnnnnnnnnnnnnnnnnnnnnnnnnnnnnnnnnnnnnnnnnnnnnnnnnnnnnnnnnnnnnnnnnnnnnnnnnnnnnnnnnnnnnnnnnnnnnnnnnnnnnnnnnnnnnnnnnnnnnnnnnnnnnnnnnnnnnnnnnnnnnnnnnnnnnnnnnnnnnnnnnnnnnnnnnnnnnnnnnnnnnnnnnnnnnnnnnnnnnnnnnnnnnnnnnnnnnnnnnnnnnnnnnnnnnnnnnnnnnnnnnnnnnnnnnnnnnnnnnnnnnnnnnnnnnnnnnnnnnnnnnnnnnnnnnnnnnnnnnnnnnnnnnnnnnnnnnnnnnnnnnnnnnnnnnnnnnnnnnnnnnnnnggcacaggcagttcctactcggccacatcgtgacctttaatgggcagaattttcaggcagcctgacagctgatcatacgtcctatttcaaaacaagggagcaggacctggaggtgattctccataaatggggcctgcagccttgcagcaaggcagggctgcatgaaatccttcgaggtgaagcacgctgccctctctgtcgagctgcacagtgacatggaggtgnnnnnnnnnnnnnnnnnnnnnnnnnnnnnnnnnnnnnnnnnnnnnnnnnnnnnnnnnnnnnnnnnnnnnnnnnnnnnnnnnnnnnnnnnnnnnnnnnnnnnnnnnnnnnnnnnnnnnnnnnnnnnnnnnnnnnnnnnnnnnnnnnnnnnnnnnnnnnnnnnnnnnnnnnnnnnnnnnnnnnnnnnnnnnnnnnnnnnnnnnnnnnnnnnnnnnnnnnnnnnnnnnnnnnnnnnnnnnnnnnnnnnnnnnnnnnnnnnnnnnnnnnnnnnnnnnnnnnnnnnnnnnnnnnnnnnnnnnnnnnnnnnnnnnnnnnnnnnnnnnnnnnnnnnnnnnnnnnnnnnnnnnnnnnnnnnnnnnnnnnnnnnnnnnnnnnnnnnnnnnnnnnnnnnnnnnnnnnnnnnnnnnnnnnnnnnnnnnnnnnnnnnnnnnnnnnnnnnnnnnnnnnnnnnnnnnnnnnnnnnnnnnnnnnnnnnnnnnnnnnnnnnnnnnnnnnnnnnnnnnnnnnnnnnnnnnnnnnnnnnnnnnnnnnnnnnnnnnnnnnnnnnnnnnnnnnnnnnnnnnnnnnnnnnnnnnnnnnnnnnnnnnnnnnnnnnnnnnnnnnnnnnnnnnnnnnnnnnnnnnnnnnnnnnnnnnnnnnnnnnnnnnnnnnnnnnnnnnnnnnnnnnnnnnnnnnnnnnnnnnnnnnnnnnnnnnnnnnnnnnnnnnnnnnnnnnnnnnnnnnnnnnnnnnnnntcctggaagcctgggtcccggaccaccagccctgtcagatctgcacgtgcctcagcgggcgaaggccaactgcacaatgcagccctgccccacggccaaannnnnnnnnnnnnnnnnnnnnnnnnnnnnnnnnnnnnnnnnnnnnnnnnnnnnnnnnnnnnnnnnnnnnnnnnnnnnnnnnnnnnnnnnnnnnnnnnnnnnnnnnnnnnnnnnnnnnnnnnnnnnnnnnnnnnnnnnnnnnnnnnnnnnnnnnnnnnnnnnnnnnnnnnnnnnnnnnnnnnnnnnnnnnnnnnnnnnnnnnnnnnnnnnnnnnnnnnnnnnnnnnnnnnnnnnnnnnnnnnnnnnnnnnnnnnnnnnnnnnnnnnnnnnnnnnnnnnnnnnnnnnnnnnnnnnnnnnnnnnnnnnnnnnnnnnnnnnnnnnnnnnnnnnnnnnnnnnnnnnnnnnnnnnnnnnnnnnnnnnnnnnnnnnnnnnnnnnnnnnnnnnnnnnnnnnnnnnnnnnnnnnnnnnnnnnnnnnnnnnnnnnnnnnnnnnnnnnnnnnnnnnnnnnnnnnnnnnnnnnnnnnnnnnnnnnnnnnnnnnnnnnnnnnnnnnnnnnnnnnnnnnnnnnnnnnnnnnnnnnnnnnnnnnnnnnnnggcttcacttacgttccgcgtgaaggcgagtgctgtggaaggtgcctgccgtctgcctgtgaagtggtgaccggctcaccacggggggactcccagtcttcctggaagagnnnnnnnnnnnnnnnnnnnnnnnnnnnnnnnnnnnnnnnnnnnnnnnnnnnnnnnnnnnnnnnnnnnnnnnnnnnnnnnnnnnnnnnnnnnnnnnnnnnnnnnnnnnnnnnnnnnnnnnnnnnnnnnnnnnnnnnnnnnnnnnnnnnnnnnnnnnnnnnnnnnnnnnnnnnnnnnnnnnnnnnnnnnnnnnnnnnnnnnnnnnnnnnnnnnnnnnnnnnnnnnnnnnnnnnnnnnnnnnnnnnnnnnnnnnnnnnnnnnnnnnnnnnnnnnnnnnnnnnnnnnnnnnnnnnnnnnnnnnnnnnnnnnnnnnnnnnnnnnnnnnnnnnnnnnnnnnnnnnnnnnnnnnnnnnnnnnnnnnnnnnnnnnnnnnnnnnnnnnnnnnnnnnnnnnnnnnnnnnnnnnnnnnnnnnnnnnnnnnnnnnnnnnnnnnnnnnnnnnnnnnnnnnnnnnnnnnnnnnnnnnnnnnnnnnnnnnnnnnnnnnnnnnnnnnnnnnnnnnnnnnnnnnnnnnnnnnnnnnnnnnnnnnnnnnnnnnnnnnnnnnnnnnnnnnnnnnnnnnnnnnnnnnnnnnnnnnnnnnnnnnnnnnnnnnnnnnnnnnnnnnnnnnnnnnnnnnnnnnnnnnnnnnnnnnnnnnnnnnnnnnnnnnnnnnnnnnnnnnnnnnnnnnnnnnnnnnnnnnnnnnnnnnnnnnnnnnnnnnnnnncagggcaaatgtgccagcaaagccatgtactccattgacatcaacgatgtgcaggaccagtgctcctgctgctctccaacacggacggagcccatgcaggtgcccctgcactgcaccaatggctctgttgtgtaccacgaggttctcaatgccatgcagtgcgaatgttcccccaggaagtgcagcaagtgaggctgctgcagctgcatgggtgactgctgctgcctgccttggcctgacaggccagagtgctgccagtcctctgcatgttctgctcttgtgcctttctgggcccacaataaaggctgagctcttagcttg

SEQ ID NO: 19147 - DNA, 148 bp, Macaca Mulatta
gtacttccggaacctgtgctcagatgacacccccatggtgcggcgggccgcagcctccaagctgggggagtttgccaaggtgctggagctggacaacgtcaagagtgagatcatccccatgttctccaacctggcctctgacgagcag

SEQ ID NO: 19148 - DNA, 2033 bp, Macaca Mulatta
ggggcccctcatgtttctccgagtgatagcgactttcacatgttcaggagaaaaggaagtaaatttggctgttcaaaatgcaaaagctgcttttaaaatatggagtaaaaaatctggcatggagcgttgccgaatccttttggaggctgccaggataataagggaacgagaggatgaaattgccactggtggaatgcatcaacaatggcaagtccatctttgaggcccgcttggacattgacacttcctggcagtgcctggagtattatgcgggcttggctgcatccatggctggtgagcatatccagctcccaggcggatcctttggttataccagaagagaaccacttggggtatgtgtgggaataggagcatggaactacccctttcagatcgcctcttggaagtcagctccagcgttagcctgtggtaatgccatggtctttaaaccttctccctttacacctgtttctgcattgctactggctgaaatctacactgaggctggtgtgcctcctgggctcttcaatgtggtgcagggaggggctgccacaggccagtttctgtgtcagcatcacgatgtggccaaagtctccttcactggaagtgtgcccactggcatgaagatcatggagatgtcagctaaaggaatcaaacctgttaccttggaacttggaggcaaatctccactcatcatcttctcagactgtgatatgaacaatgctgtgaagggggcgctgatggccaactttctcacacaaggccaggtttgcctgtaatggcacaagagtatttgtgcagaaagaaattcttgataaatttacagaggaagtggtgaaacagacccaaaggattaaaattggagatccccttctggaagatacaaggatgggtccactcatcaaccgaccacacctggagcgagttcttgggtttgttaaagtggcaaaggagcggggtgctaaagtgttatgtggtggagatatatatgtacctgaagatcccaaattaaaggatggatattacatgagaccttgtgtattaactaattgcagagatgacatgacctgtgtgaaagaagagatctttgggcctgttatgtccattttatcatttgacactgaagctgaggttctagaaagagccaatgataccacttttggactagcagctggcgtctttaccagggacatccagcgggctcatagagtggtagctgagcttcaggctggaacgtgcttcattaacaactataatgtcagcccagtggagttgccctttggtggatataagaagtcaggatttggcagagagaacggccgtgtgacaattgaatattattcacaactgaagactgtgtgtgtggagatgggtgatgtggaatctgctttttgaaaacctgcagtgaaacctactgacatggccaggctgtggaatgatgcgaattggccctgtttacagaggcagtacaacctgaatgttgttttttaaattcagaattttggcattcaggataagagaatggttcatgttactctttctctctccatcagcttcgtcactgaaaatgtgcattaagtgccttgtagatactaaatcaagaaagttggcattctccctcaagtatatttttgtgaaatcttttaagagccagtaacatactttctagaaagcaggaaaactggactggggataatacatcttccacacattttggcccactaaccaatgttaaattctctggcggaattttaaaaaaacttgttccctgggagaacccaagtgccaatgggatttacaacctaaatttgatcccaaccccggtttcaagaatttcctttgtttcctttccccctttccccactggcttccacttggacaaagtcctttgaaggggcgaataagaagggaatcttccacctatcaacaaaaaaaaacacccttggttcccttttgtaaaggttccccgggcaaaaaatcaatcaggggatgattttcccacccccctgtggctccctttttaaacctggtaa

SEQ ID NO: 19149 - DNA, 375 bp, Macaca Mulatta
  misc_feature (1)...(375): n = A,T,C or G
tatatttgtacaaaaaaagttttatttttcnnnnnnnnnnnnnnnnnnnnnnnnnnnnnngggtgtacttatagccacactgcacactgcctggcccaaaacgttttattgtagtgggatcagccctcgttgtgttgcttttgtgaactttttgtagaggacaagaaagatcattgaaattccaagaaaacttcttttaaacctcacctctgtggggttttggacgttagcaaaaattcatggaaggaccacattttatatttattgtgcttcgagtgactgaccccgtggtatcctgtggcatgtagcagccaggagtgttagacctttcagtgatgtggggtgaaaagttaatacctgtcaaggtttgtgtta

SEQ ID NO: 19150 - DNA, 482 bp, Macaca Mulatta
  misc_feature (1)...(482): n = A,T,C or G
gtaccacgcggagaccatcaagaatgtgcgtacagccacggaaagctttgcttctgaccccatcctctaccggcccgttgctgtggctctggacactaaaggacctgagatccgaactgggctcatnnnnnnnnnnnnnnnnnnnnnnnnnnnnnnnnnnnnnnnnnnnnnnnnnnnnnnnnnnnnnnnnnnnnnnnnnnnnnnnnnnnnnnnnnnnnnnnnnnnnnnnnnnnnnnnnnnnnnnnnnnnnnnnnnnnnnnnnnnnnnnnnnnnnnnnnnnnnnnnnnnnnnnnnnnnnnnnnnnnnnnnnnnnnnnnnaggtgctgacttcctggtgacggaggtggaaaatggtggctccttgggcagcaagaagggtgtgaaccttcctggggctgctgtggacttgcctgctgtgtcggaaaaggacatccaggatctgaagtttggggtcgagcaggatgtcgataaggtgtttgcgt

SEQ ID NO: 19151 - DNA, 5578 bp, Macaca Mulatta
  misc_feature (1)...(5578): n = A,T,C or G
cacctccaaggtttacacgaacacccgttgatcagacaggggtctctggcggagttgcctctttcatctgccaagctacgggagacccaagacctaaaattgtctggaacaaaaaaggaaagaaagtcagcaatcagagatttgaggtattagnaggtaatagagtttgacgatgggtctggatcagttctcagaatacaacccttacggactccgagggatgaggccatttatgaatgtgtggcctcaaataatgtgggagaaataagtgtatccaccagactcacagttttacgggnnnnnnnnnnnnnnnnnnnnnnnnnnnnnnnnnnnnnnnnnnnnnnnnnnnnnnnnnnnnnnnnnnnnnnnnnnnnnnnnnnnnnnnnnnnnnnnnnnnnnnnnnnnnnnnnnnnnnnnnnnnnnnnnnnnnnnnnnnnnnnnnnnnnnnnnnnnnnnnnnnnnnnnnnnnnnnnnnnnnnnnnnnnnnnnnnnnnnnnnnnnnnnnnnnnnnnnnnnnnnnnnnnnnnnnnnnnnnnnnnnnnnnnnnnnnnnnnnnnnnnnnnnnnnnnnnnnnnnnnnnnnnnnnnnnnnnnnnnnnnnnnnnnnnnnnnnnnnnnnnnnnnnnnnnnnnnnnnnnnnnnnnnnnnnnnnnnnnnnnnnnnnnnnnnnnnnnnnnnnnnnnnnnnnnnnnnnnnnnnnnnnnnnnnnnnnnnnnnnnnnnnnnnnnnnnnnnnnnnnnnnnnnnnnnnnnnnnnnnnnnnnnnnnnnnnnnnnnnnnnnnnnnnnnnnnnnnnnnnnnnnnnnnnnnnnnnnnnnnnnnnnnnnnnnnnnnnnnnnnnnnnnnnnnnnnnnnnnnnnnnnnnnnnnnnnnnnnnnnnnnnnnnnnnnnnnnnnnnnnnnnnnnnnnnnnnnnnnnnnnnnnnnnnnnnnnnnnnnnnnnnnnnnnnnnnnnnnnnnnnnnnnnnnnnnnnnnnnnnnnnnnnnnnnnnnnnnnnnnnnnnnnnnnnnnnnnnnnnnnnnnnnnnnnnnnnnnnnnnnnnnnnnnnnnnnnnnnnnnnnnnnnnnnnnnnnnnnnnnnnnnnnnnnnnnnnnnnnnnnnnnnnnnnnnnnnnnnnnnnnnnnnnnnnnnnnnnnnnnnnnnnnnnnnnnnnnnnnnnnnnnnnnnnnnnnnnnnnnnnnnnnnnnnnnnnnnnnnnnnnnnnnnnnnnnnnnnnnnnnnnnnnnnnnnnnnnnnnnnnnnnnnnnnnnnnnnnnnnnnnnnnnnnnnnnnnnnnnnnnnnnnnnnnnnnnnnnnnnnnnnnnnnnnnnnnnnnnnnnnnnnnnnnnnnnnnnnnnnnnnnnnnnnnnnnnnnnnnnnnnnnnnnnnnnnnnnnnnnnnnnnnnnnnnnnnnnnnnnnnnnnnnnnnnnnnnnnnnnnnnnnnnnnnnnnnnnnnnnnnnnnnnnnnnnnnnnnnnnnnnnnnnnnnnnnnnnnnnnnnnnnnnnnnnnnnnnnnnnnnnnnnnnnnnnnnnnnnnnnnnnnnnnnnnnnnnnnnnnnnnnnnnnnnnnnnnnnnnnnnnnnnnnnnnnnnnnnnnnnnnnnnagcaacgaattaccattgagccagggacatcatataggctgcaaggactgaaaccaaatagcttatactatttccgtctggctgcacgctcccctcaaggcctgggtgcttctactgcagaaatatcagctagaaccatgcagtcaannnnnnnnnnnnnnnnnnnnnnnnnnnnnnnnnnnnnnnnnnnnnnnnnnnnnnnnnnnnnnnnnnnnnnnnnnnnnnnnnnnnnnnnnnnnnnnnnnnnnnnnnnnnnnnnnnnnnnnnnnnnnnnnnnnnnnnnnnnnnnnnnnnnnnnnnnnnnnnnnnnnnnnnnnnnnnnnnnnnnnnnnnnnnnnnnnnnnnnnnnnnnnnnnnnnnnnnnnnnnnnnnnnnnnnnnnnnnnnnnnnnnnnnnnnnnnnnnnnnnnnnnnnnnnnnnnnnnnnnnnnnnnnnnnnnnnnnnnnnnnnnnnnnnnnnnnnnnnnnnnnnnnnnnnnnnnnnnnnnnnnnnnnnnnnnnnnnnnnnnnnnnnnnnnnnnnnnnnnnnnnnnnnnnnnnnnnnnnnnnnnnnnnnnnnnnnnnnnnnnnnnnnnnnnnnnnnnnnnnnnnnnnnnnnnnnnnnnnnnnnnnnnnnnnnnnnnnnnnnnnnnnnnnnnnnnnnnnnnnnnnnnnnnnnnnnnnnnnnnnnnnnnnnnnnnnnnnnnnnnnnnnnnnnnnnnnnnnnnnnnnnnnnnnnnnnnnnnnnnnnnnnnnnnnnnnnnnnnnnnnnnnnnnnnnnnnnnnnnnnnnnnnnnnnnnnnnnnnnnnnnnnnnnnnnnnnnnnnnnnnnnnnnnnnnnnnnnnnnnnnnnnnnnnnnnnnnnnnnnnnnnnnnnnnnnnnnnnnnnnnnnnnnnnnnnnnnnnnnnnnnnnnnnnnnnnnnnnnnnnnnnnnnnnnnnnnnnnnnnnnnnnnnnnnnnnnnnnnnnnnnnnnnnnnnnnnnnnnnnnnnnnnnnnnnnnnnnnnnnnnnnnnnnnnnnnnnnnnnnnnnnnnnnnnnnnnnnnnnnnnnnnnnnnnnnnnnnnnnnnnnnnnnnnnnnnnnnnnnnnnnnnnnnnnnnnnnnnnnnnnnnnnnnnnnnnnnnnnnnnnnnnnnnnnnnnnnnnnnnnnnnnnnnnnnnnnnnnnnnnnnnnnnnnnnnnnnnnnnnnnnnnnnnnnnnnnnnnnnnnnnnnnnnnnnnnnnnnnnnnnnnnnnnnnnnnnnnnnnnnnnnnnnnnnnnnnnnnnnnnnnnnnnnnnnnnnnnnnnnnnnnnnnnnnnnnnnnnnnnnnnnnnnnnnnnnnnnnnnnnnnnnnnnnnnnnnnnnnnnnnnnnnnnnnnnnnnnnnnnnnnnnnnnnnnnnnnnnnnnnnnnnnnnnnnnnnnnnnnnnnnnnnnnnnnnnnnnnnnnnnnnnnnnnnnnnnnnnnnnnnnnnnnnnnnnnnnnnnnnnnnnnnnnnnnnnnnnnnnnnnnnnnnnnnnattctttatgatgatgggaaaatggtagaagaagtagatggccgagccacacagaagttaaattgtcacctgaagcctgagaagtcatattcattcgtgctgaccaatcgtgggaacagtgctggtgggctgcagcacagggtcacagcaaagactgcacgggatgtgttacgtaccaagcctgccttnnnnnnnnnnnnnnnnnnnnnnnnnnnnnnnnnnnnnnnnnnnnnnnnnnnnnnnnnnnnnnnnnnnnnnnnnnnnnnnnnnnnnnnnnnnnnnnnnnnnnnnnnnnnnnnnnnnnnnnnnnnnnnnnnnnnnnnnnnnnnnnnnnnnnnnnnnnnnnnnnnnnnnnnnnnnnnnnnnnnnnnnnnnnnnnnnnnnnnnnnnnnnnnnnnnnnnnnnnnnnnnnnnnnnnnnnnnnnnnnnnnnnnnnnnnnnnnnnnnnnnnnnnnnnnnnnnnnnnnnnnnnnnnnnnnnnnnnnnnnnnnnnnnnnnnnnnnnnnnnnnnnnnnnnnnnnnnnnnnnnnnnnnnnnnnnnnnnnnnnnnnnnnnnnnnnnnnnnnnnnnnnnnnnnnnnnnnnnnnnnnnnnnnnnnnnnnnnnnnnnnnnnnnnnnnnnnnnnnnnnnnnnnnnnnnnnnnnnnnnnnnnnnnnnnnnnnnnnnnnnnnnnnnnnnnnnnnnnnnnnnnnnnnnnnnnnnnnnnnnnnnnnnnnnnnnnnnnnnnnnnnnnnnnnnnnnnnnnnnnnnnnnnnnnnnnnnnnnnnnnnnnnnnnnnnnnnnnnnnnnnnnnnnnnnnnnnnnnnnnnnnnnnnnnnnnnnnnnnnnnnnnnnnnnnnnnnnnnnnnnnnnnnnnnnnnnnnnnnnnnnnnnnnnnnnnnnnnnnnnnnnnnnnnnnnnnnnnnnnnnnnnnnnnnnnnnnnnnnnnnnnnnnnnnnnnnnnnnnnnnnnnnnnnnnnnnnnnnnnnnnnnnnnnnnnnnnnnnnnnnnnnnnnnnnnnnnnnnnnnnnnnnnnnnnnnnnnnnnnnnnnnnnnnnnnnnnnnnnnnnnnnnnnnnnnnnnnnnnnnnnnnnnnnnnnnnnnnnnnnnnnnnnnnnnnnnnnnnnnnnnnnnnnnnnnnnnnnnnnnnnnnnnnnnnnnnnnnnnnnnnnnnnnnnnnnnnnnnnnnnnnnnnnnnnnnnnnnnnnnnnnnnnnnnnnnnnnnnnnnnnnnnnnnnnnnnnnnnnnnnnnnnnnnnnnnnnnnnnnnnnnnnnnnnnnnnnnnnnnnnnnnnnnnnnnnnnnnnnnnnnnnnnnnnnnnnnnnnnnnnnnnnnnnnnnnnnnnnnnnnnnnnnnnnnnnnnnnnnnnnnnnnnnnnnnnnnnnnnnnnnnnnnnnnnnnnnnnnnnnnnnnnnnnnnnnnnnnnnnnnnnnnnnnnnnnnnnnnnnnnnnnnnnnnnnnnnnnnnnnnnnnnnnnnnnnnnnnnnnnnnnnnnnnnnnnnnnnnnnnnnnnnnnnnnnnnnnnnnnnnnnnnnnnnnnnnnnnnnnnnnnnnnnnnnnnnnnnnnnnnnnnnnnnnnnnnnnnnnnnnnnnnnnnnnnnnnnnnnnnnnnnnnnnnnnnnnnnnnnnnnnnnnnnnnnnnnnnnnnnnnnnnnnnnnnnnnnnnnnnnnnnnnnnnnnnnnnnnnnnnnnnnnnnnnnnnnnnnnnnnnnnnnnnnnnnnnnnnnnnnnnnnnnnnnnnnnnnnnnnnnnnnnnnnnnnnnnnnnnnnnnnnnnnnnnnnnnnnnnnnnnnnnnnnnnnnnnnnnnnnnnnnnnnnnnnnnnnnnnnnnnnnnnnnnnnnnnnnnnnnnnnnnnnnnnnnnnnnnnnnnnnnnnnnnnnnnnnnnnnnnnnnnnnnnnnnnnnnnnnnnnnnnnnnnnnnnnnnnnnnnnnnnnnnnnnnnnnnnnnnnnnnnnnnnnnnnnnnnnnnnnnnnnnnnnnnnnnnnnnnnnnnnnnnnnnnnnnnnnnnnnnnnnnnnnnnnnnnnnnnnnnnnnnnnnnnnnnnnnnnnnnnnnnnnnnnnnnnnnnnnnnnnnnnnnnnnnnnnnnnnnnnnnnnnnnnnnnnnnnnnnnnnnnnnnnnnnnnnnnnnnnnnnnnnnnnnnnnnnnnnnnnnnnnnnnnnnnnnnnnnnnnnnnnnnnnnnnnnnnnnnnnnnnnnnnnnnnnnnnnnnnnnnnnnnnnnnnnnnnnnnnnnnnnnnnnnnnnnnnnnnnnnnnnnnnnnnnnnnnnnnnnnnnnnnnnnnnnnnnnnnnnnnnnnnnnnnnnnnnnnnnnnnnnnnnnnnnnnnnnnnnnnnnnnnnnnnnnnnnnnnnnnnnnnnnnnnnnnnnnnnnnnnnnnnnnnnnnnnnnnnnnnnnngcagcgcgggcgttggaagaactggagtcttcataacattaagcattgttttggaaagaatgagatatgaaggagtcgtagatatcttccagaccgtcaaaatgttaagaacacaacgaccagctatggtacagacagagg

SEQ ID NO: 19152 - DNA, 5378 bp, Macaca Mulatta
  misc_feature (1)...(5378): n = A,T,C or G
agaatgaaaggcttaagaaactttgtactgatctagaagagaaacatgaagcatcagagattcaaataaagcagcagtctacaagttatcgaaatcaactgcaacaaaaagaggtannnnnnnnnnnnnnnnnnnnnnnnnnnnnnnnnnnnnnnnnnnnnnnnnnnnnnnnnnnnnnnnnnnnnnnnnnnnnnnnnnnnnnnnnnnnnnnnnnnnnnnnnnnnnnnnnnnnnnnnnnnnnnnnnnnnnnnnnnnnnnnnnnnnnnnnnnnnnnnnnnnnnnnnnnnnnnnnnnnnnnnnnnnnnnnnnnnnnnnnnnnnnnnnnnnnnnnnnnnnnnnnnnnnnnnnnnnnnnnnnnnnnnnnnnnnnnnnnnnnnnnnnnnnnnnnnnnnnnnnnnnnnnnnnnnnnnnnnnnnnnnnnnnnnnnnnnnnnnnnnnnnnnnnnnnnnnnnnttaaggaactaaaacagaaccgaagtcaggaaattgatgaccatcaacatgaaatgtcagtactgcagaatgcacaccaacagaaattgacagaaataagtcgacgacatcgagaagaattaagtgactatgaagaacgaattgaagaacttgaaaatctgttacaacaaggtnnnnnnnnnnnnnnnnnnnnnnnnnnnnnnnnnnnnnnnnnnnnnnnnnnnnnnnnnnnnnnnnnnnnnnnnnnnnnnnnnnnnnnnnnnnnnnnnnnnnnnnnnnnnnnnnnnnnnnnnnnnnnnnnnnnnnnnnnnnnnnnnnnnnnnnnnnnnnnnnnnnnnnnnnnnnnnnnnnnnnnnnnnnnnnnnnnnnnnnnnnnnnnnnnnnnnnnnnnnnnnnnnnnnnnnnnnnnnnnnnnnnnnnnnnnnnnnnnnnnnnnnnnnnnnnnnnnnnnnnnnnnnnnnnnnnnnnnnnnnnnnnnnnnnnnnnnnnnnnnnnnnnnnnnnnnnnnnnnnnnnnnnnnnnnnnnnnnnnnnnnnnnnnnnnnnnnnnnnnnnnnnnnnnnnnnnnnnnnnnnnnnnnnnnnnnnnnnnnnnnnnnnnnnnnnnnnnnnnnnnnnnnnnnnnnnnnnnnnnnnnnnnnnnnnnnnnnnnnnnnnnnnnnnnnnnnnnnnnnnnnnnnnnnnnnnnnnnnnnnnnnnnnnnnnnnnnnnnnnnnnnnnnnnnnnnnnnnnnnnnnnnnnnnnnnnnnnnnnnnnnnnnnnnnnnnnnnnnnnnnnnnnnnnnnnnnnnnnnnnnnnnnnnnnnnnnnnnnnnnnnnnnnnnnnnnnnnnnnnnnnnnnnnnnnnnnnnnnnnnnnnnnnnnnnnnnnnnnnnnnnnnnnnnnnnnnnnnnnnnnnnnnnnnnnnnnnnnnnnnnnnnnnnnnnnnnnnnnnnnnnnnnnnnnnnnnnnnnnnnnnnnnnnnnnnnnnnnnnnnnnnnnnnnnnnnnnnnnnnnnnnnnnnnnnnnnnnnnnnnnnnnnnnnnnnnnnnnnnnnnnnnnnnnnnnnnnnnnnnnnnnnnnnnnnnnnnnnnnnnnnnnnnnnnnnnnnnnnnnnnnnnnnnnnnnnnnnnnnnnnnnnnnnnnnnnnnnnnnnnnnnnnnnnnnntgtaagcatccaggagaatttggaacttaaggagcatattagataaaatgaggaggcgcttcctagagtcaggaatgagttaactcagtctctaaatcaagactctagtagtaattttaaggacaacttacttaaagaaagagaagccaaagtcagaaacttaaagcaaagtctttcagaattagaacagctcaatgaaaatttaaagacagttgtttttgatgtcaaaatggaaaatgaaaagttagtttcagcatgtgaagatgtgaggcatcacttgggaagaatctattgctactaacaatcagctttctctgggaaaaaatcaccaatgtggagactccaaaaatggaaaaaggagggaaagaagcagaattgtgtcgggctgtaaagaggctgttggaagaagtaaacacatgagagaaaaccactgaagaactgtcaaatgcacgtaatttgaatacctctgccttacagctggaacatgagcatttaattaaactcaatcaaaagaaagacatggaaatagcagaactcaaaaagaatattgaacaaatggatactgaccataaagaaactaaggacattttgtcatctagtttagaagagcagaggcagttggcacaacttataaaggagaaagaaatttttattgaaaagcttaaagaaagaagttcaaagctgcaggaggaattggataaatattctcaggccttaagaaaaaatgaaattttaagacagaccatagaggaaaaggaccgaagtcttggatccatgaaagaagaaaataatcatctgcaagaagaattggaacgactcagggaacagcagagtcgaaccgcacctgtgactgaccctaaaacccttgatagtgttgctgaactagcatctgaggtgtctcaactgaatatgatcaaggatcatcttgaagaggaaattaaacatcatcaaaagataattgaagatcaaaaccagagtaagatgcaactacttcagtctttacaagagcaaaagaaggaaatggatgagtttagataccagcatgagcaaatgaacgccacacacacccagctctttttagagaaagatgaggaaattaagagtttgcaaaaaacaatcgaacaaatcaaaacccagttacatgaagaaagacaggacattcaaacagataactctgatatttttcaagaaacaaaagttcagagccttaatatagaaaatggaagtgaaaagcatgatttatctaaagctgaaacggaaagattagtgaaaggaataaaggagcgagaactggagattaaacttctaaatgaaaagaatatatctttaactaaacagattgatcagttatccaaagatgaagttggtaaactaactcagattattcagcagaaagacttggagatacaagctcttcatgctagaatttcttcaacttcctatactcaagatgttgtttaccttcaacagcaactgcaggcttatgctatggaaagagaaaaggtattcgctgttttgaatgagaagactagggaaaatagccattaaaaacagaatatcacnnnnnnnnnnnnnnnnnnnnnnnnnnnnnnnnnnnnnnnnnnnnnnnnnnnnnnnnnnnnnnnnnnnnnnnnnnnnnnnnnnnnnnnnnnnnnnnnnnnnnnnnnnnnnnnnnnnnnnnnnnnnnnnnnnnnnnnnnnnnnnnnnnnnnnnnnnnnnnnnnnnnnnnnnnnnnnnnnnnnnnnnnnnnnnnnnnnnnnnnnnnnnnnnnnnnnnnnnnnnnnnnnnnnnnnnnnnnnnnnnnnnnnnnnnnnnnnnnnnnnnnnnnnnnnnnnnnnnnnnnnnnnnnnnnnnnnnnnnnnnnnnnnnnnnnnnnnnnnnnnnnnnnnnnnnnnnnnnnnnnnnnnnnnnnnnnnnnnnnnnnnnnnnnnnnnnnnnnnnnnnnnnnnnnnnnnnnnnnnnnnnnnnnnnnnnnnnnnnnnnnnnnnnnnnnnnnnnnnnnnnnnnnnnnnnnnnnnnnnnnnnnnnnnnnnnnnnnnnnnnnnnnnnnnnnnnnnnnnnnnnnnnnnnnnnnnnnnnnnnnnnnnnnnnnnnnnnnnnnnnnnnnnnnnnnnnnnnnnnnnnnnnnnnnnnnnnnnnnnnnnnnnnnnnnnnnnnnnnnnnnnnnnnnnnnnnnnnnnnnnnnnnnnnnnnnnnnnnnnnnnnnnnnnnnnnnnnnnnnnnnnnnnnnnnnnnnnnnnnnnnnnnnnnnnnnnnnnnnnnnnnnnnnnnnnnnnnnnnnnnnnnnnnnnnnnnnnnnnnnnnnnnnnnnnnnnnnnnnnnnnnnnnnnnnnnnnnnnnnnnnnnnnnnnnnnnnnnnnnnnnnnnnnnnnnnnnnnnnnnnnnnnnnnnnnnnnnnnnnnnnnnnnnnnnnnnnnnnnnnnnnnnnnnnnnnnnnnnnnnnnnnnnnnnnnnnnnnnnnnnnnnnnnnnnnnnnnnnnnnnnnnnnnnnnnnnnnnnnnnnnnnnnnnnnnnnnnnnnnnnnnnnnnnnnnnnnnnnnnnnnnnnnnnnnnnnnnnnnnnnnnnnnnnnnnnnnnnnnnnnnnnnnnnnnnnnnnnnnnnnnnnnnnnnnnnnnnnnnnnnnnnnnnnnnnnnnnnnnnnnnnnnnnnnnnnnnnnnnnnnnnnnnnnnnnnnnnnnnnnnnnnnnnnnnnnnnnnnnnnnnnnnnnnnnnnnnnnnnnnnnnnnnnnnnnnnnnnnnnnnnnnnnnnnnnnnnnagggcaaggctggagagttaaatcagcttttaaacgcagttaaatcaatgcaggagaagacagttgtgtttcaacaggagagagaccaagtcatgttggccctgaaacaaaaacaaatggaaaatactgccctacagaatgaggtnnnnnnnnnnnnnnnnnnnnnnnnnnnnnnnnnnnnnnnnnnnnnnnnnnnnnnnnnnnnnnnnnnnnnnnnnnnnnnnnnnnnnnnnnnnnnnnnnnnnnnnnnnnnnnnnnnnnnnnnnnnnnnnnnnnnnnnnnnnnnnnnnnnnnnnnnnnnnnnnnnnnnnnnnnnnnnnnnnnnnnnnnnnnnnnnnnnnnnnnnnnnnnnnnnnnnnnnnnnnnnnnnnnnnnnnnnnnnnnnnnnnnnnnnnnnnnnnnnnnnnnnnnnnnnnnnnnnnnnnnnnnnnnnnnnnnnnnnnnnnnnnnnnnnnnnnnnnnnnnnnnnnnnnnnnnnnnnnnnnnnnnnnnnnnnnnnagaggaaaaagctatgtattctgctgaactcgaaaagcaaaaacagcttatagctgaatggaagaaaaaggcagaaaatctggaaggaaaagtgatatcattacaggncaggaacgtttggatgaagcaaacgctgcattggattcagcatccagacttacagaacagttagatgtaaaagaagaacaaatcgaagaacttaaaaaacaaannnnnnnnnnnnnnnnnnnnnnnnnnnnnnnnnnnnnnnnnnnnnnnnnnnnnnnnnnnnnnnnnnnnnnnnnnnnnnnnnnnnnnnnnnnnnnnnnnnnnnnnnnnnnnnnnnnnnnnnnnnnnnnnnnnnnnnnnnnnnnnnnnnnnnnnnnnnnnnnnnnnnnnnnnnnnnnnnnnnnnnnnnnnnnnnnncagttgtttcatgatgatcagggcggtgttaccaggtggatgactgggtggcttggaggaggatcaaaaagtgttcccaacacacctttgagaccaaatcagcaatctgtgcttaatagt

SEQ ID NO: 19153 - DNA, 1214 bp, Macaca Mulatta
  misc_feature (1)...(1214): n = A,T,C or G
ggacgcgaggcggagcggggccccacacaggccgcggcggctggctcgggcccctacggtcccgnnnnnnnnnnnnnnnnnnnnnnnnnnnnnnnnnnnnnnnnnnnnnnnnnnnnnnnnnnnnnnnnnnnnnnnnnnnnnnnnnnnnnnnnnnnnnnnnnnnnnnnnnnnnnaggttcctagaaggtgagtgcggacggtatgcaaagttgtgaatctagtggcgacagtgcggatgaccctctcagtcgtggcctacggagaaggggacagcctcgtgtggtggtgatcggcgccggcttggctggcctggctgcagccaaagcacttctcgagcagggcttcacggatgtcactgtgcttgaggcttccagccacatcggaggccgtgtgcagagtgtgaaacttgnnnnnnnnnnnnnnnnnnnnnnnnnnnnnnnnnnnnnnnnnnnnnnnnnnnnnnnnnnnnnnnnnnnnnnnnnnnnnnnnnnnnnnnnnnnnnnnnnnnnnnnnnnnnnnnnnnnnnnnnnnnnnnnnnnnnnnnnnnnnnnnnnnnnnnnnnnnnnnnnnnnnnnnnnnnnnnnnnnnnnnnnnnnnnnnnnnnnnnnnnnnnnnnnnnnnnnnnnnnnnnnnaggtctataacttgacccaggagttcttccggcacgataaaccagtcaatgctgaaagtcaaaatagcgtgggggtgttcacccgagaggaggtgcgtaaccgcatcaggaatgaccctgatgacccagaggccaccaagcgcctgaagctcgccatgatccagcagtacctgaagnnnnnnnnnnnnnnnnnnnnnnnnnnnnnnnnnnnnnnnnnnnnnnnnnnnnnnnnnnnnnnnnnnnnnnnnnnnnnnnnnnnnnnnnnnnnnnnnnnnnnnnnnnnnnnnnnnnnnnnnnnnnnnnnnnnnnnnnnnnnnnnnnnnnnnnnnnnnnnncccatgcaggtgctgttttccggtgaggccacccaccgcaagtactattccactacccacggtgctctgctctctggccagcgcgaggctgcccgcctcatcgagatgtaccgagacctcttccagcangggacctgagggctgtcctcgctgccgagaagagcactaacttgtgacctccagcccgccccttgctgccatgtgctcctgccttcctgatcctctgtagaaaggatttttatcttc

SEQ ID NO: 19154 - DNA, 372 bp, Macaca Mulatta
attatatatgtgactgatacaacttctctgtgatcagtttggtatttttttctccttaaggcacaaaataattggtttgaggtatgtgaaacactagaggtcaaccttacatagtatatagaactgatgggtttacccagctacccagtagcataacttttcacagctcggggataacttaacatggctgaaataaaactaaaaggatggtttttaaactttggcatttcatgatttatcatctcactctactctaaaactggttgtttcttactgaaggtgttcgccatttgaaattttctcttcaaagtatttttaagtagtatcttaagacacgacttgttagtaataaaagtgttactagttggaaga

SEQ ID NO: 19155 - DNA, 1043 bp, Macaca Mulatta
  misc_feature (1)...(1043): n = A,T,C or G
tcctcgaccaaggtctagacgaccattattgccggaatcctgacggctcggagcggccctggtgctacactacggatccgcagctcgagcgagagttctgtgaccttccccgctgcggngggtccgaggcacagccccgccacgaggccacaactgtcatctgcttccgcgggaagggtgagggctaccggggcacagccaacaccaccaccgcgggcgtaccttgccagcgttgggacgcgcaaatcccgcatcagcaccgatttacgccagaaaaatacgcgtgcaanagaccttcgggagaacttctgccggaaccccgacggctcagaggcgccctggtgctttacactgcggcccggcatgcgcgtggccttttgctaccagattcggcgttgtgcggacgacgtgcggccccaggnnnnnnnnnnnnnnnnnnnnnnnnnnnnnnnnnnnnnnnnnnnnnnnnnnnnnnnnnnnnnnnnnnnnnnnnnnnnnnnnnnnnnnnnnnnnnnnnnnnnnnnnnnnnnnnnnnnnnnnnnnnnnnnnnnnnnnnnnnnnnnnnnnnnnnnnnnnnnnnnnnnnnnnnnnnnnnnnnnnnnnnnnnnnnnnnnnnnnnnnnnnnnnnnnnnnnnnnnnnnnnnnnnnnnnnnnnnnnnnnnnnnnnnnnnnnnnnnnnnnnnnnnnnnnnnnnnnnnnnnnnnnnnnnnnnnnnnnnnnnnnnnnnnnnnnnnnnnnnnnnnnnnnnnnnnnnnnnnnnnnnnnnnnnnnnnnnnnnnnnnnnnnnnnnnnnnnnnnnnnnnnnnnnnnnnnnnnnnnnnnnnnnnnnnnnnnnnnnnnnnnnnnnnnnnnnnnnnnnnnnnnnnnnnnnnnnnnnnnnnnnnnnnnnnnnnnnngccatatgcctctcatgggctatgaggtatggttgggcaccctgttccagaacccacagcatggagagccaggcctacagcgggtcccagtagccaagatggtgtgtgggccctcaggctcccagcttgtcctgctcaagctggaga

SEQ ID NO: 19156 - DNA, 197 bp, Macaca Mulatta
gtcttcatcgcccagacagtgcttcggaacccgcctgccatgagcccctccgggcagctgtcccgcgccacggagcagcagctgctcatctacttgcgcgtggccacgtggaaccagatcctggacccctgggtgtacatcctgttccgccgcgccgtgctccggcgcctgcagccccgcctcagcacccgggccag

SEQ ID NO: 19157 - DNA, 605 bp, Macaca Mulatta
taaaagtttcgatacaaaatatgttataaataaaaggcttgtatgtacaaggctcctcagggagtgagtggtcttcaacccgtagaatgatgtgagtccacgctggctctagaggatcacagcccaggtatcacaggcctaggtttaaacaggagaagaattagcttaaattgtattctagtcatgaaagacatgtgatacatcgttaaaagttgtaatcaatgagaatgctacacattagatgaggtctcctgagtccagtttgaattagttaggtcgtgtaatttgtcatgaaggccaccgatgactgcccctctttggctttgctggacctctgtcctgcagccttcaaacagctgtctggaaaccgtcagcaccaacagtcttcaagctaagatcaaatctgcagatgaactaatcaaacatcctcacctcaggaaactactgaccacaaagattgtatgattgtattcaaactcttggtagcttggagcttttagagcctagcaggaagatgagactccaagtctacacaagattgaagcaggtacgtatcacaggggaggtaccaaccatgcatgatcagtacgggcagaaaacatgtc

SEQ ID NO: 19158 - DNA, 830 bp, Macaca Mulatta
  misc_feature (1)...(830): n = A,T,C or G
aggatgggtttccagatttccaggattctgtgcaaacgctcttccagcaggctagagctaagagtgaagaacttgcagctcttagttcacagnnnnnnnnnnnnnnnnnnnnnnnnnnnnnnnnnnnnnnnnnnnnnnnnnnnnnnnnnnnnnnnnnnnnnnnnnnnnnnnnnnnnnnnnnnnnnnnnnnnnnnnnnnnnnnnnnnnnnnnnnnnnnnnnnnnnnnnnnnnnnnnnnnnnnnnnnnnnnnnnnnnnnnnnnnnnnnnnnnnnnnnnnnnnnnnnnnnnnnnnnnnnnnnnnnnnnnnnnnnnnnnnnnnnnnnnnnnnnnnnnnnnnnnnnnnnnnnnnnnnnnnnnnnnnnnnnnnnnnagagagccttgggattttaaaagactaccctcactcagcttttaccttagaaaagaaagtcatcaaaacagagcctgaagattcaagatagctgtgatttctctcaccgttttctggaaatggcatcagatttaaggataatactccatcatagaaataagccttaataaccagtgttgcctcattcagctcaaacagatttcatagccaaagcaaaaggactggtacggtagtctgtggaaactgggaagataaaacaacagccacaaaagagaaaatcaaaagagtgttgcaatctataatagtaatattgattcattcacattcctgtgttaagtcattttatatggaaaggcttacagatcaattttgtaagcattcattatttaagaatgtacgatgtatttgtgtaatttatagaagtaaaatctagatgttgagacctgtttggtccaataga

SEQ ID NO: 19159 - DNA, 725 bp, Macaca Mulatta
  misc_feature (1)...(725): n = A,T,C or G
ncagttcacacctgccatccggccattcctgcagaccatctccattgggctggtgtccttcggagagcactacaatcgcaacgagacaggcctcagtnngtgtggccgccagctccctcttcaccagcggccgctttgccatcgaccccgagctgcgtggggctgagtttgagcggatcatacagaacctggacgtgcacttctggaaagccttctggaacatcaccgagatggaagtgctatcnnnnnnnnnnnnnnnnnnnnnnnnnnnnnnnnnnnnnnnnnnnnnnnnnnnnnnnnnnnnnnnnnnnnnnnnnnnnnnnnnnnnnnnnnnnnnnnnnnnnnnnnnnnnnnnnnnnnnnnnnnnnnnnnnnnnnnnnnnnnnnnnnnnnnnnnnnnnnnnnnnnnnnnnnnnnnnnnnnnnnnnnnnnnnnnnnnnnnnnnnnnnnnnnnnnnnnnnnnnnnnnnnnnnngagcctggagctgtggccgcgcccccagcaggcaccccgctcgcagtccctgatagtgcacttccacggctgtggcttcgtggcccagacctccaaatcccatgagccctacctcaagagctgggcccaggagctgggcgcccccatcatctccatcgactattccctggcccccgaggcccccttcccccgtgcgttggaggagtgcttcttcgcctactgctgggccatcaagcactgcgccctccttgg

SEQ ID NO: 19160 - DNA, 733 bp, Macaca Mulatta
  misc_feature (1)...(733): n = A,T,C or G
aagcagagtgcttctangatgcgagagtggtcactggggaaaaggacctggccatcaccttccagtacctgctgcctgtctccctgacccatggtgtggcaagttaggcacagccagacgtggacagttgatccatgaggcaaagatgctgtcccacctatggctaggaatcagagcaggactggctgagctcccagggcaaggggttcactaatgcttaccaataaagaatattaagcnnnnnnnnnnnnnnnnnnnnnnnnnnnnnnnnnnnnnnnnnnnnnnnnnnnnnnnnnnnnnnnnnnnnnnnnnnnnnnnnnnnnnnnnnnnnnnnnnnnnnnnnnnnnnnnnnnnnnnnnnnnnnnnnnnnnnnnnnnnnnnnnnnnnnnnnnnnnnnnnnnnnnnnnnnnnnnnnnnnnnnnnnnnnnnnnnnnnnnnnnnnnnnnnnnnnnnnnnnnnnnnnnnnnnnnnnnnnnnnnnnnnnnnnnnnnnnnnnnnnnnnnnnnnnnnnnnnnnnnnnnnnnnnnnnnnnnnnnnnnnnnnnnnnnnnnnnnnnnnnnnnnnnnnnnnnnnnnnnnnnnnnnnnnnnnnnnnnnnnnnnnnnnnnnnnnnnnnnnnnnnnnnnnnnnnnnnnnnnnnnnnnnnnnnnnnnnnnnnnnnnnnnnnnnnnnnnnnnnnnnnnnnnnnnnnnnnnnnnnnnnnnnnnnnnnnnnnnnnnnnnnnnnnnnnnnnn

SEQ ID NO: 19161 - DNA, 210 bp, Macaca Mulatta
aggatgagctttctgattttagccaaggcggatctaaagctaccactccagcatcaacagctaattcagatgtggcaacaattcctactgatactcccttaaaggaagaaaatgaaggatttgtgaaggttacagatgcaccaaataaatcagagataagcaaacacattgaagtacaggtagcccaagaaactagaaatgtatctactg

SEQ ID NO: 19162 - DNA, 127 bp, Macaca Mulatta
cagtgtgtggtgacatccatggccaattttttgatctgatgaaactttttgaagtaggaggatcacctgctaatacacgatacctttttcttggcgattatgtggacagaggttattttagtataga

SEQ ID NO: 19163 - DNA, 523 bp, Macaca Mulatta
tggaggatggagagaggggaataatagaagaacatccaaggagagacagagacaggcccaagagatgaagagtgagagggcatgggcaccaggctgagcgagagagaaagaagtaggcgtgagggatcacagggccccagaaggcagtgaaaggctctgaaagccagctgctgaccagagtcccacacggaggcatctgcaccctggatgaagcccaataaacctcttttctctgagacgctgtctgcttgtgtgtgtctgtctgggagtgagaatctcccagtctatctaaggaaaggagggagggatagagggctcaaagggagcaagagctgtggggagaacaaaaggataaggggctcagagagcttcagggacatgtgatagactcactaggtgaggccgccagactgctgcaggggaagcaaaggagaagctgagaagacaaaggaaaagtcagggtctgaaggggcgggggtcagggagctcctgggagatatggccacaagtagtggctctgagg

SEQ ID NO: 19164 - DNA, 3824 bp, Macaca Mulatta
  misc_feature (1)...(3824): n = A,T,C or G
ctgccattctgggtacgttggtgcacgctgtgagcatgcggacctcctggctgtggtggccgccagtcagaagaagcaggccatcaccgccttggtggtggtctccatcgtggccctggctgtcttatcatcacatgtgtgctgatacannnnnnnnnnnnnnnnnnnnnnnnnnnnnnnnnnnnnnnnnnnnnnnnnnnnnnnnnnnnnnnnnnnnnnnnnnnnnnnnnnnnnnnnnnnnnnnnnnnnnnnnnnnnnnnnnnnnnnnnnnnnnnnnnnnnnnnnnnnnnnnnnnnnnnnnnnnnnnnnnnnnnnnnnnnnnnnnnnnnnnnnnnnnnnnnnnnnnnnnnnnnnnnnnnnnnnnnnnnnnnnnnnnnnnnnnnnnnnnnnnnnnnnnnnnnnnnnnnnnnnnnnnnnnnnnnnnnnnnnnnnnnnnnnnnnnnnnnnnnnnnnnnnnnnnnnnnnnnnnnnnnnnnnnnnnnnnnnnnnnnnnnnnnnnnnnnnnnnnnnnnnnnnnnnnnnnnnnnnnnnnnnnnnnnnnnnnnnnnnnnnnnnnnnnnnnnnnnnnnnnnnnnnnnnnnnnnnnnnnnnnnnnnnnnnnnnnnnnnnnnnnnnnnnnnnnnnnnnnnnnnnnnnnnnnnnnnnnnnnnnnnnnnnnnnnnnnnnnnnnnnnnnnnnnnnnnnnnnnnnnnnnnnnnnnnnnnnnnnnnnnnnnnnnnnnnnnnnnnnnnnnnnnnnnnnnnnnnnnnnnnnnnnnnnnnnnnnnnnnnnnnnnnnnnnnnnnnnnnnnnnnnnnnnnnnnnnnnnnnnnnnnnnnnnnnnnnnnnnnnnnnnnnnnnnnnnnnnnnnnnnnnnnnnnnnnnnnnnnnnnnnnnnnnnnnnnnnnnnnnnnnnnnnnnnnnnnnnnnnnnnnnnnnnnnnnnnnnnnnnnnnnnnnnnnnnnnnnnnnnnnnnnnnnnnnnnnnnnnnnnnnnnnnnnnnnnnnnnnnnnnnnnnnnnnnnnnnnnnnnnnnnnnnnnnnnnnnnnnnnnnnnnnnnnnnnnnnnnnnnnnnnnnnnnnnnnnnnnnnnnnnnnnnnnnnnnnnnnnnnnnnnnnnnnnnnnnnnnnnnnnnnnnnnnnnnnnnnnnnnnnnnnnnnnnnnnnnnnnnnnnnnnnnnnnnnnnnnnnnnnnnnnnnnnnnnnnnnnnnnnnnnnnnnnnnnnnnnnnnnnnnnnnnnnnnnnnnnnnnnnnnnnnnnnnnnnnnnnnnnnnnnnnnnnnnnnnnnnnnnnnnnnnnnnnnnnnnnnnnnnnnnnnnnnnnnnnnnnnnnnnnnnnnnnnnnnnnnnnnnnnnnnnnnnnnnnnnnnnnnnnnnnnnnnnnnnnnnnnnnnnnnnnnnnnnnnnnnnnnnnnnnnnnnnnnnnnnnnnnnnnnnnnnnnnnnnnnnnnnnnnnnnnnnnnnnnnnnnnnnnnnnnnnnnnnnnnnnnnnnnnnnnnnnnnnnnnnnnnnnnnnnnnnnnnnnnnnnnnnnnnnnnnnnnnnnnnnnnnnnnnnnnnnnnnnnnnnnctatgtgtgtcttcctttccccgcaagagaaggagtttctgttcccctgagcacctgggtccgtctgacccgtggggcctgcctgtgagaagcagcgggccccttcaaatacagagtggatagctcatccctaggaattttcattgaaatttggagacagagtaacgaagaaataatatataaacgccttatgtgaggaaacgctactaatatttgaaaagtgaaagatttctccctactaactcttaagtgcacctagcttactacatcatgaaaggtacatttaaaatatgtcaaattggcttgaacttttcagagaattttgtcttccccctaattcttcttccttggtctggaagaacgatttctatgaattttctcttttttatatatataattcagacaattctgacccatgtcttcactttgggcactcttatttaacaatgccacactggaagcactnngatctgttcagagctgacctcccagcaacatagttgacacagctccaggtttttaaattattaaaataagttcaagtttacatcccttgggccggatatgtgggttgaggcttgactgtagcatcctgcttagagaccaatcaatggacactggtttttagacctctattgatcagtagttagcatccaagagactttgcagaggcatgggaagatgaggctggacagatggcagaagcagaggttctctgcaaagacttgagatttagtgtctgtgaatgctctggttcctaggtccagcaagtcacacctgccagtgccctcatccttatgcccataacacacannnnnnnnnnnnnnnnnnnnnnnnnnnnnnnnnnnnnnnnnnnnnnnnnnnnnnnnnnnnnnnnnnnnnnnnnnnnnnnnnnnnnnnnnnnnnnnnnnnnnnnnnnnnnnnnnnnnnnnnnnnnnnnnnnnnnnnnnnnnnnnnnnnnnnnnnnnnnnnnnnnnnnnnnnnnnnnnnnnnnnnnnnnnnnnnnnnnnnnnnnnnnnnnnnnnnnnnnnnnnnnnnnnnnnnnnnnnnnnnnnnnnnnnnnnnnnnnnnnnnnnnnnnnnnnnnnnnnnnnnnnnnnnnnnnnnnnnnnnnnnnnnnnnnnnnnnnnnnnnnnnnnnnnnnnnnnnnnnnnnnnnnnnnnnnnnnnnnnnnnnnnnnnnnnnnnnnnnnnnnnnnnnnnnnnnnnnnnnnnnnnnnnnnnnnnnnnnnnnnnnnnnnnnnnnnnnnnnnnnnnnnnnnnnnnnnnnnnnnnnnnnnnnnnnnnnnnnnnnnnnnnnnnnnnnnnnnnnnnnnnnnnnnnnnnnnnnnnnnnnnnnnnnnnnnnnnnnnnnnnnnnnnnnnnnnnnnnnnnnnnnnnnnnnnnnnnnnnnnnnnnnnnnnnnnnnnnnnnnnnnnnnnnnnnnnnnnnnnnnnnnnnnnnnnnnnnnnnnnnnnnnnnnnnnnnnnnnnnnnnnnnnnnnnnnnnnnnnnnnnnnnnnnnnnnnnnnnnnnnnnnnnnnnnnnnnnnnnnnnnnnnnnnnnnnnnnnnnnnnnnnnnnnnnnnnnnnnnnnnnnnnnnnnnnnnnnnnnnnnnnnnnnnnnnnnnnnnnnnnnnnnnnnnnnnnnnnnnnnnnnnnnnnnnnnnnnnnnnnnnnnnnnnnnnnnnnnnnnnnnnnnnnnnnnnnnnnnnnnnnnnnnnnnnnnnnnnnnnnnnnnnnnnnnnnnnnnnnnnnnnnnnnnnnnnnnnnnnnnnnnnnnnnnnnnnnnnnnnnnnnnnnnnnnnnnnnnnnnnnnnnnnnnnnnnnnnnnnnnnnnnnnnnnnnnnnnnnnnnnnnnnnnnnnnnnnnnnnnnnnnnnnnnnnnnnnnnnnnnnnnnnnnnnnnnnnnnnnnnnnnnnnnnnnnnnnnnnnnnnnnnnnnnnnnnnnnnnnnnnnnnnnnnnnnnnnnnnnnnnnnnnnnnnnnnnnnnnnnnnnnnnnnnnnnnnnnnnnnnnnnnnnnnnnnnnnnnnnnnnnnnnnnnnnnnnnnnnnnnnnnnnnnnnnnnnnnnnnnnnnnnnnnnnnnnnnnnnnnnnnnnnnnnnnnnnnnnnnnnnnnnnnnnnnnnnnnnnnnnnnnnnnnnnnnnnnnnnnnnnnnnnnnnnnnnnnnnnnnnnnnnnnnnnnnnnnnnnnntgaattatacttcaagagtagtgagcaatataagatgcaattgtgtttttcagtaatgtgcattgttattcagttgtactgtaccttatttggaaggatgaaggaat

SEQ ID NO: 19165 - DNA, 642 bp, Macaca Mulatta
gggggccgtccatttttcctttagttgggaaggacgttggtattgaggttggcatacgtatcaaggacagtaactaccatggcacctgaagttttgccaaaacctcagatgcgtggccttctggccaggcgtctgcgatttcatatggttacaggattcgtgctatccctgggagttgcagctttgtataaggttggtgtggctgataaaagaaagaaggcatacgcagatttctacagaaactatgatgccatgaaagattttgaggagatgaggaaggctggtatctttcagagtgtaaagtaatcttggaatataaagaatttcttcaggttggattacctagaagtttgtcactgactcctgaactatgacacatgaatatgtgggctaagaaattgttcctcttgataaataaactattaacaaattatttttattttgtcacaatgtgctttttcctgtacgacgcctccggcctcgagaagcttttataacccttctttggcgccccgttctgctcgtaaatgtcacttcgactatatttcttatacctgtaatagtttacttattttattcttctattcacaaaccttttgtacatagttcctccatcttcctttattcttatactatctacct

SEQ ID NO: 19166 - DNA, 85 bp, Macaca Mulatta
cataatggactcggaccctcgacgctgcatgaggcatcactatgtggattctatcagtcacccattgtacaagtgtagctcaaag

SEQ ID NO: 19167 - DNA, 837 bp, Macaca Mulatta
cctgtgtgtgtcaagaatgaggctgagctgggtccctagcctgattcctttaggtcagctaagacacaatcaggaacagtcatgcttccaggattaggaattctatgaatgatccatggcaccccactgcctctgcaggttggtgtcatcagctggggagtagtggatgtctgcaaaaaccagaagcggcaaaagcaggtacctgctcacgcccgagactttcacgtcaacctcttccaagtgctgccctggctgaaggagaaactccaagatgaggatttgggttttctctaaggggtttcctgctggacaggggcgcgggattgaattaaaacagctgcgacaacacttgtgttccagatccttttggggcaagggagtggggaacgggcactggccatgttgttacactgagatcaaacctgacacccatttttaaaggcttaaccccaatcccaagtgctgaaaaaccagaggctgagggagatatgtaagcttccacctcagtgttttactgagaccagcattggggcatttgaggcacaaggaatccagctctgttccctagaagccatccacaaggttttccttgtagacgtcatcactgtagacaatctgggtcctcttgtcccggtggcaacccttagggctgttctggacagctagggagggaggagaggaacagttaaggtctaaaggagatcatagatcagaccctgaggctgactcctgaccacctcagtcctggctgctggcccctggaaacccagtttccacgctgccctctggtggccaggatggcctgtcttccttagctcctttgtgccaacccatggc

SEQ ID NO: 19168 - DNA, 757 bp, Macaca Mulatta
  misc_feature (1)...(757): n = A,T,C or G
ggggagtctgaggctcttttcaacgctgnnnaannngacagaggctgttaactatggcggagggcaaccagagaaaaaaagccacttaagatgttggaatccctgggcaaagatttcctcactggcgttttggataacttggtggaacagaatgtgctgaactggaaggaagaggaaaaaaagaagtattatgatgcaaaaactgaagacaaagttcgggtcatggcagactctatccaagagaaacaacgtatggcaggtcaaatgcttcttcaaaccttttttaacatagaccaaatatccccccagtaaaaaagctcatctgaatatggaggctagaccacctgagtcaggagaatctgcagatgccctcaagctttgccctcatgaagagttcctgagactatgtaaagaaagagctgaagagatctatccaataaaggagagaaatgaccgcacacgcctggctctcatcatatgcaatacagagtttgatcatctgcctcccaagaatggagctgactttgacatcacagggatgaaagacctgcttgagggtctggactatagtgtggatgtaaaaaagaatctgacagccaaggaatatgagtcagccctgaaggcatttgctgccccgacagaacacaagtccctccgatagcacatttctgggtgctcatgtctcagggcatcccggaaggaaatcgcccgaacggcccctgaggagaaaaaccccaaggtgctgccttttgaaacc

SEQ ID NO: 19169 - DNA, 422 bp, Macaca Mulatta
  misc_feature (1)...(422): n = A,T,C or G
aaatctctgccgctgttagaaaatcaaatcaaggagagtcaccagggaataacagaggagctacaaaagtatggtgtcgacataccagaagatgaaaatgaaaaaatgttctttctgatagnnnnnttaatgcctttaatcaggacatcactgctctcatacaaggggaggaaactgtaggggnnnnnnnnnnnnnnnnnnnnnnnnnnnnnnnnnnnnnnnnnnnnnnnnnnnnnnnnnnnnnnnnnnnnnnnnnnnnnnggccataaaattacgagtagaaaaatgcagaaatttgaaaatcagtatcgtggtagagagctgccaggctttgtgaattacaggacatttgagacaatcgtaaaacagcaaatcaaggcactggaagagccagctgtgaatatgctacacactgtgacggn

SEQ ID NO: 19170 - DNA, 788 bp, Macaca Mulatta
gggggaggaggaggagggactcggcgggaggatgggcttgctctcaattttgcgcaagttgaaaagtgcaccagaccaggagctaagaatacttctcctgggcttggataatgctggcaagaccactcttctgaagcagctagcatctgaagatatcagccacatcacacctacacagggtttcaacatcaaaagtgtacaatcacaaggttttaaactgaatgtatgggacattggtggacagaggaaaatcagaccatactggaggaattattttgaaaatactgatattcttatatatgtaatcgacagtgcagacagaaaaaggtttgaagagacgggtcaggaactagcggaattattggaggaagaaaaactaagttgtgtgccagtgctcatctttgctaataagcaggatttgctcacagcagctcctgcctctgaaattgcagaaggactgaacctgcataccatccgcgaccgagtctggcagatccagtcttgctcagctctcacaggagagggcgttcaggatggcatgaactgggtctgcaaaaatgtcaatgcaaagaaaaaataaaatcttgacgaatggagacgcaggagctgcgggagccgaattcggccctgaaaaacactaattttggctgctttctgaacaaatgttttttccatctgtggtacagcctacagctgttttgaagagaagggaacaacacagttttagaaaagaatcccccattcccgcagtagaatttaaatggatctctggaggttccagtatcctc

SEQ ID NO: 19171 - DNA, 157 bp, Macaca Mulatta
ttccattcctgtgtcattatgtgtgggcttgcttcgtgtcttaacctctgctcttctggcttagggatggacacagcaagtcgtagtagtgggtaattcatgttctctaaataatgaggtccttcctacacagtccccataatctagaattttaaaa

SEQ ID NO: 19172 - DNA, 114 bp, Macaca Mulatta
tgactgtgaagtgctgaccacactcaccccagacactggtcgtatcctgtccaagctgcacactgtccaacccaagggcaagatcaccttctgcactggtatccgcgtggccca

SEQ ID NO: 19173 - DNA, 2677 bp, Macaca Mulatta
  misc_feature (1)...(2677): n = A,T,C or G
nagccaatacgaagagaaggccaaggccttcaaggagcagctctctcactcgcccaccttgctgcccaccctgcaggnnnnnnnnnnnnnnnnnnnnnnnnnnnnnnnnnnnnnnnnnnnnnnnnnnnnnnnnnnnnnnnnnnnnnnnnnnnnnnnnnnnnnnnnnnnnnnnnnnnnnnnnnnnnnnnnnnnnnnnnnnnnnnnnnnnnnnnnnnnnnnnnnnnnnnnnnnnnnnnnnnnnnnnnnnnnnnnnnnnnnnnnnnnnnnnnnnnnnnnnnnnnnnnnnnnnnnnnnnnnnnnnnnnnnnnnnnnnnnnnnnnnnnnnnnnnnnnnnnnnnnnnnnnnnnnnnnnnnnnnnnnnnnnnnnnnnnnnnnnnnnnnnnnnnnnnnnnnnnnnnnnnnnnnnnnnnnnnnnnnnnnnnnnnnnnnnnnnnnnnnnnnnnnnnnnnnnnnnnnnnnnnnnnnnnnnnnnnnnnnnnnnnnnnnnnnnnnnnnnnnnnnnnnnnnnnnnnnnnnnnnnnnnnnnnnnnnnnnnnnnnnnnnnnnnnnnnnnnnnnnnnnnnnnnnnnnnnnnnnnnnnnnnnnnnnnnnnnnnnnnnnnnnnnnnnnnnnnnnnnnnnnnnnnnnnnnnnnnnnnnnnnnnnnnnnnnnnnnnnnnnnnnnnnnnnnnnnnnnnnnnnnnnnnnnnnnnnnnnnnnnnnnnnnnnnnnnnnnnnnnnnnnnnnnnnnnnnnnnnnnnnnnnnnnnnnnnnnnnnnnnnnnnnnnnnnnnnnnnnnnnnnnnnnnnnnnnnnnnnnnnnnnnnnnnnnnnnnnnnnnnnnnnnnnnnnnnnnnnnnnnnnnnnnnnnnnnnnnnnnnnnnnnnnnnnnnnnnnnnnnnnnnnnnnnnnnnnnnnnnnnnnnnnnnnnnnnnnnnnnnnnnnnnnnnnnnnnnnnnnnnnnnnnnnnnnnnnnnnnnnnnnnnnnnnnnnnnnnnnnnnnnnnnnnnnnnnnnnnnnnnnnnnnnnnnnnnnnnnnnnnnnnnnnnnnnnnnnnnnnnnnnnnnnnnnnnnnnnnnnnnnnnnnnnnnnnnnnnnnnnnnnnnnnnnnnnnnnnnnnnnnnnnnnnnnnnnnnnnnnnnnnnnnnnnnnncccggaaaagagagagatgacgtcagagcctaaaggaaacagctgggctccgaacggcctctcggaagagcctctactcaaaaataaggatcatcacagatccaaacagaaaaacaggggtgacatccccacatggagggaacacctgacttagcaaatgggacaggtccccagggtcaggcttttagagcaggcacaagactgggacactggagagaaggttgttcccatnnnnnnnnnnnnnnnnnnnnnnnnnnnnnnngagacggagtttcgctcttcgttgcccaggctggagtgtaatggtgcaatctcggctccctgcaacctctgtctcctgggttcaagtgattctcctgccacagcctcgcgagtagctgggattacaggtgcctgccaccatgccccgctaattttttgtatttttagtagagatggggtttcaccatgttggccaagctggtctcgaactccagacctcaggtgatccacctgtctcagcctcccaaagtgctaggattacaggagtgagccaccgtgcctggccannnnnnnnnnnnnnnnnnnnnnnnnnnnnnnnnnnnnnnnnnnnnnnnnnnnnnnnnnnnnnnnnnnnnnnnnnnnnnnnnnnnnnnnnnnnnnnnnnnnnnnnnnnnnnnnnnnnnnnnnnnnnnnnnnnnnnnnnnnnnnnnnnnnnnnnnnnnnnnnnnnnnnnnnnnnnnnnnnnnnnnnnnnnnnnnnnnnnnnnnnnnnnnnnnnnnnnnnnnnnnnnnnnnnnnnnnnnnnnnnnnnnnnnnnnnnnnnnnnnnnnnnnnnnnnnnnnnnnnnnnnnnnnnnnnnnnnnnnnnnnnnnnnnnnnnnnnnnnnnnnnnnnnnnnnnnnnnnnnnnnnnnnnnnnnnnnnnnnnnnnnnnnnnnnnnnnnnnnnnnnnnnnnnnnnnnnnnnnnnnnnnnnnnnnnnnnnnnnnnnnnnnnnnnnnnnnnnnnnnnnnnnnnnnnnnnnnnnnnnnnnnnnnnnnnnnnnnnnnnnnnnnnnnnnnnnnnnnnnnnnnnnnnnnnnnnnnnnnnnnnnnnnnnnnnnnnnnnnnnnnnnnnnnnnnnnnnnnnnnnnnnnnnnnnnnnnnnnnnnnnnnnnnnnnnnnnnnnnnnnnnnnnnnnnnnnnnnnnnnnnnnnnnnnnnnnnnnnnnnnnnnnnnnnnnnnnnnnnnnnnnnnnnnnnnnnnnnnnnnnnnnnnnnnnnnnnnnnnnnnnnnnnnnnnnnnnnnnnnnnnnnnnnnnnnnnnnnnnnnnnnnnnnnnnnnnnnnnnnnnttccagcaagggcagagctcctaaagccaggggttagcacctggccagcttacgtagcagatggtctcagttacttcactgctttcccaaactcctgcagctctcctgcatccaccttctgttgatagcaaagcactgggtaagaacaaccttttttctagtagttttttccaagcagttttccatttctccacagtaccctttccatttagaggagcttaataactgcttgttaaaa

SEQ ID NO: 19174 - DNA, 199 bp, Macaca Mulatta
aggacactgtagtggccactctgcgtgtcttcgatgcagacgtggtacctgcgtcaggggagctggtgaggcggtacacaagcacgctgctccccggggacacctggacccagcagaccttccgggtggagcactggcccaacgagacctcagtccaggccaacggcagcttcgtgcgggcgaccgtacatgactatag

SEQ ID NO: 19175 - DNA, 1228 bp, Macaca Mulatta
  misc_feature (1)...(1228): n = A,T,C or G
aagaaaatgtttcagaaacggttccccaaatgccggttctgtggagcagacgcccaagaagcctggcctcagaagacgtcaaacgtaaacagctagaattaagaatatgtttccttgtttatcagatacatcttgatcttgatgaagcaaggaagatatacatgaaaattttaaaaatacatatcgttgacttcatggaatggacatcctgtataagcactgaaaagcaacaataacactaaaattttaggcactcttaaatgatctgcctctaaaagcgttggatgtagcattatgcaattaggtttttccttatttgcttcattgtactacctgtgtatatagttttaccttttatgtagcacataaactttggggaagggagggcagggtggggctgagtaactgacatggagggggatatgaagagcttgctttgatttgcagcaagtagataaatatttgactttcatgaagagaagcaattttgggaaaggttttgaattgttttctttaaagatgtaatgtccctttcagtgacggctgatacttcatttgaaaaatcacaaaaatttgaacactggctaaagataattgctattgtttattctcatttgggagatctggtgatctcccaagtttgttaaatagctgcatatggcttttttaaaaaagcaacaaaaacctatcctcagtgccctccccaatctctcttaaagttggaatttaccagttaatcagcagaatggtaatcactccaggtagtttggggcaaaaatccgaagtgcttgggagttttcaatgttaagaattgaccatctgcttttattaaatttgttgacaaaatttcttcatttgcttttcactttgggctgtgtaaacacagtccaaataattctaaatccatcgatatttttaaagatctgtaagtaacttcacatnnnnnnnnnnnnnnnnnnnnnnnnnnngcttctttgtccatttatccaaaggaaggtgttatttttaaaggaaggttcatgtagagaaaagcacacttgtaggataagtgaaatggatactacatctttaaacagtatttcattgcctgtgtatggaaaacctttttgaagtgtacctgtgtacataactctgtaaaaacactgaaaaattattactaaccttatttatgtttaaannnnnnnnnnnnnnnnnnnctagaccatatttccaagccaaagtgtggcat

SEQ ID NO: 19176 - DNA, 1315 bp, Macaca Mulatta
  misc_feature (1)...(1315): n = A,T,C or G
gatgaaaaaacagatatatacatgagactgtggttgaagaacagatcattggcgagaactcacctcctgattattcagaatatatgacaggaaagaaacttcctcctggaggaatacctggcattgacctctcagatcccaaacaactggcagaatttgctagaatgaagccaagaaaaattaaagaagatgatgctccaagaacaatagcttgccctcataaaggctgcacaaagatgttcagggataactcggccatgagaaaacatctgcacacccacggtcccagagtccacgtctgtgcagaatgtggcaaagcctttgttgagagttcaaaactaaaacgacaccaactggttcatactggagagaagccctttcagtgcacgttcgaaggctgtgggaaacgcttttcactggacttcaatttgcgcacacatgtgcgaatccataccggagacaggccctatgtgtgccccttcgatggttgtaataagaagtttgctcagtcaactaacctgaaatctcacatcttaacacatgctaaggccaaaaacaaccagtgaaaagaagagagaagacccttctcgaccacgggaagcatcttccagaagtgtgattgggaataaatatgcctctcctttgtatattatttctaggaagaattttaaaaatgaatcctacacacctaagggacatgttttgataaagtagtaaaaannnnnnnnnnnnnnnnnnnnactaagatgacattgctaagatgctctatcttgctctgtaatctcgtttcaaaaacacagtgtttttgtaaagtgtggtcccaacaggaggacaattcatgaacttcgcatcaaaagacaattctttatacaacagtgctaaaaatgggacttcttttcacattcttataaatatgaagctcacctgttgcttacaatttttttaattttgtattttccaagtgtgcatattgtacacttttttggggatatgcttagtaatgctatgtgtgatttttctggaggttgataactttgcttgcagtagattttctttaaaagaatgggcagttacatgcatacttcaaaagtattttccnnnnnnnnnnnnnnnnnnnnatatagggtttttgtttgctatccttatttttggtttgtattcctttgaatgttaacacatttttgtataatttgtaaccgtaataagctgtaattggaatccatggtagtatccaaaatatttagaaagggaattttaataagggggttaaacccaaatttaaaacccctttttttagttcaaccttttttttttt

SEQ ID NO: 19177 - DNA, 715 bp, Macaca Mulatta
  misc_feature (1)...(715): n = A,T,C or G
ccagtgatgggcctcgaggagattgccccctgcacaagcaaacggaagacccagtgccgctgccagccgggaatgttctgtgctgcctgggccctcgagtgtacacactgcgaattactttctgactgcccgcctggcactgaagccgagctcaaannnnnnnnnnnnnnnnnnnnnnnnnnnnnnnnnnnnnnnnnnnnnnnnnnnnnnnnnnnnnnnnnnnnnnnnnnnnnnnnnnnnnnnnnnnnnnnnnnnnnnnnnnnnnnnnnnnnnnnnnnnnnnnnnnnnnnnnnnnnnnnnnnnnnnnnnnnnnnnnnnnnnnnnnnnnnnnnnnnnnnnnnnnnnnnnnnnaaccatgctgatgctggccatcctgctgccactggcattctttctgctccttgccaccatctttgcctgcatctggaagagccacccttctctttgcaggaaactgggnnnnnnnnnnnnnnnnnnnnngcagggagagggacctaatcctgtagctgcaggcagggaccctccaaaggcccaatccacagtaccctgacctggtagagccattgctacccatctctggagatgtttccccagtatccactgggcttcccacagccctagtttcggaggaaggggtgccgcagcagcagagtcctctggacctgaccacggagccgcagttggaacntggggagcagaaccaggtggcccacgg

SEQ ID NO: 19178 - DNA, 583 bp, Macaca Mulatta
  misc_feature (1)...(583): n = A,T,C or G
gaggagatgatcttccagatcccatggaagcatgttgccaagcatggctgggacatcaacaatgatgcctgtttgttccggagctgggccattcacacagnnnnnnnnnnnnnnnnnnnnnnnnnnnnnnnnnnnnnnnnnnnnnnnnnnnnnnnnnnnnnnnnnnnnnnnnnnnnnnnnnnnnnnnnnnnnnnnnnnnnnnnnnnnnnnnnnnnnnnnnnnnnnnnnnnnnnnnnnnnnnnnnnnnnnnnnnnnnnnnnnnnnnnnnnnnnnnnnnnnnnnnnnnnnnnnnnnnnnnnnnnnnnnnnnnnnnnnnnnnnnnnngtcatgtggggattccagccctgataccttctctgatggactcagcagctccactctgcctgatgaccacagcagctacacagctccgggctacatgcaggacttggaggtggagcgggccctgactccagnccagcactgtcgccgtgtgctgtcagcagcactctccctgactggcacatcccagtggaagttgtgccggacagcaccagtgatctgtacaacttccaggtgtcacccatgccctccacctctgaag

SEQ ID NO: 19179 - DNA, 712 bp, Macaca Mulatta
  misc_feature (1)...(712): n = A,T,C or G
gagggtcctgcctccanggaatagatggacatggcctggcagatgatgcagctgctgcttctggctttggtgactgcttcaaggagtgcccagcccaggagttcgcgggccaggacggacctgctcaatgtctgcatgaacgccaagcaccacaaggcacagcccagtcccgaggacgagctgtatggccagtgcagtccctggaagaagaatgcctgctgcacggccaacaccagccaggagctgcacaaggacacctcccgcctgtacaactttaactgggaccactgtggtaagatggagcccgcctgcaagcgccactttatccaggatgcctgtctctatgagtgctcacccaacttggggccctggatctggcaggtcaaccagagctggcgcaaagagcgcatcctgaatgtgcccctgtgcaaagaggactgtgagcgatggtgggaggactgtcgcacctcctacacctgcaagagcaactggcacaaaggctggaattggacctcagggattaatgagtgtccggcccgggccctctgccgcacctttgagtcctacttccccactccagccgccctttgtgaaggcctctggagccactccttcaaggtcagtaactacagtggagggagcggncgctgcatccagatgtggtttgactcaggccagggcaacgccaatgaggaggtgggcaagttctatg

SEQ ID NO: 19180 - DNA, 671 bp, Macaca Mulatta
  misc_feature (1)...(671): n = A,T,C or G
nnnnnnnnnnnnnnnnnnnnnnnnnnnnnnnnnnnnnnnnnnnnctttgatgaaggtgagctataatattggtggttaacataatccagaaggcttagttctgtgtgtgttctgtccctatataaactagtaaaaaaaaaagttatgcagaatgttagatatttacatttgaattggtatgccactattctaggaaaaattaaatagtattttttttaaatagaatgaacttcaaaattaaagttgatctttaacttccatattagcaaatactcttcactactgaaagtactattttgcatattctgcataactttaagtctttagtgaaatctttattggaagaaagtcatttgacagcaggcaaaaatttaatgatttggtatgaagtaaactcaatcttctgatttggaaaatattataaaggtttcacttctttttggatgttttaaaatagacatagacacttgaaagtactatcatcacgtctcaaatcacctagaattcctagtatttttaaattgcaaaaacaatttcaagtttatttaaatactccagaagttataatcctactaattgtgctagactttgctagtagagggggcccctctttctggatgagaagtctctcttggagccatagaagagaccatggctttcccataggttta

SEQ ID NO: 19181 - DNA, 1688 bp, Macaca Mulatta
  misc_feature (1)...(1688): n = A,T,C or G
ttgaagccggtaggcagtgataatccgcattcagttgccgaggagtgccagtgaccttcagtttctggagctggccgtcaacatgtcctttcctaaggcgcccctgaaaagattcaatgacccttctggtnnnnnnnnnnnnnnnnnnnnnnnnnnnnnnnnnnnnnnnnnnnnnnnnnnnnnnnnnnnnnnnnnnnnnnnnnnnnnnnnnnnnnnnnnnnnnnnnnnnnnnnnnnnnnnnnnnnnnnnnnnnnnnnnnnnnnnnnnnnnnnnnnnnnnnnnnnnnnnnnnnnnnnnnnnnnnnnnnnnnnnnnnnnnnnnnnnnnnnnnnnnnnnnnnnnnnnnnnnnnnnnnnnnnnnnnnnnnnnnnnnnnnnnnnnnnnnnnnnnnnnnnnnnnnnnnnnnnnnnnnnnnnnnnnnnnnnnnnnnnnnnnnnnnnnnnnnnnnnnnnnnnnnnnnnnnnnnnnnnnnnnnnnnnnnnnnnnnnnnnnnnnnnnnnnnnnnnnnnnnnnnnnnnnnnnnnnnnnnnnnnnnnnnnnnnnnnnnnnnnnnnnnnnnnnnnnnnnnnnnnnnnnnnnnnnnnnnnnnnnnnnnnnnnnnnnnnnnnnnnnnnnnnnnnnnnnnnnnnnnnnnnnnnnnnnnnnnnnnnnnnnnnnnnnnnnnnnnnnnnnnnnnnnnnnnnnntgtttcaatagagaaagaaaagattgatgaaaaatctgaaacagaaaaactcttagaatacatcgaagaaattagnagttgtgcttcagatcaagtggaaaaatacaagctagatgttgcccagttagaagaaaatttgaaagagaagaatgatgaaatgttaagccttaagcagtctcttgaggagaatattgttatattatctaaacaagtagacagtctaaatgaaaaatgtcagctgcttgaaaaagaaaaagnnnnnnnnnnnnnnnnnnnnnnnnnnnnnnnnnnnnnnnnnnnnnnnnnnnnnnnnnnnnnnnnnnnnnnnnnnnnnnnnnnnnnnnnnnnnnnnnnnnnnnnnnnnnnnnnnnnnnnnnnnnnnnnnnnnnnnnnnnnnnnnnnnnnnnnnnnnnnnnnnnnnnnnnnnnnnnnnnnnnnnnnnnnnnnnnnnnnnnnnnnnnnnnnnnnnnnnnnnnnnnnnnnnnnnnnnnnnnnnnnnnnnnnnnnnnnnnnnnnnnnnnnnnnnnnnnnnnnnnnnnnnnnnnnnnnnnnnnnnnnnnnnnnnnnnnnnnnnnnnnnnnnnnnnnnnnnnnnnnnnnnnnnnnnnnnnnnnnnnnnnnnnnnnnnnnnnnnnnnnnnnnnnnnnnnnnnnnnnnnnnnnnnnnnnnnnnnnnnnnnnnnnnnnnnnnnnnnnnnnnnnnnnnnnnnnnnnnnnnnnnnnnnnnnnnnnnnnnnaagctataaagcattaacagccagtgagatagaagatcttaagctggagaactcatcattacaggaaacagtggccaaggctggaaaaagtgcagaggatgttcagcatcagatactggcaactgagagctcaaatcaagaatatgnaaggatgctttctagatctgcagaccaagtcagcatttaaagaaaaaagaaattaaagaaaatcacattttcttttctccaaaaattaactgatttgcagacccaactcaagcaacaagagg

SEQ ID NO: 19182 - DNA, 655 bp, Macaca Mulatta
  misc_feature (1)...(655): n = A,T,C or G
aaagattcggcaggatgatacgagttcatccatcaatttcctgactcgagttagtggcattgnnnnnnnnnnnnnnnnnnnnnnnnnnnnnnnnnnnnnnnnnnnnnnnnnnnnnnnnnnnnnnnnnnnnnnnnnnnnnnnnnnnnnnnnnnnnnnnnnnnnnnnnnnnnnnnnnnnnnnnnnnnnnnnnnnnnnnnnnnnnnnnnnnnnnnnnnnnnnnnnnnnnnnnnnnnnnnnnnnnnnnnnnnnnnnnnnnnnnnnnnnnnnnnnnnnnnnnnnnnnnnnnnnnnnnnnnnnnnnnnnnnnnnnnnnnnnnnnnnnnnnnnnnnnnnnnnnnnnnnnnnnnnnnnnnnnnnnnnnnnnnnnnnnnnnnnnnnnnnnnnnnnnnnnnnnnnnnnnnnnnnnnnnnnnnnnnnnnnnnnnnnnnnnnnnnnnnnnnnnnnnnnnnnnnnnnnnnnnnnnnnnnnnnnnnnnnnnnnnnnnnnnnnnnnnnnnnnnnnnnnnnnnnnnnnnggttgatacccaaagatcagtattactgtggtgttctctatttcactgggagtgatattttcaataagaatatgagggctcatgccctagaaaagggtttcacaatcaatgagtacaccatccgtcccttgggagtcactgg

SEQ ID NO: 19183 - DNA, 1142 bp, Macaca Mulatta
  misc_feature (1)...(1142): n = A,T,C or G
cactgattggctggaggaatgttacacggctgctggtgttttccacagatgccgggtttcactttgctggagatgggaaacttggtggcattgttttaccaaatgatggacagtgtcacctggaaaataatatgtacacaatgagtcattattatggattatccttctattgctcaccttgtccagaaactgagtgaaaataatattcagacaatttttgcagttactgaagaatttcagcccgtttacaagnnnnnnnnnnnnnnnnnnnnnnnnnnnnnnnnnnnnnnnnnnnnnnnnnnnnnnnnnnnnnnnnnnnnnnnnnnnnnnnnnnnnnnnnnnnnnnnnnnnnnnnnnnnnnnnnnnnnnnnnnnnnnnnnnnnnnnnnnnnnnnnnnnnnnnnnnnnnnnnnnnnnnnnnnnnnnnnnnnnnnnnnnnnnnnnnnnnnnnnnnnnnnnnnnnnnnnnnnnnnnnnnnnnnnnnnnnnnnnnnnnnnnnnnnnnnnnnnnnnnnnnnnnnnnnnnnnnnnnnnnnnnnnnnnnnnnnnnnnnnnnnnnnnnnnnnnnnnnnnnnnnnnnnnnnnnnnnnnnnnnnnnnnnnnnnnnnnnnnnnnnnnnnnnnnnnnnnnnnnnnnnnnnnnnnnnnnnnnnnnnnnnnnnnnnnnnnnnnnnnnnnnnnncaggtgcaacgaagggcgtgttggtagacattgtgaatgcagcacagatgaagttaacagtgaagacatggacgcttactgcagaaaagaaaacagttcagaaatctgcagtaacaatggagagtgcgtttgtggacagtgtgtttgtaggaagagggatagtacaaaagaaatttattctggcaaattctgcgagtgtgataatttcaactgtnnnnnnnnnnnnnnnnnnnnnnnnnaggaaatggtgtttgcaagtgtcgtgtgtgtgagtgcaaccccaactacactggcagtgcatgtgactgttctttggatactagtacttgcgaagccagcaacggacagatctgtaatggccggggcatctgcgaatgtggtgtctgtaagtgtacagatccgaagttccaagggcaaacatgtgagatgtgtcagacctgccttggtgtctgtgctgagcata

SEQ ID NO: 19184 - DNA, 3064 bp, Macaca Mulatta
  misc_feature (1)...(3064): n = A,T,C or G
atgccggcgcgtaccgccccagcccgggtgcccacactggccgtcccggccatctcactgcccgacgatgtccgcaggcgnnnnnnnnnnnnnnnnnnnnnnnnnnnnnnnnnnggaatgtgtgaaggagaaattgaatctcttgcatgaatttctgcaaacagaaataaagaatcacctatgtgacttggaaaccaaattacgtaaagaagaattatctgaggnnnnnnnnnnnnnnnnnnnnnnnnnnnnnnnnnnnnnnnnnnnnnnnnnnnnnnnnnnnnnnnnnnnnnnnnnnnnnnnnnnnnnnnnnnnnnnnnnnnnnnnnnnnnnnnnnnnnnnnnnnnnnnnnnnnnnnnnnnnnnnnnnnnnnnnnnnnnnnnnnnnnnnnnnnnnnnnnnnnnnnnnnnnnnnnnnnnnnnnnnnnnnnnnnnnnnnnnnnnnnnnnnnnnnnnnnnnnnnnnnnnnnnnnnnnnnnnnnnnnnnnnnnnnnnnnnnnnnnnnnnnnnnnnnnnnnnnnnnnnnnnnnnnnnnnnnnnnnnnnnnnnnnnnnnnnnnnnnnnnnnnnnnnnnnnnnnnnnnnnnnnnnnnnnnnnnnnnnnnnnnnnnnnnnnnnnnnnnnnnnnnnnnnnnnnnnnnnnnnnnnnnnnnnnnnnnnnnnnnnnnnnnnnnnnnnnnnnnnnnnnnnnnnnnnnnnnnnnnnnnnnnnnnnnnnnnnnnnnnnnnnnnnnnnnnnnnnnnnnnnnnnnnnnnaacacccaaacagaaactgaaggaggagccggacagagaagccagggcaggtgtgcacgctgacgaggacgaagacggagatgagaaannnnnnnnnnnnnnnnnnnnnnnnnnnnnnnnnnnnnnnnnnnnnnnnnnnnnnnnnnnnnnnnnnnnnnnnnnnnnnnnnnnnnnnnnnnnnnnnnnnnnnnnnnnnnnnnnnnnnnnnnnnnnnnnnnnnnnnnnnnnnnnnnnnnnnnnnnnnnnnnnnnnnnnnnnnnnnnnnnnnnnnnnnnnnnnnnnnnnnnnnnnnnnnnnnnnnnnnnnnnnnnnnnnnnnnnnnnnnnnnnnnnnnnnnnnnnnnnnnnnnnnnnnnnnnnnnnnnnnnnnnnnnnnnnnnnnnnnnnnnnnnnnnnnnnnnnnnnnnnnnnnnnnnnnnnnnnnnnnnnnnnnnnnnnnnnnnnnnnnnnnnnnnnnnnnnnnnnnnnnnnnnnnnnnnnnnnnnnnnnnnnnnnnnnnnnnnnnnnnnnnnnnnnnnnnnnnnnnnnnnnnnnnnnnnnnnnnnnnnnnnnnnnnnnnnnnnnnnnnnnnnnnnnnnnnnnnnnnnnnnnnnnnnnnnnnnnnnnnnnnnnnnnnnnnnnnnnnnnnnnnnnnnnnnnnnnnnnnnnnnnnnnnnnnnnnnnnnnnnnnnnnnnnnnnnnnnnnnnnnnnnnnnnnnnnnnnnnnnnnnnnnnnnnnnnnnnnnnnnnnnnnnnnnnnnnnnnnnnnnnnnnnnnnnnnnnnnnnnnnnnnnnnnnnnnnnnnnnnnnnnnnnnnnnnnnnnnnnnnnnnnnnnnnnnnnnnnnnnnnnnnnnnnnnnnnnnnnnnnnnnnnnnnnnnnnnnnnnnnnnnnnnnnnnnnnnnnnnnnnnnnnnnnnnnnnnnnnnnnnnnnnnnnnnnnnnnnnnnnnnnnnnnnnnnnnnnnnnnnnnnnnnnnnnnnnnnnnnnnnnnnnnnnnnnnnnnnnnnnnnnnnnnnnnnnnnnnnnnnnnnnnnnnnnnnnnnnnnnnnnnnnnnnnnnnnnnnnnnnnnnnnnnnnnnnnnnnnnnnnnnnnnnnnnnnnnnnnnnnnnnnnnnnnnnnnnnnnnnnnnnnnnnnnnnnnnnnnnnnnnnnnnnnnnnnnnnnnnnnnnnnnnnnnnnnnnnnnnnnnnnnnnnnnnnnnnnnnnnnnnnnnnnnnnnnnnnnnnnnnnnnnnnnnnnnnnnnnnnnnnnnnnnnnnnnnnnnnnnnnnnnnnnnnnnnnnnnnnnnnnnnnnnnnnnnnnnnnnnnnnnnnnnnnnnnnnnnnnnnnnnnnnnnnnnnnnnnnnnnnnnnnnnnnnnnnnnnnnnnnnnnnnnnnnnnnnnnnnnnnnnnnnnnnnnnnnnnnnnnnnnnnnnnnnnnnnnnnnnnnnnnnnnnnnnnnnnnnnnnnnnnnnnnnnnnnnnnnnnnnnnnnnnnnnnnnnnnnnnnnnnnnnnnnnnnnnnnnnnnnnnnnnnnnnnnnnnnnnnnnnnnnnnnnnnnnnnnnnnnnnnnnnnnnnnnnnnnnnnnnnnnnnnnnnnnnnnnnnnnnnnnnnnnnnnnnnnnnnnnnnnnnnnnnnnnnnnnnnnnnnnnnnnnnnnnnnnnnnnnnnnnnnnnnnnnnnnnnnnnnnnnnnnnnnnnnnnnnnnnnnnnnnnnnnnnnnnnnnnnnnnnnnnnnnnnnnnnnnnnnnnnnnnnnnnnnnnnnnnnnnnnnnnnnnnnnnnnnnnnnnnnnnnnnnnnnnnnnnnnnnnnnnnnnnnnngggaggcatggatcccgagtccctgctggagggggacgacgggaagacctacttctaccagctgtggtatgatcaagactacgcgagattcgagtcccctccaaaaacccagccaacggaggacaacaagttcaannnnnnnnnnnnnnnnnnnnnnnnnnnnnnnnnnnnnnnnnnnnnnnnnnnnnnnnnnnnnnnnnnnnnnnnnnnnnnnnnnnnnnnnnnnnnnnnnnnnnnnnnnnnnnnnnnnnnnnnnnnnnnnnnnnnnnnnnnnnnnnnnnnnnnnnnnnnnnnnnnnnnnnnnnnnnnnnnnnnnnnnnnnnnnnnnnnnnnnnnnnnnnnnnnnnnnnnnnnnnnnnnnnnnnnnnnnnnnnnnnnnnnnnnnnnnnnnnnnnnnnnnnnnnnnnnnnnnnnnnnnnnnnnnnnnnnnnnnnnnnnnnnnnnnnnnnnnnnnnnnnnnnnntgtcccaagaagagcaacggcaggcccaacgagactgacatcaagatccgggtcaacaagttctacag

SEQ ID NO: 19185 - DNA, 882 bp, Macaca Mulatta
  misc_feature (1)...(882): n = A,T,C or G
gatcattgattgtgtccgtgagaattccaaggagcagggctttctctccttctggaggggtaacctggccaacgtgatccgttacttccccacccaagctctcaactttgccttcaaggacaagtacaagcagctcttcttacggggtgtggatcggcataagcagtcctggcgctactttgctggtaacctggcatctggtggggccgctggggccacctccctttgctttgtctacccgctggactttgctaggaccaggttggctgccgacgtgggcaagggtgccgcccagcgtgagttccatggtctgggcgactgtatcatcaagatcttcaagtctgatggcctgaggggtctctaccaaggtttcaacgtctctgtccaaggcatcattatctacagagctgcctacttcggagtctatgatactgccaaggggatgctgcctgaccccaagaacgtgcacatttttgtgagctggatgattgcccagagtgtgacggcagtcgcagggctggtgtcctaccccttcgacactgttcgtcgtaggatgatgatgcagtccggccggaaaggggctgatattatgtacactgggacagttgactgctggaggaagattgcaaagatgaaggagccaagactcttcaaggtgctggtccatgtttgagagctgggtgggcttcgaatggggtgagatgagacacagttgctagtattaaacagtcctatcaggactgacccattccatctggggtaaacatccggagcaattggtaccagagagctaaattcgtctaccattgtttcatcccaaatatctgcaaatgcacccacgctcccgtccctgttctccgcgnnnnnnnnnnnnnnnnnnna

SEQ ID NO: 19186 - DNA, 672 bp, Macaca Mulatta
  misc_feature (1)...(672): n = A,T,C or G
ggggggacaccggtgagtcgccggcgctgcagagagaggcggcactggtctcgacttggggcggccagcgatgaagccgcctagttcaatacaaacaagtgagtttgactcatcagacgaagagcctattgaagatgaacagactccaattcagatatcatggctatctttgtcacgagtgaattgttctcagtttctcggtttatgtgctcttccaggttgtaaatttaaagatgttagaagaaatgtccaaaaagatacagaagaactaaagagctgtggtatacaagacatatttgttttctgcaccagaggggaactgtcaaaatatagagtcccaaaccttctggatctctaccagcaatgtggaattatcacccatcatcatccaatcgcagatggagggactcctgacatagccagctgctgtgaaataatggaagagcttacaatctgccttanaaattaccggaaaaccttaatacactgctatggaggacttgggagatctttgtctgtagctgcttgtctcctactatacctgtctgaacacatatcaccagagncagccatagacagcctgcgagacctagaagatccggggcatacagaccatcagcatacaatatcttctgagttcnggacaattactgccctcttcatcagagatcc

SEQ ID NO: 19187 - DNA, 1311 bp, Macaca Mulatta
  misc_feature (1)...(1311): n = A,T,C or G
acaaattcgacccaggagatcaaaatgattctcaactcttctaccgaagatggtattaaaagaatccaagacgattgtcccaaagctggaaggcataattacatatttgtcatgattcctactttatacagtatcatctttgtggtgggaatatttggaaacagcttggtggtgatagtcatttacttttacatgaagctgaagactgtggccagtgtttttcttttgaatttagcactggctgacttatgctttttactgactttgccactatgggctgtctacacagctatggaataccgctggccctttggcaattacctatgtaagattgcttcagccagcgtcagtttcaacctgtatgctagtgtgttcctactcacgtgtctcagcattgatcgatacctggctattgttcacccaatgaagtcccgccttcgacgcacaatgcttgtagccaaagtcacctgcatcgtcatttggctgctggcaggcttggccagtttgccagctataatccatcgaaatgtatttttcattgagaacaccaatattacagtttgtgctttccattatgagtcccaaaattcaacccttccgataggactgggcctgaccaaaaatatactgggtttcctgtttccttttctgatcattcttacaagttatactcttatttggaaggccctaaagaaggcttatgaaagtcagaagaacaaaccnnnnnnnnnnnnnnnnnnnnnnnnnnnnnnnnnnnnnnnnnnnnnnnnnnnnnnnnnnnnnnnnnnnnnnnnnnnnnnnnnnnnnnnnnnnnnnngattcaactaggcatcatacgtgactgtagaatttcagatattgtggacacagccatgcccatcaccatttgtatagcttattttaacaattgcctgaatcctcttttttatggctttctgggnnnnnnnnnnnnnnntattttctccagcttctaaaatacattcccccaaaagccaaatcccactcaaacctttcaacaaaaatgagcacgctttcctaccgcccctcagataatgcaagctcatccaccaagaagcctgcaccatgttttgaggttgagtgacatgttcgaaacctgtccataaagtaattttgtgaaagaaggagcaagagaacattcctcggcagcacttcactaccaaatgagcattagctgcttttcagaattgaaggagaaaatggattatgtggactgaactgacttttctaaagctctgaacaaaagcttttctttccctttgcaacaagacacagcaaagccacattttgcat

SEQ ID NO: 19188 - DNA, 187 bp, Macaca Mulatta
aggttatcctgaatacatgactaacaattttccttgcaaccttagctgttgtttttcactgtttccaaaagatcaaaattgctccagaaattggagacatatttgatttaaaaggaaaaacttgaacaaatggacaatatgtctattacgaatacaccaacaaggaaaatgcctgtctgagcattgt

SEQ ID NO: 19189 - DNA, 2758 bp, Macaca Mulatta
  misc_feature (1)...(2758): n = A,T,C or G
aacccagcccttgctgacatctacacggagcacgcccatcaggtggtggtggccaagtatgcgcccagcggattctacattgcctctgganagatgtgtctgggaagctgaggatctgggataccacgcagaaggagcacctgttgaagtatgagtaccagcctttcgctgggaagatcaaagacattgcttggactgaagacagtaagaggatcgccgtggtcggggaaggaagagagaagnnnnnnnnnnnnnnnnnnnnnnnnnnnnnnnnnnnnnnnnnnnnnnnnnnnnnnnnnnnnnnnnnnnnnnnnnnnnnnnnnnnnnnnnnnnnnnnnnnnnnnnnnnnnnnnnnnnnnnnnnnnnnnnnnnnnnnnnnnnnnnnnnnnnnnnnnnnnnnnnnnnnnnnnnnnnnnnnnnnnnnnnnnnnnnnnnnnnnnnnnnnnnnnnnnnnnnnnnnnnnnnnnnnnnnnnnnnnnnnnnnnnnnnnnnnnnnnnnnnnnnnnnnnnnnnnnnnnnnnnnnnnnnnnnnnnnnnnnnnnnnnnnnnnnnnnnnnnnnnnnnnnnnnnnnnnnnnnnnnnnnnnnnnnnnnnnnnnnnnnnnnnnnnnnnnnnnnnnnnnnnnnnnnnnnnnnnnnnnnnnnnnnnnnnnnnnnnnnnnnnnnnnnnnnnnnnnnnnnnnnnnnnnnnnnnnnnnnnnnnnnnnnnnnnnnnnnnnnnnnnnnnnnnnnnnnnnnnnnnnnnnnnnnnnnnnnnnnnnnnnnnnnnnnnnnnnnnnnnnnnnnnnnnnnnnnnnnnnnnnnnnnnnnnnnnnnnnnnnnnnnnnnnnnnnnnnnnnnnnnnnnnnnnnnnnnnnnnnnnnnnnnnnnnnnnnnnnnnnnnnnnnnnnnnnnnnnnnnnnnnnnnnnnnnnnnnnnnnnnnnnnnnnnnnnnnnnnnnnnnnnnnnnnnnnnnnnnnnnnnnnnnnnnnnnnnnnnnnnnnnnnnnnnnnnnnnnnnnnnnnnnnnnnnnnnnnnnnnnnnnnnnnnnnnnnnnnnnnnnnnnnnnnnnnnnnnnnnnnnnnnnnnnnnnnnnnnnnnnnnnnnnnnnnnnnnnnnnnnnnnnnnnnnnnnnnnnnnnnnnnnnnnnnnnnnnnnnnnnnnnnnnnnnnnnnnnnnnnnnnnnnnnnnnnnnnnnnnnnnnnnnnnnnnnnnnnnnnnnnnnnnnnnnnnnnnnnnnnnnnnnnnnnnnnnnnnnnnnnnnnnnnnnnnnnnnnnnnnnnnnnnnnnnnnnnnnnnnnnnnnnnnnnnnnnnnnnnnnnnnnacgtccgcctgtactccatcctgggcaccacactgaaggatgagggcaagctcctggaggcgaagggccccgtgaccgatgtggcgtactcccacgatggcgccttcctcgcggtgtgnnnnnnnnnnnnnnnnnnnnnnnnnnnnnnnnnnnnnnnnnnnnnnnnnnnnnnnnnnnnnnnnnnnnnnnnnnnnnnnnnnnnnnnnnnnnnnnnnnnnnnnnnnnnnnnnnnnnnnnnnnnnnnnnnnnnnnnnnnnnnnnnnnnnnnnnnnnnnnnnnnnnnnnnnnnnnnnnnnnnnnnnnnnnnnnnnnnnnnnnnnnnnnnnnnnnnnnnnnnnnnnnnnnnnnnnnnnnnnnnnnnnnnnnnnnnnnnnnnnnnnnnnnnnnnnnnnnnnnnnnnnnnnnnnnnnnnnnnnnnnnnnnnnnnnnnnnnnnnnnnnnnnnnnnnnnnnnnnnnnnnnnnnnnnnnnnnnnnnnnnnnnnnnnnnnnnnnnnnnnnnnnnnnnnnnnnnnnnnnnnnnnnnnnnnnnnnnnnnnnnnnnnnnnnnnnnnnnnnnnnnnnnnnnnnnnnnnnnnnnnnnnnnnnnnnnnnnnnnnnnnnnnnnnnnnnnnnnnnnnnnnnnnnnnnnnnnnnnnnnnnnnnnnnnnnnnnnnnnnnnnnnnnnnnnnnnnnnnnnnnnnnnnnnnnnnnnnnnnnnnnnnnnnnnnnnnnnnnnnnnnnnnnnnnnnnnnnnnnnnnnnnnnnnnnnnnnnnnnnnnnnnnnnnnnnnnnnnnnnnnnnnnnnnnnnnnnnnnnnnnnnnnnnnnnnnnnnnnnnnnnnnnnnnnnnnnnnnnnnnnnnnnnnnnnnnnnnnnnnnnnnnnnnnnnnnnnnnnnnnnnnnnnnnnnnnnnnnnnnnnnnnnnnnnnnnnnnnnnnnnnnnnnnnnnnnnnnnnnnnnnnnnnnnnnnnnnnnnnnnnnnnnnnnnnnnnnnnnnnnnnnnnnnnnnnnnnnnnnnnnnnnnnnnnnnnnnnnnnnnnnnnnnnnnnnnnnnnnnnnnnnnnnnnnnnnnnnnnnnnnnnnnnnnnnnnnnnnnnnnnnnnnnnnnnnnnnnnnnnnnnnnnnnnnnnnnnnnnnnnnnnnnnnnnnnnnnnnnnnnnnnnnnnnnnnnnnnnnnnnnnnnnnnnnnnnnnnnnnnnnnnnnnnnnnnnnnnnnnnnnnnnnnnnnnnnnnnnnnnnnnnnnnnnngacaaagatgaagtcactgtaaactaatctgtcatcgtttttaccttccttttctttttcagtgcagaaattaaaagtaagtataaagcaccgtgattgggagtgtttttgcgtgtgtcggaatcactggtaaatgttggctgagaacaatccctccccttgcacttgtgaaaacactgagcgctttaagagattagcctgagaaataattaaatatcttttctcttc

SEQ ID NO: 19190 - DNA, 297 bp, Macaca Mulatta
  misc_feature (1)...(297): n = A,T,C or G
ctatttcaccccgactacacattagcgagaaaaaagaagcaggaattcctgaattttatgactatgacgttgccctgatcaagctcaagaataagttgaattatgacccgactatcaggnnnnnnnnnnnnnnnnnnnnnnnnnnnnnnnnnnnnnnnnnnnnnnnnnnnnnnnnnnnnnnnnnnnnnnnnnnnnggaagagctgctcccggcacaggatatcaaagctctggtttgtgtctgaggaggagaagaagctgactccggaaggaggtctacatcaagaatggggataag

SEQ ID NO: 19191 - DNA, 834 bp, Macaca Mulatta
  misc_feature (1)...(834): n = A,T,C or G
ggggccgccatcttggggctgctgggactcgcgtcggttggcgactcccggacgtaggtagtttgttgggccgggttctgaggcgttggttctctttacttttccacttcaggccacgatgccgcagtaccagacctgggaggagttcagccgcgctgccgaaaaactttacctcgctgatcctatgaagcaccctctaaattaccaaatggacccctttataagcacgtgtggttctcaaatataggcattctgatgggaacttgtgtgttaaagtaacagatgatttagtttgtttggtgtataaaacagagcaagctcaagatgtaaagaagattgagaaattccacagtcaactaatgcgacttatggtagccaagggaatccccgcaatgttaccatggaaactgagtgactggttttgaaatgaagaactttgtcatgtacttagggaggtaattttcttggaatatagaaagtggttggggacagaaaatacttttttgtaacctaagttggactttttcgaaacctttaaggggcatttttttggaaatttttcttttttagggtttaccccttgaaaaagcttgggggtgcccaaatggttttccgtttagaaaagccctttattttcctttttgggaaattgtgacaagaaaatggctcctctgtccttgggaaaatttttgccaaaattaatttggaggtgnnnnnnnnnnnnnnnctggaaatttggtttccccccgggcctaaattttttcttcccctaaaatttttgaaaagtgggaattattttagaaaaaannnnnnnnnnnnnnnnnnnnnaaaaaa

SEQ ID NO: 19192 - DNA, 480 bp, Macaca Mulatta
gcgttgtcctcagccctgcgtggaactcgcgtctggcacagcctgaccgcggcctaacctgctgagagcccatcagcctccatcccacccccagggccttgtcatcccaggcttcccacggctcctcgagatcccaacactgccagcatctcccttccttcctctctcctgtctccctcctctgcccgggagctcaggagccgaggcagggaagggtcctatgggctccttaaggctcttttgtaaggtttttgtagtgatttttatgccacctgaataaattttgaatgggcctggctggtttgatgtcattcattctgggcatgggtggggacaagcgaggatggtggggaaggaggggaggcggctgcagggcggactgtgctgatgaatcctaggcccagcagggcggcccgcaaagtgcacgtttggcctctggccgatcgacaggcattcttttccacatggtcccctctgacc

SEQ ID NO: 19193 - DNA, 362 bp, Macaca Mulatta
cagacatggaactatctggaaaaacccaaagaaatgtttctcaagttcaagattttggggaaggctatgagcttcaaagcaagctggatagaaagcagggaattcccatgaaagagatagtaggacaaccctcttcaaagaggatgaactacagtgaagtcccttatgtccacaaaaaatcctccactggagagagaccacataaatgtaacgagtgtgggaaaagcttcattcagagcgcacatcttattcacatcaaagaatacacactggggagaaaccattcaggtgtgaggaatgtgggaaagctacaacaacgcgtgcactaactcagcatcagcgcgtcacacaggtgagaagcc

SEQ ID NO: 19194 - DNA, 648 bp, Macaca Mulatta
  misc_feature (1)...(648): n = A,T,C or G
ggggaggtttgggtacttaattgaataatgagtaaataatcttacgtgggtagagatggcctttgccaacaaagtgaactgttggttgttttaaacttatgaggtatgggttcagtggagatgtttggaactctgaaggatttagacaaggttttgaaaaggataatcatgggttagaaggaagtgtttgaaattcgctttgaaagttagctttgggccagcatgttagctcacccttgtaatctnnnnnnnnnnnnnnnnnnnnnnnngtggattannnnnnnnnnnnnannnnnnnnnnnnnnnnatnnnnnnnnnnnnnnnnnnttctacaaaaaataagctgggctttgtagcatgtgcctgtggtctcagctactgaggaggctgaagtgggaggattgnnnnnnnnnnnnnnnnnnnnnnnnnnnnnnnnnnnngtcacgccactgtnnnnnnnnnnnnnnnnnnnagtgagnnnnnnnnnnnnnnnnnnnnttgaaaatcaaaggaggcaaaattttgacagggaaggaagtaactgcaaaacactangctttagtaggtactttatctaaatctagtccagttttctcattttaaaaatgagacactgaagtacagacttaatagctcagatactaatag

SEQ ID NO: 19195 - DNA, 484 bp, Macaca Mulatta
gctccggcttgggagggcaggtgcaggaggagatgcatgaaggaggcctctgaggcaaggaggctgcccgtgaagctttctgtatacatcatgcagccatcaccagggatgccacgaccaagacgttttcatcccttgcttctctccctctttccagtttgtggatatgctgggctggcgcctggagacggcagacagaatggacatccccgtctcattcaacccgggcagcaacagcatggtggcggatctccaggagctgcccgcaactgtccacagcgcgtcctgggtcgcacccgcgtcctacctgggggacaaggtaatgatgtcctgctgttcttctgggccctcagtggccctctactattgctgtgtgagcatcatttcctggaaatctggaaggaagcatccagcagttcaggttactaacatgccagaaatgagctgaactaaaaatgaagaagagaccttgcctcctgctgtg

SEQ ID NO: 19196 - DNA, 832 bp, Macaca Mulatta
  misc_feature (1)...(832): n = A,T,C or G
ggcagaaggaagtgggacggatgatgagtgatcaatatggacgtttttccttggtagaactgaattccttcctcccctgtctcatttctacccagtgagttcattttgtcatataggcactgggttgtttctatatcatcatcgtctataaactagctttaggatagtgccagacaaacatatgatatcatggnnnnnnnnnnnnnnnnnncatacacaaatatttgtaacatattgtgaccaaatgggcctcaaagattcaaagattgaaacaaacaaaaaagcttttgatggaaaatatgtgggtggatagtatatttctatgggtgggtctaatttggtaacggtttgattgtgcctggttttatcacctgttcagatgagaagatttttgtcttttgtagcactgataaccaggagaagccattaaaagccactggttattttatttttcatcaggcaattttcaaggtttttatttgttcggtattgtttttttacactgtggtacatataagcaactttaataggtgataaatgtacagtagttagatttcacctgcatatacatttttccattttatgctctatgatctgaacaaaagctttttgaattgtataagatttatgtctactgtaaacattgcttaatttttttgctcttgatttttaaaaagttttgttgaagcgctattgatattgcatctatatagtgattgatgctcttngcactgactcagtacaaggacgtctccangatactgtctcagtgtaacgagtnnnnnnnnnnnnnnnnnnnnnnnnnnnnnnnnnnnnnnnnnnnnnnnnnnnn

SEQ ID NO: 19197 - DNA, 491 bp, Macaca Mulatta
tactcactaaggccattccatcaggtcagtggtcccagctcactggtcatagctcaatggtcatcccagagatgacttgaaggcatttcttcctgtcccaccattaccatcaacaccaaacctggccccccaggaatgagaagaaatgaaaacaagatgggctattaagtgccgaggcaaaagcttcccaaaaggtgaggaaacaatataatagaattacttgtgtgcagaacaactttaagatcaatattccttaagcccaactactcttgggaaatgagaacaatgcaaaaatgagtttcagacatacagaacgagagcttttggaatcagaattagggtgagggaagtggaagagagattttatttggggttgcaaatgcagtgacaacaggtaccaggaagatatcaatgtaagcaatgagggctggatggaataggataaatcccagatgacactcgctttcctttggtggatgcaacacagaggg

SEQ ID NO: 19198 - DNA, 999 bp, Macaca Mulatta
  misc_feature (1)...(999): n = A,T,C or G
cacactcacttcaccctggttcaacacccccacgagattgaccctgtcattacattagagattatgcattttccacatagggaaactgaggctcagggatgttaagtgactcacccaaggtcacacggctaggaagttgctgcacgctcnnnnnnnnnnnnnnnnnnnnnnnnnnnnnnnnnnnnnnnnnnnnnnnnnnnnnnnnnnnnnnnnnnnnnnnnnnnnnnnnnnnnnnnnnnnnnnnnnnnnnnnnnnnnnnnnnnnnnnnnnnnnnnnnnnnnnnnnnnnnnnnnnnnnnnnnnnnnnnnnnnnnnnnnnnnnnnnnnnnnnnnnnnnnnnnnnnnnnnnnnnnnnnnnnnnnnnnnnnnnnnnnnnnnnnnnnnnnnnnnnnnnnnnnnnnnnnnnnnnnnnnnnnnnnnnnnnnnnnnnnnnnnnnnnnnnnnnnnnnnnnnnnnnnnnnnnnnnnnnnnnnnnnnnnnnnnnnnnnnnnnnnnnnnnnnnnnnnnnnnnnnnnnnnnnnnnnnnnnnnnnnnnnnnnnnnnnnnnnnnnnnnnnnnnnnnnnnnnnnnnnnnnnnnnnnnnnnnnnnnnnnnnnnnnnnnnnnnnnnnnnnnnnnnnnnnnnnnnnnnnnnnnnnnnnnnnnnnnnnnnnnnnnnnnnnnnnnnnnnnnnnnnnnnnnnnnnnnnnnnnnnnnnnnnnnnnnnnnnnnnnnnnnnnnnnnnnnnnnnnnnnnnnnnnnnnnnnnnnnnnnnnnnnnnnnnnnnnnnnnnnnnnnnnnnnnnnnnnnnnnnnnnnnnnnnnnnnnnnnacacggggcctgggccgcctggggtccctggagcccctgctcaggatcctgccacggaggaccccacgaacctaaggagacacgaagccgcacgtgttctgcacctgagccttcccagaagcctcttgttaagccctgcccagggccagcctatgagcatcggaagcgcaccggcctgccgccttgcccag

SEQ ID NO: 19199 - DNA, 149 bp, Macaca Mulatta
agctgatccaccttgagatcaagccggccatccggaaccagatcatccgcgagctgcaggtcctgcatgagtgcaactcgccgtacatcgtgggcttctacggggccttctacagcgacggggagatcagcatctgcatggagcacatg

SEQ ID NO: 19200 - DNA, 582 bp, Macaca Mulatta
  misc_feature (1)...(582): n = A,T,C or G
agccagtcccaaaggctccagaatctccatcgctggactcggccctggcttcgccactggaccctcaagccctggcctgcaccccagcctcccctccagattcacaatctccagcttctccccaggattctgaagccctggactttgaaaccccttcctcctccctggcaccccaaactccagactctgccttggcctctgagacccttgcttctccccagtctctgcctccagcctcaccactgctggaggataggggagagggggacctggggaaggccctggaactagcagaggccccaaagcgggagaaagcagaaggggcagcaatgctggagctggtgggatccattctcnnnnnnnnnnnnnnnnnnnnnnnnnnnnnnnnnnnnnnnnnnnnnnnnnnnnnnnnnnnnnnnnnnnnnnnnnnnnnnnnnnnnnnnnnnnnnnnnnnnnnnnnnnnnnnnnnnnggctggccctgcataactcccgtttcctgagtctcgtctctgagctagatggtcgagtccggcccctcgtgtacaccctccgctgctgggctcagggtcgggggctttcag

SEQ ID NO: 19201 - DNA, 5143 bp, Macaca Mulatta
  misc_feature (1)...(5143): n = A,T,C or G
agtgagtggctatgctctctaccagcgacacattaaagcaatgcatgagtcagcactcctggaggagcagcggcagagacaagaacagatagatttggaatgtagaagttctacaagtccatgtggcacatccaagagtccaaacagagagtgggaannnnnnnnnnnnnnnnnnnnnnnnnnnnnnnnnnnnnnnnnnnnnnnnnnnnnnnnnnnnnnnnnnnnnnnnnnnnnnnnnnnnnnnnnnnnnnnnnnnnnnnnnnnnnnnnnnnnnnnnnnnnnnnnnnnnnnnnnnnnnnnnnnnnnnnnnnnnnnnnnnnnnnnnnnnnnnnnnnnnnnnnnnnnnnnnnnnnnnnnnnnnnnnnnnnnnnnnnnnnnnnnnnnnnnnnnnnnnnnnnnnnnnnnnnnnnnnnnnnnnnnnnnnnnnnnnnnnnnnnnnnnnnnnnnnnnnnnnnnnnnnnnnnnnnnnnnnnnnnnnnnnnnnnnnnnnnnnnnnnnnnnnnnnnnnnnnnnnnnnnnnnnnnnnnnnnnnnnnnnnnnnnnnnnnnnnnnnnnnnnnnnnnnnnnnnnnnnnnnnnnnnnnnnnnnnnnnnnnnnnnnnnnnnnnnnnnnnnnnnnnnnnnnnnnnnnnnnnnnnnnnnnnnnnnnnnnnnnnnnnnnnnnnnnnnnnnnnnnnnnnnnnnnnnnnnnnnnnnnnnnnnnnnnnnnnnnnnnnnnnnnnnnnnnnnnnnnnnnnnnnnnnnnnnnnnnnnnnnnnnnnnnnnnnnnnnnnnnnnnnnnnnnnnnnnnnnnnnnnnnnnnnnnnnnnnnnnnnnnnnnnnnnnnnnnnnnnnnnnnnnnnnnnnnnnnnnnnnnnnnnnnnnnnnnnnnnnnnnnnnnnnnnnnnnnnnnnnnnnnnnnnnnnnnnnnnnnnnnnnnnnnnnnnnnnnnnnnnnnnnnnnnnnnnnnnnnnnnnnnnnnnnnnnnnnnnnnnnnnnnnnnnnnnnnnnnnnnnnnnnnnnnnnnnnnnnnnnnnnnnnnnnnnnnnnnnnnnnnnnnnnnnnnnnnnnnnnnnnnnnnnnnnnnnnnnnnnnnnnnnnnnnnnnnnnnnnnnnnnnnnnnnnnnnnnnnnnnnnnnnnnnnnnnnnnnnnnnnnnnnnnnnnnnnnnnnnnnnnnnnnnnnnnnnnnnnnnnnnnnnnnnnnnnnnnnnnnnnnnnnnnnnnnnnnnnnnnnnnnnnnnnnnnnnnnnnnnnnnnnnnnnnnnnnnnnnnnnnnnnnnnnnnnnnnnnnnnnnnnnnnnnnnnnnnnnnnnnnnnnnnnnnnnnnnnnnnnnnnnnnnnnnnnnnnnnnnnnnnnnnnnnnnnnnnnnnnnnnnnnnnnnnnnnnnnnnnnnnnnnnnnnnnnnnnnnnnnnnnnnnnnnnnnnnnnnnnnnnnnnnnnnnnnnnnnnnnnnnnnnnnnnnnnnnnnnnnnnnnnnnnnnnnnnnnnnnnnnnnnnnnnnnnnnnnnnnnnnnnnnnnnnnnnnnnnnnnnttacaatttcttctaacaagtctaccaatcatgaaaggaaatcgacactgacccctacgcagagggaaagtatcccagcgaagtctccagtgcctggggtggaccctgtcgtgagccacagtccgtttgatccccatcacagaggcagcactgcaggagaggtttatcggagccacctgcccacgcacttagatccagccatgccttttcacagggctttggatcctgnnnnnnnnnnnnnnnnnnnnnnnnnnnnnnnnnnnnnnnnnnnnnnnnnnnnnnnnnnnnnnnnnnnnnnnnnnnnnnnnnnnnnnnnnnnnnnnnnnnnnnnnnnnnnnnnnnnnnnnnnnnnnnnnnnnnnnnnnnnnnnnnnnnnnnnnnnnnnnnnnnnnnnnnnnnnnnnnnnnnnnnnnnnnnnnnnnnnnnnnnnnnnnnnnnnnnnnnnnnnnnnnnnnnnnnnnnnnnnnnnnnnnnnnnnnnnnnnnnnnnnnnnnnnnnnnnnnnnnnnnnnnnnnnnnnnnnnnnnnnnnnnnnnnnnnnnnnnnnnnnnnnnnnnnnnnnnnnnnnnnnnnnnnnnnnnnnnnnnnnnnnnnnnnnnnnnnnnnnnnnnnnnnnnnnnnnnnnnnnnnnnnnnnnnnnnnnnnnnnnnnnnnnnnnnnnnnnnnnnnnnnnnnnnnnnnnnnnnnnnnnnnnnnnnnnnnnnnnnnnnnnnnnnnnnnnnnnnnnnnnnnnnnnnnnnnnnnnnnnnnnnnnnnnnnnnnnnnnnnnnnnnnnnnnnnnnnnnnnnnnnnnnnnnnnnnnnnnnnnnnnnnnnnnnnnnnnnnnnnnnnnnnnnnnnnnnnnnnnnnnnnnnnnnnnnnnnnnnnnnnnnnnnnnnnnnnnnnnnnnnnnnnnnnnnnnnnnnnnnnnnnnnnnnnnnnnnnnnnnnnnnnnnnnnnnnnnnnnnnnnnnnnnnnnnnnnnnnnnnnnnnnnnnnnnnnnnnnnnnnnnnnnnnnnnnnnnnnnnnnnnnnnnnnnnnnnnnnnnnnnnnnnnnnnnnnnnnnnnnnnnnnnnnnnnnnnnnnnnnnnnnnnnnnnnnnnnnnnnnnnnnnnnnnnnnnnagcctcattcttcagtagtttattctgaggctgggaaagataaagggcctcctccaaaatccagatatgaggaagagctaaggacccgagggaagactaccattactgcagctaacttcatagacgtgatcatcacccggcaaattgcctcggacaaggatgcgagggaacgtggctctcaaagttcagactcttctagtagcnnnnnnnnnnnnnnnnnnnnnnnnnnnnnnnnnnnnnnnnnnnnnnnnnnnnnnnnnnnnnnnnnnnnnnnnnnnnnnnnnnnnnnnnnnnnnnnnnnnnnnnnnnnnnnnnnnnnnnnnnnnnnnnnnnnnnnnnnnnnnnnnnnnnnnnnnnnnnnnnnnnnnnnnnnnnnnnnnnnnnnnnnnnnnnnnnnnnnnnnnnnnnnnnnnnnnnnnnnnnnnnnnnnnnnnnnnnnnnnnnnnnnnnnnnnnnnnnnnnnnnnnnnnnnnnnnnnnnnnnnnnnnnnnnnnnnnnnnnnnnnnnnnnnnnnnnnnnnnnnnnnnnnnnnnnnnnnnnnnnnnnnnnnnnnnnnnnnnnnnnnnnnnnnnnnnnnnnnnnnnnnnnnnnnnnnnnnnnnnnnnnnnnnnnnnnnnnnnnnnnnnnnnnnnnnnnnnnnnnnnnnnnnnnnnnnnnnnnnnnnnnnnnnnnnnnnnnnnnnnnnnnnnnnnnnnnnnnnnnnnnnnnnnnnnnnnnnnnnnnnnnnnnnnnnnnnnnnnnnnnnnnnnnnnnnnnnnnnnnnnnnnnnnnnnnnnnnnnnnnnnnnnnnnnnnnnnnnnnnnnnnnnnnnnnnnnnnnnnnnnnnnnnnnnnnnnnnnnnnnnnnnnnnnnnnnnnnnnnnnnnnnnnnnnnnnnnnnnnnnnnnnnnnnnnnnnnnnnnnnnnnnnnnnnnnnnnnnnnnnnnnnnnnnnnnnnnnnnnnnnnnnnnnnnnnnnnnnnnnnnnnnnnnnnnnnnnnnnnnnnnnnnnnnnnnnnnnnnnnnnnnnnnnnnnnnnnnnnnnnnnnnnnnnnnnnnnnnnnnnnnnnntcaggctcagttagctctagaggccattcttttgctgatcctgccagcaatctcgggctggaagacattatcaggaaggctctcatgggaagctttgatgacaaagttgaggatcatggagttgtcatgtcccagcctatgggagtagtgcctggtactgccaacacctcagttgtgactagtggtgagacacggagagaggaaggggacccatcacctcattcagnnnnnnnnnnnnnnnnnnnnnnnnnnnnnnngtcaaacagcaggaaatctaaatctcctatccctgggcaaggctacttaggaaccgaacggccctcttcagtctcctctgtacattcagaaggggattaccataggcagacgccagggtgggcctgggaagacaggccctcttcaacagnnnnnnnnnnnnnnnnnnnnnnnnnnnnnnnnnnnnnnnnnnnnnnnnnnnnnnnnnnnnnnnnnnnnnnnnnnnnnnnnnnnnnnnnnnnnnnnnnnnnnnnnnnnnnnnnnnnnnnnnnnnnnnnnnnnnnnnnnnnnnnnnnnnnnnnnnnnnnnnnnnnnnnnnnnnnnnnnnnnnnnnnnnnnnnnnnnnnnnnnnnnnnnnnnnnnnnnnnnnnnnnnnnnnnnnnnnnnnnnnnnnnnnnnnnnnnnnnnnnnnnnnnnnnnnnnnnnnnnnnnnnnnnnnnnnnnnnnnnnnnnnnnnnnnnnnnnnnnnnnnnnnnnnnnnnnnnnnnnnnnnnnnnnnnnnnnnnnnnnnnnnnnnnnnnnnnnnnnnnnnnnnnnnnnnnnnnnnnnnnnnnnnnnnnnnnnnnnnnnnnnnnnnnnnnnnnnnnnnnnnnnnnnnnnnnnnnnnnnnnnnnnnnnnnnnnnnnnnnnnnnnnnnnnnnnnnnnnnnnnnnnnnnnnnnnnnnnnnnnnnnnnnnnnnnnnnnnnnnnnnnnnnnnnnnnnnnnnnnnnnnnnnnnnnnnnnnnnnnnnnnnnnnnnnnnnnnnnnnnnnnnnnnnnnnnnnnnnnnnnnnnnnnnnnnnnnnnnnnnnnnnnnnnnnnnnnnnnnnnnnnnnnnnnnnnnnnnnnnnnnnnnnnnnnnnnnnnnnnnnnnnnnnnnnnnnnnnnnnnnnnnnnnnnnnnnnnnnnnnnnnnnnnnnnnnnnnnnnnnnnnnnnnnnnnnnnnnnnnnnnnnnnnnnnnnnnnnnnnnnnnnnnnnnnnnnnnnnnnnnnnnnnnnnnnnnnttctgccatattgtaaatttccagtgcaggctttannnnnnnnnnncattagtagcactgaaaaaatattactgcatgggtatgttctagttcagtttataaagttttaaaggcttatntgaggcatacctcactgttatgcacactggtaatttaaccatgcccctaagtattccttttctcctgcatttgatgcagcccaacaaagcttttgttttgaaataaatttgactaccctgtcca

SEQ ID NO: 19202 - DNA, 3235 bp, Macaca Mulatta
  misc_feature (1)...(3235): n = A,T,C or G
cagctgagacaggaggtggtggcctgcatgcgcagggacacaaccctggagacggctctcaactccaaagcatacaaacggagcgaaacgccagactctgagagaagctcgcatgaatgagaagctnnnnnnnnnnnnnnnnnnnnnnnnnnnnnnnnnnnnnnnnnnnnnnnnnnnnnnnnnnnnnnnnnnnnnnnnnnnnnnnnnnnnnnnnnnnnnnnnnnnnnnnnnnnnnnnnnnnnnnnnnnnnnnnnnnnnnnnnnnnnnnnnnnnnnnnnnnnnnnnnnnnnnnnnnnnnnnnnnnnnnnnnnnnnnnnnnnnnnnnnnnnnnnnnnnnnnnnnnnnnnnnnnnnnnnnnnnnnnnnnnnnnnnnnnnnnnnnnnnnnnnnnnnnnnnnnnnnnnnnnnnnnnnnnnnnnnnnnnnnnnnnnnnnnnnnnnnnnnnnnnnnnnnnnnnnnnnnnnnnnnnnnnnnnnnnnnnnnnnnnnnnnnnnnnnnnnnnnnnnnnnnnnnnnnnnnnnnnnnnnnnnnnnnnnnnnnnnnnnnnnnnnnnnnnnnnnnnnnnnnnnnnnnnnnnnnnnnnnnnnnnnnnnnnnnnnnnnnnnnnnnnnnnnnnnnnnnnnnnnnnnnnnnnnnnnnnnnnnnnnnnnnnnnnnnnnnnnnnnnnnnnnnnnnnnnnnnnnnnnnnnnnnnnnnnnnnnnnnnnnnnnnnnnnnnnnnnnnnnnnnnnnnnnnnnnnnnnnnnnnnnnnnnnnnnnnnnnnnnnnnnnnnnnnnnnnnnnnnnnnnnnnnnnnnnnnnnnnnnnnnnnnnnnnnnnnnnnnnnnnnnnnnnnnnnnnnnnnnnnnnnnnnnnnnnnnnnnnnnnnnnnnnnnnnnnnnnnnnnnnnnnnnnnnnnnnnnnnnnnnnnnnnnnnnnnnnnnnnnnnnnnnnnnnnnnnnnnnnnnnnnnnnnnnnnnnnnnnnnnnnnnnnnnnnnnnnnnnnnnnnnnnnnnnnnnnnnnnnnnnnnnnnnnnnnnnnnnnnnnnnnnnnnnnnnnnnnnnnnnnnnnnnnnnnnnnnnnnnnnnnnnnnnnnnnnnnnnnnnnnnnnnnnnnnnnnnnnnnnnnnnnnnnnnnnnnnnnnnnnnnnnnnnnnnnnnnnnnnnnnnnnnnnnnnnnnnnnnnnnnnnnnnnnnnnnnnnnnnnnnnnnnnnnnnnnnnnnnnnnnnnnnnnnnnnnnnnnnnnnnnnnnnnnnnnnnnnnnnnnnnnnnnnnnnnnnnnnnnnnnnnnnnnnnnnnnnnnnnnnnnnnnnnnnnnnnnnnnnnnnnnnnnnnnnnnnnnnnnnnnnnnnnnnnnnnnnnnnnnnnnnnnnnnnnnnnnnnnnnnnnnnnnnnnnnnnnnnnnnnnnnnnnnnnnnnnnnnnnnnnnnnnnnnnnnnnnnnnnnnnnnnnnnnnnnnnnnnnnnnnnnnnnnnnnnnnnnnnnnnnnnnnnnnnnnnnnnnnnnnnnnnnnnnnnnnnnnnnnnnnnnnnnnnnnnnnnnnnnnnnnnnnnnnnnnnnnnnnnnnnnnnnnnnnnnnnnnnnnnnnnnnnnnnnnnnnnnnnnnnnnnnnnnnnnnnnnnnnnnnnnnnnnnnnnnnnnnnnnnnnnnnnnnnnnnnnnnnnnnnnnnnnnnnnnnnnnnnnnnnnnnnnnnnnnnnnnnnnnnnnnnnnnnnnnnnnnnnnnnnnnnnnnnnnnnnnnnnnnnnnnnnnnnnnnnnnnnnnnnnnnnnnnnnnnnnnnnnnnnnnnnnnnnnnnnnnnnnnnnnnnnnnnnnnnnnnnnnnnnnnnnnnnnnnnnnnnnnnnnnnnnnnnnnnnnnnnnnnnnnnnnnnnnnnnnnnnnnnnnnnnnnnnnnnnnnnnnnnnnnnnnnnnnnnnnnnnnnnnnnnnnnnnnnnnnnnnnnnnnnnnnnnnnnnnnnnnnnnnnnnnnnnnnnnnnnnnnnnnnnnnnnnnnnnnnnnnnnnnnnnnnnnnnnnnnnnnnnnnnnnnnnnnnnnnnnnnnnnnnnnnnnnnnnnnnnnnnnnnnnnnnnnnnnnnnnnnnnnnnnnnnnnnnnnnnnnnnnnnnnnnnnnnnnnnnnnnnnnnnnnnnnnnnnnnnnnnnnnnnnnnnnnnnnnnnnnnnnnnnnnnnnnnnnnnnnnnnnnnnnnnnnnnnnnnnnnnnnnnnnnnnnnnnnnnnnnnnnnnnnnnnnnnnnnnnnnnnnnnnnnnnnnnnnnnnnnnnnnnnnnnnnnnnnnnnnnnnnnnnnnnnnnnnnnnnnnnnnnnnnnnnnnnnnnnnnnnnnnnnnnnnnnnnnnnnnnnnnnnnnnnnnnnnnnnnnnnnnnnnnnnnnnnnnnnnnnnnnnnnnnnnnnnnnnnnnnnnnnnnnnnnnnnnnnnnnnnnnnnnnnnnnnnnnnnnnnnnnnnnnnnnnnnnnnnnnnnnnnnnnnnnnnnnnnnnnnnnnnnnnnnnnnnnnnnnnnnnnnnnnnnnnnnnnnnnnnnnnnnnnnnnnnnnnnnnnnnnnnnnnnnnnnnnnnnnnnnnnnnnnnnnnnnnnnnnnnnnnnnnnnnnnnnnnnnnnnnnnnnnnnnnnnnnnnnnnnnnnnnnnnnnnnnnnnnnnnnnnnnnnnnnnnnnnnnnnnnnnnnnnnnnnnnnnnnnnnnnnnnnnnnnnnnnnnnnnnnnnnnnnnnnnnnnnnnnnnnnnnnnnnnnnnnnnnnnnnnnnnnnnnnnnnnnnnnnnnnnnnnnnnnnnnnnnnnnnnnnnnnnnnnnnnnnnnnnnnnnnnnnnnnnnnnnnnnnnnnnnnnnnnnnnnnnnnnnnnnnnnnnnnnnnnnnnnnnnnnnnnnnnnnnnnnnnnnnnnnnnnnnnnnnnnnnnnnnnnnnnnnnnnnnnnnnnnnnnnnnnnnnnnnnnnnnnnnnnnnnnnnnnnnnnnnnnnnnnnnnnnnnnnnnnnnnnnnnnnnnnnnnnnnnnnnnnnnnnnnnnnnnnnnnnnnnnnnnnnnnnnnnnnnnnnnnnnnnnnnnnnnnnnngttcagggcgacagctcagtgaagtcttcattcagttaccttcaaggaaagaattaccagaatactatgaattaattagaaagccagtggatttcnnnnnnnnnnaggaaaggattcgtaatcataagtaccggagcctgggcgacctggagaaggatgtcatgcttctctgtcacaacgctcagacattcaacctggaaggatccca

SEQ ID NO: 19203 - DNA, 759 bp, Macaca Mulatta
  misc_feature (1)...(759): n = A,T,C or G
gggacacccgctctcagctggccggtgtggcacaaccctacccccacctccccttcttggcctacgccagtgtgggagcctcgtctcactggagagtcccttcaggctctgccactatttcccattggccaaaccctactggaagtggaaggctaagaagtccactggtgcaatccatacagggccagcaggtcacctcactgaggatcattctatccgcaagctaattcagaacagcctgaagcatgtttcgtcatgagctagagcttctgccgggatgcggagggaggattcagctctggttttcgagtcttgctctgttgccagcctggattgcagtggcgtnnnnnnnnnnnnnnnnnnnnnnnacctcccgagttcgagcnnnnnnnnnnnnnnnnnnnnnnnnnnnnnnnnncttacaagcatgcannnnnnnnnnnnnnnnnnnnnngtgttttttnnnnnnnnnnnnnnnnnnnnnnnnaannnnnnnnnnnnnnnnnnnnnnnnnntgagatccacccgccttggcctcccaaactggtgggattacagacgtgagtcacacactttctgtagtttacagaaacagtagaccatccatgtgctttcctaaactgcctgaactagtgggagtctggagagattcggggacaaaaaagagcagtggatcacccccctaacttggttccctggaaccttaccctttgaacaccctttcctccctaaaactgccaaacggggaaatgtggtact

SEQ ID NO: 19204 - DNA, 4490 bp, Macaca Mulatta
  misc_feature (1)...(4490): n = A,T,C or G
ggccgggcgacaggtgtcgcttgaaaagactgggcttgtccttgctggtgcatgcgtcgtcggcctctaggcagcaggnnnnnnnnnnnnnnnnnnnnnnnnnnnnnnnnnnnnnnnnnnnnnnnnnnnnnnnnnnnnnnnnnnnnnnnnnnnnnnnnnnnnnnnnnnnnnnnnnnnnnnnnnnnnnnnnnnnnnnnnnnnnnnnnnnnnnnnnnnnnnnnnnnnnnnnnnnnnnnnnnnnnnnnnnnnnnnnnnnnnnnnnnnnnnnnnnnnnnnnnnnnnnnnnnnnnnnnnnnntgagtctgattttgaatttgatttgtggaagtaaaggagaagtgatcctagctggggcatattgttaaagcatttttttcagagttggccaggcaatctcctactggcatattctcncattatgtagaatagaaacagtaccggtgtttgggaaagattttaaaatgagtgacacttacgttgaacaaaaagctaataataaatcctctgcaaactaaagaaatatgcagatgaaagctttgacacattaaaatacttctacagtgacaaagaaaaatcaagaacaaagcgttttgataggtgcaacaaatttagagtaagtaaaaagataaatgtgatgattggtcaagaaattatccagttatttataaggccattgatattttaaaagtccaaaagtgtgtttaagtgggctgttacctctgagaatgatgaggatgagagtgatagttgaaggttacatcttaggaaatgaagaaatttagaaagaaaaataatataaagacagtgatgaatacaaagaagatttttatgacaatgtgtaaaatttttggccagggaaaggaatattgaagttagatacaattacttacctttgagggaaataattatcggtaatgagatgtaatgtttctcctgccacctggaaacaaaccattgaagtctgcagnnnnnnnnnnnnnnnnnnnnnnnnnnnnnnnnnnnnnnnnnnnnnnnnnnnnnnnnnnnnnnnnnnnnnnnnnnnnnnnnnnnnnnnnnnnnnnnnnnnnnnnnnnnnnnnnnnnnnnnnnnnnnnnnnnnnnnnnnnnnnnnnnnnnnnnnnnnnnnnnnnnnnnnnnnnnnnnnnnnnnnnnnnnnnnnnnnnnnnnnnnnnnnnnnnnnnnnnnnnnnnnnnnnnnnnnnnnnnnnnnnnnnnnnnnnnnnnnnnnnnnnnnnnnnnnnnnnnnnnnnnnnnnnnnnnnnnnnnnnnnnnnnnnnnnnnnnnnnnnnnnnnnnnnnnnnnnnnnnnnnnnnnnnnnnnnnnnnnnnnnnnnnnnnnnnnnnnnnnnnnnnnnnnnnnnnnnnnnnnnnnnnnnnnnnnnnnnnnnnnnnnnnnnnnnnnnnnnnnnnnnnnnnnnnnnnnnnnnnnnnnnnnnnnnnnnnnnnnnnnnnnnnnnnnnnnnnnnnnnnnnnnnnnnnnnnnnnnnnnnnnnnnnnnnnnnnnnnnnnnnnnnnnnnnnnnnnnnnnnnnnnnnnnnnnnnnnnnnnnnnnnnnnnnnnnnnnnnnnnnnnnnnnnnnnnnnnnnnnnnnnnnnnnnnnnnnnnnnnnnnnnnnnnnnnnnnnnnnnnnnnnnnnnnnnnnnnnnnnnnnnnnnnnnnnnnnnnnnnnnnnnnnnnnnnnnnnnnnnnnnnnnnnnnnnnnnnnnnnnnnnnnnnnnnnnnnnnnnnnnnnnnnnnnnnnnnnnnnnnnnnnnnnnnnnnnnnnnnnnnnnnnnnnnnnnnnnnnnnnnnnnnnnnnnnnnnnnnnnnnnnnnnnnnnnnnnnnnnnnnnnnnnnnnnnnnnnnnnnnnnnnnnnnnnnnnnnnnnnnnnnnnnnnnnnnnnnnnnnnnnnnnnnnnnnnnnnnnnnnnnnnnnnnnnnnnnnnnnnnnnnnnnnnnnnnnnnnnnnnnnnnnnnnnnnnnnnnnnnnnnnnnnnnnnnnnnnnnnnnnnnnnnnnnnnnnnnnnnnnnnnnnnnnnnnnnnnnnnnnnnnnnnnnnnnnnnnnnnnnnnnnnnnnnnnnnnnnnnnnnnnnnnnnnnnnnnnnnnnnnnnnnnnnnnnnnnnnnnnnnnnnnnnnnnnnnnnnnnnnnnnnnnnnnnnnnnnnnnnnnnnnnnnnnnnnnnnnnnnnnnnnnnnnnnnnnnnnnnnnnnnnnnnnnnnnnnnnnnnnnnnnnnnnnnnnnnnnnnnnnnnnnnnnnnnnnnnnnnnnnnnnnnnnnnnnnnnnnnnnnnnnnnnnnnnnnnnnnnnnnnnnnnnnnnnnnnnnnnnnnnnnnnnnnnnnnnnnnnnnnnnnnnnnnnnnnnnnnnnnnnnnnnnnnnnnnnnnnnnnnnnnnnnnnnnnnnnnnnnnnnnnnnnnnnnnnnnnnnnnnnnnnnnnnnnnnnnnnnnnnnnnnnnnnnnnnnnnnnnnnnnnnnnnnnnnnnnnnnnnnnnnnnnnnnnnnnnnnnnnnnnnnnnnnnnnnnnnnnnnnnnnnnnnnnnnnnnnnnnnnnnnnnnnnnnnnnnnnnnnnnnnnnnnnnnnnnnnnnnnnnnnnnnnnnnnnnnnnnnnnnnnnnnnnnnnnnnnnnnnnnnnnnnnnnnnnnnnnnnnnnnnnnnnnnnnnnnnnnnnnnnnnnnnnnnnnnnnnnnnnnnnnnnnnnnnnnnnnnnnnnnnnnnnnnnnnnnnnnnnnnnnnnnnnnnnnnnnnnnnnnnnnnnnnnnnnnnnnnnnnnnnnnnnnnnnnnnnnnnnnnnnnnnnnnnnnnnnnnnnnnnnnnnnnnnnnnnnnnnnnnnnnnnnnnnnnnnnnnnnnnnnnnnnnnnnnnnnnnnnnnnnnnnnnnnnnnnnnnnnnnnnnnnnnnnnnnnnnnnnncagaaaggagtcttgctcgcgctggtttctattacactggtgtgaatgacaaggtcaaatgcttctgttgcggcctgatgctggataactggaaaagaggagacagtcctgttgaaaagcataaaaagttgtatcctagctgcagattcgttcagagtctaaattcagttaacaactcggaagctacctctcagcctgcttttccttcttcagtaacaaattccacacattcattacttccgggtacagaaaacagtggatatttcagtggctcttattcaagctttccatcaaatcctgtaaactccagagcaaatcaagatttttctgccttgatgagaagttcctaccactgtgcaatgaataatgaaaaagccagattacttacttttcagacgtggccattgacttttctgtcgccaacagatctggcaaaagcaggcttttactacgttggacctggagacagagtggcttgctttgcctgtggcggaaaattgagcaactgggaaccgaaggataatgcaatgtcagaacacctgagacattttcccaaatgcccatttatcgaaaatcagcttcaagacacttcgagatacacagtttctaatctgagcatgcagacacatgcagcccgctttaaaacattctttaactggccctctagtgttctagttaatcctgagcagcttgcaagtgcgggtttttattatgtgggtannnnnnnnnnnnnnnnnnnnnnnnnnnnnnnnnnnnnnnnnnnnnnnnnnnnnnnnnnnnnnnnnnnnnnnnnnnnnnnnnnnnnnnnnnnnnnnnnnnnnnnnnnnnnnnnnnnnnnnnnnnnnnnnnnnnnnnnnnnnnnnnnnnnnnnnnnnnnnnnnnnnnnnnnnnnnnnnnnnnnnnnnnnnnnnnnnnnnnnnnnnnnnnnnnnnnnnnnnnnnnnnnnnnnnnnnnnnnnnnnnnnnnnnnnnnnnnnnnnnnnnnnnnnnnnnnnnnnnnnnnnnnnnnnnnnnnnnnnnnnnnnnnnnnnnnnnnnnnnnnnnnnnnnnnnnnnnnnnnnnnnnnnnnnnnnnnnnnnnnnnnnnnnnnnnnnnnnnnnnnnnnnnnnnnnnnnnnnnnnnnnnnnnnnnnnnnnnnnnnnnnnnnnnnnnnnnnnnnnnnnnnnnnnnnnnnnnnnnnnnnnnnnnnnnnnnnnnnnnnnnnnnnnnnnnnnnnnnnnnnnnnnnnnnnnnnnnnnnnnnnnnnnnnnnnnnnnnnnnnnnnnnnnnnnnnnnnnnnnnnnnnnnnnnnnnnnnnnnnnnnnnnnnnnnnnnnnnnnnnnnnnnnnnnnnnnnnnnnnnnnnnnnnnnnnnnnnnnnnnnnnnnnnnnnnnnnnnnnnnnnnnnnnnnnnnnnnnnnnnnnnnnnnnnnnnnnnnnnnnnnnnnnnnnnnnnnnnnnnnnnnnnnnnnnnnnnnnnnnnnnnnnnnnnnnnnnnnnnnnnnagatctaccagtggaagaacagttgcggagattacaagaagaaagaacatgtaaagtgtgtatggacaaagaagtgtccatagtgtttattccttgtggtcatctagtagtatgcaaagat

SEQ ID NO: 19205 - DNA, 604 bp, Macaca Mulatta
ttacgttcagctttctggtggcaacagttgccgtagggctttatgccatgtgaatgcaggcatgctggctcccagggccatgaactttgtccagtggaaggccttctttctggagagggaaatctcttagctggcttccttatcgcgggcactggaggctttcagggcctccatccctctcactgtgtccctctctctggaaagcaggaaggagcctatggcatcttccccaacgaaaagcacatccagccaatggcctaaacttcagagtgggccaaaggatccagccctgcccttcagcatcctcagttcctgcagcagagcctagaagacaccctagatgtggcagctgtctcaaacctccaaaagtcctgagtttgaagtatccttgttgacacggccatgaccactttccccgtgggccatggcaatttttacataaaactgaaaagatgttgtgtcttgtgtttttgtcttatttttgttggagccactctgttcctggctcagcctcaaatgcagtatttttgtagtgtactattgtttttatagcagggttggggtggtaattgagccatgcgtgggtggggagggaggtgtttaa

SEQ ID NO: 19206 - DNA, 177 bp, Macaca Mulatta
  misc_feature (1)...(177): n = A,T,C or G
actttgctgcccagatggctggaggatttgatgaaaaggctggtggcgcccagatgggagtaatgcaaggaccaatggnnnnnnnnnnnnnnnnnnnnnnnnnnnnnnnnnnnnnnnnnnnngggcctcaaggatttcaaggcaatcctggtgaacctggtgaaccgtggtgtctct

SEQ ID NO: 19207 - DNA, 765 bp, Macaca Mulatta
  misc_feature (1)...(765): n = A,T,C or G
ggcagacttaatattaatagggcctgtgaaaacaggcttttgcattgtctcttgacatcacaaggtacaacaggcatatgggcaaaatggtgtggcaggctcactggccctttgttttttaaacacattttcacaagtttttgagacactggatttcttnnnnnnnnnnnnnnnnnnccaagaaacattatttatacaggtttgattgctttcatgttgttattctgtaccctatagtagtctccatgagaatctggtatttcttgctgcttggaactactttgcagtgattacttggttgcagtccaagtactctcatttagtctgagcctggagatgtcctagacttgcttctcccacctctgggattaggacaggaaaaatgtgaaatttccctttacaggattatacggtaccatcacatcatttgtggaaattggggtaactgtatagctgggattgggccatggattgtggtcttatctgtccatatacagccaaaatgcctatccagaaatccagtccactggaaaggaaaattggaactcctgtgccacaggggttccagaaaaaggaagtcactttaccttgcggtggtgggatcctgatgtctttcttccatttgtagtaaaagctggtaaagcttttcttactcctgggtccctataccagtatttctaaaacgtgtcgcacttttctccaacaggcatgtgggtttttgaccttttttttcaatccttctgggaaaggggatgggaagcaaat

SEQ ID NO: 19208 - DNA, 843 bp, Macaca Mulatta
gggatggggttgatagcatctgtgtctattccacagctgcctttgatccggcccttcagatgcctatgaatgagggtgcttaactggtattagagattaagaccagtgggtagtctgtgtattcctgtggtcacagcattaatatttcagtgttgcccatgctaatgtgtgaatgttgggtttaaagctgatgttcttagaggtagggctctgctttatttagcctagtgaatcttaggatttttcatcggccttcagtcaccaactctgtctttattctttgcagctgacatcatgtacacaggcacgcttgactgctggaggaagatagctcgtgatgaaggaggcaaagcttttttcaagggtgcatggtccaatgttctcaggggcatgggtggtgcttttgtgcttgtcttgtatgatgaaatcaagaagtacacataagttatttcctaggatttttccccctgtgaacaggcatgttgtattatataacatatcttgaacattcttgacagactcctggctgtcagtttctcagtggcaactatttactggttgaaaatgggaagcaataatattcatctgaccagttttctcttaaagccatttccatgatgatgatgggactcaattgtattttttatttcagtcactcctgataaataacaaatttggagaaataaaaatatctaaaataaattttgtttgtctgcagtttattttcatataaaaatatattttatatttgagtgctacatttgaataaatactacctttttagtgaatgctacattttaataaatgctacaatatctctggagatgaagaactgtcttttta

SEQ ID NO: 19209 - DNA, 6465 bp, Macaca Mulatta
  misc_feature (1)...(6465): n = A,T,C or G
aggaaaaccagtagattcccagacatcgcgaagtgaatctgaaattgtgccaaaagttgctaaaatgacngtatcnggaaagaagcaaactangggannnnnnnnnnnnnnnnnnnnnnnnnnnnnnnnnnnnnnnnnnnnnnnnnnnnnnnnnnnnnnnnnnnnnnnnnnnnnnnnnnnnnnnnnnnnnnnnnnnnnnnnnnnnnnnnnnnnnnnnnnnnnnnnnnnnnnnnnnnnnnnnnnnnnnnnnnnnnnnnnnnnnnnnnnnnnnnnnnnnnnnnnnnnnnnnnnnnnnnnnnnnnnnnnnnnnnnnnnnnnnnnnnnnnnnnnnnnnnnnnnnnnnnnnnnnnnnnnnnnnnnnnnnnnnnnnnnnnnnnnnnnnnnnnnnnnnnnnnnnnnnnnnnnnnnnnnnnnnnnnnnnnnnnnnnnnnnnnnnnnnnnnnnnnnnnnnnnnnnnnnnnnnnnnnnnnnnnnnnnnnnnnnnnnnnnnnnnnnnnnnnnnnnnnnnnnnnnnnnnnnnnnnnnnnnnnnnnnnnnnnnnnnnnnnnnnnnnnnnnnnnnnnnnnnnnnnnnnnnnnnnnnnnnnnnnnnnnnnnnnnnnnnnnnnnnnnnnnnnnnnnnnnnnnnnnnnnnnnnnnnnnnnnnnnnnnnnnnnnnnnnnnnnnnnnnnnnnnnnnnnnnnnnnnnnnnnnnnnnnnnnnnnnnnnnnnnnnnnnnnnnnnnnnnnnnnnnnnnnnnnnnnnnnnnnnnnnnnnnnnnnnnnnnnnnnnnnnnnnnnnnnnnnnnnnnnnnnnnnnnnnnnnnnnnnnnnnnnnnnnnnnnnnnnnnnnnnnnnnnnnnnnnnnnnnnnnnnnnnnnnnnnnnnnnnnnnnnnnnnnnnnnnnnnnnnnnnnnnnnnnnnnnnnnnnnnnnnnnnnnnnnnnnnnnnnnnnnnnnnnnnnnnnnnnnnnnnnnnnnnnnnnnnnnnnnnnnnnnnnnnnnnnnnnnnnnnnnnnnnnnnnnnnnnnnnnnnnnnnnnnnnnnnnnnnnnnnnnnnnnnnnnnnnnnnnnnnnnnnnnnnnnnnnnnnnnnnnnnnnnnnnnnnnnnnnnnnnnnnnnnnnnnnnnnnnnnnnnnnnnnnnnnnnnnnnnnnnnnnnnnnnnnnnnnnnnnnnnnnnnnnnnnnnnnnnnnnnnnnnnnnnnnnnnnnnnnnnnnnnnnnnnnnnnnnnnnnnnnnnnnnnnnnnnnnnnnnnnnnnnnnnnnnnnnnnnnnnnnnnnnnnnnnnnnnnnnnnnnnnnnnnnnnnnnnnnnnnnnnnnnnnnnnnnnnnnnnnnnnnnnnnnnnnnnnnnnnnnnnnnnnnnnnnnnnnnnnnnnnnnnnnnnnnnnntgctgttacactaccaaactgtcagtgaacccgccgttattaaacgattgattagtgtcttaaacaaaagcacgggtgaagtcacaaagaaaaagcctaagtnnnnnnnnnnnnnnnnnnnnnnnnnnnnnnnnnnnnnnnnnnnnnnnnnnnnnnnnnnnnnnnnnnnnnnnnnnnnnnnnnnnnnnnnnnnnnnnnnnnnnnnnnnnnnnnnnnnnnnnnnnnnnnnnnnnnnnnnnnnnnnnnnnnnnnnnnnnnnnnnnnnnnnnnnnnnnnnnnnnnnnnnnnnnnnnnnnnnnnnnnnnnnnnnnnnnnnnnnnnnnnnnnnnnnnnnnnnnnnnnnnnnnnnnnnnnnnnnnnnnnnnnnnnnnnnnnnnnnnnnnnnnnnnnnnnnnnnnnnnnnnnnnnnnnnnnnnnnnnnnnnnnnnnnnnnnnnnnnnnnnnnnnnnnnnnnnnnnnnnnnnnnnnnnnnnnnnnnnnnnnnnnnnnnnnnnnnnnnnnnnnnnnnnnnnnnnnnnnnnnnnnnnnnnnnnnnnnnnnnnnnnnnnnnnnnnnnnnnnnnnnnnnnnnnnnnnnnnnnnnnnnnnnnnnnnnnnnnnnnnnnnnnnnnnnnnnnnnnnnnnnnnnnnnnnnnnnnnnnnnnnnnnnnnnnnnnnnnnnnnnnnnnnnnnnnnnnnnnnnnnnnnnnnnnnnnnnnnnnnnnnnnnnnnnnnnnnnnnnnnnnnnnnnnnnnnnnnnnnnnnnnnnnnnnnnnnnnnnnnnnnnnnnnnnnnnnnnnnnnnnnnnnnnnnnnnnnnnnnnnnnnnnnnnnnnnnnnnnnnnnnnnnnnnnnnnnnnnnnnnnnnnnnnnnnnnnnnnnnnnnnnnnnnnnnnnnnnnnnnnnnnnnnnnnnnnnnnnnnnnnnnnnnnnnnnnnnnnnnnnnnnnnnnnnnnnnnnnnnnnnnnnnnnnnnnnnnnnnnnnnnnnnnnnnnnnnnnnnnnnnnnnnnnnnnnnnnnnnnnnnnnnnnnnnnnnnnnnnnnnnnnnnnnnnnnnnnnnnnnnnnnnnnnnnnnnnnnnnnnnnnnnnnnnnnnnnnnnnnnnnnnnnnnnnnnnnnnnnnnnnnnnnnnnnnnnnnnnnnnnnnnnnnnnnnnnnnnnnnnnnnnnnnnnnnnnnnnnnnnnnnnnnnnnnnnnnnnnnnnnnnnnnnnnnnnnnnnnnnnnnnnnnnnnnnnnnnnnnnnnnnnnnnnnnnnnnnnnnnnnnnnnnnnnnnnnnnnnnnnnnnnnnnnnnnnnnnnnnnnnnnnnnnnnnnnnnnnnnnnnnnnnnnnnnnnnnnnnnnnnnnnnnnnnnnnnnnnnnnnnnnnnnnnnnnnnnnnnnnnnnnnnnnnnnnnnnnnnnnnnnnnnnnnnnnnnnnnnnnnnnnnnnnnnnnnnnnnnnnnnnnnnnnnnnnnnnnnnnnnnnnnnnnnnnnnnnnnnnnnnnnnnnnnnnnnnnnnnnnnnnnnnnnnnnnnnnnnnnnnnnnnnnnnnnnnnnnnnnnnnnnnnnnnnnnnnnnnnnnnnnnnnnnnnnnnnnnnnnnnnnnnnnnnnnnnnnnnnnnnnnnnnnnnnnnnnnnnnnnnnnnnnnnnnnnnnnnnnnnnnnnnnnnnnnnnnnnnnnnnnnnnnnnnnnnnnnnnnnnnnnnnnnnnnnnnnnnnnnnnnnnnnnnnnnnnnnnnnnnnnnnnnnnnnnnnnnnnnnnnnnnnnnnnnnnnnnnnnnnnnnnnnnnnnnnnnnnnnnnnnnnnnnnnnnnnnnnnnnnnnnnnnnnnnnnnnnnnnnnnnnnnnnnnnnnnnnnnnnnnnnnnnnnnnnnnnnnnnnnnnnnnnnnnnnnnnnnnnnnnnnnnnnnnnnnnnnnnnnnnnnnnnnnnnnnnnnnnnnnnnnnnnnnnnnnnnnnnnnnnnnnnnnnnnnnnnnnnnnnnnnnnnnnnnnnnnnnnnnnnnnnnnnnnnnnnnnnnnnnnnnnnnnnnnnnnnnnnnnnnnnnnnnnnnnnnnnnnnnnnnnnnnnnnnnnnnnnnnnnnnnnnnnnnnnnnnnnnnnnnnnnnnnnnnnnnnnnnnnnnnnnnnnnnnnnnnnnnnnnnnnnnnnnnnnnnnnnnnnnnnnnnnnnnnnnnnnnnntcttgacaggatgtgaaaattcttcccttacatcctcagatcttccatccagggcaaggacagactaaaagagcatatattttccagaaatcctagaaacatctcatcattgactctgattgaattttatttattaatacttccctaggatatcctgtgtttgagtgtgaagtaagtatcacacaaagcatatagctaacagttgtgggaggattggaaattcagggtgctgttaggaaggggaaatggattggggtttaagggtagggggagtaaaaacaagaaaccatccactctgtatattatataagaccatgatggaattaagaattttagtttacaatttagcataaacaaatagtagtagtagaaattaatgcatttattcattccttctccaatagtgtttaagtacaatcnnnnnnnnnnnnnnnnnnnnngattgattgtggttgaagggagtggtgatattatttcgaggattcactgtgtgagaacactgttggtagtagaagacttgagttaattaagtgacaaagaggtagagcaggcacgcccaaacttgtttatgctctgatttcctcaccctgttactttcatccataatttatagtacattcattttgtgtcattttgcttcaggtatttcttgtcctgactcttcttttttatgattttannnnnnnnnnnnnnnnnnnnnnnnnnnnnnnnnnnnnnnnnnnnnnnnnnnnnnnnnnnnnnnnnnnnnnnnnnnnnnnnnnnnnnnnnnnnnnnnnnnnnnnnnnnnnnnnnnnnnnnnnnnnnnnnnnnnnnnnnnnnnnnnnnnnnnnnnnnnnnnnnnnnnnnnnnnnnnnnnnnnnnnnnnnnnnnnnnnnnnnnnnnnnnnnnnnnnnnnnnnnnnnnnnnnnnnnnnnnnnnnnnnnnnnnnnnnnnnnnnnnnnnnnnnnnnnnnnnnnnnnnnnnnnnnnnnnnnnnnnnnnnnnnnnnnnnnnnnnnnnnnnnnnnnnnnnnnnnnnnnnnnnnnnnnnnnnnnnnnnnnnnnnnnnnnnnnnnnnnnnnnnnnnnnnnnnnnnnnnnnnnnnnnnnnnnnnnnnnnnnnnnnnnnnnnnnnnnnnnnnnnnnnnnnnnnnnnnnnnnnnnnnnnnnnnnnnnnnnnnnnnnnnnnnnnnnnnnnnnnnnnnnnnnnnnnnnnnnnnnnnnnnnnnnnnnnnnnnnnnnnnnnnnnnnnnnnnnnnnnnnnnnnnnnnnnnnnnnnnnnnnnnnnnnnnnnnnnnnnnnnnnnnnnnnnnnnnnnnnnnnnnnnnnnnnnnnnnnnnnnnnnnnnnnnnnnnnnnnnnnnnnnnnnnnnnnnnnnnnnnnnnnnnnnnnnnnnnnnnnnnnnnnnnnnnnnnnnnnnnnnnnnnnnnnnnnnnnnnnnnnnnnnnnnnnnnnnnnnnnnnnnnnnnnnnnnnnnnnnnnnnnnnnnnnnnnnnnnnnnnnnnnnnnnnnnnnnnnnnnnnnnnnnnnnnnnnnnnnnnnnnnnnnnnnnnnnnnnnnnnnnnnnnnnnnnnnnnnnnnnnnnnnnnnnnnnnnnnnnnnnnnnnnnnnnnnnnnnnnnnnnnnnnnnnnnnnnnnnnnnnnnnnnnnnnnnnnnnnnnnnnnnnnnnnnnnnnnnnnnnnnnnnnnnnnnnnnnnnnnnnnnnnnnnnnnnnnnnnnnnnnnnnnnnnnnnnnnnnnnnnnnnnnnnnnnnnnnnnnnnnnaaagtgggagtgattttgcaattgggtatcttaatttttgtgttgtggatgggaggaaaggaaagaagcaacagtcatccatgttagccacaagaagaggttggctatttatggtttgcatagtgactttgtttttgtctgtgctcaggcatgattacagtatctcattttatccggattacggtgacctcatctgatgttagagatttgagaattgttaaatgttcagcaggagaacaccaccacatnagtgtgaatgctaggtcagaagctgctttttcacaccaaaaccatttaagtatgtacaagtaagttaatagtgtaaatgtagatgtaaaatacaatgcaaaacaaaataatgaagtaagtgaattaaattattgtgccaaatatggggatatgaaatagggaaagaaaagcattaaattacttatagtccataaagggactacattattttgttattctgataatcccataaaacaaagttttaagaatgtttacagtaaccacgagtggaattagtgaaactattcatatcaatgnnnnnnnnnnnnnnnnnnngcaaagaaactaagtctgtacagcaaaagatggaaaggaaacaagaaaattaaatgaagacaaaggttgtgatcattacaataaatgaaaataggtttttatctttaaaatgtagactcaaactgcaaagctaatgatatgccatctacaaaatattcctattttgtaaataacactatagatttaaagaagaaagggcacagatgtactggggagacaaaaataactgtgatctgttggatgtctaccatgtgccaagcaattttcatatactcactaatatgacatatctataattatatgaggtaggtattattaacctcagttgacagataagaagactaaagcccagagggattactaaaaactagtaaataaattatggaaacatgatttgaatttagatttaagtctgactgaggcatgttcaaagacactacactgcctctccagaaatcaggagtagcaatattaacactggactaagaatttaaagcaagtaaaaagaaaattaaggtaagagaatttcatattaataacaagtataatgcacaagctgtaccaaatgacataaaaatgcataatgaaatttagacattaaaaattaaaggacataattacaattattgaggaattctcatagctctgccttata

SEQ ID NO: 19210 - DNA, 470 bp, Macaca Mulatta
ttaaaagcagcacaagtgcaataagagatatttcctcaaatttgcctcaagatggaaaccgtttgcctcagggcatccttttggctggcactggttggatgtgtaatcagtgataatgctgagagatacagcacaaatctaagcaatcatgtggatgatttcaccacttttcatggcacagagctcagcctcctggttaccactcatcaacccactaacttggtcctacccagcaatggctcaatgcacaactattgcccacagcagactaaaattacttcagcttttaaatacattaacactgtgatatcttgtactattttcatcgtgggaatggtggggaatgcaactctgctcaggatcatttaccagaacaaatgtatgaggaatggccccaacgcgctgatagccagccttgcccttggagaccttatctatgtggtcattgatctccctatcaatgtatttaa

SEQ ID NO: 19211 - DNA, 1263 bp, Macaca Mulatta
  misc_feature (1)...(1263): n = A,T,C or G
ntgcctcagtctggataaacacctgacaacatatcatttgcaaaatttgaaaccttatacaaactatagtttatcattacatgcctacatcattgcaaaagtgcaacgtaatggaactgctgcaacatgtaatttcacaactgaaagtgnnnnnnnnnnnnnnnnnnnnnnnnnnnnnnnnnnnnnnnnnnnnnnnnnnnnnnnnnnnnnnnnnnnnnnnnnnnnnnnnnnnnnnnnnnnnnnnnnnnnnnnnnnnnnnnnnnnnnnnnnnnnnnnnnnnnnnnnnnnnnnnnnnnnnnnnnnnnnnnnnnnnnnnnnnnnnnnnnnnnnnnnnnnnnnnnnnnnnnnnnnnnnnnnnnnnnnnnnnnnnnnnnnnnnnnnnnnnnnnnnnnnnnnnnnnnnnnnnnnnnnnnnnnnnnnnnnnnnnnnnnnnnnnnnnnnnnnnnnnnnnnnnnnnnnnnnnnnnnnnnnnnnnnnnnnnnnnnnnnnnnnnnnnnnnnnnnnnnnnnnnnnnnnnnnnnnnnnnnnnnnnnnnnnnnnnnnnnnnnnnnnnnnnnnnnnnnnnnnnnnnnnnnnnnnnnnnnnnnnnnnnnnnnnnnnnnnnnnnnnnnnnnnnnnnnnnnnnnnnnnnnnnnnnnnnnnnnnnnnnnnnnnnnnnnnnnnnnnnnnnnnnnnnnnnnnnnnnnnnnnnnnnnnnnnnnnnnnnnnnnnnnnnnnnnnnnnnnnnnnnnnnnnnnnnnnnnnnnnnnnnnnnnnnnnnnnnnnnnnnnnnnnnnnnnnnnnnnnnnnnnnnnnnnnnnnnnnnnnnnnnnnnnnnnnnnnnnnnnnnnnnnnnnnnnnnnnnnnnnnnnnnnnnnnnnnnnnnnnnnnnnnnnnnnnnnnnnnnnnnnnnnnnnnnnnnnnnnnnnnnnnnnnnnnnnnnnnnnnnnnnnnnnnnnnnnnnnnnnnnnnnnnnnnnnnnnnnnnnnnnnnnnnnnnnnnnnnnnnnnnnnnnnnnnnnnnnnnnnnnnnnnnnnnnnnnnnnnnnnnnnnnnnnnnnnnnnnnnnnnnnnnnnnnnnnnnnnnnnnnnnnnnnnnnnnnnnnnnnnnnnnnnnnnnnnnnnnnnnnnnnnnnnngcaactggaagagaggtgactcacattcagtttaccagctggccagaccacggggtgcctgaggatcctcacttgcttcnctcaaactgagaaggagagtgaatgccttcagcaatttcttcagtggtcccattgtggtgcactgca

SEQ ID NO: 19212 - DNA, 383 bp, Macaca Mulatta
  misc_feature (1)...(383): n = A,T,C or G
ggagacgtatgttcttacctgacagttacaccacatgcagactgtcaagttgagaagagtgaatcaataacttgtatttgttttaaaaattaaattaatccttgataagagttacttttttttaggagttagtccttgaccactagtttgatgccatctccattttgggtgacctgtttcaccagcaggcctgttactctccatgactaactgtgtaagtgcttaaaatggaataaattgcttttctacannnnnnnnnnnnnnnnnnnnnnnnnnnnnnnnnnnnnnnnnnnnnnnnnnnnnnnnnnnnnnnnnnnnnnnnnnnnnnnnnnnnnnnnnnnnnnnnnnnnnnattgacacacgaagccacctaagaaaaagaa

SEQ ID NO: 19213 - DNA, 806 bp, Macaca Mulatta
ggggccgccatgttggggctgctgggactcgcgtcggttggcgactcccggacgtaggtagtttgttgggccgggttctgaggcgttggttctctttacttttccacttcaggccacgatgccgcagtaccagacctgggaggagttcagccgcgctgccgaaaaactttacctcgctgatcctatgaaggcacgtgtggttctcaaatataggcattctgatgggaacttgtgtgttaaagtaacagatgatttagtttgtttggtgtataaaacagagcaagctcaagatgtaaagaagattgagaaattccacagtcaactaatgcgacttatggtagccaaggaatcccgcaatgttaccatggaaactgagtgactggtttgaaatgaagactttgtcatgtacttaggaagtaaatatcttgaaatagagaaagtgttgggacagaaagtactttatgtaactaagtggactattcagaagcttagaggtcattttttgtaattttctttttaatgtttacattagagagctagggatgcaaatgttttcagttagaaagcctttatttacttttggaaattgaacaagaaatgcatctgtcttggaaactttgcagattatttgatgttagataaaacatgtaattgtttctctggcaaatttatatcagtaatttgaaaatgagatattagaaaaaaacaattcttaaatttagttcatctttaaaagaacattaaatataaccattttgttggatcgatgtgttttccttttggagcataaaatgtatgctgttgtg

SEQ ID NO: 19214 - DNA, 276 bp, Macaca Mulatta
ggcccacgcacttgtgcaggacagcaatctcattctccatgctgccttccttgccctccagggccttcttggcaatgcatttgatggccaccagcttctgcgtccttttatcttctgccaggatcacctccgagaaggcccccctatggggagaggggattcataaggtgaagaactggaaccccagcttccctccagcctctcctccattccctatgggttctgtgaccactgctggaccagggatgtggatgaccctctcctagtcactcatct

SEQ ID NO: 19215 - DNA, 4635 bp, Macaca Mulatta
  misc_feature (1)...(4635): n = A,T,C or G
ggttgttccttttggtgcaaacaatgcttttaccatgcctctgcatatgactttttggggaaaagaggaaaatagaaaagcggtttcagatcagttgaagaaacatggatttaaattgggtcctgcaccaaaaannnnnnnnnnnnnnnnnnnnnnnnnnnnnnnnnnnnnnnnnnnnnnnnnnnnnnnnnnnnnnnnnnnnnnnnnnnnnnnnnnnnnnnnnnnnnnnnnnnnnnnnnnnnnnnnnnnnnnnnnnnnnnnnnnnnnnnnnnnnnnnnnnnnnnnnnnnnnnnnnnnnnnnnnnnnnnnnnnnnnnnnnnnnnnnnnnnnnnnnnnnnnnnnnnnnnnnnnnnnnnnnnnnnnnnnnnnnnnnnnnnnnnnnnnnnnnnnnnnnnnnnnnnnnnnnnnnnnnnnnnnnnnnnnnnnnnnnnnnnnnnnnnnnnnnnnnnnnnnnnnnnnnnnnnnnnnnnnnnnnnnnnnnnnnnnnnnnnnnnnnnnnnnnnnnnnnnnnnnnnnnnnnnnnnnnnnnnnnnnnnnnnnnnnnnnnnnnnnnnnnnnnnnnnnnnnnnnnnnnnnnnnnnnnnnnnnnnnnnnnnnnnnnnnnnnnnnnnnnnnnnnnnnnnnnnnnnnnnnnnnnnnnnnnnnnnnnnnnnnnnnnnnnnnnnnnnnnnnnnnnnnnnnnnnnnnnnnnnnnnnnnnnnnnnnnnnnnnnnnnnnnnnnnnnnnnnnnnnnnnnnnnnnnnnnnnnnnnnnnnnnnnnnnnnnnnnnnnnnnnnnnnnnnnnnnnnnnnnnnnnnnnnnnnnnnnnnnnnnnnnnnnnnnnnnnnnnnnnnnnnnnnnnnnnnnnnnnnnnnnnnnnnnnnnnnnnnnnnnnnnnnnnnnnnnnnnnnnnnnnnnnnnnnnnnnnnnnnnnnnnnnnnnnnnnnnnnnnnnnnnnnnnnnnnnnnnnnnnnnnnnnnnnnnnnnnnnnnnnnnnnnnnnnnnnnnnnnnnnnnnnnnnnnnnnnnnnnnnnnnnnnnnnnnnnnnnnnnnnnnnnnnnnnnnnnnnnnnnnnnnnnnnnnnnnnnnnnnnnnnnnnnnnnnnnnnnnnnnnnnnnnnnnnnnnnnnnnnnnnnnnnnnnnnnnnnnnnnnnnnnnnnnnnnnnnnnnnnnnnnnnnnnnnnnnnnnnnnnnnnnnnnnnnnnnnnnnnnnnnnnnnnnnnnnnnnnnnnnnnnnnnnnnnnnnnnnnnnnnnnnnnnnnnnnnnnnnnnnnnnnnnnnnnnnnnnnnnnnnnnnnnnnnnnnnnnnnnnnnnnnnnnnnnnnnnnnnnnnnnnnnnnnnnnnnnnnnnnnnnnnnnnnnnnnnnnnnnnnnnnnnnnnnnnnnnnnnnnnnnnnnnnnnnnnnnnnnnnnnnnnnnnnnnnnnnnnnnnnnnnnnnnnnnnnnnnnnnnnnnnnnnnnnnnnnnnnnnnnnnnnnnnnnnnnnnnnnnnnnnnnnnnnnnnnnnnnnnnnnnnnnnnnnnnnnnnnnnnnnnnnnnnnnnnnnnnnnnnnnnnnnnnnnnnnnnnnnnnnnnnnnnnnnnnnnnnnnnnnnnnnnnnnnnnnnnnnnnnnnnnnnnnnnnnnnnnnnnnnnnnnnnnnnnnnnnnnnnnnnnnnnnnnnnnnnnnnnnnnnnnnnnnnnnnnnnnnnnnnnnnnnnnnnnnnnnnnnnnnnnnnnnnnnnnnnnnnnnnnnnnnnnnnnnnnnnnnnnnnnnnnnnnnnnnnnnnnnnnnnnnnnnnnnnnnnnnnnnnnnnnnnnnnnnnnnnnnnnnnnnnnnnnnnnnnnnnnnnnnnnnnnnnnnnnnnnnnnnnnnnnnnnnnnnnnnnnnnnnnnnnnnnnnnnnnnnnnnnnnnnnnnnnnnnnnnnnnnnnnnnnnnnnnnnnnnnnnnnnnnnnnnnnnnnnnnnnnnnnnnnnnnnnnnnnnnnnnnnnnnnnnnnnnnnnnnnnnnnnnnnnnnnngccacatgctaaatgccctttatgcagaaatgatatacatgaagataatttattagaatgtcctccagaagaattagcatgtgacagtgagaaaaagtctgatatggaatggacatccagttcaaagnnnnnnnnnnnnnnnnnnnnnnnnnnnnnnnnnnnnnnnnnnnnnnnnnnnnnnnnnnnnnnnnnnnnnnnnnnnnnnnnnnnnnnnnnnnnnnnnnnnnnnnnnnnnnnnnnnnnnnnnnnnnnnnnnnnnnnnnnnnnnnnnnnnnnnnnnnnnnnnnnnnnnnnnnnnnnnnnnnnnnnnnnnnnnnnnnnnnnnnnnnnnnnnnnnnnnnnnnnnnnnnnnnnnnnnnnnnnnnnnnnnnnnnnnnnnnnnnnnnnnnnnnnnnnnnnnnnnnnnnnnnnnnnnnnnnnnnnnnnnnnnnnnnnnnnnnnnnnnnnnnnnnnnnnnnnnnnnnnnnnnnnnnnnnnnnnnnnnnnnnnnnnnnnnnnnnnnnnnnnnnnnnnnnnnnnnnnnnnnnnnnnnnnnnnnnnnnnnnnnnnnnnnnnnnnnnnnnnnnnnnnnnnnnnnnnnnnnnnnnnnnnnnnnnnnnnnnnnnnnnnnnnnnnnnnnnnnnnnnnnnnnnnnnnnnnnnnnnnnnnnnnnnnnnnnnnnnnnnnnnnnnnnnnnnnnnnnnnnnnnnnnnnnnnnnnnnnnnnnnnnnnnnnnnnnnnnnnnnnnnnnnnnnnnnnnnnnnnnnnnnnnnnnnnnnnnnnnnnnnnnnnnnnnnnnnnnnnnnnnnnnnnnnnnnnnnnnnnnnnnnnnnnnnnnnnnnnnnnnnnnnnnnnnnnnnnnnnnnnnnnnnnnnnnnnnnnnnnnnnnnnnnnnnnnnnnnnnnnnnnnnnnnnnnnnnnnnnnnnnnnnnnnnnnnnnnnnnnnnnnnnnnnnnnnnnnnnnnnnnnnnnnnnnnnnnnnnnnnnnnnnnnnnnnnnnnnnnnnnnnnnnnnnnnnnnnnnnnnnnnnnnnnnnnnnnnnnnnnnnnnnnnnnnnnnnnnnnnnnnnnnnnnnnnnnnnnnnnnnnnnnnnnnnnnnnnnnnnnnnnnnnnnnnnnnnnnnnnnnnnnnnnnnnnnnnnnnnnnnnnnnnnnnnnnnnnnnnnnnnnnnnnnnnnnnnnnnnnnnnnnnnnnnnnnnnnnnnnnnnnnnnnnnnnnnnnnnnnnnnnnnnnnnnnnnnnnnnnnnnnnnnnnnnnnnnnnnnnnnnnnnnnnnnnnnnnnnnnnnnnnnnnnnnnnnnnnnnnnnnnnnnnnnnnnnnnnnnnnnnnnnnnnnnnnnnnnnnnnnnnnnnnnnnnnnnnnnnnnnnnnnnnnnnnnnnnnnnnnnnnnnnnnnnnnnnnnnnnnnnnnnnnnnnnnnnnnnnnnnnnnnnnnnnnnnnnnnnnnnnnnnnnnnnnnnnnnnnnnnnnnnnnnnnnnnnnnnnnnnnnnnnnnnnnnnnnnnnnnnnnnnnnnnnnnnnnnnnnnnnnnnnnnnnnnnnnnnnnnnnnnnnnnnnnnnnnnnnnnnnnnnnnnnnnnnnnnnnnnnnnnnnnnnnnnnnnnnnnnnnnnnnnnnnnnnnnnnnnnnnnnnnnnnnnnnnnnnnnnnnnnnnnnnnnnnnnnnnnnnnnnnnnnnnnnnnnnnnnnnnnnnnnnnnnnnnnnnnnnnnnnnnnnnnnnnnnnnnnnnnnnnnnnnnnnnnnnnnnnnnnnnnnnnnnnnnnnnnnnnnnnnnnnnnnnnnnnnnnnnnnnnnnnnnnnnnnnnnnnnnnnnnnnnnnnnnnnnnnnnnnnnnnnnnnnnnnnnnnnnnnnnnnnnnnnnnnnnnnnnnnnnnnnnnnnnnnnnnnnnnnnnnnnnnnnnnnnnnnnnncatgtttgatgatacagatgtaagaatacctgagactttacttggagtgttggaagtgatttgatagaaagatgagatcagagacaatgttgtgttatagggcgcacattgaaggtatatgccaaatctctcaccatctaagtccttttctccctgtgccctgtttttttgctcaaagggaacagtgaattagcccgctagaatcttcctggtccctttttgaggcggtagcaggtaaggaacgggctgattttcatcaaaaccaagacctttctacagggatgatagtggaataataatttgggattagcccactggcattaggagcagtagggaagttacctggtagatcaagcattacacacaaaaaaatcaagttgatcagagtatgggttctccatatagcaatacttcagtgagattaagtataaacagtttttggcaaaaaacaacacaatctactcttcctgcttacaaagacaaagccttacaaactcactgtgaaggtaaagggaggacagcttacttctttgcccagatatttacaaagttgtttttaaaacacactcataagtttggcaatttgtttaaaaaatgtcttgttttgtacagttctgttagatgttgttaaattttaaaaagtttaattaaaaaaatttaatttgtccttcctaagaaggataaatatataaaaaagccactggaacgtaaacttcctattatgctatgctgttttattattacatagaaaagtaactttagaaaaata

SEQ ID NO: 19216 - DNA, 770 bp, Macaca Mulatta
gggacccagtggcttctagaaatatcatagcaacagaaacttcctatgtcacagggtccactatgccaccaagcactgtgatcctgggtcctagacagccacagagccttattgtgaccgagagggtgtatgctccagcttctgccttggtagatcagccttatgctaatgaaggtacagttgtggtcactgaaagagtaatacagcctcatgggggtggatcgaatcctctggaaggcactcagcatctgcaggatgcaccttacgtcatggtgagggaaagagagagcttccttgcccccagctcaggtgtacaacctactctggccatgcctaatatagcagtaggacagaatgtgacagtgacagaaagaattctagcacctgcttccactctgcaatccagttaccagattcccactgaaaactctgtgaaggctaggaacaccatggtgtctggagctggagtccctggccctctgccagactttggtttagaggaatctggtcattctaattctaccataaccacatcttccaccagagtcaccaagcatagcactgtacagcattcttactcctaaacagcagtcagccacaaactgaccccgagtttaattagcagtgactaatttcatgtttccaatgtacctgatttttcatgagccttacagacacacacagacacatacacattgatcttaaaatgtttctcagtcactgatacgatacgcaaagggacacactggtctctgcttccaaggagtgta

SEQ ID NO: 19217 - DNA, 2903 bp, Macaca Mulatta
  misc_feature (1)...(2903): n = A,T,C or G
tgcagccgccgccaagtctgtgcggacgcgccctggttgcgctggttcttgcctgcggcctgtcgcagatctggggagaggatagaggcttcccgcctgccagggccactccgcttttgcaaaccgcaaagataatgacgccacccactaagaccttatnnnnnnnnnnnnnnnnnnnnnnnnnnnnnnnnnnnnnnnnnnnnnnnnnnnnnnnnnnnnnnnnnnnnnnnnnnnnnnnnnnnnnnnnnnnnnnnnnnnnnnnnnnnnnnnnnnnnnnnnnnnnnnnnnnnnnnnnnnnnnnnnnnnnnnnnnnnnnnnnnnnnnnnnnnnnnnnnnnnnnnnnnnnnnnnnnnnnnnnnnnnnnnnnnnnnnnnnnnnnnnnnnnnnnnnnnnnnnnnnnnnnnnnnnnnnnnnnnnnnnnnnnnnnnnnnnnnnnnnnnnnnnnnnnnnnnnnnnnnnnnnnnnnnnnnnnnnnnnnnnnnnnnnnnnnnnnnnnnnnnnnnnnnnnnnnnnnnnnnnnnnnnnnnnnnnnnnnnnnnnnnnnnnnnnnnnnnnnnnnnnnnnnnnnnnnnnnnnnnnnnnnnnnnnnnnnnnnnnnnnnnnnnnnnnnnnnnnnnnnnnnnnnnnnnnnnnnnnnnnnnnnnnnnnnnnnnnnnnnnnnnnnnnnnnnnnnnnnnnnnnnnnnnnnnnnnnnnnnnnnnnnnnnnnnnnnnnnnnnnnnnnnnnnnnnnnnnnnnnnnnnnnnnnnnnnnnnnnnnnnnnnnnnnnnnnnnnnnnnnnnnnnnnnnnnnnnnnnnnnnnnnnnnnnnnnnnnnnnnnnnnnnnnnnnnnnnnnnnnnnnnnnnnnnnnnnnnnnnnnnnnnnnnnnnnnnnnnnnnnnnnnnnnnnnnnnnnnnnnnnnnnnnnnnnnnnnnnnnnnnnnnnnnnnnnnnnnnnnnnnnnnnnnncagagacgggaagtggccaaaaccgtcttttgcctggtccttgtatttgccctctgctggcttccccttcacctcagcaggattctgaagctcactctttataatcagaatgatcccaatagatgtgaacttttgannnnnnnnnnnnnnnnnnnnnnnnnnnnnnnnnnnnnnnnnnnnnnnnnnnnnnnnnnnnnnnnnnnnnnnnnnnnnnnnnnnnnnnnnnnnnnnnnnnnnnnnnnnnnnnnnnnnnnnnnnnnnnnnnnnnnnnnnnnnnnnnnnnnnnnnnnnnnnnnnnnnnnnnnnnnnnnnnnnnnnnnnnnnnnnnnnnnnnnnnnnnnnnnnnnnnnnnnnnnnnnnnnnnnnnnnnnnnnnnnnnnnnnnnnnnnnnnnnnnnnnnnnnnnnnnnnnnnnnnnnnnnnnnnnnnnnnnnnnnnnnnnnnnnnnnnnnnnnnnnnnnnnnnnnnnnnnnnnnnnnnnnnnnnnnnnnnnnnnnnnnnnnnnnnnnnnnnnnnnnnnnnnnnnnnnnnnnnnnnnnnnnnnnnnnnnnnnnnnnnnnnnnnnnnnnnnnnnnnnnnnnnnnnnnnnnnnnnnnnnnnnnnnnnnnnnnnnnnnnnnnnnnnnnnnnnnnnnnnnnnnnnnnnnnnnnnnnnnnnnnnnnnnnnnnnnnnnnnnnnnnnnnnnnnnnnnnnnnnnnnnnnnnnnnnnnnnnnnnnnnnnnnnnnnnnnnnnnnnnnnnnnnnnnnnnnnnnnnnnnnnnnnnnnnnnnnnnnnnnnnnnnnnnnnnnnnnnnnnnnnnnnnnnnnnnnnnnnnnnnnnnnnnnnnnnnnnnnnnnnnnnnnnnnnnnnnnnnnnnnnnnnnnnnnnnnnnnnnnnnnnnnnnnnnnnnnnnnnnnnnnnnnnnnnnnnnnnnnnnnnnnnnnnnnnnnnnnnnnnnnnnnnnnnnnnnnnnnnnnnnnnnnnnnnnnnnnnnnnnnnnnnnnnnnnnnnnnnnnnnnnnnnnnnnnnnnnnnnnnnnnnnnnnnnnnnnnnnnnnnnnnnnnnnnnnnnnnnnnnnnnnnnnnnnnnnnnnnnnnnnnnnnnnnnnnnnnnnnnnnnnnnnnnnnnnnnnnnnnnnnnnnnnnnnnnnnnnnnnnnnnnnnnnnnnnnnnnnnnnnnnnnnnnnnnnnnnnnnnnnnnnnnnnnnnnnnnnnnnnnnnnnnnnnnnnnnnnnnnnnnnnnnnnnnnnnnnnnnnnnnnnnnnnnnnnnnnnnnnnnnnnnnnnnnnnnnnnnnnnnnnnnnnnnnnnnnnnnnnnnnnnnnnnnnnnnnnnnnnnnnnnnnnnnnnnnnnnnnnnnnnnnnnnnnnnnnnnnnagggcaggccctgtgttcatagctttacaatggagagatgccagtgacctcataatagagactgtgaactgcctggtgcggtgtccacatgacaagggggcaggtagcaccctctctcacccatgctgtagttaaaacggtttctagcgtatgtataatgctgtagttaaaacactatttttcaaaatcatacagattagtacatttaacggctacctgtaaagcttattactaatttttgtattatttttgtaaatagccaatagaaaagtgtgcttgacgtggtgcttttctttcacttagaggcaaaactgctttttgagactgtaagaacctcttagctttgtgcgttcctgcctaatttttaaatcttctaagcaaagtgccttagaatagcttgggatgagatgtgtgtgaaagtatgtacaagagaaaacggaagacagaggaaatgaggtggggtgagaggaaactcatggggacagattcccattcttagcctaacattcgtcattgcctcgtcacaccaatgcaaaaggtcctgattttgttccagcaaaacacagtgcaatgttctcagagtgactttagaaataaattgg

SEQ ID NO: 19218 - DNA, 787 bp, Macaca Mulatta
  misc_feature (1)...(787): n = A,T,C or G
gggtggatggcaggagcttgggaattcttgctgttaagtacaaattttgcactttttgaatgttagatgcttagtgtaaagttgatatgcaaggaaaatggtccatgtttacccacggttttcaggtactcccggactttaaagatgtcttggacattaagttcttaagcagtacacactacaccgtttgannnnnnnnnnnnnnnnnnnntaaggatttttttgtagggcagcacagcagagcaggacatggatgaaatactaggaatacgcatagtggggcagtgtgggggcttctcagcaatggagaacagttggtgaaacctttatttttatcaaactaagcatttaatcttgtatatttcccacatttaaaaatgaattaggtctctatcctaattaggatttgatcccatcaacactattgtagcagttaggaatcttaagagctatttttgtttcatacaattactatagtccagtttaccaaagttttctttagatgtctgattatcttggggggattacttaccttaaaaaggatagaaagggtcaccttacctatgtgggaaaaatgaaacaaggggtggagctggaataaagggcctgacttagtggaagtaactgggcaacaggtggagttttcgtaagaaggtgaaaattgggggggagatggtcacgcctgtaatttcaagaaccggatggttcctaacccagcccgggggaaagaaagagggaaaagttggttttctcgcggcgatgaaaggggcgcagatgcagaacgcct

SEQ ID NO: 19219 - DNA, 856 bp, Macaca Mulatta
ggacatttgagcttttttcctgcagggccatgaagtccccttaggttcccatatctgagatggttgtctgaccctctccccttatgtacagaagaggaaactgattctcagagaggggaagtggcttgccattcagtgttaggaggttgctgaatgacaaactgttcctaagaccccatctcaggctggccagagggccagcctcctcattcctgcttgttcttagaaaatctttcactgatcattttttgtcactggagtaacttcaaggttattatgctttcattccaaagtggatctatcctcagctgtggaccaaattccccttacttcattttggcaaacatttaagtcaagtcaaataatcaaaatgcctgtcactacatagagcctatcacctggggccaatacgaacagactgagtttcctccattctggtgtaaaataggatggaacacaaacctgggtaacttggtgacactggccttaaaccccttttttgggattaaacccaaaatgtaaatgaaaaatcttaaaccatattaaattgccggccgattgagaacttatctgaatttgtagaaaaaataaaatgtaatttttgggaataaaaataaaaacacacatcatagtaaaaacaaactatcctttttgggctggctcttgaggcccattagagaaaacacttttcagcacaccatttccattttagccacccccgggccacaactttgtggacaaactgtgaccatagggccaataacgctaggcttctctcgggggaaaatctccgggagccacgtaactaaagggcgcttagggcaacattctccgcccaaatttaaaaaacgccccc

SEQ ID NO: 19220 - DNA, 848 bp, Macaca Mulatta
  misc_feature (1)...(848): n = A,T,C or G
ggcaaggcttaattaacggggcactaaacaaaacagccaataaagtcaccagcagtattactatcacaccaacagccacacctcttcctcgacaatcacaaattacaatcaaggaggtatgcaagcggagaatcccaacacggatccctaaaccaannaaccnntacaggcatcaccaagatttccactaaagcccccacagtgcctatggataagcctatttacaaaaatggccttgagaagctacacatcgtaagaactgtcacctccaacactttcctccacatggggaggggagaaaggtaaccccaaaacaaggggcccgcgggggaaacctcnnnnnnnnnnnnnnnnnnnnnnnnnnnnnnnnnnnnnnttacctcagcactggtagatgggatgagaggtaggaaagtatgtattttttagtatagaattggataccattacagaaacaaaaataaaatgagacgaataaaagtagaggggtggagagtcataaagcaaacaaactcgcaaacggagcccatagaagactacataattggtagatttgtctacatctacggatatagggttaactatcgtagttaggggctaatttatcgtctgagtgtttatatactattcttttagtatatgacattgataataaagttatacttagaagacagtagtactagtccactgctagcaaatagagagggaacaccgcgtaaaaatttcaaccaaaattaggtttcattacaatatgataagatctagtgacagactcaatcaatttcacatgtgtagatgttgtattgaattatatttctatcgaactatataaacgacgataaagtgta

SEQ ID NO: 19221 - DNA, 665 bp, Macaca Mulatta
atgatttgcactgataaagatggttttaatggtgaaaacttcacagaatcactaatgtttctagaggttaacttcaagtgggcaagctggggtttttaggtagtcagtggcctagtttctaaagccgcagtatagggtctgtttgttaaactgaatctctgttgaaagtttgttttagctgattggaggcttccttttaagacaaactgtatgtgattaagttgttttaagggaactgaagaagttgatgtaacccctggccagataacactgtatctgatttctcagatactatttctctgggaaacattctacatagcacaggagcttaagagtggcattatcttcttgccttaatttccagagattatttctgtactgagagtcctggaactactatgctaggaaatttaaagccgcatggtctgtcttgttttcatttaattattgtgaacacctagaatctttctaggtcctgatttctcttgcttaatccagtctttatctctaactgccgcttatttgatcaccatgtactaggggctctgagagccagctcagctcctgatccttgaggcagcatcctttttctatttgaacttcagttttgtccttgaatcctgactagatatttcttgccctctggtctcagaattctcttggct

SEQ ID NO: 19222 - DNA, 600 bp, Macaca Mulatta
  misc_feature (1)...(600): n = A,T,C or G
agccatatgagctcacagtggctgcactttaccccagtagccctgaagtgtgggcccgtaccctctgtcccagcggagttagcgcctgctctaactcctcctgctttcacctatcccgcttcactgcatgcccagtgtttctctcctgaggcaaagcccaacacacctgtcttttgtccacttctccagcaaattagatttgtctctgggaatgtgtttgtaacataccaacctactgcagaccagcagagggagctcccatgttgaatttgttagctatcttcccccctttcgcaaaaactatttcttgacgacctttgagagatttcaataaaaattttaatcagagcaaaaatgaaaaaaaagagagagaactagtnnnnnnnnnnnnnnnnnnnannnnnnnnnnnnnnnnnnnnnnnnnnnnnnnnnnnnnnnnnnnnnnnnnnnnnnnnnnnnnnnnnnnnnannnnnnnnnnnnnnnnnnnnnnnnnnnnnnnnnnnnnnnnnnnnnnnnnnnnnnnnnnnnnnnnnnnnnnnnnnnnnnnnnnnnnnnnnnnnnnnnnnnnnnnnnnnnnnnnnnnnnnnnnnnnnnnnnnn

SEQ ID NO: 19223 - DNA, 256 bp, Macaca Mulatta
gctgtgccgctgaggcgccgccgtggagccgccttggagccaccgccccctcgccgcttcgccgctgcgttggggaaccgggaccgcggcggcgccgggttgccctgatgatcccgggcgggcggtggcggcggcagaggcggcgggaggatgacctcttaccgggagcggagtgccgatctggcccgtttctacactgttaccgagccccagcgacacccgaggggctacacagtatataaggtcaccgcccggg

SEQ ID NO: 19224 - DNA, 912 bp, Macaca Mulatta
cagtcctggctggagcccgtgcagttcctcaggagtgtgtttgccaacaggctggtgtatggcacctcagacagcgacgtctatgacctcctaaaaagcctagaggaaggcatccaaacgctgatgggggtgagggtggcgccagggggtccccaaccctggaacctcactggcttcgcgggctgggggagagaaacactgctgccctctttttagcagtcaggcactgacccaagagaactcaccttattcttcatttcccctggtgaatcctccaggcctttctcccttggaggggagggaggaaaatgaatgaatgagacagggagggaacagtgaccaagcacttggcctctccttctcttccttcactttgcagaggctggaagatggtagcccccggactgggcagatcttcaagcagacctacagcacgtttgacacaaactcgcacaatgatgacacactgctcaagaactactggctgctccactgtttcaggaaggacatgaacaaggtcgagacattcctgcgcatggtgcagtgccgctctgtggagggcagctgtggcttctaggtgcccgtgtggcatcctgtgaccccttgccagtgcctctcctggctccggaaggtgccactccagtgcccaccagccatgtcctaataaaattaagttgtatcattttgtctggctaggtgtccttctataatattttggggtggaagggggtggtatggagcaaggggcagcttgggaagatgacctgtagggcctgcagggtctattgggaaccaggccgctgaaatataaaagatttgactgttcctgggccagaagaaagctgacacatcactgcagtctgttactcactaaggccattccaccagctcagtggtcccagcttgctggtc

SEQ ID NO: 19225 - DNA, 145 bp, Macaca Mulatta
gtcactcccacggaagagggcatgaagaaggtcacccagctggtggccacctatccccagggttttaagttttggatgggtcctacctttcccctcctcactttatgccaccctgacaccatccggcctatcacccgtgcctcag

SEQ ID NO: 19226 - DNA, 802 bp, Macaca Mulatta
  misc_feature (1)...(802): n = A,T,C or G
ggggattttatgtgcctttttgtacctttttcagattggaattagttttctgtttaaggctttaatggtactgatttctgaaacgataagtaaaagacaaaatattttgtggtgggagcagtaagttaaaccatgatatgcttcaacacgcctttgttacattgcatttgcttttattaaaatacagaattaaacaaaaaaaactcatggagcgattttgttaccttgggggatgagaccatgagattggaaaatgtacattacttctagttttagactttannnnnnnnnnnnnnnnnnctaaaatcttaaaacttactcagctggttgcaaataaagggagttttcatatcaccaatttgtagcaaaattgaattttttcataaactagaatgttagacacattttggtcttaatccatgtacacttttttatttctgtatttttccacttcactgtaaaaatagtatgtgtacataatgttttattggcatagtctatggagaagtgcagaaacttcagaacatgtgtatgtattatttggactatggattcaggttttttgcatgtttatatctttcgttatggataaagtatttaacaaaacaagtgacatttgatcaattgttgagctgtagttagaatactcnnnnnnnnnnnnnnnnnnnnnnnnnnnnnnnnnnnnnnnnnnnnnnnggtttggggaagggaagagaagttcttagcccaaaagggttttacctaattttgnnnnnnnnnnnnnnnnnnnnnnnnnnnnnnnnnnnnnnnnnnggggggggcc

SEQ ID NO: 19227 - DNA, 876 bp, Macaca Mulatta
gggagcgcgtgggccccgcccccttatgtcgggtataaagcccctcccgctcacggtttggggagtccgccaaggctcggaaatccttcaccatgtcgtgcgagtcgtctatggttttggggtactgggatattcgtgggctggcgcacgccatccgcctgctcctggagttcacggatacctcctatgaggagaaacgatacacgtgtggggaagctcctgactatgatcgaagccaatggctggatgtgaaattcaagctggacctggactttcctaatctgccctacctcatggatgggaagaacaagatcacccagagcaatgccatcttgcgctacatcgctcgcaagcacaacatgtgtggtgagactgaggaagaaaagattcgagtggacatcatagagaaccaagtgatggatttccgcacacaactgataaggctgtgttacagctctgatcacgaaaaactgaagcctcagtacttggaagagctacctggacaactgaaacaattctccgtgtttctggggaaattctcatggtttgcaggggaaaagctcacctttgtggattttctcacctatgatatcttggatcagaaccgtatatttgagcccaagtgcctggatgagttcccaaacctgaaggcttttatgtgccgtttttgaggctttggaagaaaatcgctgccctatatatcagtcttgatcaagttccttcaaaaatgccccttctcaaaaacaaagatgtggccccagtggggggccgaacaaagccctgtgtattcctggagcctagaagggtaaaacttgcgcttaaaccctgtttttggatttcacaccccgcgtccctataagggggtcacaccccttc

SEQ ID NO: 19228 - DNA, 779 bp, Macaca Mulatta
ggcgccgccgccgccatgaacatcttccggctgactggggacctgtcccacctggcggccatcgtcatcctgctgctgaagatctggaagacgcgctcctgcgccggtatttctgggaaaagccagcttctgtttgcactggtcttcacaactcgttacctggatctttttacttcatttatttcattgtataacacatctatgaaggttatctaccttgcctgctcctatgccacagtgtacctgatctacctgaaatttaaggcaacctacgatggaaatcacgataccttccgagtggagtttctggtggtccctgtgggaggcctctcctttttagtcaatcatgatttctctcctcttgagatcctctggaccttctccatctacctggagtccgtggctatccttccacagctctttatgatcagcaagactgggggaggccgagaccatcaccacgcactacttgttcttccttggcctctatcgtgctttgtatcttgtcaactggatctggcgcttttagtttgaggggcttctttgacctcattgctgtggggggccggcgtaatccagaacatcctgatgcgggggacttcttctacgtggtacataagcaaaggactgcgaggggaaaaaagctcagatttgcccacgatgagggggccgaagaatcagccgccagccggggtgggcgccctcagagggggcctccggaagagagaaattccctgtacggcccgagccaaaggggcatctcaagaagaagaccttgt

SEQ ID NO: 19229 - DNA, 954 bp, Macaca Mulatta
  misc_feature (1)...(954): n = A,T,C or G
tcaccctgcatgagcccgttggtgtctgtggccttatcatcccgtggaactttcccttggtaatgcagggttggaaactcgccccggcgcttgccacaggcaacactgtggttatgaaggtggcagagcagacacccctctctgccctgtacgtggcctccctcatcaaggaggcgggctttccccctggggtggtgaacatcatcacgggctatggcccaacagcaggtgcggccatcgcgcagcacatggatgttgacaaagttgccttcaccggttccaccgaggtaggccatctgatccagaaagcagctggcgattccaacctcaagagagtcaccctggagctgggcggcaagagccccagcatcgtgctggccgatgctgacatggagcacgccgtagagcagtgccacgaagccctgttcttcaacatgggccagtgctgctgtgctggctcccggacctttgtggaagaatccatctacaatgagtttctcgagagaaccgtggagaaagcaaagcagaggaaagtggggaacccctttgagctggacacccagcaagggcctcaggtggacaaggagcagtttgaacgagtcctaggctacatccaacttggccagaaggagggtgcaaaactgctctgtggtggagagcgttttgnggagcgtggtttcttcatcaagcctactgtctttggtggcgtgcaggatgacatgaggatcgccaaagaagagatctttgggcctgtgcagcccctggttcagtttcagaaagattgangaggtgattgagaggccaacaacactaggtatggcctggctgcggctgtgttcacccgggacctgnnacaggcatgtactttcaccagcactccagccgggaacgtgtgggtaaacactacacatcgtcactggcaacgccatttggaggttaaggaatctgnaaacg

SEQ ID NO: 19230 - DNA, 2424 bp, Macaca Mulatta
  misc_feature (1)...(2424): n = A,T,C or G
agctatggacagccatcgttacaagatgaacttaaagacaataccactgtcttcaccaggattttggacagactcctagacggttatgacaatcgcctgagaccaggattgggagnnnnnnnnnnnnnnnnnnnnnnnnnnnnnnnnnnnnnnnnnnnnnnnnnnnnnnnnnnnnnnnnnnnggaatatacaatagatgtatttttccgtcaaagctggaaggatgaaaggttaaaatttaaagggcccatgacagtcctccggttaaataacctaatggcaagtaaaatctggactccggacacgttttttcacaatggaaagaagtcagtggcccacaacatgaccatgcccaacaaactcctgcggatcacagaggatggcaccttgctgtacaccatgaggnnnnnnnnnnnnnnnnnnnnnnnnnnnnnnnnnnnnnnnnnnnnnnnnnnnnnnnnnnnnnnnnnnnnnnnnnnnnnnnnnnnnnnnnnnnnnnnnnnnnnnnnnnnnnnnnnnnnnnnnnnnnnnnnnnnnnnnnnngtggttgtagcagaagatggatcacgtctaaaccagtatgatcttcttggacaaacagtagactctggaattgtccagtcaagtacaggncaggagaatatgttgttatgaccactcatttccacttgaagagaaagattggctactttgttattcaaacatacctgccatgcataatgacagtgattctttcacaagtgtccttctggctcaacagagagtctgtaccagcaagaactgtctttggnnnnnnnnnnnnnnnnnnnnnnnnnnnnnnnnnnnnnnnnnnnnnnnnnnnnnnnnnnnnnnnnnnnnnnnnnnnnnnnnnnnnnnnnnnnnnnnnnnnnnnnnnnnnnnnnnnnnnnnnnnnnnnnnnnnnnnnnnnnnnnnnnnnnnnnnnnnnnnnnnnnnnnnnnnnnnnnnnnnnnnnnnnnnnnnnnnnnnnnnnnnnnnnnnnnnnnnnnnnnnnnnnnnnnnnnnnnnnnnnnnnnnnnnnnnnnnnnnnnnnnnnnnnnnnnnnnnnnnnnnnnnnnnnnnnnnnnnnnnnnnnnnnnnnnnnnnnnnnnnnnnnnnnnnnnnnnnnnnnnnnnnnnnnnnnnnnnnnnnnnnnnnnnnnnnnnnnnnnnnnnnnnnnnnnnnnnnnnnnnnnnnnnnnnnnnnnnnnnnnnnnnnnnnnnnnnnnnnnnnnnnnnnnnnnnnnnnnnnnnnnnnnnnnnnnnnnnnnnnnnnnnnnnnnnnnnnnnnnnnnnnnnnnnnnnnnnnnnnnnnnnnnnnnnnnnnnnnnnnnnnnnnnnnnnnnnnnnnnnnnnnnnnnnnnnnnnnnnnnnnnnnnnnnnnnnnnnnnnnnnnnnnnnnnnnnnnnnnnnnnnnnnnnnnnnnnnnnnnnnnnnnnnnnnnnnnnnnnnnnnnnnnnnnnnnnnnnnnnnnnnnnnnnnnnnnnngcagcttggagacaggattctgacagagcaagtgaaagagcaaagtcatgtcagaaggagacagaatgagagagaaaagaggggcaagacggttccaagatacaagaaaaagtagaaaaaaaaaataacacttacctataacccctaggtcatttgtagatatatatttccaaatattcagaaaaaaagatactgtatatgtcaaaaatatttttatgtgaaggtgtttaaaaggataaattataaatgtttcatgaagaaaaatcttaaaaaaatctatgtctttattacactatggtgtgcttatgtttttgttttgctttttaaactgatgtatagctttaacattttgtttccaaagctgaagatccccattatttctctttgnnnnnnnnnnnngcctaacgcattattttgtcataaaacgctcttttaaaattcatggaactttcataggcaaaggtgcggttgctcattgtagagcacatttagtccaatgaagataaatgctttaaacagatttcttcactttcatctgagcttttaccgctggactcaaggaagaataattttaacagacatgtatactcaatagaaactaaactaaaataatttaaaaatattccctttttcaccctattttcagatagcacatgagcccaatactcacttaattctcgttatgaagatgtttttagaggggcaaaaatattttgcaagctctggaattgttgaatgtattcttttatataactacattaaaagctttagattgaaatttatgactagccaacaaaaaatagaatatataaaagatatatgtaaatatacagcatgagattgtacannnnnnnnnnnnnnaaaattgtgttcttaaaatattgtgtaagaatcactgctcttagctgttagaatgttgttaaatgctatggaaatacat

SEQ ID NO: 19231 - DNA, 1771 bp, Macaca Mulatta
  misc_feature (1)...(1771): n = A,T,C or G
gcaggctgcggcagacggcgacattggcggcggcgccatggcagggcttgcaggatccctgctgccttggtgatcccgggctgacagccagagagcacagcggctcagctcctggagagtgagggttgaagaaagcggagggcagccgcctgcgcccgctggctcccattaggtcggttcctgcagcggtgcccggcagccttggtgaaggccctgcccggcagagatcatgtgttgcctccagtggctgctgcccgtcctcctcatccccaagcccctcaaccccgccctgtggttcagccactccatgttcatgggcttctacctgctcagcttcctcctggaacggaagccttgcacaatttgtgccttggttttcctggcagcgcttttccttatctgctatagctgctggggaaactgtttcctgtaccactgctccgattcaccgcttccagaatcggcgcatgatcccggcgtcgtgggcacctaacggcctgccctgttagcttttcaaggaagcagaagacgggaggggaggcattgacataggtcataaagcattggagtttcaaatcccgcagcctcgcgggtgtcacattcctgacggcgcctttttggcctgtgaatgttttatccttataatgtgaataatggcactgaccggtgcttttattgtaaagtcctatagtcgtgggtggtcttgtggttgtgtgtgttctgtccccatctaggtcctggctggccgcatgaccacccccctcgcctcattactgcgaggagtctgggcccatcctggtcaaccgccccaatgtgacctggggcagataaaatgccagtctcattgtcacctctgtgatccctccttgtcagggtctccttccttcccagaatgttactgactcagtccctctcctggtttccctttacttctcttctaccctttnnnnnnnnnnnnnnnagtacctgtccaagacagggctcatttttgcacttatctcaaatttgaagagattgctgacgcccgagagcctcgctttttcatccttctttccttgttcagcaggctagacagaaacatgtcttgactgtttgttgtccacaaatcttcagtattttctccgcttcatttttaagaaaggaagcaacagatagatgttgctctttcacctgggtgtctgggctcatgctttcctgcccagcctcacttcctttgcccttcctcctgcctttctcaactgttccaaggaggggggcctcattgtgtctcccgtgcatgctctgcagcattgaagtatggtgtgttcacgtagttctagcagtccccagctgagtgagttgggagagtacctgtgtgtttcataacaggccattatccccttgatagatgtttggatattttttggtgtgccctgtgcgtgtgtgtgtgtacaaatacatgtgtatattcctttttaagaagctttatcgaacatgttctgattttgaggtttagcaatagctagctatatatggtaggtgccgctacagtttttatttagcatggggattgcagagtgaccagcacactggactccgaaggtgattccaacaagaacaggggaacaatgggcccatcattcctcccggccagggggctttcttcccgttccttgccgccataaaagaactgggtacctttnnnnnnnnnnnnnnnnnnnagggaaaaaaaccttttgggtgaacctggttcaacctttgggccgggcctttttttttcctcggccgccta

SEQ ID NO: 19232 - DNA, 431 bp, Macaca Mulatta
gtctgcgacggcggcgtggagacctccttccgcaaactcagctttactgagtctctgaccagtggtggctcactgctaactctcaacaaaatgccccatgattatgggcaggaaggacctctagaaggcaaaatttagcctgcagacaatttcccacaccgtataaaccaaagccctaaaattctactgcattgtccacaaaacagaagctgaagcgcatccagaggtgctcagagagccggcctgcctgaatcattctcgatataactcgagaccttttcaacttggcttcctttcttggttcataaatgaattttagtttggttcacttacagatagtatctagcaatcacagcactggctgagcggatgcatctggggatgaggttgcttactaagctttgccggctgctgccggatcacagctgctt

SEQ ID NO: 19233 - DNA, 2211 bp, Macaca Mulatta
  misc_feature (1)...(2211): n = A,T,C or G
gtcaatgatgaatctggtcgagattctgaagtcggtgccagggagcacatgagttccagcagctccctccagtcccgggaggagaagcaagagcctgtcgtggtaaggccctatccacaggtgcagatgttgtctacacaccatgctgtcgcatcagccacacctgttgcagtgacagccccgccagcacacctgnnnnnnnnnnnnnnnnnnnnnnnnnnnnnnnnnnnnnnnnnnnnnnnnnnnnnnnnnnnnnnnnnnnnnnnnnnnnnnnnnnnnnnnnnnnnnnnnnnnnnnnnnnnnnnnnnnnnnnnnnnnnnnnnnnnnnnnnnnnnnnnnnnnnnnnnnnnnnnnnnnnnnnnnnnnnnnnnnnnnnnnnnnnnnnnnnnnnnnnnnnnnnnnnnnnnnnnnnnnnnnnnnnnnnnnnnnnnnnnnnnnnnnnnnnnnnnnnnnnnnnnnnnnnnnnnnnnnnnnnnnnnnnnnnnnnnnnnnnnnnnnnnnnnnnnnggtgcagctgctgctgccgtgatgtccagttctaaagtaaccacagtcctgaggccgacctcgcagctgccaaatgctgctactgctcagccagcagtgcagcacatcattcaccaaccaatccaggcannnnnnnnnnnnnnnnnnnnnnnnnnnnnnnnnnnnnnnnnnnnnnnnnnnnnnnnnnnnnnnnnnnnnnnnnnnnnnnnnnnnnnnnnnnnnnnnnnnnnnnnnnnnnnnnnnnnnnnnnnnnnnnnnnnnnnnnnnnnnnnnnnnnnnnnnnnnnnnnnnnnnnnnnnnnnnnnnnnnnnnnnnnnnnnnnnnnnnnnnnnnnnnnnnnnnnnnnnnnnnnnnnnnnnnnnnnnnnnnnnnnnnnnnnnnnnnnnnnnnnnnnnnnnnnnnnnnnnnnnnnnnnnnnnnnnnnnnnnnnnnnnnnnnnnnnnnnnnnnnnnnnnnnnnnnnnnnnnnnnnnnnnnnnnnnnnnnnnnnnnnnnnnnnnnnnnnnnnnnnnnnnnnnnnnnnnnnnnnnnnnnnnnnnnnnnnnnnnnnnnnnnnnnnnnnnnnnnnnnnnnnnnnnnnnnnnnnnnnnnnnnnnnnnnnnnnnnnnnnnnnnnnnnnnnnnnnnnnnnnnnnnnnnnnnnnnnnnnnnnnnnnnnnnnnnnnnnnnnnnnnnnnnnnnnnnnnnnnnnnnnnnnnnnnnnnnnnnnnnnnnnnnnnnnnnnnnnnnnnnnnnnnnnnnnnnnnnnnnnnnnnnnnnnnnnnnnnnnnnnnnnnnnnnnnnnnnnnnnnnnnnnnnnnnnnnnnnnnnnnnnnnnnnnnnnnnnnnnnnnnnnnnnnnnnnnnnnnnnnnnnnnnnnnnnnnnnnnnnnnnnnnnnnnnnnnnnnnnnnnnnnnnnnnnnnnnnnnnnnnnnnnnnnnnnnnnnnnnnnnnnnnnnnnnnnnnnnnnnnnnnnnnnnnnnnnnnnnnnnnnnnnnnnnnnnnnnnnnnnnnnnnnnnnnnnnnnnnnnnnnnnnnnnnnnnnnnnnnnnnnnnnnnnnnnnnnnnnnnnnnnnnnnnnnnnnnnnnnnnnnnnnnnnnnnnnnnnnnnnccccaatcaacacacaagggcttcagcctgcaaaaattggtactcagcagcctcagcctgaaggaaagacttcangcagtggtgttggcagatggagccacaattgtggccaaccctattagcaatccattcagtgctgctccagcagcaacaaccgtggtgcagacccacagccagagtgctagcaccaacgctcctgcccagggctcatcgccacggccaagcatactccgcaagaaacctgccacagatggngtgccaaacccaagtctgaaatccacgtgtctatggccactcccgtcactgtgtccatggagactgtatccagtcaaaataatgatcagcctaccattgccgtccctccaactgcccagcagcctccaccgaccattccaactatgattgcagcagccagtcccccatcacaaccagccgttgccctttcaaccattcctggagcggtccccatcactccacccatcaccaccattgcagctgcaccacctccatcagtcactgtgggtggcagtctgtcctccgtcttgggccctcctgttcctgaaattaaagtgaaagaagaagtagaaccaatggatatcatgaggccagtttctg

SEQ ID NO: 19234 - DNA, 684 bp, Macaca Mulatta
  misc_feature (1)...(684): n = A,T,C or G
gtctcgcgtannnnnnnnnnnnnnnnnngtagaggtgaggtcttgtcatattgannnnnnnnnnnnnnnnnnnnagnnnnnnnnnnnnnnacctggctgggcctcccaaagtgttgaannnnnnnnnnnnnnnnnnntatgcttagcctgaaaagcattttcttaacccatgttcaacacaagggcaaaggcatcagattaatacaaaaaaaagtttgttcatcaattagtgacattaataaatggagttaactgtataagtcacaatatttttctaaagtgaaaatactcatattggataaagccacctacccaaggactgagcactagctcacagtcactcaatcaatacaggtatttctttaaagaacaggtaaggtacaaaaatagccattaaaatttaggacacaccaacagtggtgactcacacctataatcctagtactttaggatgctgaagtgggagaattgtttgagcccaagagtttgagaccagtctgggcaacacagtgaggcactctttctannnnnnnnnnnnnnnnnnnnnnnnnnnnnnnnnnnatgttcctgtagtcccagctacaggtaggaggctgagaggcaggaggattgcttgagcccaggaggttgaggccgcagtgagccacgactgtgtcactgcactccgggctgggcaaccagagc

SEQ ID NO: 19235 - DNA, 490 bp, Macaca Mulatta
  misc_feature (1)...(490): n = A,T,C or G
acaggtaccagtcagtggcccagacctggagggcaagcaccttcatccccaagctatgaaaactcactccactccctgngcagtctcgaatggaggatcgtttagacagactggatgatgcaatccatgtgctgcggaaccatgctgtgggaccttccaccagtttgcctactggtcacagtgatatacacagtttattgggaccatcccataatgcaccaattggaagcctcaattcaaactatggaggatcaagccttgttgcaagcagtcgatcaacttcaatgnnnnnnnnnnnnttttatctttcctttgcctctttgttaggtggcttgcagagtcagtctggaactgttgttacaacagaaatcaagactgaaaacaaagaaaaggatgaaaaccttcatgaacctccttcatcagatgacatgaagtctgatgatgaatcctcccaaaaagacatcaaggtttcatctagaggcagaacaag

SEQ ID NO: 19236 - DNA, 601 bp, Macaca Mulatta
  misc_feature (1)...(601): n = A,T,C or G
gaaattacagacaacccttacatgacgtcaatccctgtgaatgcttttcagggactatgcaatgaaaccttgacactgnnnnnnnnnnnnnnnnnnnnnnnnnnnnnnnnnnnnnnnnnnnnnnnnnnnnnnnnnnnnnnnnnnnnnnnnnnnnnnnnnnnnnnnnnnnnnnnnnnnnnnnnnnnnnnnnnnnnnnnnnnnnnnnnnnnnnnnnnnnnnnnnnnnnnnnnnnnnnnnnnnnnnnnnnnnnnnnnnnnnnnnnnnnnnnnnnnnnnnnnnnnnnnnnnnnnnnnnnnnnnnnnnnnnnnnnnnnnnnnnnnnnnnnnnnnnnnnnnnnnnnnnnnnnnnnnnnnnnnnnnnnnnnnnnnnnnnnnnnnnnnnnnnnnnnnnnnnnnnnnnnnnnnnnnnnnnnnatccttgaatccttgatgtgtaatgagagcagctatgcagagcttgcgccagagaaaatctgtgaatgccttgaatagccccctccaccactgatatgaacagaatctggatgacaggattgttgggtacaaggaaaagtccaagttccaggatgctcataacaatgctcattattacgtcttctttg

SEQ ID NO: 19237 - DNA, 87 bp, Macaca Mulatta
aggcaaatgtgcaataccaacatgtctgtacctactgatggtgctgtaaccacctcacagattccagcttctgaacaagagaccctg

SEQ ID NO: 19238 - DNA, 262 bp, Macaca Mulatta
tcggactacggttggtttctgcaacttcccggattattttcgccaaggactttgcaacatttttttccgccttttctggaaggatttcgctgcttcccgaaggtcttggacgagcgctccagctccgtgggaaggttttgggctctctggcgcggattttgcaatttctccctggggactgtcgtggagccgcgtccactgtggattataattgcaacatgacgctggaagagctcgtggcgtgcgacaacgcggcgcagaa

SEQ ID NO: 19239 - DNA, 155 bp, Macaca Mulatta
  misc_feature (1)...(155): n = A,T,C or G
naggtttatgtgcgaagcacagactttgaccggactctcatgagtgctgaggccaacctggctggactcttccctcccaatgggatgcagcgcttcaacccgaacatctcgtggcagcctatccctgtgcacactgtgcccatcactgaggacag

SEQ ID NO: 19240 - DNA, 1070 bp, Macaca Mulatta
gggattcttcccggggagaccgcagcccatcggcatggctcaagagtttgtgaacggcaaaatccagcctgggaaggtggttgtgttcatcaagcccacctgcccatactgcaggagggcccaagagatcctcagtcaattgcccatcaaacaagggcttctggaatttgtcgatatcacagccaccaaccacactaacgagattcaagattatttgcagcagctcacgggagcaagaacggttcctcgagtctttatcggtaaagattgtataggcggatgcagtgatctagtctctatgcaacagagtggggaactgctgacgcggctaaagcagattggagctctgcagtaaccacagggccaagaaggttgacggggcatcttggttttcttctggatgcgctctttggttttcagaagactgtgacaagttctggcccaggattccctcactgaccctcaactgttctctttggcacacgtttcttactgttctccacgtgtcagcatgtctctacctctaagccagtgtttttcaactatgtttatccagactccttctccacaatgatgaatccatagttggttttctgctactgtccattagctgaaatcattttgctgcttgactttatggagtttgtattatgatatcagtgggtattttgaatgtgttctttcaaactacatgcatctctccactcaaccccaccccatcccatcccaccttgaaaatcactgctccgaaccagtgttctccaccttgtcctccatagatctcataggaaatgttcaacaattctgtgaaaggtcacaggacccaattggagaaatcatatgaaaagcatagttggtcttggcgtcacatggattaaaggcacaagtgcagaggctgtggtcatgcggaacactctgttatttaagatggctctccagataatcctgaacactgtgtatttgttcgatttagactaccagcaacgatttaaagcacgaaatgtgaaacatctgagaaaacttacagccccctacaccaagagtgtatcctatgaaagagcccccacact

SEQ ID NO: 19241 - DNA, 755 bp, Macaca Mulatta
ggcatttctcagtattttcaaggctctaacccgccttcatccaatgtgtggcctacaataactagcatttgttgatttgtttgttgtatcaaaattcccaaataaaacttaaaaccactgactctgtcagagaaactgaaacactgggatatttcatcccttcagttcctcagtattgattttatgttaattgactttcagaatttctctacagaaacgaaagggaaattttctaatctgttttatccatgtacttgcatttcagacatggacatgccattgttatttgactcataactgtttccaaatgttagttattatggacccaatttattaacaacattagctgatttttacctatcagtattattttatttcttttagtttatagatctgtgcaacatttttgtactgtatgtcttcaaacctggcagtattaatacccttcttactgacatatgtacttttagttttagaaaacttttatatttatgtgtcttatttttatatttctttatttattacacagtgtagtgtataatactgtagtttgtattaatacaataatatattttagtatgaaaatttggaaagttgataagatttaaagtagagatgcaattggttcctcctgcattgaagatttgatttaaacagggtttatgttaacatttaatacttggccttgggacttgtaaaaaagaaaacttaaaatggggaaatggtatttaatttttccaaacttaccaatccac

SEQ ID NO: 19242 - DNA, 82 bp, Macaca Mulatta
ggtcaccttctacctcattcttagcacctcagggatcagcattgagaccacggaactggaggtagagctgctgttggccacg

SEQ ID NO: 19243 - DNA, 362 bp, Macaca Mulatta
cctccctcaagtccacctctccggtacgagagtgagtgccggctctggtttttgtcgggttcttttgtgcaagcgtcccaggccccgttttctttcgtcagtcagaggtcttccggaagcgagctgccgcccccgcggctttcgaggctcccaggacactgcagcttttcgctcccgggccgacccgtacactggggccgcttcatcgtgccggagtgtttacggagaagagtgaggcctgaaccgacgaaagagaagcccacatgggcgacaacactggtagtccaaggagctaggacgacgcgggtgcaacagagactcgcacactcgcgccgcttccgaacccagttcgctaggacctc

SEQ ID NO: 19244 - DNA, 629 bp, Macaca Mulatta
  misc_feature (1)...(629): n = A,T,C or G
tcctgcaaatgtcgcagctggaacgcaacatagagaccatcatcaacaccttccaccagtactctgtgaagctggggcacccagacaccctgaaccggagggaatcaaacagctggtggaaaaagatcttcaaaactttctcaagaaggagaaaaagaatgataagatcatagaccacatcatggaggacctggacacaaatgcagacaagcagctgagcttcgaggagttcatcatgctgatggcgaggctaacctgggcctcccacgagaagatgcacgaggatgacgagggccctggccaccaccataagccaggtctcggggaggacgctcgctaagaccacagtgtccaagatcgcagtggccatggccacgccacagccactaatcaggaggccaggccaccctgtctctacccaaccagggccccgggacctcttgtgccaaactgtcctggctgtggcggtaggggctggggccaaataaagtcttcnnnnnnnnnnnnnnnnnnnnnnnnnnnnnnnnnnnnnnnnnnnnnnnnnnnnnnnnnnnnnnnnnnnnnnnnnnnnnnnnnnnnnnnnnnnnnnnnnnnnnnnnnnnnnnnnnnnnnnnnnnnnnnnnnnnnnn

SEQ ID NO: 19245 - DNA, 691 bp, Macaca Mulatta
  misc_feature (1)...(691): n = A,T,C or G
ttattttctaagatagccagatagaaaaagattttcattgatgagatatttttaaacttgcttgtatcagtattttaatttgagcaaactggaatattttcatcaggaaaggagcactgtggtaaaaagcccagtattcacattttttcccagttttcagaagtgacatttcatatataggtgccaataagtgaattggggtgcggagagcgggaaccttttgaatttacgattatcacagagattgtagaacttatgatctgactggaaaacgatcctgtatcccctcccaaataatcatgggcttttgttttgaataaaaaagcagacaaannnnnnnnnnnnnnnnnnnnnnnnnnnnnnnnnnnnnnnnnnnnnnnnnnnnnnnnnnnnnnnnnnnnnnnnnnnnnnnnnnnnnnnnnnnnnnnnnnnnnnnnnnnnnnnnnnnnnnnnnnnnnnnnnnnnnnnnnnnnnnnnnnnnnnnnnnnnnnnnnnnnnnnnnnnnnnnnnnnnnnnnnnnnnnnnnnnnnnnnnnnnnnnnnnnnnnnnnnnnnnnnnnnnnnnnnnnnnnnnnnnnnnnnnnnnnnnnnnnnnnnnnnnnnnnnnnnnnnnnnnnnnnnnnnnnnnnnnnnnnnnnnnnnnnnnnnnnnnnnnnnnnnnnnnnnnnnnnnnnnnnnnnnnnnnnnnnnnn

SEQ ID NO: 19246 - DNA, 224 bp, Macaca Mulatta
agaggccaagcctggatgccaaggagcccctggtgttacatggggcctggcccatgccctccctcttccaggcctgagatatgacccaccagtgccttctgtctgctcgttagctttaatcaatcattccctgccttgtccctctcacttcccagccccacccctaagtgcccaaagtggggagggacaagggattctgggaagccttagcctcccccaaagca

SEQ ID NO: 19247 - DNA, 4314 bp, Macaca Mulatta
  misc_feature (1)...(4314): n = A,T,C or G
atggcagcaacttacagacttgtggttagtactgtgaaccactacagcagtgtggtgatagaccggcgttttgaacaagctatacattattgcactggaacctgccacaccttcacacatggagttgactgcattgtggtacaccattagtgtttgtgcnnnnnnnnnnnnnnnnnnnnnnnnnnnnnnnnnnnnnnnnnnnnnnnnnnnnnnnnnnnnnnnnnnnnnnnnnnnnnnnnnnnnnnnnnnnnnnnnnnnnnnnnnnnnnnnnnnnnnnnnnnnnnnnnnnnnnnnnnnnnnnnnnnnnnnnnnnnnnnnnnnnnnnnnnnnnnnnnnnnnnnnnnnnnnnnnnnnnnnnnnnnnnnnnnnnnnnnnnnnnnnnnnnnnnnnnnnnnnnnnnnnnnnnnnnnnnnnnnnnnnnnnnnnnnnnnnnnnnnnnnnnnnnnnnnnnnnnnnnnnnnnnnnnnnnnnnnnnnnnnnnnnnnnnnnnnnnnnnnnnnnnnnnnnnnnnnnnnnnnnnnnnnnnnnnnnnnnnnnnnnnnnnnnnnnnnnnnnnnnnnnnnnnnnnnnnnnnnnnnnnnnnnnnnnnnnnnnnnnnnnnnnnnnnnnnnnnnnnnnnnnnnnnnnnnnnnnnnnnnnnnnnnnnnnnnnnnnnnnnnnnnnnnnnnnnnnnnnnnnnnnnnnnnnnnnnnnnnnnnnnnnnnnnnnnnnnnnnnnnnnnnnnnnnnnnnnnnnnnnnnnnnnnnnnnnnnnnnnnnnnnnnnnnnnnnnnnnnnnnnnnnnnnnnnnnnnnnnnnnnnnnnnnnnnnnnnnnnnnnnnnnnnnnnnnnnnnnnnnnnnnnnnnnnnnnnnnnnnnnnnnnnnnnnnnnnnnnnnnnnnnnnnnnnnnnnnnnnnnnnnnnnnnnnnnnnnnnnnnnnnnnnnnnnnnnnnnnnnnnnnnnnnnnnnnnnnnnnnnnnnnnnnnnnnnnnnnnnnnnnnnnnnnnnnnnnnnnnnnnnnnnnnnnnnnnnnnnnnnnnnnnnnnnnnnnnnnnnnnnnnnnnnnnnnnnnnnnnnnnnnnnnnnnnnnnnnnnnnnnnnnnnnnnnnnnnnnnnnnnnnnnnnnnnnnnnnnnnnnnnnnnnnnnnnnnnnnnnnnnnnnnnnnnnnnnnnnnnnnnnnnnnnnnnnnnnnnnnnnnnnnnnnnnnnnnnnnnnnnnnnnnnnnnnnnnnnnnnnnnnnnnnnnnnnnnnnnnnnnnnnnnnnnnnnnnnnnnnnnnnnnnnnnnnnnnnnnnnnnnnnnnnnnnnnnnnnnnnnnnnnnnnnnnnnnnnnnnnnnnnnnnnnnnnnnnnnnnnnnnnnnnnnnnnnnnnnnnnnnnnnnnnnnnnnnnnnnnnnnnnnnnnnnnnnnnnnnnnnnnnnnnnnnnnnnnnnnnnnnngagaaatcatttgttcatctacctaaggaagactgtaaatcaaaagtttctaaagttgaagagggagaccagagagattttacaaattccagtagccaagaagagatagataaattgttaatggatttggaatctttttcacagaagatggagacctctctaagagagccacttgcaaagggtaaaaactctaattctttaaatagtcacagtcagttgactggtcagacccttgtagatcctgagcctaaatctaaagtctcttcacccatagaaaaagtctcgccttcctgtctaacaaggattatcgaaaccaatggacacaaaatagaggaagaggatcgagccctcttactgcgaattctggaaagcattgaagactttgctcaagaactagttgaatgcaaatcaagcagagggagcctatcacaagagaaggaaatgatgcaaattctacaggaaaccttgacaacttcctcccaggccaatttatcagtctgtagaagtcctgttggtgataaagccaaagatactacttcagcagttttgattcagcagactccagaggtgatcaagnnnnnnnnnnnnnnnnnnnnnnnnnnnnnnnnnnnnnnnnnnnnnnnnnnnnnnnnnnnnnnnnnnnnnnnnnnnnnnnnnnnnnnnnnnnnnnnnnnnnnnnnnnnnnnnnnnnnnnnnnnnnnnnnnnnnnnnnnnnnnnnnnnnnnnnnnnnnnnnnnnnnnnnnnnnnnnnnnnnnnnnnnnnnnnnnnnnnnnnnnnnnnnnnnnnnnnnnnnnnnnnnnnnnnnnnnnnnnnnnnnnnnnnnnnnnnnnnnnnnnnnnnnnnnnnnnnnnnnnnnnnnnnnnnnnnnnnnnnnnnnnnnnnnnnnnnnnnnnnnnnnnnnnnnnnnnnnnnnnnnnnnnnnnnnnnnnnnnnnnnnnnnnnnnnnnnnnnnnnnnnnnnnnnnnnnnnnnnnnnnnnnnnnnnnnnnnnnnnnnnnnnnnnnnnnnnnnnnnnnnnnnnnnnnnnnnnnnnnnnnnnnnnnnnnnnnnnnnnnnnnnnnnnnnnnnnnnnnnnnnnnnnnnnnnnnnnnnnnnnnnnnnnnnnnnnnnnnnnnnnnnnnnnnnnnnnnnnnnnnnnnnnnnnnnnnnnnnnnnnnnnnnnnnnnnnnnnnnnnnnnnnnnnnnnnnnnnnnnnnnnnnnnnnnnnnnnnnnnnnnnnnnnnnnnnnnnnnnnnnnnnnnnnnnnnnnnnnnnnnnnnnnnnnnnnnnnnnnnnnnnnnnnnnnnnnnnnnnnnnnnnnnnnnnnnnnnnnnnnnnnnnnnnnnnnnnnnnnnnnnnnnnnnnnnnnnnnnnnnnnnnnnnnnnnnnnnnnnnnnnnnnnnnnnnnnnnnnnnnnnnnnnnnnnnnnnnnnnnnnnnnnnnnnnnnnnnnnnnnnnnnnnnnnnnnnnnnnnnnnnnnnnnnnnnnnnnnnnnnnnnnnnnnnnnnnnnnnnnnnnnnnnnnnnngcattgagtattggttccgctgcatggatgtggatggaaatggtatactctccatgtatgagctggagtacttctatgatgagcagtgtgagcggatggaagtcatgtcaattgagcccttgccattccatgagttactgagccagatgcttgacctagtgaaaccagnnnnnnnnnnnnnnnnnnnnnnnnnnnnnnnnnnnnnnnnnnnnnnnnnnnnnnnnnnnnnnnnnnnnnnnnnnnnnnnnnnnnnnnnnnnnnnnnnnnnnnnnnnnnnnnnnnnnnnnnnnnnnnnnnnnnnnnnnnnnnnnnnnnnnnnnnnnnnnnnnnnnnnnnnnnnnnnnnnnnnnnnnnnnnnnnnnnnnnnnnnnnnnnnnnnnnnnnnnnnnnnnnnnnnnnnnnnnnnnnnnnnnnnnnnnnnnnnnnnnnnnnnnnnnnnnnnnnnnnnnnnnnnnnnnnnnnnnnnnnnnnnnnnnnnnnnnnnnnnnnnnnnnnnnnnnnnnnnnnnnnnnnnnnnnnnnnnnnnnnnnnnnnnnnnnnnnnnnnnnnnnnnnnnnnnnnnttaaatgtttctttcttggaaagagatgttctcgtttgcatactgctttttaaagactttgatttctccaagtgtgtatctgcactaggaactttgtttttaagcagtaggtctggatacacatttaacttaggagactcctccaatttgcctcaaacctcttacggagcttttcctcagaagcggtaccatcgccttccgaagtcagcactctacacccttgaatgtaccaaggatctcttggggacggtgccatgcacggttctctacacaggtgactgaagttgcctctgttggctggcatccgagtcccctccgggctcctatggagcctagaagaaaccttcacttgcagaaaacttgagtcaaaaaattctggaacttgaaaaagtagtaagggcctccagaattgacttagccctagtaataaaagcactgccaaaacatctcagagacttttaattctatgtatactggagttcaaagatcttgaacttacctggcttcatgtaatttcacagttccctgccaaactactagtcactttacatcctcaggtattgtaaccactgggccttccaacttcgctggcaagctctggtaacctccctgactgtggatcttatataagatctcaannnnnnnnnnnnttcttaaatgaagtacagaatttgactcatacttggaaaaagcccttttaacttttattcattgaactatggaatgatgtatttagtctccaaattagctaatactgttttcacttcctatcagaaggcctgcttgatgacataaaggaataatgatacattaaaattcttactagat

SEQ ID NO: 19248 - DNA, 108 bp, Macaca Mulatta
tttgtcttttaaccctagttcagaacctcccacaaaagcattagccattagaggaagtgctaggctgagctgctaccacacagtgttcagcaggaagggtggggatgg

SEQ ID NO: 19249 - DNA, 438 bp, Macaca Mulatta
ccctccctttcctttgaattgctgagcgcattacgcgaagtaatgtgtacgacgctctctgggacaggtcccaatcccggtgttccggctcagcacggcccacgcgtttcccagtttccattgcgtttctctctgaaatcttattgcctctctctggggaagctccccgattcttcttggcccttccttccctcccacagtccctctccaccctaagcccagcgggccgcctcccctctccctcccggcaggtgacggcggaatcccgctgtaagctgctcagctggctgatcccggtgcaccgccaattcggcctctccttcgagtcgctgtgcctgacggtgaacactctggaccgcttcctcaccaccacgccggtggctgcagactgcttccagctgctcggggtcacctccttgctcatcgcttgcaaacagg

SEQ ID NO: 19250 - DNA, 627 bp, Macaca Mulatta
  misc_feature (1)...(627): n = A,T,C or G
tttgggattcttgtcaagctccttctagagnnnnnnnnnnnnnnnnnnnnnnnnnnnnnnnnnnnnnnnnnnnnnnnnnnnnnnnnnnnnnnnnnnnnnnnnnnnnnnnnnnnnnnnnnnnnnnnnnnnnnnnnnnnnnnnnnnnnnnnnnnnnnnnnnnnnnnnnnnnnnnnnnnnnnnnnnnnnnnnnnnnnnnnnnnnnnnnnnnnnnnnnnnnnnnnnnnnnnnnnnnnnnnnnnnnnnnnnnnnnnnnnnnnnnnnnnnnnnnnnnnnnnnnnnnnnnnnnnnnnnnnnnnnnnnnnnnnnnnnnnnnnnnnnnnnnnnnnnnnnnnnnnnnnnnnnnnnnnnnnnnnnnnnnnnnnnnnnnnnnnnnnnnnnnnnnnnnnnnnnnnnnnnnnnnnnnnnnnnnnnnnnnnnnnnnnnnnnnnnnnnnnnnnnnnnnnnnnnnnnnnnnnnnnnnnnagaaagatcatgcgagctctgctggaggtgatctgcgccttgcacaaactcaacattgtgcaccgggacctgaagcccgagaacatcctcttggatgacaacatgaacatcaagctcacagattttggcttttcctgccagctggagccaggagagaggctgcga

SEQ ID NO: 19251 - DNA, 789 bp, Macaca Mulatta
ggggtgccccggaagtgatcccctggttggctcggctgctcgggttagagcgtcgggtgagggagggatagcaagcgctaagcaagtggtggagtcctgtgttttggctgcgcgtgatcctgcgtgggtcggaaggtgtttctgaagagcctaaagattagactgtaaggaaagaaaatagaagccatgtttcgaagacctgtgttacaggtacttcgtcagtttgtaagacatgagtccgaaacaagtaccagtttggttcttgaaagatccctgaatcgtgtgcagttacttgggcgagtgggtcaggaccctgtcttgagacaggtggaaggaaaaaatccagtcacaatattttctctagcaactaatgagatgtggcgatcaggggacagtgaagtttaccaaatgggtgatgtcagtcaaaagacaacatggcacagaatatcagtatttcggccaggcctcagagacgtggcatatcagtatgtgaaaaagggggctcgaatttttttggaaggggaaattagactatggtgaatacatgggataaaaatgatggcgaggcgacaagcaaccacctatcataacctgaagatatttgtatttcctgaatgggcccagacgcagcagagaagggacgtagacaagggatgatttcctctcttcggcccaatcattgaggaaacagtcccccatttaccaaagaccgatagaaggaagttgttgtatgcactccccgccggggagacaaggaattgaggagtagcgccccttgtttacacccgg

SEQ ID NO: 19252 - DNA, 775 bp, Macaca Mulatta
ggcatcaaaggttaggtgaggtttatagaaagatacatagccaggcttaccaaagtattaagtcaagaatatagtatgtgatcagctttcaaagcatttacaagtgctgcaagttagtgaaacagctgtctccataaacaggaaatgtgagaaaccttggaatgccctctggttctggcacattggaaagcacactcagaaggcttcatggccaagattttgggagagtaaagctaagtatagttgatgtaacattgtagaagcagcataggaacaataagaacaataggtaaagctctaattatggcttatatttagaaatgactgcatttgatattttaggatatttttctaggttttttcctttcattttattctcttttagttttgacattttacggtagatttgctctctagaagggaacgtctttatttaggagggtaaaaattttggtcatagcattcacttttgctattccgatctacaactggaagatacgtaaaagtgctttatgcattgcaaatttgggataacttcaaaaatcccatggttgatgttagggatagcactaagcattttagttccaggagaataaaagaaattcctattcgaaatgaattcctcatttggagggaaaaaaagcatgcattctagcacaagatcaaattatggaatacaaaagtggctccttcccatgtgcagtccctggtccccctgcagtcctctgcacacccgaactgtttctgattggcttttagctttttgttggtggtt

SEQ ID NO: 19253 - DNA, 890 bp, Macaca Mulatta
  misc_feature (1)...(890): n = A,T,C or G
ggagcttctgggtgatgtaaggccgggcatgggaggggcctctcctcgactcgctgccaggaagggggcgggactcttggtgacgagacgccggggagggggcaggcgttcattgataaaaacgctgggctccccagggcgcgagcgcagcgtagcaaatacaggcagcgccacgcgcggccggggccgggcggaaccgagaagaagccgggcccgcgctgcgacgcgccgcccgcatggagcccgccactggtttcctgtccccgcgccccttccagcgtgcggccgccgagcccgctcccccggccgggcccgggccgcctccgagtgccttgcccggacctgagctggagatgctggccgggctaccgacgtcagaccccgggcgcctcatcacggacccgcgcagtggccgcacctacttcaaaggccgcttgttgggcaaggtgggcnnnnnnnnnnnnnnnnnnnnnnnnnnnnnnnnnnnnnnnnnnnnnnnnnnnnnnnnnnnnnnnnnnnnnnnnnnnnnnnnnnnnnnnnnnnnnnnnnnnnnagatcctaaatgagattgagctgcaccgagaccggcagcaccgccacatcgtgcatttttcgaacacactttgaggacgctgacaacatctacattttcctggagctctgcagtcgaaannnnnnnnnnnnnnnnnnnnnnnnnnnnnnnnnnnnnnnnnnnnnnnnnnnnnnnnnnnnnnnnnnnnnnnnnnnnnnnnnnnnnnnnnnnnnnnnnnnnnnnnnnnnnnnnnnnnnnnnnnnnnnnnnnnnnnnnnnnnnnnnnnnnnnnnnatggaactgaaggtgggggattttgggctggcagcccggttggagcctccggagcagaggaagaa

SEQ ID NO: 19254 - DNA, 851 bp, Macaca Mulatta
  misc_feature (1)...(851): n = A,T,C or G
agcctcagctcgttctgggcggcgctgcccagacggcttcacttgggacggcaacggctgttcagacagggactcctcagcgcacggttccaggggcaaccgccacttcctcagctgccacggnnnnnnnnnnnnnnnnnnnnnnnnnnnnnnnnnnnnnnnnnnnnnnnnnnnnnnnnnnnnnnnnnnnnnnnnnnnnnnnnnnnnnnnnnnnnnnnnnnnnnnnnnnnnnnnnnnnnnnnnnnnnnnnnnnnnnnnnnnnnnnnnnnnnnnnnnnnnnnnnnnnnnnnnnnnnnnnnnnnnnnnnnnnnnnnnnnnnnnnnnnnnnnnnnnagaggagcttacccgccttgagacagctgactcccgactccgcggccttcatccagcagagccagcagcagccgccaccgcccgcctcgcaggccaccactgcgctcacggctgtggtgctgagtagctcagtccagcgcacggccgggaagacggcggccaccgtgaccagtgccctccagccccctgtgctcagcctcacgcagcccacacaggtcggcgtcggcaagcaggggcaacccacaccgctggtnatccagcagcctccgaagccaggagccctgatccggcctccgcaggtgacgttgacgcagacacccatggtcgccctgcggcagcctcacaaccggatcatgctcaccacgcctcagcagatccagctgaacccgctgcagccagnagtccctgtggtgaaacctgctgtgttacctggaaccaaagccctttccgctgtctcggcacaagcagctgctgcacagaaaaataaactcaaggagcctgggggaggttcgtttcgg

SEQ ID NO: 19255 - DNA, 870 bp, Macaca Mulatta
  misc_feature (1)...(870): n = A,T,C or G
ggactggcannnnnnnnnnnnnnnnnnnnnnnnnnnnnntaaagtgtnnnnnnnnnnnnnnnnnnnnntgacgcccggccagaagccactaattataataggcacacatgacacagcatgtggttaatagctgtgtcttgaattatcctctaaataaccaaatttagttttatgtatttgtaaaggatatggcttcagaagctatcttttgttctcttgctataacttttaagggtattcctgacccaagaaagattccttgcatttgtaactgtggtctgatacccaaatgtgccctgttcttatggatacagtctcttgaagcatacctcaaagtcatagagagaatatggcattcaagaaatcatttgccttggatcatatgagttattttgtgaaacaacagctgacttttcagaaaaggggcaactacttttatatgctaaaagtatttcataactttctgggaaaccttatttaggtataaatggttatcttattatttttcaaaaaggtatattttaataatcgtacaatttatatacagtttgtgaccagaatttgcaagttgttggtgtcatatcaaggatcttttaaattataccactacaggatgtatcatttccagtttattttggcacagctaaacagtagcaaaagaagcccattagccttgaataatgggtgtcttcatttttactgtaatttaactgaaaacctaacacatgttgaaaaaccgttatcatacctagtttatctcttaatttcaaactatgtacttgtaaaaatgatgtaaattttgcattggnggaacctgnannaaagactggactggataanttttttgggttttgttgattttttcacgaa

SEQ ID NO: 19256 - DNA, 807 bp, Macaca Mulatta
gccgcagccgctccgccgcgcgcttcctccgccgccgcggactccggcagctttatcgccagagtccctgaactctcgctttctttttaaatcccctgcatcggatcaccggcgtgccccaccatgtcagacgcagccgtagacaccagctccgaaatcaccaccaaggacttaaaggagaagaaggaagttgtggaagaggcagaaaatggaagagacgcccctgctaacgggaatgctaatgaggaaaatggggagcaagaggctgacaatgaggtagatgaagaagaggaagaaggtggggaggacgaggaggaggaagaacgaaggtgatggtgaggaagaggatggagatgaagatgaggaagctgagtcagctacgggcaagcgggcagctgaagatgatgaggatgacgatgttgataccaagaagcagaagactgacgaggatgactagacagcaaaaaaggaaaagttaaactaaaaaaaaaaggccgccgtgacctattcaccctccacttcccgtctcagaatctaaacgtggtcaccttcgagtagagaggcccgcccgacacgcaaagcgagggcagagacacaccgcagatgccacgcgacaactccaccaacccagccaaaccatgaaaaatatgcaacaggggaggaaaaacgaagcacaagtatgaagagcccggcctccacagcatccacaggaactggaagacggacattacgcaatgtatcataaccatttacatgctaatatgattgtacatagtcgagcagggacacacaaatacaatgataatc

SEQ ID NO: 19257 - DNA, 2058 bp, Macaca Mulatta
  misc_feature (1)...(2058): n = A,T,C or G
gaccacaaggaaaaccaggacttgctggacttcctggtgctgatgggcctcctgnnnnnnnnnnnnnnnnnnnnnnnnnnnnnnnnnnnnnnnnnnnnnnnnnnnnnnnnnnnnnnnnnnnnnnnnnnnnnnnnnnnnnnnnnnnnnnnnnnnnnnnnnnnnnnnnnnnnnnnnnnnnnnnnnnnnnnnnnnnnnnnnnnnnnnnnnnnnnnnnnnnnnnnnnnnnnnnnnnnnnnnnnnnnnnnnnnnnnnnnnnnnnnnnnnnnnnnnnnnnnnnnnnnnnnnnnnnnnnnnnnnnnnnnnnnnnnnnnnnnnnnnnnnnnnnnnnnnnnnnnnnnnnnnnnnnnnnnnnnnnnnnnnnnnnnnnnnnnnnnnnnnnnnnnnnnnnnnnnnnnnnnnnnnnnnnnnnnnnnnnnnnnnnnnnnnnnnnnnnnnnnnnnnnnnnnnnnnnnnnnnnnnnnnnnnnnnnnnnnnnnnnnnnnnnnnnnnnnnnnnnnnnnnnnnnnnnnnnnnnnnnnnnnnnnnnnnnnnnnnnnnnnnnnnnnnnnnnnnnnnnnnnnnnnnnnnnnnnnnnnnnnnnnnnnnnnnnnnnnnnnnnnnnnnnnnnnnnnnnnnnnnnnnnnnnnnnnnnnnnnnnnnnnnnnnnnnnnnnnnnnnnnnnnnnnnnnnnnnnnnnnnnnnnnnnnnnnnnnnnnnnnnnnnnnnnnnnnnnnnnnnnnnnnnnnnnnnnnnnnnnnnnnnnnnnnnnnnnnnnnnnnnnnnnnnnnnnnnnnnnnnnnnnnnnnnnnnnnnnnnnnnnnnnnnnnnnnnnnnnnnnnnnnnnnnnnnnnnnnnnnnnnnnnnnnnnnnnnnnnnnnnnnnnnnnnnnnnnnnnnnnnnnnnnnnnnnnnnnnnnnnnnnnnnnnnnnnnnnnnnnnnnnnnnnnnnnnnnnnnnnnnnnnnnnnnnnnnnnnnnnnnnnnnnnnnnnnnnnnnnnnnnnnnnnnnnnnnnnnnnnnnnnnnnnnnnnnnnnnnnnnnnnnnnnnnnnnnnnnnnnnnnnnnnnnnnnnnnnnnnnnnnnnnnnnnnnnnnnnnnnnnnnnnnnnnnnnnnnnnnnnnnnnnnnnnnnnnnnnnnnnnnnnnnnnnnnnnnnnnnnnnnnnnnnnnnnnnnnnnnnnnnnnnnnnnnnnnnnnnnnnnnnnnnnnnnnnnnnnnnnnnnnnnnnnnnnnnnnnnnnnnnnnnnnnnnnnnnnnnnnnnnnnnnnnnnnnnnnnnnnnnnnnnnnnnnnnnnnnnnnnnnnnnnnnnnnnnnnnnnnnnnnnnnnnnnnnnnnnnnnnnnnnnnnnnnnnnnnnnnnnnnnnnnnnnnnnnnnnnnnnnnnnnnnnnnnnnnnnnnnnnnnnnnnnnnnnnnnnnnnnnnnnnnnnnnnnnnnnnnnnnnnnnnnnnnnnnnnnnnnnnnnnnnnnnnnnnnnnnnnnnnnnnnnnnnnnnnnnnnnnnnnnnnnnnnnnnnnnnnnnnnnnnnnnnnnnnnnnnnnnnnnnnnnnnnnnnnnnnnnnnnnnnnnnnnnnnnnnnnnnnnnnnnnnnnnnnnnnnnnnnnnnnnnnnnnnnnnnnnnnnnnnnnnnnnnnnnnnnnnnnnnnnnnnnnnnnnnnnnnnnnnnnnnnnnnnnnnnnnnnnnnnnnnnnnnnnnnnnnnnnnnnnnnnnnnnnnnnnnnnnnnnnnnnnnnnnnnnnnnnnnnnnnnnnnnnnnnnnnnnnnnctgttggtttttctggagatcctggtcctcctggggaacctggccctgcannnnnnnnnnnnnnnnnnnnnnnnnnnnnnnnnnnnnnnnnnnnnnnnnnnnnnnnnnnnnnnnnnnnnnnnnnnnnnnnnnnnnnnnnnnnnnnnnnnnnnnnnnnggtcctcctggagctgcaggtgcagagggaagacaaggtgaaaaagnnnnnagggagaagcaggtgccgaaggtcctcctggaaaaaccggcccagttggtcctcagggacctgcaggaaagcctggtccagaaggtcttcggggcatccctggccctgtg

SEQ ID NO: 19258 - DNA, 731 bp, Macaca Mulatta
caaggagactgaagtctggcattttctgcggcgcttaggggtctaccccaccaagaagcactttattttcggagatccaaagaaactcattaccgaggactttgtgcgacaacgttacctggaataccggcggataccccacaccgaccccgtggactacgagttccagtggggcccgcgaaccaacctggaaaccagcaagatgaaagttcttaagtttgtggccaaagtccataatcaagaccccaaggactggccagcgcagtactgtgaggcgttggcagatgaggagaacagggccagacctcagcccagtggctcagccccatcctcttgaaatctgaggtggattcagagggacccccgggacaagggtctgagacccaaaggcacagtgcagaggagcgggggaagggagaacgaacccaggaagcgtatttctgtagcgtttcaatgtgtgtagctttaggatgtgtttgcaaagttttgttcttttaatgttgtgttatttggttccagattttcatctataaacaaaggagcatttgttttgctttgattttactttttttggtataaaaaattttcctagcttagtaaaacgaattggaaaacttgactatgatctgaaacagatatgccagaaggaacacataagtaagttgctttggtgccaagaaaataaaaaagtagctattatcgggtctcttaagcatcccagtttgtaagga

SEQ ID NO: 19259 - DNA, 607 bp, Macaca Mulatta
caaactaggcagtggttttcaaactgcttggaagagccctgaagtttcctaggggttgcctcaggagtccttggggagatgaagggggtggggagttgagcaggctgggcaatttgccctcaaactgaacagctctccttgtagctgtcttacatatcggggttcagggtaagattttatttgcattaggggtttgctgctgaaaaaatgttggaaaaccactgactagaccatcggctccaaattggaacctgtgcttccttccccaggtttggagcacactcttcaccctaccctctaccacaggacgcatatccctgttagcattccccgggacctttagccaagaggggctgcagggaccatggccaggttaccgaaatgccctgctctgaagtcttgacacctgggtggaaagagaggctgttttctgaaagggtaaagggcttggtctggattcccagaaacagagcttagatgggaccacagtgggcaattttgacctgtcctgcccttcttagcttgaagggaaaccccagagactcttctgtcagggaaaactagggactctcttctagagccatatagttccttgggattagctctt

SEQ ID NO: 19260 - DNA, 307 bp, Macaca Mulatta
  misc_feature (1)...(307): n = A,T,C or G
aggtgtgttaccgagtggaatgggccaaattccaggaacgnnnnnnnnnnnnnnnnnnnnnnnnnnnnnnnnnnnnnnnnnnnnnnnnnnnnnnnnnnnnnnnnnnnnnnnnnnnnnnnnnnnnnnnnnnnnnnnnnnnnnnnnnnnnnnagggaacttccctccccccaccacgccggaggagctgggggcccgaatcctcattcaggagcgctatgagaagtttggggagagtgaggaagttgagatggaggtcgagtctgatgaggacgatgacaaacaggagaaggcagaggaacctccttcc

SEQ ID NO: 19261 - DNA, 595 bp, Macaca Mulatta
  misc_feature (1)...(595): n = A,T,C or G
tggtaaataaagatgtcctggacgtttacattgagcatcggctgatgatggagcagcggagtcgggaccctggaacagcccgaagcccccagaaccagtaccctgctgaactcatgcgcagattntgagctgtattttcaaggcccaagtagcaacaagcctcgtgtgatccgggaagtgcgggctgactctgtggggaaattggtgactgtgcgtggaattgtcactcgtgtctctgaagtcaaacccaagatggtggtggccacttacacttgtgaccagtgtggggcagagacctaccagccgnnnnnnnnnnnnnnnnnnnnnnnnnnnnnnnnnnnnnnnnnnnnnnnnnnnnnnnnnnnnnnnnnnnnnnnnnnnnnnnnnnnnnnnnnnnnnnnnnnnnnnnnnnnnnnnnnnnnnnnnnnnnnnnnnnnnnnnnnnnagtgatcaagtgcccgtgggaaacatccctcgtagtatcacggtgctggtagaaggagagaacacgagaattgcccagcctggagaccacgtcagcgtcactggtatcttcttgccaatcctgcgcactgggttccgacaggtggtacag

SEQ ID NO: 19262 - DNA, 710 bp, Macaca Mulatta
ccgaggagctcatctgtgaaccccagctatgtaaaagatcgggtagaaaaagtgggccaggtgatcagagttatttgcatcctcagccaccccatcaagaacaccaatgatgccaactcctgccagatcattattccacagaaccaagctcaatcgaaagtcagatatctatgtctgcatgatctcctttgcgcacaatgtagcggcacaagggaagtacattgccatagttagtacaaccgtggaaaccaaggagcccgagaaggaaatcagaccagctttggagctcttggaaccaattgaacagaaatttgttagcatcagtgacctcctggtaccgaaagacttgggaatggaaagccagatctttatttcccgcacatacgatgccaccactcattttgagacaacgtgtgatgacattaaaaacatctacaagaggatgacaggatcagaatttgactttgaggaaatgaagcgcaagaaaaatgacatctatggcgaagactaacagcagtacatgttattatctaattaggacacatttaaaatttggcaaataatgcatatgaaatcaatattgtaaggcctgcttttgtaatcaaaatggagagagtgaagagcgctgtgtgccagtaaatactccccttcatctttctaatattatgtattaacttgttttcatggagtggctattcagaattggcagt

SEQ ID NO: 19263 - DNA, 176 bp, Macaca Mulatta
  misc_feature (1)...(176): n = A,T,C or G
agaggatctaattaagtactttttcaaaattggagtgaagcagatggtgatggtgaaaatatntaaatcatctgataaagttgtaagttggttcatacagaattttgcatggtggtgtttgaaggtgagaggccagtgtagtatntgatggatgagtaaactgctgttgatgaaga

SEQ ID NO: 19264 - DNA, 197 bp, Macaca Mulatta
gacaaggtcctgaaggagaagagaaagctgtttatccattccacgggtgaaggtacaataaatggcttactggatgaattattacagacaagggtgctgaaccaggaagagatggagaaagtaaaacgtgaaaatcctacagttatggataaggcccgagctgtgattgactctttattcgcaaaggggcacaggca

SEQ ID NO: 19265 - DNA, 2108 bp, Macaca Mulatta
  misc_feature (1)...(2108): n = A,T,C or G
gattttgacttgcaggtccaaatcttgcttggggtccattatgactcccaaaagtttgaccagaggacccagggacaagcctacccctccagatgagcttctacctcaagctatcgaatttgtcaaccaatattacggctccttcaaagannnnnnnnnnnnnnnnnnnnnnnnnnnnnnnnnnnnnnnnnnnnnnnnnnnnnnnnnnnnnnnnnnnnnnnnnnnnnnnnnnnnnnnnnnnnnnnnnnnnnnnnnnnnnnnnnnnnnnnnnnnnnnnnnnnnnnnnnnnnnnnnnnnnnnnnnnnnnnnnnnnnnnnnnnnnnnnnnnnnnnnnnnnnnnnnnnnnnnnnnnnnnnnnnnnnnnnnnnnnnnnnnnnnnnnnnnnnnnnnnnnnnnnnnnnnnnnnnnnnnnnnnnnnnnnnnnnnnnnnnnnnnnnnnnnnnnnnnnnnnnnnnnnnnnnnnnnnnnnnnnnnnnnnnnnnnnnnnnnnnnnnnnnnnnnnnnnnnnnnnnnnnnnnnnnnnnnnnnnnnnnnnnnnnnnnnnnnnnnnnnnnnnnnnnnnnnnnnnnnnnnnnnnnnnnnnnnnnnnnnnnnnnnnnnnnnnnnnnnnnnnnnnnnnnnnnnnnnnnnnnnnnnnnnnnnnnnnnnnnnnnnnnnnnnnnnnnnnnnnnnnnnnnnnnnnnnnnnnnnnnnnnnnnnnnnnnnnnnnnnnnnnnnnnnnnnnnnnnnnnnnnnnnnnnnnnnnnnnnnnnnnnnnnnnnnnnnnnnnnnnnnnnnnnnnnnnnnnnnnnnnnnnnnnnnnnnnnnnnnnnnnnnnnnnnnnnnnnnnnnnnnnnnnnnnnnnnnnnnnnnnnnnnnnnnnnnnnnnnnnnnnnnnnnnnnnnnnnnnnnnnnnnnnnnnnnnnnnnnnnnnnnnnnnnnnnnnnnnnnnnnnnnnnnnnnnnnnnnnnnnnnnnnnnnnnnnnnnnnnnnnnnnnnnnnnnnnnnnnnnnnnnnnnnnnnnnnnnnnnnnnnnnnnnnnnnnnnnnnnnnnnnnnnnnnnnnnnnnnnnnnnnnnnnnnnnnnnnnnnnnnnnnnnnnnnnnnnnnnnnnnnnnnnnnnnnnnnnnnnnnnnnnnnnnnnnnnnnnnnnnnnnnnnnnnnnnnnnnnnnnnnnnnnnnnnnnnnnnnnnnnnnnnnnnnnnnnnnnnnnnnnnnnnnnnnnnnnnnnnnnnnnnnnnnnnnnnnnnnnnnnnnnnnnnnnnnnnnnnnnnnnnnnnnnnnnnnnnnnnnnnnnnnnnnnnnnnnnnnnnnnnnnnnnnnnnnnnnnnnnnnnnnnnnnnnnnnnnnnnnnnnnnnnnnnnnnnnnnnnnnnnnnnnnnnnnnnnnnnnnnnnnnnnnnnnnnnnnnnnnnnnnnnnnnnnnnnnnnnnnnnnnnnnnnnnnnnnnnnnnnnnnnnnnnnnnnnnnnnnnnnnnnnnnnnnnnnnnnnnnnnnnnnnnnnnnnnnnnnnnnnnnnnnnnnnnnnnnnnnnnnnnnnnnnnnnnnnnnnnnnnnnnnnnnnnnnnnnnnnnnnnnnnnnnnnnnnnnnnnnnnnnnnnnnnnnnnnnnnnnnnnnnnnnnnnnnnnnnnnnnnnnnnnnnnnnnnggggcctctcagctcacccctatggcgcagatggggacgaactcagtgggcaggaggacgccttccgcacttgggccgtgcaaaccttcaaggnnnnnnnnnnnnnnnnnnnnnnnnnnnnnnnnnnnnnnnnnnnnnnnnnnnnnnnnnnnnnnnnnnnnnnnnnnnnnnnnnnnnnnnnnnnnnnnnnnnnnnnnnnnnnnnnnnnnnnnnnnnnnnnnnnnnnnnnnnnnnnnnnnnnnnnnnnnnnnnnnnnnnnnnnnnnnnnnnnnnnnnnnnnnnnnnnnnnnnnnnnnnnnnccagccgtgccaccatcctggtggaactctcctgtgaggacggccaaggcctgaactacttgccgggggagcacctcggggtttgtccaggcaaccagcccgccctggtccaaggcatcctggagcgagtggtggacggccccgcaccccaccagacagtgcgacaggaggccctggacgaga

SEQ ID NO: 19266 - DNA, 1231 bp, Macaca Mulatta
  misc_feature (1)...(1231): n = A,T,C or G
ccaaggactatgagaacgccatcaagttctacagccagaccatcgagctgaaccccagcaatgccatctaatatggcaaccgcagcctggcttacctgcgcaccgagtgctatggctacgcactgggagatgcctcgcgggccatcgagctggacaagaaatacatcaagggttattnnnnnnnnnnnnnnnnnnnnnnnnnnnnnnnnnnnnnnnnnnnnnnnnnnnnnnnnnnnnnnnnnnnnnnnnnnnnnnnnnnnnnnnnnnnnnnnnnnnnnnnnnnnnnnnnnnnnnnnnnnnnnnnnnnnnnnnnnnnnnnnnnnnnnnnnnnnnnnnnnnnnnnnnnnnnnnnnnnnnnnnnnnnnnnnnnnnnnnnnnnnnnnnnnnnncattgaggatgagtacagcggacccaagcttgaggatggcaaagtgacaatcactttcatgaaggagctcatgcagtggtacaaggaccagaaaaaactgcaccggaaatgcgcctaccagnnnnnnnnnnnnnnnnnnnnnnnnnnnnnnnnnnnnnnnnnnnnnnnnnnnnnnnnnnnnnnnnnnnnnnnnnnnnnnnnnnnnnnnnnnnnnnnnnnnnnnnnnnnnnnnnnnnnnnnnnnnnnnnnnnnnnnnnnnnnnnnnnnnnnnnnnnnnnnnnnnnnnnnnnnnnnnnnnnnnnnnnnnnnnnnnnnnnnnnnnnnnnnnnnnnnnnnnnnnnnnnnnnnnnnnnnnnnnnnnnnnnnnnnnnnnnnnnnnnnnnnnnnnnnnnnnnnnnnnnnnnnnnnnnnnnnnnnnnnnnnnnnnnnnnnnnnnnnnnnnnnnnnnnnnnnnnnnnnnnnnnnnnnnnnnnnnnnnnnnnnnnnnnnnnnnnnnnnnnnnnnnnnnnnnnnnnnnnnnnnnnnnnnnnnnnnnnnnnnnnnnnnnnnnnnnnnnnnnnnnnnnnnnnnnnnnnnnnnnnnnnnnnnnnnnnnnnnnnnnnnnnnnnnnnnnnnnnnnnnnnnnnnnnnnnnnnnnnnnnnnnnnnnnnnnnnnnnnnnncagaacgggcgctcggtcagcaagcggggcgtgagctgtcagtttgggcctgacgtcaccaaggccttcttggaagagaacaacctggactacatcatccgcagccacgaggtcaaggccgagggctatgaggtggctcacggaggccgctgtgtcaccgtcttctctgcccccaactact

SEQ ID NO: 19267 - DNA, 531 bp, Macaca Mulatta
agatgctgtgcccctggccttgggatcgaggcccctttttctccagccggcccatgggaggctggagttggggcagaggagaacttgctgcctcagatccccttcttacctcccagtccccactttattgccaaaacccagctgcatcccttcctgggcacacgctgctttgccccagcttgggggcagatctcccacatgtcaggggcctttggatgctgccttgccagcccatttgggcagagaggctgtggtttgggggagaagaagtaggggtggcctgaaaggatctcgaaaatgctgtctttcttgctccctgactgggggcagacatggtggggtctcctcaggaccagagttggcaccttccccctcccccagccactccccagccagcctggctgggactggggacaaaactcggtgtccccaccatctgctgtcttttctttgccatctctgctccaactgggatgggaggtgggcaagctggccgcaggggcaagggaggccatctggagagcccagaga

SEQ ID NO: 19268 - DNA, 2105 bp, Macaca Mulatta
  misc_feature (1)...(2105): n = A,T,C or G
caggttccaaaacatttctgaaaagctgcacatggaatgcaaagcagaaatggtgacgcctctggtgactaatcctggacacgtgtgcatcacggacacaaacctctattttcagcctctcaacggctacccnnnnnnnnnnnnnnnnnnnnnnnnnnnnnnnnnnnnnnnnnnnnnnnnnnnnnnnnnnnnnnnnnnnnnnnnnnnnnnnnnnnnnnnnnnnnnnnnnnnnnnnnnnnnnnnnnnnnnnnnnnnnnnnnnnnnnnnnnnnnnnnnnnnnnnnnnnnnnnnnnnnnnnnnnnnnnnnnnnnnnnnnnnnnnnnnnnnnnnnnnnnnnnnnnnnnnnnnnnnnnnnnnnnnnnnnnnnnnnnnnnnnnnnnnnnnnnnnnnnnnnnnnnnnnnnnnnnnnnnnnnnnnnnnnnnnnnnnnnnnnnnnnnnnnnnnnnnnnnnnnnnnnnnnnnnnnnnnnnnnnnnnnnnnnnnnnnnnnnnnnnnnnnnnnnnnnnnnnnnnnnnnnnnnnnnnnnnnnnnnnnnnnnnnnnnnnnnnnnnnnnnnnnnnnnnnnnnnnacacgctaccaggaaatgcctgaaccaaagttcatgtatgggagtcactactcttccccgggttatgtacttttttatcttgttaggattgnnnnnnnnnnnnnnnnnnnnnnnnnnnnnnnnnnnnnnnnnnnnnnnnnnnnnnnnnnnnnnnnnnnnnnnnnnnnnnnnnnnnnnnnnnnnnnnnnnnnnnnnnnnnnnnnnnnnnnnnnnnnnnnnnnnnnnnnnnnnnnnnnnnnnnnnnnnnnnnnnnnnnnnnnnnnnnnnnnnnnnnnnnnnnnnnnnnnnnnnnnnnnnnnnnnnnnnnnnnnnnnnnnnnnnnnnnnnnnnnnnnnnnnnnnnnnnnnnnnnnnnnnnnnnnnnnnnnnnnnnnnnnnnnnnnnnnnnnnnnnnnnnnnnnnnnnnnnnnnnnnnnnnnnnnnnnnnnnnnnnnnnnnnnnnnnnnnnnnnnnnnnnnnnnnnnnnnnnnnnnnnnnnnnnnnnnnnnnnnnnnnnnnnnnnnnnnnnnnnnnnnnnnnnnnnnnnnnnnnnnnnnnnnnnnnnnnnnnnnnnnnnnnnnnnnnnnnnnnnnnnnnnnnnnnnnnnnnnnnnnnnnnnnnnnnnnnnnnnnnnnnnnnnnnnnnnnnnnnnnnnnnnnnnnnnnnnnnnnnnnnnnnnnnnnnnnnnnnnnnnnnnnnnnnnnnnnnnnnnnnnnnnnnnnnnnnnnnnnnnnnnnnnnnnnnnnnnnnnnnnnnnnnnnnnnnnnnnnnnnnnnnnnnnnnnnnnnnnnnnnnnnnnnnnnnnnnnnnnnnnnnnnnnnnnnnnnnnnnnnnnnnnnnnnnnnnnnnnnnnnnnnnnnnnnnnnnnnnnnnnnnnnnnnnnnnnnnnnnnnnnnnnnnnnnnnnnnnnnnnnnnnnnnnnnnnnnnnnnnnnnnnnnnnnnnnnnnnnnnnnnnnnnnnnnnnnnnnnnnnnnnnnnnnnnnnnnnnnnnnnnnnnnnnnnnnnnnnnnnnnnnnnnnnnnnnnnnnnnnnnnnnnnnnnnnnnnnnnnnnnnnnnnnnnnnnnnnnnnnnnnnnnnnnnnnnnnnnnnnnnnnnnnnnnnnnnggtgtggtctggtgttcctgcggagatgccaggcaccaaaagacaccactttgacttgctggctgagctggaacatgatgtcagtgtngtagatacaatcagtttaaatcctgcaagcacactgttagtttccggcaccaaagaaggcacagtgaatatttgggacctcacaacggccaccttaatgcaccagattccatgccattcagggattgtatgtgacactgcttttagcccannnnnnnnnnnnnnnnnnnnnnnnnnnnnnnnnnnnnnnnnnnnnnnnnnnnnnnnnnnnnnnnnnnnnnnnnnnnnnnnnnnnnnnnnnnnnnnnnnnnnaggtgttttgtctgggatggaaattccgttttatctggaagtcagtctggtgaactgcttgtttgggaccttcttggagcaaaaatcagtgagagaatacagggccacacagg

SEQ ID NO: 19269 - DNA, 1995 bp, Macaca Mulatta
  misc_feature (1)...(1995): n = A,T,C or G
atcagggccgcccacgcctttttttgggggctgcacctgacacttgactgggccgtgagggggctactgctgctgaatactcggctgtgacccgaggcccagagccaccaccgtccttccaaagccacatcttatttatttatttatttcggtactgggggcgaaacagccaggtgatccccctgcctttatctccccctagnnnnnnnnnnnnnnnnnnnnnnnnnnnnnnnnnnnnnnnnnnnnnnnnnnnnnnnnnnnnnnnnnnnnnnnnnnnnnnnnnnnnnnnnnnnnnnnnnnnnnnnnnnnnnnnnnnnnnnnnnnnnnnnnnnnnnnnnnnnnnnnnnnnnnnnnnnnnnnnnnnnnnnnnnnnnnnnnnnnnnnnnnnnnnnnnnnnnnnnnnnnnnnnnnnnnnnnnnnnnnnnnnnnnnnnnnnnnnnnnnnnnnnnnnnnnnnnnnnnnnnnnnnnnnnnnnnnnnnnnnnnnnnnnnnnnnnnnnnnnnnnnnnnnnnnnnnnnnnnnnnnnnnnnnnnnnnncacttgatcgcgacttgtctgagagctggggctggatgctcgggtaactggggcagggcaggtggaggnnnnnnnnnnnnnnnnnnnnnnnnnnnnnnnnnnnnnnnnnnnnnnnnnnnnnnnnnnnnnnnnnnnnnnnnnnnnnnnnnnnnnnnnnnnnnnnnnnnnnnnnnnnnnnnnnnnnnnnnnnnnnnnnnnnnnnnnnnnnnnnnnnnnnnnnnnnnnnnnnnnnnnnnnnnnnnnnnnnnnnnnnnnnnnnnnnnnnnnnnnnnnnnnnnnnnnnnnnnnnnnnnnnnnnnnnnnnnnnnnnnnnnnnnnnnnnnnnnnnnnnnnnnnnnnnnnnnnnnnnnnnnnnnnnnnnnnnnnnnnnnnnnaggtggaggtcccgagtgggcggggcagggactgggagacgggtcagtcactcagacagctctggggaggcagagtttgagcctcgcctggggccccacactgcacagggctctttgttttttgagatggagactggctctgttgcctaggttggagtgcagtggcgcaatctaagctcactgcaacctccacctcccgggtttaatcgattctcctgcctcagcctcccgattagctgggatcacaggcgtgcaccaccacgcccggctaattatttatttcttttgtattttcagtagagacaaggtttcaccatgttgaccaggctggtttcgaactcctgacctcaggtgatcctcctgccttggcctcccaaagtgctgggattacaggtgtgagccaccgcacctgacctatataggtcttcaataaatatttaatggaaggttccagaagtcaccctgcgattaatggtacccgtatgtgacaaagctgcaaggtcaagatggttcattatggctgtgttgaccgtagcaaattggaaacaatccagatatccaacaggtgagggttaagcaacatggtgcatcggtggatggaatgccacccggccacccagagcannnnnnnnnnnnnnnnnnnnnnnnnnnnnnnnnnnnnnnnnnnnnnnnnnnnnnnnnnnnnnnnnnnnnnnnnnnnnnnnnnnnnnnnnnnnnnnnnnnnnnnnnnnnnnnnnnnnnnnnnnnnnnnnnnnnnnnnnnnnnnnnnnnnnnnnnnnnnnnnnnnnnnnnnnnnnnnnnnnnnnnnnnnnnnnnnnnnnnnnnnnnnnnnnnnnnnnnnnnnnnnnnnnnnnnnnnnnnnnnnnnnnnnnnnnnnnnnnnnnnnnnnnnnnnnnnnnnnnnnnnnnnnnnnncctaaagggaaataagccaaatgttgacaaggactgtctccaggtcaaaggagagaggtgggattgtgggtgacttttgatgtttatgattgtctgtattttacagaatttctgccatgactgtgtattttgcatgacacattttaaaaataataaacactatttttaga

SEQ ID NO: 19270 - DNA, 614 bp, Macaca Mulatta
gggggattgtggtggaggtccgagcgagtcgcctgggcccgaagcggctgttcgaagtccgagggtactgagagccacggtacctgtccggaccctatttgttagtggccttcctctggatatcaaacctcgggagctctatctgcttttcagaccatttaagggctatgagggttctcttataaagctcacatctaaacagcctgtaggttttgtcagttttgacagtcgctcagaagcagaagctgcaaagaatgctttgaatggcatccgcttcgatcctgaaattcgcaaacactacgactagagtttgctaaggcaaacacgaagatgggccagaacaaactcgtagggactccaaaccccgtactcttctgccaacactgtaccttcagtcattgccaaaaacccttatgagctcccgtggctggcctttaccccattaacccgaagtgggggccccttccccctggtccccgcggaattagcccccggtcaccccccccggttttcctttcccgttcttggggcccaaggcctgggccccccccaggggtttttcggggggaaacccccattccgaaaaaatttccccctttgggagcggcccctcc

SEQ ID NO: 19271 - DNA, 527 bp, Macaca Mulatta
  misc_feature (1)...(527): n = A,T,C or G
aggtgaagatgcacaccatgtcctcctcgcatctcttctacctggcactgtgcctgctcaccttcaccagctccgccacggctggaccggagacgctctgcggggctgagctggtggatgctcttcagttcgtgtgtggagacaggggcttttatttcanacaagcccacagggtatggctccagcagtcggagggcacctcagacaggcatcgtggatgagtgctgcttccggagctgtgatctgagaaggctggagatgtattgcgcacccctcaagcctgccaagtcagcccgctctgtccgtgcccagcgccataccgacatgcccaagacccagaagnnnnnnnnnnnnnnnnnnnnnnnnnnnnnnnnnnnnnnnnnnnnnnnnnnnnnnnnnaagacacatccaggaggggaacagaaggaggggacagaagcaagtctgcagatcagaggaaagaagaaagagcagaggagggagattggaagtagaaatgctgaatgcagaggcaaaaaaggaaaatg

SEQ ID NO: 19272 - DNA, 925 bp, Macaca Mulatta
  misc_feature (1)...(925): n = A,T,C or G
taagggtttaagaaagttttttcgaagggccgaaggccggccgacaagggttttttacctttttaactatccccagagggatcttggctctgcttttattgacctcagagcaccctgtgagtgccgttaaaaaaaaacacacccatcnncatgggaacttgatcccggccagtggcacctgacctcagaagaattcgtggatttgtacaaaatgcagaggaaaaaatgaggcaatgtggtgctgagtcgaggggtagccgattggcagagtagtcagcaacagtgcagtcgggtcatgcctctttctcataagtgcgagtgcaaactgcagtgccgtgggtgagtgtcagtatgagttttccatcaattagctcccgcacaagtgtcgtctcttgcccatcccatttctgcaggtgaatgagtttccctccatccagtgtcacaatggacttgaccttcctgtcatctgctgttgtctcatcaaactccacccccagcttgaagttgatctctgtgttcttgaaggtgctgtgtgtttttagggtgagaatgtccccattcttttcgatgatcgtggtaggcttggtcatgttggccacctgcctggtagcaaaacccactccgattgacttcatgtagtcatcgaaattcttgctgtccactagcttccaggtgcccaggaaagcgtccaccatagtgatgctgggctaggctgagaaaagccaaggcagactgctttgcttctttaatcctcagttttcttatttctgggacaggattggaaactgctgcaactgcatcctcttcctctgttatgctgactatatttgggggagaatgtgagccctgtccctttttgtgctcctctgtcttgccctcagcagattcagatgtggatataacatctggcaggcagcaagccccc

SEQ ID NO: 19273 - DNA, 1423 bp, Macaca Mulatta
cggtgaaggcggcccggcctgtggatgttcagatagcgcctgtctcccgccgccaatctctggcccctagcgagcacggaggagaggggcggcagcagcagcagcaggcgaggaggaagatggcgggacggctgccggcctgtgtggtggactgtggcacggggtatacaaaactaggatatgctggaaatacagaaccacagtttatcatcccttcctgtattgctattaaggagtcagcaaaagtgggtgatcaagctcagaggagggtgatgaaaggtgttgatgacctagacttcttcattggtgatgaagcaatagaaaaacctacatatgcaacaaagtggccaatccgccatggtatagttgaagattgggacttaatggaaaggttcatggagcaagtgatctttaagtatttaagggcagaacctgaagaccattattttcttttgactgaacctccattgaatactccagaaaacagggaatatactgctgaaataatgtttgagtctttcaatgttccaggcttgtacattgctgtgtaggctgttcttgccttagctgcatcttggacctcaagacaagtaggagaacggacgttgaccggtacagtaatagacagtggagatggtgtcactcatgtcattcctgtggctgaagggtatgtgattggcagctgtattaaacacattccaatcgcaggacgagatataacatattttattcagcaactgctgagagaccgagaagtaggaatccctccagaacaatccttggaaactgctaaggcagtaaaggagcgttatagttatgtctgcccagatttagtaaaagaatttaacaagtatgatacagatgggtcaaaatggattaaacagtatactggaatcaatgctatctcaaagaaagaattttctatcgatgttggttatgagagatttttgggacctgaaatattttttcatccagagtttgctaatccagactttacacagcctatctcagaagttgtagatgaagtaattcagaattgtcctattgatgtcaggcgtcctctctacaagaatattgtcctctctggaggttcaccatgttcagggactttggacgtcgcttgcaaagagatttacaaagaactgtagatgcccggctgaaattaagtgaggaatagagtggcggacgactgaaggccaaacctattgatgtaccagtcattacacaccacatcaaacgaaaagcacatggataggcagatcacgctggctcacgcagtaatctacagtatgcatgccaacggacatagaattgtcctacttgtgccaacccgttgcatatcgcagagaatccgctgggtcgcggggaaaaaaccgacactcgcagcgggactaacatggacaaccctcattttgtccataaa

SEQ ID NO: 19274 - DNA, 268 bp, Macaca Mulatta
ttcaccatcataacttttcagttaaatcatgatgtaaaattttagtacttaaaggtttttaatcgtctcgaaggccaagcatcacatttgtaaacagtcctggtcagtagttaaataatgtttcaattaaagtgctgtaaaataaacttcaaagtggttataaggggttgttaactttctttatggttaaaaattatcagtttatcactcagtttaaaaactcagtggaaaagccaatagataaatgtcatttaaaactatgcctggg

SEQ ID NO: 19275 - DNA, 1943 bp, Macaca Mulatta
  misc_feature (1)...(1943): n = A,T,C or G
agagggtggctgttgcacttagtaaagctctaaagttgttagagaaattggcttcccgagttatgagactgtgcgcagacagttgaggaagaaagaactcaagtacaacccaatgagnnnagatataggctactcttcccaactcagccttggagagcatcatcaactgcctcacgtgtggtgaccttcactgtcgtatgccagtgactcatctggagtaatctcaacagccagttaccaacacttgctcttgattgataaacagagaatggggctttggatcttagcaattctcacaattctcgtgtattccacagcagcgaagtttagtannntaaacaatcgtggggcctggaaaatgaggctttaattgtgagatgtcctagacaaggaaaacctagttacatcgtggattggtattactcacaaacaaacaaaagtattcccacccaggaaagaaatcgtgtgtttgcctcaggccaacttcttaagtttctaccagctgaagttgctgattctggtatttatacctgcattgtcagaagnnnnnnnnnnnnnnnnnnnnnnnnnnnnnnnnnnnnnnnnnnnnnnnnnnnnnnnnnnnnnnnnnnnnnnnnnnnnnnnnnnnnnnnnnnnnnnnnnnnnnnnnnnnnnnnnnnnnnnnnnnnnnnnnnnnnnnnnnnnnnnnnnnnnnnnnnnnnnnnnnnnnnnnnnnnnnnnnnnnnnnnnnnnnnnnnnnnnnnnnnnnnnnnnnnnnnnnnnnnnnnnnnnnnnnnnnnnnnnnnnnnnnnnnnnnnnnnnnnnnnnnnnnnnnnnnnnnnnnnnnnnnnnnnnnnnnnnnnnnnnnnnnnnnnnnnnnnnnnnnnnnnnnnnnnnnnnnnnnnnnnnnnnnnnnnnnnnnnnnnnnnnnnnnnnnnnnnnnnnnnnnnnnnnnnnnnnnnnnnnnnnnnnnnnnnnnnnnnnnnnnnnnnnnnnnnnnnnnnnnnnnnnnnnnnnnnnnnnnnnnnnnnnnnnnnnnnnnnnnnnnnnnnnnnnnnnnnnnnnnnnnnnnnnnnnnnnnnnnnnnnnnnnnnnnnnnnnnnnnnnnnnnnnnnnnnnnnnnnnnnnnnnnnnnnnnnnnnnnnnnnnnnnnnnnnnnnnnnnnnnnnnnnnnnnnnnnnnnnnnnnnnnnnnnnnnnnnnnnnnnnnnnnnnnnnnnnnnnnnnnnnnnnnnnnnnnnnnnnnnnnnnnnnnnnnnnnnnnnnttgatcatcaaagcacctactgcataattgcagtatgtagtgtattgttaatgctaatcaatgtcctggttatcatcctaaaaacgttctggattgaggctactctgctctggagggacatagctaaaccttacaagaccaggaatnnnnnnnnnnnnnnnnnnnnnnnnnnnnnnnnnnnnnnnnnnnnnnnnnnnnnnnnnnnnnnnnnnnnnnnnnnnnnnnnnnnnnnnnnnnnnnnnnnnnnnnnnnnnnnnnnnnnnnnnnnnnnnnnnnnnnnnnnnnnnnnnnnnnnnnnnnnnnnnnnnnnnngatgtagtcactgcagtggaaaccaacatacgaaagagcaggcggcacattttcatcctgacccctcagatcacgcacagcgaggagtttgcctacgagcaggaagttgccctgcatagtgccctcatccagaacgactccaaggtgattcttattgagatggaggctctgagcgagctggacatgctgcaggctgaagcgcttcaggactctctcaggcatctcatggaagtgcagggcaccatcaagtggagggaggaccacgttgccaataaacggtccctgaattccaaattctggaagcacgtgaggtaccaaatgcctgtgccaagcaaaatgcccagaaaggcctccagtttgacttccttggcagcccagaagcaatag

SEQ ID NO: 19276 - DNA, 436 bp, Macaca Mulatta
  misc_feature (1)...(436): n = A,T,C or G
agggaagctatgcgaaattatttaaaagagcgaggagatcaaacagtacttattcttcatgcaaaagttgcacagaagtcatatggaaatgaaaaaaggnnnnnnccctcctccttgtgtgtatcttatgggcagtggatggnnnnnnnnnnnnnnnnnnnnnnnnnnnnnnnnnnnnnnnnnnnnnnnnnnnnnnnnnnnnnnnnnnnnnnnnnnnnnnnnnnnnnnnnnnnnnnnnnnnnnnnnnnnnnnnnnnnnnnagaactattgcacagccaaaacattgtacatatctgattcagacaagcgaaagcacttcatgttgtctgtaaagatgttctatggcaacagtgatgacattggtgtgttcctcagcaagcggataaaagtcatctccaaaccttccaaaaagaagcagtcattgaaaaatgctgac

SEQ ID NO: 19277 - DNA, 297 bp, Macaca Mulatta
cccaaaatgttcaataatgtcccatgtaaaacttgctgcaaatggcagcttatacatagcaatggtaaaatcattatctggatttaggaattgctcttgtcatgccctgtaggttcttagatttaaaagccttctcattgctgctatcctacatttaaatacctttgaaagtttgtattaaatgtgaattttaagaaataatatttatatttctataaatgtaaactgtgaagagagttaaaaactgaagcagatacctagaaccacctaaagaacttccatttatagagatttttt

SEQ ID NO: 19278 - DNA, 578 bp, Macaca Mulatta
cagtgaaatatagtccaagatccagtgagagacacagaagtgctagaagccactcctcgtgaactaaggagaaaaagaacagacagggaacaccctggacatggcatcagagatccacatgacaggcccaatgtgcctcattgagaacactaatgggcgactgatggcgaatccagaagctctgaagatcctgtctgccattacacagcctgtggtggtggtggcgattgtgggcctctatcgcacagggaaatcctacctgatgaacaagctggctggaaagaaaaagggcttctctctgggctccacagtgcagtctcacactaaaggaatctggatgtggtgtgtgccccatcccaagaagccaggccacgtcctagttctgctggacaccgagggtctgggagatgtagagaagggtgacaaccagaatgactcctggatcttcgccctggccatcctcctgagcagcaccttcgtgtacaatagcatgggaaccatcaaccagcaggccatggaccaattgcactatgtgacagagctgacacatcgaatccgatcaaaatcgtcactgatga

SEQ ID NO: 19279 - DNA, 291 bp, Macaca Mulatta
tgccaagcagatgtcaagagtggggatggtcaggctggggtacagcctgctctcggtgtgggcctatgatgtaggctctcacctcttccaggagaagatacaaatccacaggaaacaaagaggacacggctggcttattctcattgtgaaagatagctacacctcacaaggacatggactgcctttcttgagcacttccctggacccaccacgtatctagctaatacgtatgtgtcactagtaggctccaagggttgacaaatatatttatgatctattcagctgctttta

SEQ ID NO: 19280 - DNA, 2784 bp, Macaca Mulatta
  misc_feature (1)...(2784): n = A,T,C or G
ggttccaacccctgcgctgaggaaaacgggggatgcagccatctctgcctttacagacctcagggccttcgctgtgcttgccctattggctttgaactcatcagtgacatgaagacctgcattgtcccagaggctttccttttgttttcacggagagcagacatcagacgaatttctttggaaacaaacaataataatgtggctattccactcactggtgtcaaagaagcttctgctttggattttgatgtgacagacaaccgaatttattggactgatatatcactcaannnnnnnnnnnnnnnnnnnnnnnnnnnnnnnnnnnnnnnnnnnnnnnnnnnnnnnnnnnnnnnnnnnnnnnnnnnnnnnnnnnnnnnnnnnnnnnnnnnnnnnnnnnnnnnnnnnnnnnnnnnnnnnnnnnnnnnnnnnnnnnnnnnnnnnnnnnnnnnnnnnnnnnnnnnnnnnnnnnnnnnnnnnnnnnnnnnnnnnnnnnnnnnnnnnnnnnnnnnnnnnnnnnnnnnnnnnnnnnnnnnnnnnnnnnnnnnnnnnnnnnnnnnnnnnnnnnnnnnnnnnnnnnnnnnnnnnnnnnnnnnnnnnnnnnnnnnnnnnnnnnnnnnnnnnnnnnnnnnnnnnnnnnnnnnnnnnnnnnnnnnnnnnnnnnnnnnnnnnnnnnnnnnnnnnnnnnnnnnnnnnnnnnnnnnnnnnnnnnnnnnnnnnnnnnnnnnnnnnnnnnnnnnnnnnnnnnnnnnnnnnnnnnnnnnnnnnnnnnnnnnnnnnnnnnnnnnnnnnnnnnnnnnnnnnnnnnnnnnnnnnnnnnnnnnnnnnnnnnnnnnnnnnnnnnnnnnnnnnnnnnnnnnnnnnnnnnnnnnnnnnnnnnnnnnnnnnnnnnnnnnnnnnnnnnnnnnnnnnnnnnnnnnnnnnnnnnnnnnnnnnnnnnnnnnnnnnnnnnnnnnnnnnnnnnnnnnnnnnnnnnnnnnnnnnnnnnnnnnnnnnnnnnnnnnnnnnnnnnnnnnnnnnnnnnnnnnnnnnnnnnnnnnnnnnnnnnnnnnnnnnnnnnnnnnnnnnnnnnnnnnnnnnnnnnnnnnnnnnnnnnnnnnnnnnnnnnnnnnnnnnnnnnnnnnnnnnnnnnnnnnnnnnnnnnnnnnnnnnnnnnnnnnnnnnnnnnnnnnnnnnnnnnnnnnnnnnnnnnnnnnnnnnnnnnnnnnnnnnnnnnnnnnnnnnnnnnnnnnnnnnnnnnnnnnnnnnnnnnnnnnnnnnnnnnnnnnnnnnnnnnnnnnnnnnnnnnnnnnnnnnnnnnnnnnnnnnnnnnnnnnnnnnnnnnnnnnnnnnnnnnnnnnnnnnnnnnnnnnnnnnnnnnnnnnnnnnnnnnnnnnnnnnnnnnnnnnnnnnnnnnnnnnnnnnnnnnnnnnnnnnnnnnnnnnnnnnnnnnnnnnnnnnnnnnnnnnnnnnnnnnnnnnnnnnnnnnnnnnnnnnnnnnnnnnnnnnnnnnnnnnnnnnnnnnnnnnnnnnnnnnnnnnnnnnnnnnnnnnnnnnnnnnnnnnnnnnnnnnnnnnnnnnnnnnnnnnnnnnnnnnnnnnnnnnnnnnnnnnnnnnnnnnnnnnnnnnnnnnnnnnnnnnnnnnnnnnnnnnnnnnnnnnnnnnnnnnnnnnnnnnnnnnnnnnnnnnnnnnnnnnnnnnnnnnnnnnnnnnnnnnnnnnnnnnnnnnnnnnnnnnnnnnnnnnnnnnnnnnnnnnnnnnnnnnnnnnnnnnnnnnnnnnnnnnnnnnnnnnnnnnnnnnnnnnnnnnnnnnnnnnnnnnnnnnnnnnnnnnnnnnnnnnnnnnnnnnnnnnnnnnnnnnnnnnnnnnnnnnnnnnnnnnnnnnnnnnnnnnnnnnnnnnnnnnnnnnnnnnnnnnnnnnnnnnnnnnnnnnnnnnnnnnnnnnnnnnnnnnnnnnnnnnnnnnnnnnnnnnnnnnnnnnnnnnnnnnnnnnnnnnnnnnnnnnnnnnnnnnnnnnnnnnnnnnnnnnnnnnnnnnnnnnnnnnnnnnnnnnnnnnnnnnnnnnnnnnnnnnnnnnnnnnnnnnnnnnnnnnnnnnnnnnnnnnnnnnnnnnnnnnnnnnnnnnnnnnnnnnnnnnnnnnnnnnnnnnnnnnnnnnnnnnnnnnnnnnnnnnnnnnnnnnnnnnnnnnnnnnnnnnnnnnnnnnnnnnnnnnnnnnnnnnnnnnnnnnnnnnnnnnnnnnnnnnnnnnnnnnnnnnnnnnnnnnnnnnnnnnnnnnnnnnnnnnnnnnnnnnnnnnnnnnnnnnnnnnnnnnnnnnnnnnnnnnnnnnnnnnnnnnnnnnnnnnnnnnnnnnnnnnnnnnnnnnnnnnnnnnnnnnnnnnnnnnnnnnnnnnnnnnnnnnnnnnnnnnnnnnnnnnnnnnnnnnnnnnnnnnnnnnnnnnnnnnnnnnnnnnnnnnnnnnnnnnnnnnnnnnnnnnnnnnnnnnnnnnnnnnnnnnnnnnnnnnnnnnnnnnnnnnnnnnnnnnnnnnnnnnnnnnnnnnnnnnnnnnnnnnnnnnnnnnnnnnnnnnnnnnnnnnnnnnnnnnnnnnnnnnnnnnnnnnnnnnnnnnnnnnnnnnnnnnnnnnnnnnnnnnnnnnnnnnnnnnnnnnnnnnnnnnnnnnnnnnnnnnnnnnnnnnnnnnnnnnnnnnnnnnnnnnnnnnnnnnnnnnnnttttgaaccctccaccatccccagccacagagcgatcacattacactatggaatttggatattcttcaaacagtccttccactcataggtcatacag

SEQ ID NO: 19281 - DNA, 224 bp, Macaca Mulatta
cctgcttcctcccctagcatggcttggggcttagggctggggacttgccctccatggaggtcagtgggagttgcagctcaaaggtggcagggcctacccatcttacagaggcgaagacaaggcccctctgcctctgctgcagccatggagtctgcacccacccttctaccctcagagcctggccatggggtcctgggtccccacaacactgtgcactggacctc

SEQ ID NO: 19282 - DNA, 584 bp, Macaca Mulatta
tgccaggcctcccggaccccttgttactcaggaacctcaccttggacggaatgggatgggggcttcggtgcccacccaccccccgcctccactctgccattccggcccacctccctctggccggacagaactggtgctctcttctccccactgtgcccgtccacggaccggggacccttccccgtgccctaccccctcccattttaatggtgtctgtgacatttcctgttgtgaagtaaaagagggacccctgcgtcctgctcctttctcttgcagtatgcttgtccatgtgtctgtttttccacttgtccatctgtccagtaagcaggtaatggtgacccatgctggtccgctcggacccccgtcctcctctccccacagctgggccccgctcagctggtcctgctggatgcagtgcccctttggacccccttgtcacctggcctcccagtccccaccacctggcctggccagctctggccagctgttgctctgtcccggtgggagaaagcccagccaggcctccacttcccctggggcgtccatacctcaggagtgcacagacccagcgtctgcccttattt

SEQ ID NO: 19283 - DNA, 234 bp, Macaca Mulatta
ggaactgtgggggattggaaaaaccacttcactgttgcccagaatgagaggtttgatgaaatctatagaaaaaagatggaaggaacctccataaacttctgcatggaactctgagcaagatgtaaacacaattaaaagatggatggcaagagtgcaaatactatcttcaatccttcagtcccagccagaagaatctctgaaagcatattgtgaatgtataggatgtagtacaaa

SEQ ID NO: 19284 - DNA, 266 bp, Macaca Mulatta
gggttttactcactgtcggtgagacacaggcaggtaaagcattaccgcattttccgcctgcccaacaactggtactacatttccccgaggctcaccttccagtgcctggaggacctggtgaaccactattctggaggtggctgatggcctgtgctgtgtgctcaccacaccctgcctgacacaaagcacggctgccccagcagtgagggcctccaactcacctgtcaccttgcgtcagaagaccgtggactggaggagaatgtcca

SEQ ID NO: 19285 - DNA, 614 bp, Macaca Mulatta
aaaaccagactgaaaggaatgcctcagaaaagatgcttcattgagtgttcattaaaccacagatgtattttgtatttattttacatttaaatttccacagcaaatagaaaataatttatcatacttgtacaattaactgaagaagtgataagaaataactgaatgtgaaacatcaataaagaccacttaatgcacgttttctattttattgaactcttattaactgtaaaatgcgtttttaaaagatcaaaaatgtatattttctagcatgattcatttatcagtcagtggccaagcttctaaatgccagatattatattgagtatgtattatatgagaacatacaatgcttaaagttccatttttcaaactcaggcaggtcatattctatcttacccagtgttgctgtaggctagaaagtgacaatggcttttgtaatcctgccttgttttaggcactttcctgcagtctttagaaattctgagattctgctaaaagctttaagtcacagtctggagaattttctatgattaggaaatgctctgttttcatccctttagataactgtgacacctagaattttctgataagtggagagtgttcattgaaagtca

SEQ ID NO: 19286 - DNA, 939 bp, Macaca Mulatta
ggcagaaggttgttgagaggcagagctgcccctgagtgagccatgcagaggatctcctccctcatccatctctccctcttctgggcaggagtcatgtcagctgttgagttggtgcctgaacaccaaacagtgattgtgtcagtgggggaccctgccaccctcaagtgctccatgaaaggagaagcaatcagtaactactatatcaactggtacaggaagacccaaggtaacacaatgactttcatataccgagaaaagggcatctatggccctggtttcaaggacaatttccaaggtgacattgatactgaagagaaccaggctgtacttaagatccttgcaccatcagagagagatgaagggtcttactactgtgccagtgaccgtattcttgagggtgggatgcggggtaaactcttctttggaaagggaactcgtgtgattgtggaaccagaaagacaacctcataccaaaccatccgttttcgtcatgaaaaatggaacaaatgttgcttgtctggtgaaggacttctaccccaaggatataagaataaatctcgagtcatccaagaagataacagagtttgatcctgctattgtcgtctctcccagtgggaagtacaatgctgtcaagcttggtcaatatgcagattcaaattcagtgacatgttcagttcaacacaacaaggaagttgtgtactccactgactttgaagtgaagacaaattctacagatcacctaaaaccaacggaaactgaaaacacaaagcaaccttcaaagagctgccatgaacccaaagttcatgccgagaaggtgaacatgatgtctctcacagtgctgggactacgaatgctgtttgcaaagagtgttgccatcaattttctcttgactgccaagttacttttcttgtaaggctgacaggcatgaggaagctacact

SEQ ID NO: 19287 - DNA, 712 bp, Macaca Mulatta
  misc_feature (1)...(712): n = A,T,C or G
gtgtgagatctggatgtgtggtatttttcctttctctgtattctttatgaaacataacttttgaaaaacctatgtattattcatacagctttggtttgtatattctgtatagcctaactacacacatcaaaatgtatgtcaaccaagtgtttagaatgaaattataagtgtttaagtccaaataaagcatgtgatgtggaataatctatgcatgttgtacttatttttgaannnnnnnnnnnnnnnnnnccaagtttggtatattggaagaatacccattagaaattcatttgtatttatataacatttagaacacttttggcttaccttttttcattaataaaaaggaaagaagtttaatgttaaaatatatgtgttacatacttaaatctattctttttcttatccatcttttgtggtacaaaatattaatctttggagattatgggcacacatagacatgtgagaaaattgccacagtgagcattttaaagattgcagaattgtccattttgttacaaatttttattagttattaataaatggaataattatgggctgtttttaaaatagtggcaggtgagagtttttgtttaaagggatttttaaattatagattattcacatgggggannnnnnnnnnnnnnnnnnnnntgactgtagaacattaacttttcttctttacgtttatatttatatcatgtgtctgaag

SEQ ID NO: 19288 - DNA, 2923 bp, Macaca Mulatta
  misc_feature (1)...(2923): n = A,T,C or G
ctccatcctcccccttgaggacatggaactttccggtgaacctgtacctgaggggaccccggaaaccaccaacatgagcatcatccagcacagcagctccgaacaaggcaagtccggatgcacatgcctannnnnnnnnnnnnnnnnnnnnnnnnnnnnnnnnnnnnnnnnnnnnnnnnnnnnnnnnnnnnnnnnnnnnnnnnnnnnnnnnnnnnnnnnnnnnnnnnnnnnnnnnnnnnnnnnnnnnnnnnnnnnnnnnnnnnnnnnnnnnnnnnnnnnnnnnnnnnnnnnnnnnnnnnnnnnnnnnnnnnnnnnnnnnnnnnnnnnnnnnnnnnnnnnnnnnnnnnnnnnnnnnnnnnnnnnnnnnnnnnnnnnnnnnnnnnnnnnnnnnnnnnnnnnnnnnnnnnnnnnnnnnnnnnnnnnnnnnnnnnnnnnnnnnnnnnnnnnnnnnnnnnnnnnnnnnnnnnnnnnnnnnnnnnnnnnnnnnnnnnnnnnnnnnnnnnnnnnnnnnnnnnnnnnnnnnnnnnnnnggtccaagcagtgaagaaagtttaacaacagctgcagctgcaaccgaagtgtccctcagtacttttgaggatgaggaagccagtggggtccccacagatggcctggcccccctcacagccaccatgacccctgagcaggcagtcacttctgnnnnnnnnnnnnnnnnnnnnnnnnnnnnnnnnnnnnnnnnnnnnnnnnnnnnnnnnnnnnnnnnnnnnnnnnnnnnnnnnnnnnnnnnnnnnnnnnnnnnnnnnnnnnnnnnnnnnnnnnnnnnnnnnnnnnnnnnnnnnnnngctcagagagaacatgtgggaatgaaaggacaggctgagcccaaaggagaaaagnnnnnnnnnnnnnnnnnnnnnnnnnnnnnnnnnnnnnnnnnnnnnnnnnnnnnnnnnnnnnnnnnnnnnnnnnnnnnnnnnnnnnnnnnnnnnnnnnnnnnnnnnnnnnnnnnnnnnnnnnnnnnnnnnnnnnnnnnnnnnnnnnnnnnnnnnnnnnnnnnnnnnnnnnnnnnnnnnnnnnnnnnnnnnnnnnnnnnnnnnnnnnnnnnnnnnnnnnnnnnnnnnnnnnnnnnnnnnnnnnnnnnnnnnnnnnnnnnnnnnnnnnnnnnnnnnnnnnnnnnnnnnnnnnnnnnnnnnnnnnnnnnnnnnnnnnnnnnnnnnnnnnnnnnnnnnnnnnnngggtgaccctggcaacagaggcttacctggacccccggggaaannnnnnnnnnnnnnnnnnnnnnnnnnnnnnnnnnnnnnnnnnnnnnnnnnnnnnnnnnnnnnnnnnnnnnnnnnnnnnnnnnnnnnnnnnnnnnnnnnnnnnnnnnnnnnnnnnnnnnnnnnnnnnnnnnnnnnnnnnnnnnnnnnnnnnnnnnnnnnnnnnnnnnnnnnnnnnnnnnnnnnnnnnnnnnnnnnnnnnnnnnnnnnnnnnnnnnnnnnnnnnnnnnnnnnnnnnnnnnnnnnnnnnnnnnnnnnnnnnnnnnnnnnnnnnnnnnnnnnnnnnnnnnnntccttgatcaatatcacccatggattcatgaatttctcggacattcctgagctggtggggcctccgnnnnnnnnnnnnnnnnnnnnnnnnnnnnnnnnnnnnnnnnnnnnnnnnnnnnnnnnnnnnnnnnnnnnnnnnnnnnnnnnnnnnnnnnnnnnnnnacagggcgagaagggagagccaggtgccatcctgacaggggacattcctctggaaaggctgatggggaaaaagnnnnnnnnnnnnnnnnnnnnnnnnnnnnnnnnnnnnnnnnnnnnnnnnnnnnnnnnnnnnnnnnnnnnnnnnnnnnnnnnnnnnnnnnnnnnnnnnnnnnnnnnnnnnnnnnnnnnnnnnnnnnnnnnnnnnnnnnnnnnnnnnnnnnnnnnnnnnnnnnnnnnnnnnnnnnnnnnnnnnnnnnnnnnnnnnnnnnnnnnnnnnnnnnnnnnnnnnnnnnnnnnnnnnnnnnnnnnnnnnnnnnnnnnnnnnnnnnnnnnnnnnnnnnnnnnnnnnnnnnnnnnnnnnnnnnnnnnnnnnnnnnnggtgttaaaggagagaaaggatcctggggccttcctggctcaaagggagaaaaaggcgaccagggagcccagggaccaccaggnnnnnnnnnnnnnnnnnnnnnnnnnnnnnnnnnnnnnnnnnnnnnnnnnnnnnnnnnnnnnnnnnnnnnnnnnnnnnnnnnnnnnnnnnnnnnnnnnnnnnnnnnnnnnnnnnnnnnnnnnnnnnnnnnnnnnnnnnnnnnnnnnnnnnnnnnnnnnnngccagaaaggggagacagtcgttgggccccaaggacccccaggtgctcctggtctgcctgggccacctggctttggaagacctggtgatcctgggccaccgggacccccagggccaccaggacctccggctatcctgggagcagnnnnnnnnnnnnnnnnnnnnnnnnnnnnnnnnnnnnnnnnnnnnnnnnnnnnnnnnnnnnnnnnnnnnnnnnnnnnnnnnnnnnnnnnnnnnnnnnnnnnnnnnnnnnnnnnnnnnnnnnnnnnnnnnnnnnnnnnnnnnnnnnnnnnnnnnnnnnnnnnnnnnnnnnnnnnnnnnnnnnnnnnnnnnnnnnnnnnnnnnnnnnnnnnnnnnnnnnnnnnnnnnnnnnnnnnnnnnnnnnnnnnnnnnnnnnnnnnnnnnnnntgcatttggctgctctgaacatgccattttctggggacattcgagctgattttcagtgcttcaagcaggccagagctgcaggactgttgtccacctaccgagcattcttatcttcccatttgcaagatctgtccaccattgtgaggaaagcagagagatacagccttcccatagtgaacctcaaggn

SEQ ID NO: 19289 - DNA, 407 bp, Macaca Mulatta
  misc_feature (1)...(407): n = A,T,C or G
gccaaagaagcccaggatgacctggtgaagaccaaggaggagctgcacctggtgatgacnnnnnnnnnnnnnnnnnnnnnnnnnngtacgagccactgagctaccatgtccaggagagcttgcaggatgagggtgcggagcccacgggctacagtgcagagctgtctagtgagggcatccgggatgaccgcaatgaggagaagcgtatcactgaggcggagaagaatgagcgtgtgcagcggcagctgctgngacgctgagcagcgagctgtcccaggcccgagatgagaataagaggacccacaatgacatcatccacaacgagaacatgaggcaaggccgggacaagtacaagacgctgcggcagatccggcagggcaacaccaagcagcgcatcgacgagttcg

SEQ ID NO: 19290 - DNA, 563 bp, Macaca Mulatta
ttttatttttcagtaggattgcaattttggtaacacaaaaccctgttatgtttggaggaaacaagttcctcaaagctcattgctttttcctctgttcccagctccgctctgcattggataaaacagaagagctcgaggtgagcaacggccacttagtgaagcgtctggaaaaaatgaaggcaaatcggagtgcactgttgtcccagcagtaaattccagctctgaacaggcaactggttggtgactggagagcattgtttcataggcttttctctgtcctgtctgggagcgctgcttcttcccctgccttctgagagaagacgaccgtggcaagcttagcacttaggggctcccgtgccatggctcacccgaggaagccccagcagccaccaggtgcctctgtgtgcagacccctggcccgggctggggccgacgctcagaacctgcagatacttcataagcacatgggggcctcgagggagctctgtgtctgaccgcacagcagcctctgaatgccactggaaatggtgatcaaagtaaagattcagttgggacttgagttc

SEQ ID NO: 19291 - DNA, 381 bp, Macaca Mulatta
gagctacatccctctgtgccatcctgcagttttgggaatggaaagcaggcctctgaggcagtggacaggaagctttctcatgcttgaattctagctcccattccaaactgttagtccccagcattgtggtcacatcagaggtcaacagcagagcagaggcaggtcggggttgtcctctctgattagcagaacaacggacccttcctcctcctccctccctcccatcccttctcattggctccctgctcctgggatgctttccaagagctctagcctccatggctgattacctcagctttcacataggtgaaatgtgtgtgcccatactgcagctccatcccatggggaccctgaagacccactgaggaattccacagggtc

SEQ ID NO: 19292 - DNA, 6650 bp, Macaca Mulatta
  misc_feature (1)...(6650): n = A,T,C or G
ttacatgaaactcattagttctttctcctgatgttcttaaggcaaggaataaaaatacctctgagaaatctagttcattgacccgtgaaatgagatcccaacgggnnnnnnnnnnnnnnnnnnnnnnnnnnnnnnnnnnnnnnnnnnnnnnnnnnnnnnnnnnnnnnnnnnnnnnnnnnnnnnnnnnnnnnnnnnnnnnnnnnnnnnnnnnnnnnnnnnnnnnnnnnnnnnnnnnnnnnnnnnnnnnnnnnnnnnnnnnnnnnnnnnnnnnnnnnnnnnnnnnnnnnnnnnnnnnnnnnnnnnnnnnnnnnnnnnnnnnnnnnnnnnnnnnnnnnnnnnnnnnnnnnnnnnnnnnnnnnnnnnnnnnnnnnnnnnnnnnnnnnnnnnnnnnnnnnnnnnnnnnnnnnnnnnnnnnnnnnnnnnnnnnnnnnnnnnnnnnnnnnnnnnnnnnnnnnnnnnnnnnnnnnnnnnnnnnnnnnnnnnnnnnnnnnnnnnnnnnnnnnnnnnnnnnnnnnnnnnnnnnnnnnnnnnnnnnnnnnnnnnnnnnnnnnnnnnnnnnnnnnnnnnnnnnnnnnnnnnnnnnnnnnnnnnnnnnnnnnnnnnnnnnnnnnnnnnnnnnnnnnnnnnnnnnnnnnnnnnnnnnnnnnnnnnnnnnnnnnnnnnnnnnnnnnnnnnnnnnnnnnnnnnnnnnnnnnnnnnnnnnnnnnncagaatcagatagtaattcagaatcagatacagaaggatcagaagaagaagatgatgatgataaagaccaagatgaatcagatagtgatactgaaggagagaaaacttcaatgaaactgaataaaacaacttcctctgtcaaaagcccttccatgagtcttacagctcactcaacacctcgtaacctccacatagcaaaagccccaggctctgctcctgctgccttatgttctgaatcccagttacctgcttttcttggtacatcttcttccacacttacttcaagcccacactctggnnnnnnnnnnnnnnnnnnnnnnnnnnnnnnnnnnnnnnnnnnnnnnnnnnnnnnnnnnngctggcagagagagacaagaataagaaactttggagggcgccttcaaggagaagtagcatattatgctccatgtggaaagaaacttaggcagtaccctgaagtaataaagnagtatctcagcagaaatggaataatggatatctcaagggacaatttcagcttcagtgcaaaaataagagtgggtgacttctatgaagccagagatggaccgcaggnagggaatgcagtggtgtcttttgaaagaagaggatgtcattcctcgtatcagggcaatggaaggccgtagaggaagaccaccaaatccagacagacagcgagcaagagaggaatccaggatgagacgtcggaagggtcgacctccaaatgttggcaatgctgaattcctagataacacagatgcaaagttgctaagaaaactgcaagctcaagnagaaatagccaggcaagcagcacaaataaagcttttgagaaaacttcaaaagcaggaacaggctcgagttgctaaagaagccaaaaaacaacaagnagcaataatggctgctgaggagaagcgaaagcaaaaagaacagataaagattatgaaacagcnnnnnnnnnnnnnnnnnnnnnnnnnnnnnnnnnnnnnnnnnnnnnnnnnnnnnnnnnnnnnnnnnnnnnnnnnnnnnnnnnnnnnnnnnnnnnnnnnnnnnnnnnnnnnnnnnnnnnnnnnnnnnnnnnnnnnnnnnnnnnnnnnnnnnnnnnnnnnnnnnnnnnnnnnnnnnnnnnaggaacgagagcgaaggcgacagcacatgatgcttatgaaagctatggaggctcgnnnnnnnnnnnnnnnnnnnnnnnnnnnnnnnnnnnnnnnnnnnnnnnnnnnnngattaaataaagagcgtaaactagagcaacgaagattagaattagaaatggcaaaggaactaaagaagcctaatgaagacatgtgcttagcggaccaaaagnagcctttgccagagttgcctcgtattccaggacttgttctctctggaagtacattttcagactgtctcatggtggtgcagttcttacgaaactttggtaaagttttgggctttgatgtgaatattgatgttccaaacctgagtgttcttcaagagggattgctaaatataggggacagcatgggtgaagtacaagacttgcttgtgaggctcctctcagctgctgtatgtgatccaggtctaataacaggatacaaggnaggctaaaacagctcttggagaacatttgctgaatgttggtgtgaatcgagacaatgtttccgagattttacagatatttatggaagcccactgtggacaaactgagcttactgaaagtctgaagaccaaagcttttcaggctcacactccagcacagaaagcttcagttctggctttcctgatcaatgaactggcatgcagcaagagtgtggtcagncagtgaaatcgacaagaacattgattatatgtcaaacttgaggagagataaatgggtggtagaaggtaaactccgcaagnnnnnnnnnnnnnnnnnnnnnnnnnnnnnnnnnnnnnnnnnnnnnnnnnnnnnnnnnnnnnnnnnnnnnnnnnnnnnnnnnnnnnnnnnnnnnnnnnnnnnnnnnnnnnnnnnnnnnnnnnnnnnnnnnnnnnnnnnnnnnnnnnnnnnnnnnnnnnnnnnnnnnnnnnnnnnnnnnnnnnnnnnnnnnnnnnnnnnnnnnnnnnnnnnnnnnnnnnnnnnnnnnnnnnnnnnnnnnnnnnaggatgaaggtgaccaagcagcaagtgttgaagagctggaaaaacagattgaaaaactgagtaaannnnnnnnnnnnnncagaaagaagctctttgatgcctctcactcattgcgttcagtgatgtttggccaggatcgttacagacgccggtactggattcttccctcaatgtggggggatttttgtagaaggcatggagagtggtgaaggnnnnnnnnnnnnnnnnnnnnnnnnnnnnnnnnnnnnnnnnnnnnnnnnnnnnnnnnnnnnnnnnnnnnnnnnnnnnnnnnnnnnnnnnnnnnnnnnnnnnnnnnnnnnnnnnnnnnnnnnnnnnnnnnnnnnnnnnnnnnnnnnnnnnnnnnnnnnnnnnnnnnnnnnnnnnnnnnnnnnnnnnnnnnnnnnnnnnnnnnnnnnnnnnnnnnnnnnnnnnnnnnnnnnnnnnnnnnnnnnnnnnnnnnnnnnnnnnnnnnnnnnnnnnnnnnnnnnnnnnnnnnnnnnnnnnnnnnnnnnnnnnnnnnnnnnnnnnnnnnnnnnnnnnnnnnnnnnnnnnnnnnnnnnnnnnnnnnnnnnnnnnnnnnnnnnnnnnnnnnnnnnnnnnnnnnnnnnnnnnnnnnnnnnnnnnnnnnnnnnnnnnnnnnnnnnnnnnnnnnnnnnnnnnnnnnnnnnnnnnnnnnnnnnnnnnnnnnnnnnnnnnnnnnnnnnnnnnnnnnnnnnnnnnnnnnnnnnnnnnnnnnnnnnnnnnnnnnnnnnnnnnnnnnnnnnnnnnnnnnnnnnnnnnnnnnnnnnnnnnnnnnnnnnnnnnnnnnnnnnnnnnnnnnnnnnnnnnnnnnnnnnnnnnnnnnnnnnnnnnnnnnnncaggtgaaaggtggagtatctatgatgggacttcagttttgtgggtggcccactggtgtgcttacttctaatattccatttgcatcatctgtacctggtctaggatcggggttagggttatcagaaggaaatggtaattcgctcttgacttccactgttgcttcgagtaaaagtgagtctccagtaccacagaatgaaaaggccacttcagctcaacctgcagctgttgaagtagcaaaaccagtagattttcctagtccaaaacctattccagaagnagaaatgcagtttggttggtggagaattattgacccagaggacctaaaagctttgctcaaagtgctacatctcagaggaataagagaaaaggcattacaaaaacaaattcagaaacatttggattatattactcaagcctgcatcaagaataaggatgngttgctattattgaactgaatgaaaatgaagaaaaccaagtaactcgagatattgtggagaactggtcagtagaagaacaagcaatggaaatggatttgagtgtccttcaacaggtagaagatctagaaaggagagttgcatcagcaagtttgcaagtgaaggnnnnnnnnnnnnnnnnnnnnnnnnnnnnnnnnnnnnnnnnnnnnnnnnnnnnnnnnnnnnnnnnnnnnnnnnnnnnnnnnnnnnnnnnnnnnnnnnnnnnnnnnnnnnnnnnnnnnnnnnnnnnnnnnnnnnnnnnnnnnnnnnnnnnnnnnnnnnnnnnnnnnnnnnnnnnnnnnnnnnnnnnnnnnnnnnnnnnnnnnnnnagaattgaagaggatattgctccagggctcagggtatggagaagggcattatcagaagctcgcagtgctgcacaggtagctctgtgcattcagcaattacagaaatcaatagcatgggaaaaatcaattatgaaagttntactgccaaatctgtcgaaagggagataatgaagaactgcttcttctttgtgatggctgtgacaaaggctgtcatacctactgccatagacccaagattacaacaatcccagatggagattggttttgtccagcttgcattgctaaggnnnnnnnnnnnnnnnnnnnnnnnnnnnnnnnnnnnnnnnnnnnnnnnnnnnnnnnnnnnnnnnnnnnnnnnnnnnnnnnnnnnnnnnnnnnnnnnnnnnnnnnnnnnnnnnnnnnnnnnnnnnnnngactaatgagtcaaagaaaggcaagaaggtaactttaacaggagacactgaagatgaagactctgcatctacaagtagttcactnnnnnnnnnnnnnnnnnnnnnnnnnnnnnnnnnnnnnnnnnnnnncacttctattaacttgtcaaaacaagaaagttttacttcagttaagaagccgaaaagagatgactccaaggacctagctctttgcagnnnnnnnnnnnnnnnnnnnnnnnnnnnnnnnnnnnnnnnnnnnnnnnnnnnnnnnnnnnnnnnnnnnnnnnnnnnnnnnnnnnnnnnnnnnnnnnnnnnnnnnnnnnnnnnnnnnnnnnnnnnnnnnnnnnnnnnnnnnnnnnnnnnnnnnnnnnnnnnnnnnnnnnnnnnnnnnnnnnnnnnnnnnnnnnnnnnnnnnnnnnnnnnnnnnnnnnnnnnnnnnnnnnnnnnnnnnnnnnnnnnnnnnnnnnnnnnnnnnnnnnnnnnnnnnnnnnnnnnnnnnnnnnnnnnnnnnnnnnnnnnnnnnnnnnnnnnnnnnnnnnnnnnnnnnnnnnnnnnnnnnnnnnnnnnnnnnnnnnnnnnnnnnnnnnnnnnnnnnnnnnnnnnnnnnnnnnnnnnnnnnnnnnnnnnnnnnnnnnnnnnnnnnnnnnnnnnnnnnnnnnnnnnnnnnnnnnnnnnnnnnnnnnnnnnnnnnnnnnnnnnnnnnnnnnnnnnnnnnnnnnnnnnnnnnnnnnnnnnnnnnnnnnnnnnnnnnnnnnnnnnnnnnnnnnnnnnnnnnnnnnnnnnnnnnnnnnnnnnnnnnnnnnnnnnnnnnnnnnnnnnnnnnnnnnnnnnnnnnnnnnnnnnnnnnnnnnnnnnnnnnnnnnnnnnnnnnnnnnnnnnnnnnnnnnnnnnnnnnnnnnnnnnnnnnnnnnnnnnnnnnnnnnnnnnnnnnnnnnnnnnnnnnnnnnnatgattaatccacatccagaatcttcgttttctgtgttaacgaagaactagaaaattgctttaaatcttgaaaatacaacaaggaatgttttaaaatataaaacaaagccaagttaaactgtttacactgatgtgctataagagcaccaaaaagaaactttactgtagagttacaagtacatttatatatatatgttgctgcatcacttgtgtagttaaattgtatttcaaaacagtgaaaacattgacatgtatatactgttcattcttgtttatattaagtcttgttttaaatatgtattatgtgtatatattgtttgcagacattattgttcatgccttagaggattgtagcattttattttcatctgaaggtaatgatagctatacagtctgtacagtcattatcctctaccaacactgtggcgtctccttaatcttggtagtgcctgcctttgaaacagggtgtaggggatattagttttccatttttctattttgttatataattttaagccaccagggcctaaattaaagtataatcatttgtatccatgtggaataaaattgtgacaatttcctacgcacacagtattttttcatagaaacatttccctcccatttgccttgcctcagaaataaatttaaaagacatttgtaaccactgtgttttatctactgtgtgttgtggtggcctgttggaggcaaatagatcagaattttttttgtacctatgtaagagtactttgagtttttattaaaataaaatgttgtggaaaaggtagcattc

SEQ ID NO: 19293 - DNA, 159 bp, Macaca Mulatta
ttcatccgcagggagcaggccaacaacgtcctggcgagggtcaggaggtccaattcctttcttgaagagatgaagaaaggaaaccttgaaagagagtgcatggaagagacctgctcatacgaagaggcccgcgaggtcttcgaggacagcgacaagacg

SEQ ID NO: 19294 - DNA, 783 bp, Macaca Mulatta
  misc_feature (1)...(783): n = A,T,C or G
ggggattatgaaataaaccacaaattaaaatttttgtttaaactgtccaggatctgatttaaaaatatagtctttgttttatatgattaaatggtttgttttcgtagatgatatgttacccattgtaaagactacatattcagcagtgttctttaaacgctttcatttaaaaagnnnnnnnnnnnnnnnnnntgaattgagtgctctgatgtaaaacttctcatggggtaaaacagtgatttattttaaccaaacattcaccaaagcaaagaagggtttcagacctttgaactggtatggtttggcagaatggttttaaattttgctgtatttgattacttagagataggnnnnnnnnnnnnnnnnnnnnnnnnnnaaataccacaacttagtgagtgtaaatgacaatttggtggttttatgtctttagaaatgttttgcctttctaagccttgtgctaaaggcgtttaacgttggtgcctatctacttagggggcattctagtcttcaaagttgtctgaactgtcccgccctggcgttttttgatttggggtaaacctaagggtgtttgttagtctcaaaactgtgaagtgacatgtcagaacagtccagactggtaagaaaattaatggcttcccttgaatttaaaccagctttagataggaaaaaaaccagtctcctcatttgcttttttcatggagtagtacatcccatatttttagaacaagtanggggtgcctttgctttaaataatagcattttaaggtataattgtggtgaaag

SEQ ID NO: 19295 - DNA, 623 bp, Macaca Mulatta
cagggctggagcagccagaggtggaggccacaaagcaggccctgaccagctgtggctttgactgctgggaaaccagcatcggtgcccccggtgtctccatccactcagccacctccctggacagccgagtccagcaagccctggatggcctctgagaggagcccacgacactgcagccgcacccagatgcccctttctgggttattctgggggctgcaatttgcccctgtgctgcccagcgggcgcccagctcctgacactgctggagaggccccagccgcttggcgatgccggccgagctctgcacagtcccagcggtgggacatacggaggcatggtctgcgctatgcatcctctgaagccagcagagcaggaggcctaggagggtcctctgaggctccagacctgagacagacgggctgctttcccgaagctcccacagtcccatctgcttcaggccccggccttggcctgtgttctccctggccacctgggtcggatgctcagatgctggggcccggttcccggagaaatgtgccttctatctccctctgcagggaccgcccctgtctctcagagccaggtctctccctcctcctccaggaagccttcccctacccctt

SEQ ID NO: 19296 - DNA, 963 bp, Macaca Mulatta
  misc_feature (1)...(963): n = A,T,C or G
tgacgactccttttcagatatggactgccatccaaaccagagaagacacagcgtgtaaatttcgagtttcgcctcagccaactaatctcgcatccccaaacacaaagcgttttaaaaaagaagaaattctttccaattctgacattcgtcaaaagttagtaaatactcagaacgtgtcagcctctcaggttgatgtagctgttaaaattaataagaaggttgtagccctggacttttctatgagttctttagctaaacgaataaagcagttacatcgtgaaacacagcaaagtgaaggtgaacagaattataggaagtttagggcaaagatttgccctggagaaaatcaagcagctgaagatgaactaaggaaagagataagnnnnnnnnnnnnnnnnnnnnnnnnnnnnnnnnnnnnnnnnnnnnnnnnnnnnnnnnnnnnnnnnnnnnnnnnnnnnnnnnnnnnnnnnnnnnnnnnnnnnnnnnnnnnnnnnnnnnnnnnnnnnnnnnnnnnnnnnnnnnnnnnnnnnnnnnnnnnnnnnnnnnnnnnnnnnnnnnnnnnnnnnnnnnnnnnnnnnnnnnnnnnnnnnnnnnnnnnnnnnnnnnnnnnnnnnnnnnnnnnnnnnnnnnnnnnnnnnnnnnnnnnnnnngctccagtgactgaaagggctaaattgatttccttgccaactagtaaaaactggaccttcggaccccaggacatcgatgaactgatctttttgctaagcgacagccctggggtcatgtgccggccgtcccgagtcaagcagatgtttgcctccagagcctgtcggaagtcggtgnnnngtgatgattggaactgctcttaacacaagcgagataaagaaactgatcacccacatggaccacccctgaaactgtccccatggaaggccaaccatgagacacgtagccaacctgggtgtcatttcgcagaactga

SEQ ID NO: 19297 - DNA, 276 bp, Macaca Mulatta
gtccccacctgagcccagcactgccctgcaggtcaccttccgggtgaaggtcacggccacatattgtatccaggagcagtcgtttgtcatccgggcactgggcttcacggacacagtgaccgtacgggtccttccccagtgtgagtgccggtgccgggaccagagcagagaccgcagcttctgccatggcaagggcttcttggagagtggcatctgcagatgaggcgggcacaggtccccgtgaagcctcccccagccccaccccacagggcagga

SEQ ID NO: 19298 - DNA, 789 bp, Macaca Mulatta
  misc_feature (1)...(789): n = A,T,C or G
ggcgaggtggcggcnnnnnnnnnnnnnnnnnnnnnnnnnnnnnnnnnnnnnnnnnngcgtatacccgggaggcgnnnnnnnnnnnnnnnnnnnnnncgnnnnnnnnnnnnnnnnnnnncccnnnnnnnnnnnnnnnnnnnnnnnnnnnnnnnnnnnnnnnnnttcttaagttaagattctgaaaataaatttagaatattctcctttaagaacatgagatacagaaacatctgaacttacaaaataagtttttgagagtcaaaaatatatataacacatttgaatagttaaagctttcttagagaacgcagtacataagagaaaattaataattatttttctagttagcttataattgcatgtgcaactactttataatcatacatgttaaaaggtttcatatatattatttattttcacaataatttcataaggacaatattagcatctgtgtcatatagatgaagacacgattgcacaccatagaatactatgcagccatgaaaaaggatgaattcatgtcttgacaggcacatggatgaaactggaaaccattattctcaacaaagtaatacaagaaagagaaaaccaaaacactgccatgtttctcacctcgtaaagtggggaggtttgaacaaatggagaaacacactgggaacaacagggggaggggggaagcaatccccaattactttggggtccccttgttccggcccagggtggggaagggaacttgggggggggaagggggaaataagccaccnnnnnnnnnnnnnnnnnnnnncccca

SEQ ID NO: 19299 - DNA, 601 bp, Macaca Mulatta
agaagtactgagcttcctcttcagtctgctctcaggagacctggctgtgaggccctcagggcagggacacaaagcagggagagggcacacaataggtatctaataaatacttaagaggtggaatttgtggaaactgtgttattctttgtggtatagactgcctgtttagtacgaaggggtgacccatgcacatctaggcgaaagtggagcctgggtgggtgggagacaactcctgggcacacagggcatcctgggcatccctgatcaagggcatgatgagttcagtgaccacccccacaggatcccaggggcttcagcagcatcccaccccttaccccatgtgagcagctgcccagtgagtttgtaggaaccccagccatattcccagtgagttcaactgcaccccagcacgttttgctgtcacctcaatggagagctccttgcttgtcagctttggcttgtggcacccagcaaaagcttcctgccactcagtggctacagccacacactctccagcaagatttaatctcagccttgtgaggagccctttccccaaatgtatttctatgttctttaacccttagtaggtaatctcatgtta

SEQ ID NO: 19300 - DNA, 102 bp, Macaca Mulatta
aggcagagaaggtgctgcagtttgacccagggaccaagaacgtgacagccctgctgatggaggcaaaagagctggaggcccgggtcatcatcctttctgcca

SEQ ID NO: 19301 - DNA, 154 bp, Macaca Mulatta
agaaaagaacgtcctatatcattaggaattttcccattacctgctggagatggattgcttacacctgatgctcagaaaggaggagagacccctggatctgagcaatggaaatttcaggaattaagtcaaccacgttctcataccagcctgaagg

SEQ ID NO: 19302 - DNA, 103 bp, Macaca Mulatta
aggtcacatccggctcacatattttggccagtggtcagaggtggagccccagtgctgcggggaggccgtggacaatctctacagcgccccaggcaagaagggg

SEQ ID NO: 19303 - DNA, 1765 bp, Macaca Mulatta
  misc_feature (1)...(1765): n = A,T,C or G
agaagaggcagtaagaagggttcaatagacgttgagaagatcacttgcgttgaaacagtggttcctgnnnnnnnnnnnnnnnnnnnnnnnnnnnnnnnnnnnnnnnnnnnnnnnnnnnnnnnnnnnnnnnnnnnnnnnnnnnnnnnnnnnnnnnnnnnnnnnnnnnnnnnnnnnnnnnnnnnnnnnnnnnnnnnnnnnnnnnnnnnnnnnnnnnnnnnnnnnnnnnnnnnnnnnnnnnnnnnnnnnnnnngtaatccggtacaacagtgatctggttcagaaataccacccttgcttctggatcgatgggcagtatctctgctgctctcagacagccaaaaatgctatgggctgccaaattttggaaaacaggaatggaannnnnnnnnnnnnnnnnnnnnnnnnnnnnnnnnnnnnnnnnnnnnnnnnnnnnnnnnnnnnnnnnnnnnnnnnnnnnnnnnnnnnnnnnnnnnnnnnnnnnnnnnnnnnnnnnnnnnnnnnnnnnnnnnnnnnnnnnnnnnnnnnnnnnnnnnnnnnnnnnnnnnnnnnnnnnnnnnnnnnnnnnnnnnnnnnnnnnnnnnnnnnnnnnnnnnnnnnnnnnnnnnnnnnnnnnnnnnnnnnnnnnnnnnnnnnnnnnnnnnnnnnnnnnnnnnnnnnnnnnnnnnnnnnnnnnnnnnnnnnnnnnnnnnnnnnnnnnnnnnnnnnnnnnnnnnnnnnnnnnnnnnnnnnnnnnnnnnnnnnnnnnnnnnnnnnnnnnnnnnnnnnnnnnnnnnnnnnnnnnnnnnnnnnnnnnnnnnnnnnnnnnnnnnnnnnnnnnnnnnnnnnnnnnnnnnnnnnnnnnnnnnnnnnnnnnnnnnnnnnnnnnnnnnnnnnnnnnnnnnnnnnnnnnnnnnnnnnnnnnnnnnnnnnnnnnnnnnnnnnnnnnnnnnnnnnnnnnnnnnnnnnnnnnnnnnnnnnnnnnnnnnnnnnnnnnnnnnnnnnnnnnnnnnnnnnnnnnnnnnnnnnnnnnnnnnnnnnnnnnnnnnnnnnnnnnnnnnnnnnnnnnnnnnnnnnnnnnnnnnnnnnnnnnnnnnnnnnnnnnnnnnnnnnnnnnnnnnnnnnnnnnnnnnnnnnnnnnnnnnnnnnnnnnnnnnnnnnnnnnnnnnnnnnnnnnnnnnnnnnnnnnnnnnnnnnnnnnnnnnnnnnnnnnnnnnnnnnnnnnnnnnnnnnnnnnnnnnnnnnnnnnnnnnnnnnnnnnnnnnnnnnnnnnnnnnnnnnnnnnnnnnnnnnnnnnnnnnnnnnnnnnnnnnnnnnnnnnnnnnnnnnnnnnnnnnnnnnnnnnnnnnnnnnnnnnnnnnnnnnnnnnnnnnnnnnnnnnnnnnnnnnnnnnnnnnnnnnnnnnnnnnnnnnnnnnnnnnnnnnnnnnnnnnnnnnnnnnnnnnnnnnnnnnnnnnnnnnnnnnnnnnnnnnnnnnnnnnnnnnnnnnnnnnnnnnnnnnnnnnnnnnnncaggtatgtcctggatgatgaatacaccagctcagtaggctccaaatttccagtccggtggtccccaccggaagtcctgaagtatagcaagttcagcagcaaatctgacatttgggcttttgnnnnnngatgtgggaaatttactccctggggaagatgccatatgagagatttactaacagtgagactgctgaacacattgcccaaggcctacgtctctacaggcctcatctggcttcagagaaggtatataccatcatgtacagttgttggcatga

SEQ ID NO: 19304 - DNA, 139 bp, Macaca Mulatta
aggtatatttgccctgtgttttacaaacaaaaaagaggtatgtgggttacatgtatgaaacactggatcagaaggacccggtatttgatgcaaaaggaatagaaacagtcagaagagattcctgccctgctgtttctaa

SEQ ID NO: 19305 - DNA, 841 bp, Macaca Mulatta
  misc_feature (1)...(841): n = A,T,C or G
agtgaagacatgacctcaatatttactgagttcagcagaatggagatacaagnnnnnnnnnnnnnnnnnnnnnnnnnnnnnnnnnnnnnnnnnnnnnnnnnnnnnnnnnnnnnnnnnnnnnnnnnnnnnnnnnnnnnnnnnnnnnnnnnnnnnnnnnnnnnnnnnnnnnnnnnnnnnnnnnnnnnnnnnnnnnnnnnnnnnnnnnnnnnnnnnnnnnnnnnnnnnnnnnnnnnnnnnnnnnnnnnnnnnnnnnnnnnnnnnnnnnnnnnnnnnnnnnnnnnnnnnnnnnnnnnnnnnnnnnnnnnnnnnnnnnnnnnnnnnnnnnnnnnnnnnnnnnnnnnnnnnnnnnnnnnnnnnnnnnnnnnnnnnnnnnnnnnnnnnnnnnnnnnnnnnnnnnnnnnnnnnnnnnnnnnnnnnnnnnnnnnnnnnnnnnnnnnnnnnnnnnnnnnnnnnnnnnnnnnnnnnnnnnnnnnnnnnnnnnnnnnnnnnnnnnnnnnnnnnnnnnnnnnnnnnnnnnnnnnnnnnnnnnnnnnnnnnnnnnnnnnnnnnnnnnnnnnnnnnnnnnnnnnnnnngtgtctttttcagtgtcttataagcatagatgatagttgactgagtttctttagggaattgaatagacaagtaaagttaatgaatttaagagccntgaaaagtgattgttttccagttatttctggaaaaggtctcattatatattgggtgctaaatgtttgatggggaaagcctgcatatattatcgtactggtgaaatgcattcaaaataattaanatgcatgtattttccttctaaacactgtgagctctcttagatatcttgtg

SEQ ID NO: 19306 - DNA, 131 bp, Macaca Mulatta
  misc_feature (1)...(131): n = A,T,C or G
cagctgctgttgcacccaaggatatgattttctatggcttcctgaagccctggctgggnggggatgggctcctgctgagtggtggtgacaagtggagccgccaccgtcgcatgctgactcctgccttccat

SEQ ID NO: 19307 - DNA, 2126 bp, Macaca Mulatta
  misc_feature (1)...(2126): n = A,T,C or G
gcagctcccccgaaggctgtgctgaaactcgagcccccgtggatcaacgtgctccgggaggactctgtgactctgacgtgtgggggcgctcacagccctgacagcgactccacccagtggttccacaatgggaatctcatccccacccacacgcagcccagctacatgttcaaggccaacaacaatgatagcggggagtacaggtgccagactggccggaccagcctcagcgaccctgttcatctgactgtgctttnnnnnnnnnnnnnnnnnnnnnnnnnnnnnnnnnnnnnnnnnnnnnnnnnnnnnnnnnnnnnnnnnnnnnnnnnnnnnnnnnnnnnnnnnnnnnnnnnnnnnnnnnnnnnnnnnnnnnnnnnnnnnnnnnnnnnnnnnnnnnnnnnnnnnnnnnnnnnnnnnnnnnnnnnnnnnnnnnnnnnnnnnnnnnnnnnnnnnnnnnnnnnnnnnnnnnnnnnnnnnnnnnnnnnnnnnnnnnnnnnnnnnnnnnnnnnnnnnnnnnnnnnnnnnnnnnnnnnnnnnnnnnnnnnnnnnnnnnnnnnnnnnnnnnnnnnnnnnnnnnnnnnnnnnnnnnnnnnnnnnnnnnnnnnnnnnnnnnnnnnnnnnnnnnnnnnnnnnnnnnnnnnnnnnnnnnnnnnnnnnnnnnnnnnnnnnnnnagccacttggacgtcaaacgattgccctcagaaagagacaacttgaagaaaccaacaatgactatgaaacagccgacggcggctacatgactctgaaccccagggcacctactgatgatagaaacatctacatgactctttctcccaacgactatgacaacagtaataactaagagtaaagttatgccatgtggtcacactctcagcttgctgagtggatgacaaaaagaggggaattgttaaaggaaaatttaaatggagactggaaaaattcctgagcaaacaaaaccacctggcccttagaaatagctttaactttgcttaaactagaaacataagcaaaacttcactggggtcacactacaagcataagcaaaacttaacttggatcatttctggtaaatgcttatgttagaaataagacaaccccagccaatcataagcagcctactaacatataactatctgtctagggactttctaacaagatactcacccccaaaaacaattatgtaattgaaaaccaatcaaatgtctttattttgcttccacatttccccaataaatacttgcctgtgacattttgccactggaacagtaaacttcacgaattgnnnnnnnnnnnnnnnnnnnnnnnnnnnnnnnnnnnnnnnnnnnnnnnnnnnnnnnnnnnnnnnnnnnnnnnnnnnnnnnnnnnnnnnnnnnnnnnnnnnnnnnnnnnnnnnnnnnnnnnnnnnnnnnnnnnnnnnnnnnnnnnnnnnnnnnnnnnnnnnnnnnnnnnnnnnnnnnnnnnnnnnnnnnnnnnnnnnnnnnnnnnnnnnnnnnnnnnnnnnnnnnnnnnnnnnnnnnnnnnnnnnnnnnnnnnnnnnnnnnnnnnnnnatccgcccgtctcggcctcccaaagtgctaggatnnnnnnnnnnnnnnnnnnnnnnnncctctttaacatcgtctttcctatgccctttctgtggatccctactgctggtttctgccttcttcattgctgagagtaaaaccacctattcactgcttttgcagtcggaagctccagaaaaacaaacagcccaattaccagcaccacattaggtctctattgttttgccttgggatttgagaagagaattagagaggcgaggatctggtatttcctggactaaattccccttgaggaagatgaagggatgctgcagttccaaaagagaaggactcttccagagtcactacctgagtcccgaagctccctgtcctgaaagccacagacaatatggtcccaaatgactgactgcaccttctgtgcctcagcccttcttgacatcaagaatcttctgttccacatccacacagccaatacaattaatcaaaccactgttattaacagatgtagcaacatgagaaatgcttatgttacaggttacatgagaacaatcatgtaagtctatatgatttcaga

SEQ ID NO: 19308 - DNA, 260 bp, Macaca Mulatta
  misc_feature (1)...(260): n = A,T,C or G
tggtggctgtgggcaccccagactacctgtcccccgagatcctgcaggctgtgggcggtgggcctgggacaggcagctacgggccagagtgtgactggtgggcgctgggtgtgttcgcctatgaaatgttctacgggcagacgcccttctacgcggattccacggcggagacctacggcaagatcgtccactacaagnnnnnnnnnnnnngccgctggcagatgaaggggtccctgaggaggctcaagacctcatccagc

SEQ ID NO: 19309 - DNA, 1026 bp, Macaca Mulatta
gggggtcattttttcccttttagaatacattaaatggttgatttggggaggaaaacttagtctgaatattaacagcggtgaaaagggaacagtttttaccctaaagtgcaaaagtgaaacatacaaaataagactgatttttaagagtaactcagtaatttcaaaatacagatttgaatggcggcattagtggtttaagtgtctagcagaggaaaaattgaatctgataaaatgaagatctggtgtatatgttttaaaatactctgatatagtcacaccttaatcttatattaggcccctctattttcaggatataattcttaactatcattatttacctgattttaatcatcagatttgaagttctttgccatgtcatatatgttcaaattcaaaccattttaaaatgtgacaggtggacttcatgcaagttggcaatagttctggtactaaaaattgtggttgtttttttctgtttacgtaacctgcttagtattgacactctctaccaagagggtcttcctaagaagagtgctgtcattatttcctcttgtcaacaacttgtgacacgagatttttttaagggctttatgtgaactatgatattgtaatttttctgagcatattcaaaagggtaacaaaattatgtttatgtactaaatctaatcaggaaagtaagccaggaaaagttgatggtattcattaggttttaactgaatggagcagttccttatgtaataacaattgcatagtagggataaaacactaacttaaggtgtaatcattttaaattgttccgtattttttaattgccaagaaaaataaccacctttgtaaatttgggaaattttttccaaaacttttccgccttcagtggcttaaaggggaaattaacccttttcccaaaaaaaggaatttgggaaaaaacagccttttagcacaccttttttttttaaggaaaaaaggggaagccctcaacctaaaaatttttttataaaggaatgggaacaattggttttgtgggaa

SEQ ID NO: 19310 - DNA, 740 bp, Macaca Mulatta
ggtgacttcagcgccagtcaccgcattctaccgtggctgcatgacactggaggtcaaccggaggctgctggacctggacgaggcggcatacaagcacagtgacatcaccgcccactcctgcccacccgtggagcccgccgcagcctaggcccccatgggacgcagcaggctcctcagcctctgtccgaaacagcggaggagcacgggggctcctcaccacgtggggccacctgagagctgggctttcctctgtgaccgtcctggcctgtaacatatctgtaaatagtgagatggacgtggggcctctgatgccgcgcactcagccgcaggcccgggtacggggaggccggcgcagggcagagcgggttcgaagaaaataattctctattatttttattaccaagcgcttctttctgactctaaaatatggaaaataaaatatttacagaaagctttgtaacactgcgttggccgccatctgctccccgcggggttctcggcacctggcagcgtttgggatgagcggggctgccagggctccaggctgtacgctcagccgctccaaagatctcgcttttctgctcccagcctggttgggtggccacggtctgctccccgggagcctctgacgctggtagtgagggcaggggctggagcctcagtttacttgttctgcaaatggggagaaagccccgctcggcccccaccacgggcagccagtcagtgccgagtgaggaggg

SEQ ID NO: 19311 - DNA, 2132 bp, Macaca Mulatta
acccgccgctccttgggctacgcgtatgtgaacttccagcagccggcggacgcggagcgtgctttggacaccatgaattttgatgttataaagggcaaaccagtacgcatcatgtggtctcagcgtgatccatcacttcgcaaaagtggagtaggcaacatattcattaaaaatctggacaaatccattgataataaagcactgtatgatacattttctgcttttggtaacatcctttcatgtaaggtggtttgtgatgaaaatggttccaagggctatggatttgtacactttgagacgcaggaagcagctgaacgagctattgaaaaaatgaatggaatgctcctaaatgatcgcaaagtatttgttggacgatttaagtctcgtaaagaacgagaagctgaacttggagctagggcaaaagaattcaccaatgtttacatcaagaattttggagaagacatggatgatgagcgccttaaggatctctttggcaagtttgggcctgccttaagtgtgaaagtaatgactgatgaaagtggaaaatccaaaggatttggatttgtaagctttgaaaggcatgaagatgcacagaaagctgtggatgagatgaatggaaaggagctcaatggaaaacaaatttacgttggtcgagctcagaaaaaggtggaacggcagacggaacttaagcgcaaatttgaacagatgaagcaagataggatcaccagataccagggtgttaatctttatgtgaaaaatcttgatgatggtattgatgatgaacgtctccggaaagagttttctccatttggtacaatcactagtgcaaaggttatgatggagggtggtcgcagcaaagggtttggttttgtatgtttctcctccccagaagaagccactaaagcagttacagaaatgaacggtagaattgtggccacaaagccattgtatgtagctttagctcagcgcaaagaagagcgccaggctcacctcactaaccagtatatgcagagaatggcaagtgtacgagctgtgcccaaccctgtaatcaacccctaccagccagcacctccttcaggttacttcatggcagctatcccacagactcagaaccgtgctgcatactatcctcctagccaaattgctcaactaagaccaagtcctcgctggactgctcagggtgccagacctcatccattccaaaatatgcccggtgctatccgcccagctgctcctagaccaccatttagtactatgagaccagcttcttcacaggttccacgagtcatgtcaacacagcgtgttgctaacacatcaacacagacaatgggtccacgtcctgcagctgcagctgctgcagctactcctgctgtccgcaccgttccacagtataaatatgctgcaggagttcgcaatcctcagcaacatcttaatgcacagccacaagttacaatgcaacagcctgctgttcatgtacaaggtcaggaacctttgactgcttccatgttggcatctgcccctcctcaagagcaaaagcaaatgttgggtgaacggctgtttcctcttattcaagccatgcaccctactcttgctggtaaaatcactggcatgttgttggagattgataattcagaacttcttcatatgctcgagtctcctgagtcactccgttctaaggttgatgaagctgtagctgtactaaaaggccaccaagctaaagaggctggccagaaagcagttaacagggccacggtgttccacctgttcacatttgatcccgcacacccaaagaactgttgtttccgcagaaaattctcactcgaaacttcatcttggacacacctgcccctcactacacaagcgagacatgacctttccagcagccgttcaacatgcgcccattgttacaaaatcgggcgccaccgtgtaacgtctgcgcaactactaccaaaggtgacaactgcactggaactgtctgtccccgggcccaccacaaaaacaacacagacaccaacacaacgaagcgacagacaaaccaagcaaaaaaagaaaaaacgacaaccaaccaacacacacaacagaacgacagcgaacaaaagcaaccaaacaagaaagaaagaacaaaaccaaac

SEQ ID NO: 19312 - DNA, 673 bp, Macaca Mulatta
ctgctgcagcgctttaacttctcggtgcccgccggacagccccggcctagcccctatgatgtctttgctttcctggtgaccccttccccctacgagctttgtgctgtgccccgctagaatggggtacctagtccccagcctgctccctagccaggggccctgatgtacaataaagcaatgtggtagttccaacttgggtcccctgcccaggccctggttgggaacgtcctccccagggcagtcccacccctgcctcattcctgcttaccccaccacctggccgcgtttgagacaggtatgttgaggttgagcagatgtcagctagccttgcccataatcccatgtcctcactgacccaactctgcccagattggtgacaagaactacattgttctggcatctgggggaaggagccagaatgggctgactagaggtgtcagccctgagtgtggtggagagggcaggactcagcctggaggcccacatttcaggcctaactcagcccaccccccatcaggggcagcggtcccgccagcaccatcacaacagttacctcctttcgtatgtgacactccaaaaaggaagacaaatcatagcatcagggactatatgccagggctacctcccagacctcagtcagcaggtgccagaacgttccctgggaaggccccaa

SEQ ID NO: 19313 - DNA, 727 bp, Macaca Mulatta
cgtttttgtttttcttggcaagttttattgtgagtttttctaattatgaagcaaaatttcttttctccaccatgctttatgtgatagtatttaaaattgatgtgagttattatgtcaaaaaaactgatctattaaagaagtaattggcctttctgagctgatttttccatcttttgtaattatctttattaaaaaattgtacttggattgtcttttgtctgtttattactacaatatgaaatcttgtttcaatggctaatgacatcatttctttagacttacaatacactctagatgaaagataataattacagctcgaaagatatcttatttgctgtttctttgggaagagtatttatagtaattattatttatttttgcaatagaaattctaccaccttgccctctataacttagccagttagtatcagtgaagattaacatcccattacaatttatgaaataataatacagactctacaattgagatgtaggagttctttgagctgacccaaagatcctcaaaaattgaaatggaaattctgaattgaaagaagaaacggaccagaacttgtgttgaccatacttgcctgtttagtatgttgctgggttataatggaacctgctattcagacaaaacctgtttcttttactgcatttacatggcatccagattccgttattagttacatgacatccaggtttctaagtcaaggaagtaaacaca

SEQ ID NO: 19314 - DNA, 2185 bp, Macaca Mulatta
  misc_feature (1)...(2185): n = A,T,C or G
agcggagtccgaaacaggcctaccagtnnnnnnnnnnnnnnnnnnnnnnnnnnnnnnnnnnnnnnnnnnnnnnnnnnnnnnnnnnnnnnnnnnnnnnnnnnnnnnnnnnnnnnnnnnnnnnnnnnnnnnnnnnnnnnnnnnnnnnnnnnnnnnnnnnnnnnnnnnnnnnnnnnnnnnnnnnnnnnnnnnnnnnnnnnnnnnnnnnnnnnnnnnnnnnnnnnnnnnnnnnnnnnnnnnnnnnnnnnnnnnnnnnnnnnnnnnnnnnnnnnnnnnnnnnnnnnnnnnnnnnnnnnnnnnnnnnnnnnnnnnnnnnnnnnnnnnnnnnnnnnnnnnnnnnnnnnnnnnnnnnnnnnnnnnnnnnnnnnnnnnnnnnnnnnnnnnnnnnnnnnnnnnnnnnnnnnnnnnnnnnnnnnnnnnnnnnnnnnnnnnnnnnnnnnnnnnnnnnnnnnnnnnnnnnnnnnnnnnnnnnnnnnnnnnnnnnnnnnnnnnnnnnnnnnnnnnnnnnnnnnnnnnnnnnnnnnnnnnnnnnnnnnnnnnnnnnnnnnnnnnnnnnnnnnnnnnnnnnnnnnnnnnnnnnnnnnnnnnnnnnnnnnnnnnnnnnnnnnnnnnnnnnnnnnnnnnnnnnnnnnnnnnnnnnnnnnnnnnnnnnnnnnnnnnnnnnnnnnnnnnnnnnnnnnnnnnnnnnnnnnnnnnnnnnnnnnnnnnnnnnnnnnnnnnnnnnnnnnnnnnnnnnnnnnnnnnnnnnnnnnnnnnnnnnnnnnnnnnnnnnnnnnnnnnnnnnnnnnnnnnnnnnnnnnnnnnnnnnnnnnnnnnnnnnnnnnnnnnnnnnnnnnnnnnnnnnnnnnnnnnnnnnnnnnnnnnnnnnnnnnnnnnnnnnnnnnnnnnnnnnnnnnnnnnnnnnnnnnnnnnnnnnnnnnnnnnnnnnnnnnnnnnnnnnnnnnnnnnnnnnnnnnnnnnnnnnnnnnnnnnnnnnaggttgtctttcttctggggaattggaatgaatttctatatggaaatagcaaagatgagagctggtagaagactctgggctcacttaatagagaaaatgtttcagcctaaaagttcaaaatctcttcttctaagagcacattgtcagacatcgggatggtcacttactgagcagnnnnnnnnntaatattgtccgtactgcaatagaagcaatggcagccttatatggagggactcagtctttgcacacaaattcttttgatgaagctttgggtttgccaactgtgaaaagtgctcgaattgccaggaacacacaaattatcattcaagaagaatctggaattcccaaagtggctgatccttggggaggttcctacatgatggaatctctcacaaatgatgtttacgatgctgctttaaagnnnnnnnnnnnnnnnnnnnnnnnnnnnnnnnnnnnnnnnnnnnnnnnnnnnnnnnnnnnnnnnnnnnnnnnnnnnnnnnnnnnnnnnnnnnnnnnnnnnnnnnnnnnnnnnggttctgaagtcatcgttggagtaaataagtaccagttggaaaaagaagacgccgtagaagttctggcaattgataatacttcagtgcgaaacaggcagattgagaaacttcagaannnnnnnnnnnnnnnnnnnnnnnnnnnnnnnnnnnnnnnnnnnnnnnnnnnnnnnnnnnnnnnnnnnnnnnnnnnnnnnnnnnnnnnnnnnnnnnnnnnnnnnnnnnnnnnnnnnnnnnnnnnnnnnnnnnnnnnnnnnnnnnnnnnnnnnnnnnnnnnnnnnnnnnnnnnnnnnnnnnnnnnnnnnnnnnnnnnnnnnnnnnnnnnnnnnnnnnnnnnnnnnnnnnnnnnnnnnnnnnnnnnnnnnnnnnnnnnnnnnnnnnnnnnnnnnnnnnnnnnnnnnnnnnnnnnnnnnnnnnnnnnnnnnnnnnnnnnnnnnnnnnnnnnnnnnnnnnnnnnnnnnnnnnnnnnnnnnnnnnnnnnnnnnnnnnnnnnnnnnnnnnnnnnnnnnnnnagactcctcgtgaagtggcccagcaggccgtggatgcagatgtgcatgctgtgggcgtaagcacccttgctgctggtcataaaaccctagttcctgaactcatcaaagaacttaactcccttggacggccagatattcttgtcatgtgtggaggggtgataccgcctcag

SEQ ID NO: 19315 - DNA, 204 bp, Macaca Mulatta
  misc_feature (1)...(204): n = A,T,C or G
atgaaggaaaatgtgatatctgcaactgttttcactctgctactttttctcaacacctgccttctgaatgnggacagttacctcctggaaaacctgagatctttaaatgtcgttctcccaataaggaaacattcacctgctggtggaggcctgggacagatggaggacttcctaccaattattcgctgacttaccacagggaag

SEQ ID NO: 19316 - DNA, 841 bp, Macaca Mulatta
ggcgttctggttggcaagccctgctgatcatagaaagtctctgcatgttctagtgttactaactaatttttatatagctaatgtaggataaagtacagtgcattaagacacaatattgtaatccctactctaggcacttgcctttacactatgtttttcaacccttcagaagggttctactactgtcctatacaatcaagtgactgaaattcttgggaagacactttgctcctcgtctttccccccgaaacaatgatgtcttgattggttttttttccttaatttgcacgaagactaaaattccgtatcaatgtgccttgccctggatagcgattatttgaggaattgttgcacatgctcctcgattgaactggggtcttccctagtcacgcatttggagacacttgttgtacatgcgactattatgtcatccatcgcctgtttcaacatctagaactaaatagaaagctagttgttccacaaatatgagtaggctttactgtcctgtaccgtcggtggcaatgctagtctgatatctgcccatgcgtatgatatcggaaatatggatgttgctggagttttcaattttttttggagacctcccttactttcccccccaatggttgagaattgggaataccacgttaatattatggacaaaagcttagcccataataaaagttttcctttcccgcattgtgcaacattcggaccaaaagcccggcggcttccacctttggcggccgcggtggtctttcaggcgcccttgtccatcgtgcacgtgtatttggacgattttttggacaggccccctttccccccaggcaaagcggcttccccc

SEQ ID NO: 19317 - DNA, 1059 bp, Macaca Mulatta
gggggggtgtcatggctgccccgagagtctaggtaagagtttgttcccgtggtgcggagggtcaaggcccacacccggagacctagcgaggtaaagttgcgtcttggttgtagagacgacaacttctccgctttctctgcaatggcggcgtccgggagcggtatggctcagaaaacctgggaattggccaacaatatgcaggaagctcagagtatcgatgaaatctacaaatacgacaagaaacagcagcaagaaatcctggcggcgaagccctggactaaggatcaccattactttaagtactgcaaaatctcggcattggctctactgaagatggtgatgcatgccagatcaggaggcaacttggaagtgatgggtctgatgctaggaaaggtggatggtgaaaccatgatcattatggacagctttgctttgcctgtggagggcactgaaactcgagtaaatgctcaggctgctgcatatgaatacatggctgcatacatagaaaatgccaaacaggttggccgccttgaaaatgcaatcgggtggtatcatagccatcctggctatggctgctggctttctgggattgatgttagtactcagatgctcaatcagcagttccaggaaccatttgtagcagtggtgattgatccaacaagaacaatatctgcagggaaagtgaatcttggcgcctttaggacatacccaaagggctacaaacctcctgatgaaagaccttctgagtaccagactatcccacttaataaaatagaagattttggtgtacactgcaaaacatattatgccttagaagtctcatatttttaaaaccttctttggattccaaattgctcgagctgttgtggaataaaaattgggttaaaaccgttgaatttcctctagcttgcctaactaatgcagaatatacccctggttcagggcctttaatttgtcttgaaaaatttaaagcagtcaaaaaccccaccctgggaacaagggaattttcctgcctggggtttgggaaaccccctggccgaaaaatttgaaaaacaaact

SEQ ID NO: 19318 - DNA, 630 bp, Macaca Mulatta
  misc_feature (1)...(630): n = A,T,C or G
tgctgagctcgcatgtgagggggtggggtcccgtggcttccccctgncgcctccaggccactgaggtccgtatctgccctgtggagttcaaccccaacttcgtggcgcgtatgatacctaaggtggagtgggcggcgttcctggaagcggccgataatttgcgcctgatccaggtgcctaaagggccggttgagggatatgaggagaatgaagagtttctgaggactatgcaccatctgctgctggaggtggaagtgatagagggcaccctgcagtgcccggagtctggacgtatgttccccatcagccgcgggatccccaacatgctgctgagtgaagaggaaactgagagttgattgtgccaggcgccagtttttcttgttatgactaatgtttttgttgatgtataccctgtttccaaattctgccgtgtatatccccaaaccttgacccaatgacaccaaacacacagtgttcttgagctcgacattatatatttgtttctcattaaaggttcnnnnnnnnnnnnnnnnnnnnnnnnnnnnnnnnnnnnnnnnnnnnnnnnnnnnnncctatagtgaagtcgattnnnnnnnnnnnnnnnnnnnnnnnnnnnnnnnnnnnnnnnnn

SEQ ID NO: 19319 - DNA, 1597 bp, Macaca Mulatta
  misc_feature (1)...(1597): n = A,T,C or G
ccggccctctgggagaaaacccagcaagatgcaagccttcagnnnnnnnnnnnnnnnnnnnnnnnnnnnnnnnnnnnnnnnnnnnnnnnnnnnnnnnnnnnnnnnnnnnnnnnnnnnnnnnnnnnnnnnnnnnnnnnnnnnnnnnnnnnnnnnnnnnnnnnnnnnnnnnnnnnnnnnnnnnnnnnnnnnnnnnnnnnnnnnnnnnnnnnnnnnnnnnnnnnnnnnnnnnnnnnnnnnnnnnnnnnnnnnnnnnnnnnnnnnnnnnnnnnnnnnnnnnnnnnnnnnnnnnnnnnnnnnnnnnnnnnnnnnnnnnnnnngccccaccaccagtttcgagtctgccgcctgccccggctggttcctctgcacagcaatggaagcagaccagcccgtcagtctcaccaatatgcctgacaagggtgtcatggtcaccaaattctacttccaggaggatgagtagtactgcccaggcctgcctgttcccattctggcatggcaaggactgcagggactgccagtccccctgccccagggctcccgactatgggggcactgaggacaagccattgaggggtggatcctcagaaggagtcacaagaacctggtcacaggactctgcctcctcttcaactgaccagcctccatgctgcctccagaatggtctttctaatgtgtgaatcagagcacagcagcccctgcgcaaagcccttccgcgtctcctctgcattcgggatcaaaccccgaccacctgcccagcctgctctcctctccccactgcctcctccatcctcattccacgttcccatgccccagatacatcaggccccttgatgaccccccaccaagtggctcccacaccctgttttacaaacaaatgccagtccgtgaggaaggtttttaagagtttgtggagaatgaaaattaaggatttcctgatttcttttttagtccacgtgaaggagagcacttcatttggagattatgttcttttgggagaggctgggggcttaaaatagtcctgcatttgtgaaatgatggtgaaagtaaatggtagctttnnnnnnnnnnnnnnnnnnnnnnnntgatgtccccatttgtaaaaattaaaagttatggtactatgttggtcctataattttttttttccttttaaaacacttccataatctggactnnnnntccaggcactgctgcccaggctccgagctccatctccactccagattttttacagctacctgcagtactttacctcctatcagaagtttctcagctcctaaggctccgagcaaatgtggctcctgggggttccttcctcctctgctgaaggaaagaattgctccttgacattgtagagtttctggcacttggagacgtgtatgaaagatgactgtgcctcggcctgtctcccccaccaggctgggagctcttcagagcaggaaaaaagactcgtatatgnnnnnnnnnnngcagggctgagcacctagcctggctcggcaggtactcagcgaatgagtgctgtatatgttggctgcaaagatccctacttcctgtcacttcagctctgttttacaataaaatattgaaaatgcctata

SEQ ID NO: 19320 - DNA, 568 bp, Macaca Mulatta
gcctctggaccatccaggccatggatcctaatgctgcttatttgaacatgagtaaccatcaccggggcctggctgcagtcaacgctgactttgccctcagcctgtataagcgcctagtggccttgagtcccaagaagaacattttcatctcccccgtgagcatctccatggccttagctatgctgtccctgggcacttgtggtcacacacgggcccagcttctccagggcctgggtttcaacctcactgagaggtctgagactgagatccaccagggtttccagcacctccaccaactctttgcagagtcagacaccagtttagaaatgaccatgggcaatgccttatttcttgatggcagcctggagttgctggagtcattctcagcagacatcaagcactactatgagtcagaggtcttggctatgaatttccgggactgggcaacagccagcagacagatcaacagctatgtcaagagtaagacacaggggaaaattgccgacttgttgtcagggctggatagcccagccatcctcgtcctggtcaactatatcttcttcaaagg

SEQ ID NO: 19321 - DNA, 521 bp, Macaca Mulatta
gacacattgttggaagaagcagctcatgacagctccccttcctggggttcaccctcgtcctcttcctgctccccttcctggggtgtagcctaaaaggacctgatgtcctcacaccattgaaaccactagttctgtccccccaggagacctggttgtgtgtgtgtgagtggttgaccttcctccatcccctggtccttcccttcccttcccgaggcacagagagacagggcaggatccacgtgcccactgtggaggcagagaaaagagaaagtgttttatatacggtacttatttaatatccctttttaattagaaattaaaacagtttatttaattaaagagtagggttttttcagtattcttggttaatatttaatttcaactatttatgagatgtatcttttgctctctctcgctctcttatttgtaccggtttttgtatataaaattcatgtttccaatctctctctccctgatcggtgacagtcactagcttatcttgaacagatatttaattttgc

SEQ ID NO: 19322 - DNA, 795 bp, Macaca Mulatta
  misc_feature (1)...(795): n = A,T,C or G
acgcggggagcaagagtgccatggagagaccgaagcgcggcatcattcacgctagaggactggttcgggagtgcttagcagaagctgaacggaatgccagatcctagctgccttgttggttttgaaggatttccatctttttacaagatgagaagttacagttcatctcccctgttcagatgaaacccttgttttcaaaatggttacagtttgttttttcctcccatggttcacttggctctgaacctacagtctcaaagattgagaaaagattttgctgttaattaggatttgcattttaagtagttaggaactgcccaggtttttttgtttttttagcattgatttaaaagatgcacgtaaagttatcttacagcaaactgtagtttgcctccaagacaccattgtctccctttaatcttctcttttgaatgcatttgttacccacggtgttctttgttccttttcataagctaacaccgctctagggattttgtttttaatgcatattgacagcaccctttacttagtagctggctcccatttgccatacagtgtangttctgcttaatgtaacttcttttttgcttaagcatttgcatgactattagtgcttcaaagtcaatttttaaaaatgcacaagttntaaatacagaagaaagagcaacccaccaaacctaacaaggacccccgaacattttcatactaagactgtaagtagatctcanttcctcgtttnttgnaagttgataaaaacatctggnagaaaatgactaaaactggtggcatctttgt

SEQ ID NO: 19323 - DNA, 106 bp, Macaca Mulatta
caggacattaagcgaccaatagatctgtgccagaatatttactggttattatgctgggaagaccaattcgaacagcaaataacagtctgagactcctcatacctca

SEQ ID NO: 19324 - DNA, 241 bp, Macaca Mulatta
cctggtgatcagtaaccggagaaagtcggggaagtacaagaaggtggagatcaaggaactgggggagttgagaaaggaaccgagtttgtaggtacccggcggggcaggggattgggtggggtaccggatttcggtatcgtcccagacgcaagagagtcacgcttcctgattctcggcgcaaaggagccgtttatcctttcaaatgccagccttccccctcccttttgcgcacacaccaggt

SEQ ID NO: 19325 - DNA, 977 bp, Macaca Mulatta
  misc_feature (1)...(977): n = A,T,C or G
ggagaggaaacccagccttcagaaacaaaagaagtggagccagagccaactgaggacaaagatttggaagctgatgaagaggacactaggaaaaaagatgcttctgatgatctagatgacttgaacttctttaatcnnnnnnnnnnnnnnnnnnnnnctaaaaagatatttgatattgatgaagctgaagaaggtgtaaaggatcttaagattgaaagtgatgttcaagaaccaactgaaccagaggatgaccttgacattatgcttggcaatnnnnnnnnnnnnnnnnagaatgttaagttcccagatgaggatgaaatactagagaaagatgaagctctagaagatgaagacagcaaaaaagatgatggtatctcattcagtaatcagacaggccctgcttgggcaggctcagaaagagactacacatacgaggagctgctgaatcgagtattcaacatcatgagggaaaagaatccagatatggttgctggggagaaaaggaaatttgtcatgaaacctccacaggtcgtccgagtaggaaccaagaaaacttcttttgtcaactttacagatatctgtaaactattacatcgtcagcccaaacatctccttgcatttttgttggctgaattgggtacaagtggttctatagatggttataaccaacttgtaatcaaaggaaagattccaacagaaacagatagaaaatgtcttgagaagatatatcaaggaatatgtcacttgtcacacatgccgatcaccggacacaatcctacagaaggacacacgactctatttcctacagtgcgaaacttgtcattctagatgttctgttgccagcatcaaaaccggcttccaggctgtcacgggcaagcgagcacagctccgtgccaaagctaactaatttgctaatcactgattttgcaaagcgtgttgtggagatgtggctggacagggttgccatcagagtggat

SEQ ID NO: 19326 - DNA, 2327 bp, Macaca Mulatta
  misc_feature (1)...(2327): n = A,T,C or G
cgccagcaaacctccggggccaggaccggcgctcactcgaccgcgcggctcacgggtgccctgtgaccccacagcggagctcgcagcggctgccacccggccctgccagccatgaggcatgcgccttccctggtccttttcctcctggtcgccctttgcgggcgnnnnnnnnnnnnnnnnnnnnnnnnnnnnnnnnnnnnnnnnnnnnnnnnnnnnnnnnnnnnnnnnnnnnnnnnnnnnnnnnnnnnnnnnnnnnnnnnnnnnnnnnnnnnnnnnnnnnnnnnnnnnnnnnnnnnnnnnnnnnnnnnnnnnnnnnnnnnnnnnnnnnnnnnnnnnnnnnnnnnnnnnnnnnnnnnnnnnnnnnnnnnnnnnnnnnnnnnnnnnnnnnnnnnnnnnnnnnnnnnnnnnnnnnnnnnnnnnnnnnnnnnnnnnnnnnnnnnnnnnnnnnnnnnnnnnnnnnnnnnnnnnnnnnnnnnnnnnnnnnnnnnnnnnnnnnnnnnnnnnnnnnnnnnnnnnnnnnnnnnnnnnnnnnnnnnnnnnnnnnnnnnnnnnnnnnnnnnnnnnnnnnnnnnnnnnnnnnnnnnnnnnnnnnnnnnnnnnnnnnnnnnnnnnnnnnnnnnnnnnnnnnnnnnnnnnnnnnnnnnnnnnnnnnnnnnnnnnnnnnnnnnnnnnnnnnnnnnnnnnnnnnnnnnnnnnnnnnnnnnnnnnnnnnnnnnnnnnnnnnnnnnnnnnnnnnnnnnnnnnnnnnnnnnnnnnnnnnnnnnnnnnnnnnnnnnnnnnnnnnnnnnnnnnnnnnnnnnnnnnnnnnnnnnnnnnnnnnnnnnnnnnnnnnnnnnnnnnnnnnnnnnnnnnnnnnnnnnnnnnnnnnnnnnnnnnnnnnnnnnnnnnnnnnnnnnnnnnnnnnnnnnnnnnnnnnnnnnnnnnnnnnnnnnnnnnnnnnnnnnnnnnnnnnnnnnnnnnnnnnnnnnnnnnnnnnnnnnnnnnnnnnnnnnnnnnnnnnnnnnnnnnnnnnnnnnnnnnnnnnnnnnnnnnnnnnnnnnnnnnnnnnnnnnnnnnnnnnnnnnnnnnnnnnnnnnnnnnnnnnnnnnnnnnnnnnnnnnnnnnnnnnnnnnnnnnnnnnnnnnnnnnnnnnnnnnnnnnnnnnnnnnnnnnnnnnnnnnnnnnnnnnnnnnnnnnnnnnnnnnnnnnnnnnnnnnnnnnnnnnnnnnnnnnnnnnnnnnnnnnnnnnnnnnnnnnnnnnnnnnnnnnnnnnnnnnnnnnnnnnnnnnnnnnnnnnnnnnnnnnnnnnnnnnnnnnnnnnnnnnnnnnnnnnnnnnnnnnnnnnnnnnnnnnnnnnnnnnnnatttctggctgcggtcctctgggaggttccacaggacgtgcaggaggcattagaaggtgtcagcttcatcgcccagcacatgaagaatgacgatgaagaccagagtgtngtcgttgaagactggaagtacgtggctatggtggtagaccggctgttcctgtgggtgttcgtgtttgtgtgcgtactgggcactgttgggctcttcctaccgcccctcttccagacccacacggcttcggaagggccctacgctgcccagcgtgactgagggcccccgggttgtggggtgagaggatgtgagtggccgggtgagcagtttgctgcttccttctgggttgtggctgatgaggccctaaataaatttgaccactggccatcaaccccatcaaaccagccacagccatggaagaggcaaggatgggggcctggactgtcctctctgaatgccttggagggatcccaggaagccccagcaggagggagcttcagacagttcaattctggcccgtcttccttccctgcaccgggcaatggggataaagatgatatcatagcagcacctactatgcgtcagccatggtgccggcctgcctctccatcgccatctccctccacttccccttgtccagtccctcacacacttctagtttcttcccagctcagaggcttggcatttgccatatcatcnnnnnnnnnnnnnnnnnnnnnnnnnnnnnnnnnnnnnnnncccaggttcaagtgaattctccctgcctcagcctcccaagtagcttgggattacagggaagctaccaccacgccccagctaatttttgtatttttgttgcccaggctgggttcgaacttctgacctcaaatgatccacctggcctcggcctcccaaagtgctaggattacaagtgtgagccactatgcctgggccttccctttcttctacttgaaaccttctttcctcctcccccaggctttcccaagctctttccac

SEQ ID NO: 19327 - DNA, 824 bp, Macaca Mulatta
  misc_feature (1)...(824): n = A,T,C or G
ggcctgcctgggccgcaggattgcagagctggagatgcagctactcctggcaaggctgatccagaagtacaaggtggtcctggccccagagacgggggagttgaagagtgtggcccgcattgtcctggttcccaataagaaagtgggcctgcagttcctgcagagacagtgctgagctgagtccccaccttgctggggcttgtcctagaggctccagccctggcatagtggttcctggctgccgcctgtctcagatgaggagggagagaaggaggccgccagacttgagaggtgggaggaactccctgcacttcccacagaccctgagcttttgccacttctatcatttttgagcaactccctctcagataaaaggccaccgctttatcgcattgctgtccttgggtagaatataaaataaagggacttttatttcttnnnnnnaannnnannnnnnnnnnnnnnnnnnnnnnnnnnnnnnnnnnnnnnnnnnnnnnnnnnnnnnnnnnnnnnnnnnnnnnnnnnnnnnngccgcccttgggccctcaaaaaaaccttttcaaaaccttttccttttgggccgcggggccccaaaagggaaagttgaaaaagggggtaataagtggtttccctaggaaaatcccgggggaataaaatatgggcctgggaatttcccccacaataaaaaaacacccccgggggggccaacccgaaagcgtttcttaaaaaaaattctcacaatagggaggttctttgaggggccctttttccggggaatttctttccccacaaggggagattcccaaagaggggggctcttttaa

SEQ ID NO: 19328 - DNA, 694 bp, Macaca Mulatta
ccgccaccaccatgctccacctcactttggcttggagactgagcctatgtgtaaattctgcctggtgccgtgaaggctggacggtggaggacctgctggggtctcctgggacctgcctgttgcctctaccctcccctgtggaaaggcctatgtgacgggctgcctgaggcccccgaactcgtctgtgaaccaccttctccagccagagtttccaaagctggaacgctagctgcctgctcttccttaagatggcctccccaggacctgccacggccctcagttgccaggggtggggccacccctgtcacactgtggaagacaagacagtgaactctgtctgtcccaacgagtcatgtaaattaaattctagagcagctttctgagcaggatgaggtcctctgacagggagttgtgtgatgggggcagcctctgcctcaaaaattcaccttgcagaatgcctctcagcctcatgtgctggtcctctgctcctcctagctccccagggatgtcatgtgctggtcctctgctcctcctagctccccagggatgtcatgtgctggtcctctgctcctcctagctccccaggaatgttgaggacccagcttggcttggcagctgagaagcagtgaccaggatatggctttggtgacctgtgtggtagttgagctgcttctgtgtctgtgaggactgccgc

SEQ ID NO: 19329 - DNA, 2499 bp, Macaca Mulatta
  misc_feature (1)...(2499): n = A,T,C or G
ccattccagtcagccaacagatggaaggaccacatcttcctaacaagnnnnnnnnnnnnnnnnaggctgtaaaaacagaacctgagaagaagtcacaatcaaccaannnnnnnnnnnnnnnnnnnnnnnnnnnnnnnnnnnnnnnnnnnnnnnnnnnnnnnnnnnnnnnnnnnnnnnnnnnnnnnnnnnnnnnnnnnnnnnnnnnnnnnnnnnnnnnnnnnnnnnnnnnnnnnnnnnnnnnnnnnnnnnnnnnnnnnnnnnnnnnnnnnnnnnnnnnnnnnnnnnnnnnnnnnnnnnnnnnnnnnnnnnnnnnnnnnnnnnnnnnnnnnnnnnnnnnnnnnnnnnnnnnnnnnnnnnnnnnnnnnnnnnnnnnnnnnnnnnnnnnnnnnnnnnnnnnnnnnnnnnnnnnnnnnnnnnnnnnnnnnnnnnnnnnnnnnnnnnnnnnnnnnnnnnnnnnnnnnnnnnnnnnnnnnnnnnnnnnnnnnnnnnnnnnnnnnnnnnnnnnnnnnnnnnnnnnnnnnnnnnnnnnnnnnnnnnnnnnnnnnnnnnnnnnnnnnnnnnnnnnnnnnnnnnnnnnnnnnnnnnnnnnnnnnnnnnnnnnnnnnnnnnnnnnnnnnnnnnnnnnnnnnnnnnnnnnnnnnnnnnnnaaacccatggggccagatgatgctatagatgccttgtcatctgacttcacctgtgggtcgcctacagctgctggaaagaaaactgaaaaagaggnaggaatctacagaagttttaaaagctcaatcagcagnnnnnnnnnnnnnnnnnnnnnnnnnnnnnnnnnnnnnnnnnnnnnnnnnnnaggatacaatgagcgatcaagcactggaggctctgtcggcttcactgggcacccggcaagcagaacctgagctcgacctcagctcgattaaggaagtcgatgagnnnnnnnnnnnnnnnnnnnnnnnnnnnnnnnnnnnnnnnnnnnnnnnnnnnnnnnnnnnnnnnnnnnnnnnnnnnnnnnnnnnnnnnnnnnnnnnnnnnnnnnnnnnnnnnnnnnnnnnnnnnnnnnnnnnnnnnnnnnnnnnnnnnnnnnnnnnnnnnnnnnnnnnnnnnnnnnnnnnnnnnnnnnnnnnnnnnnnnnnnnnnnnnnnnnnnnnnnnnnnnnnnnnnnnnnnnnnnnnnnnnnnnnnnnnnnnnnnnnnnnnnnnnnnnnnnnnnnnnnnnnnnnnnnnnnnnnnnnnnnnnnnnnnnnnnnnnnnnnnnnnnnnnnnnnnnnnnnnnnnnnnnnnnnnnnnnnnnnnnnnnnnnnnnnnnnnnnnnnnnnnnnnnnnnnnnnnnnnnnnnnnnnnnnnnnnnnnnnnnnnnnnnnnnnnnnnnnnnnnnnnnnnnnnnnnnnnnnnnnnnnnnnnnnnnnnnnnnnnnnnnnnnnnnnnnnnnnnnnnnnnnnnnnnnnnnnnnnnnnnnnnnnnnnnnnnnnnnnnnnnnnnnnnnnnnnnnnnnnnnnnnnnnnnnnnnnnnnnnnnnnnnnnnnnnnnnnnnnnnnnnnnnnnnnnnnnnnnnnnnnnnnnnnnnnnnnnnnnnnnnnnnnnnnnnnnnnnnnnnnnnnnnnnnnnnnnnnnnnnnnnnnnnnnnnnnnnnnnnnnnnnnnnnnnnnnnnnnnnnnnnnnnnnnnnnnnnnnnnnnnnnnnnnnnnnnnnnnnnnnnnnnnnnnnnnnnnnnnnnnnnnnnnnnnnnnnnnnnnnnnnnnnnnnnnnnnnnnnnnnnnnnnnnnnnnnnnnnnnnnnnnnnnnnnnnnnnnnnnnnnnnnnnnnnnnnnnnnnnnnnnnnnnnnnnnnnnnnnnnnnnnnnnnnnnnnnnnnnnnnnnnnnnnnnnnnnnnnnnnnnnnnnnnnnnnnnnnnnnnnnnnnnnnnnnnnnnnnnnnnnnnnnnnnnnnnnnnnnnnnnnnnnnnnnnnnnnnnnnnnnnnnnnnnnnnnnnnnnnnnnnnnnnnnnnnnnnnnnnnnnnnnnnnnnnnnnnnnnnnnnnnnnnnnnnnnnnnnnnnnnnnnnnnnnnnnnnnnnnnnnnnnnnnnnnnnnnnnnnnnnnnnnnnnnnnnnnnnnnnnnnnnnnnnnnnnnnnnnnnnnnnnnnnnnnnnnnnnnggtatctgcatataaaatcttcagctggtggatggtgacttttgaagaacaaaagcctttggcaacaaaacaattgttctgggtgatttctagactggtttttgttgagcctttgaacatcctaaatattggtttgtttttcttttccagaaagaaaatgaatttgactggttcacctgtgttattgtactgggtattgataaactttgaatttttttaattgccttcaattgggagagaaagaaagctttatatttgtaataaatatatttgataaagtttcttaaagcaacacnnnnnnnnnnnnnnnnnnctaagcgaatttttgcacagtctacacacagtgcctgtaaatctcatttgtattt

SEQ ID NO: 19330 - DNA, 266 bp, Macaca Mulatta
ggacacactgaagccggcgttcacagtcaccaacctgccgggtacaacctctaccatccaaacagcacctagcacctctaccaccatgcaagtcagcagcggcccctcctttcccatcaccaactacctggcaccagtgtctgctagtgtcagccccagtgctgtcagcagtgccaatgggactgtgctgaagagtacaggcagcggccctgtctcctctgggggccttatgcagctgcctaccagcttcaccctcatgcctggtg

SEQ ID NO: 19331 - DNA, 1937 bp, Macaca Mulatta
  misc_feature (1)...(1937): n = A,T,C or G
catacatctgtggatggatatactgaaccgcacatccagcctaccaagtcaagtagcagacagaacatcccccggtgtagaaactccattacatcagcaacagatgaacagcctcacattggaaattaccgtttacaaaaaacaatagggaagggaaattttgccaaagtcaaattggcaagacacgttctaactggtagagaggnnnnnnnnnnnnnnnnnnnnnnnnnnnnnnnnnnnnnnnnnnnnnnnnnnnnnnnnnnnnnnnnnnnnnnnnnnnnnnnnnnnnnnnnnnnnnnnnnnnnnnnnnnnnnnnnnnnnnnnnnnnnnnnnnnnnnnnnnnnnnnnnnnnnnnnnnnnnnnnnnnnnnnnnnnnnnnnnnnnnnnnnnnnnnnnnnnnnnnnnnnnnnnnnnnnnnnnnnnnnnnnnnnnnnnnnnnnnnnnnnnnnnnnnnnnnnnnnnnnnnnnnnnnnnnnnnnnnnnnnnnnnnnnnnnnnnnnnnnnnnnnnnnnnnnnnnnnnnnnnnnnnnnnnnnnnnnnnnnnnnnnnnnnnnnnnnnnnnnnnnnnnnnnnnnnnnnnnnnnnnnnnnnnnnnnnnnnnnnnnnnnnnnnnnnnnnnnnnnnnnnnnnnnnnnnnnnnnnnnnnnnnnnnnnnnnnnnnnnnnnnnnnnnnnnnnnnnnnnnnnnnnnnnnnnnnnnnnnnnnnnnnnnnnnnnnnnnnnnnnnnnnnnnnnnnnnnnnnnnnnnnnnnnnnnnnnnnnnnnnnnnnnnnnnnnnnnnnnnnnnnnnnnnnnnnnnnnnnnnnnnnnnnnnnnnnnnnnnnnnnnnnnnnnnnnnnnnnnnnnnnnnnnnnnnnnnnnnnnnnnnnnnnnnnnnnnnnnnnnnnnnnnnnnnnnnnnnnnnnnnnnnnnnnnnnnnnnnnnnnnnnnnnnnnnnnnnnnnnnnnnnnnnnnnnnnnnnnnnnnnnnnnnnnnnnnnnnnnnnnnnnnnnnnnnnnnnnnnnnnnnnnnnnnnnnnnnnnnnnnnnnnnnnnnnnnnnnnnnnnnnnnnnnnnnnnnnnnnnnnnnnnnnnnnnnnnnnnnnnnnnnnnnnnnnnnnnnnnnnnnnnnnnnnnnnnnnnnnnnnnnnnnnnnnnnnnnnnnnnnnnnnnnnnnnnnnnnnnnnnnnnnnnnnnnnnnnnnnnnnnnnnnnnnnnnnnnnnnnnnnnnnnnnnnnnnnnnnnnnnnnnnnnnnnnnnnnnnnnnnnnnnnnnnnnnnnnnnnnnnnnnnnnnnnnnnnnnnnnnnnnnnnnnnnnnnnnnnnnnnnnnnnnnnnnnnnnnnnnnnnnnnnnnnnnnnnnnnnnnnnnnnnnnnnnnnnnnnnnnnnnnnnnnnnnnnnnnnnnnnnnnnnnnnnnnnnnnnnnnnnnnnnnnnnnnnnnnnnnnnnnnnnnnnnnnnnnnnnnnnnnnnnnnnnnnnnnnnnnnnnnnnnnnnnnnnnnnnnnnnnnnnnnnnnnnnnnnnnnnnnnnnnnnnnnnnnnnnnnnnnnnnnnnnnnnnnnnnnnnnnnnnnnnnnnnnnnnnnnnnnnnnnnnnnnnnnnnnnnnnnnnnnnnnnnnnnnnnnnnnnnnnnnnnnnnnnnnnnnnnnnnnnnnnnnnnnnnnnnnnnnnnnnnnnnnnnnnnnnnnnnnnnnnnnnnnnnnnnnngtacaacccagagagtgcctgctgcttccccatctgctcacagtattagtactgcgactccagaccggacccgctttccccgagggagctcaagccgaagcactttccatggtgaacagctccgggagcgacgcagcgctgcttacaatgggccacctgcttcaccatcccatgaaacgggtgcatttgcacatgccagaaggggaacgtcaactggtataataagcaaaatcacatccaaatttgttcgcag

SEQ ID NO: 19332 - DNA, 118 bp, Macaca Mulatta
cccctgtaccctctgccccagtcatgcccccctaaaggttaaggagtagttggcacctccttattaatatgccagcctagatccccgctggtggaggggcaaatggctgaatccttgt

SEQ ID NO: 19333 - DNA, 2030 bp, Macaca Mulatta
  misc_feature (1)...(2030): n = A,T,C or G
tgggatttcagtcatttgcagtggaacaatgcaggctgtcacctagtgaatgaaactccagacaccgtggtgtgccgatgtactcacttgacctccttctccatgttgatgtcaccttttgtccccgctacgatcctccctgtggtaaaatggatcacctatgtgggactgggtatctccattggaagtctcatcttatgcctgatcatcgaggctctgttttggaagcagattaagaaaagcccaacctctcacacacgtcatatttgcatggtgaacatagccctgtccctcttgattgctgatatctggtttattgttggtgccacagtggatgccatggtgaactcttctggagtctgtacagctgctgtgttctttacacatgtcttctacctctctttgttcttctggatgctcatgcttggcatcctgctggcttaccggatcatcctcgtgttccatcacatggcccggcatttgatggtggctgtcggattttgcctgggttatgggtgccctctcattatatctgtcattaccattgctgtcacacaacctagcaatacctacacaaggaaagatgtgtgttggcttaactggtccaatggaagcaaaccactcctggcttttgttgtccctgcactggctattgtggctgtgaacttcattgtggtgctgctagttctcacaaagctctggaggccggctgttggggaaagactgagtcgggatgacaaggccaccatcgtccgcatggggaagagcctcctcattctgacccctctgctagggctcacctggggctttggaataggaacactagtggacaaccagaatccggcttggcatgttatttttgctttactcaatgcattacaggnnnnnnnnnnnnnnnnnnnnnnnnnnnnnnnnnnnnnnnnnnnnnnnnnnnnnnnnnnnnnnnnnnnnnnnnnnnnnnnnnnnnnnnnnnnnnnnnnnnnnnnnnnnnnnnnnnnnnnnnnnnnnnnnnnnnnnnnnnnnnnnnnnnnnnnnnnnnnnnnnnnnnnnnnnnnnnnnnnnnnnnnnnnnnnnnnnnnnnnnnnnnnnnnnnnnnnnnnnnnnnnnnnnnnnnnnnnnnnnnnnnnnnnnnnnnnnnnnnnnnnnnnnnnnnnnnnnnnnnnnnnnnnnnnnnnnnnnnnnnnnnnnnnnnnnnnnnnnnnnnnnnnnnnnnnnnnnnnnnnnnnnnnnnnnnnnnnnnnnnnnnnnnnnnnnnnnnnnnnnnnnnnnnnnnnnnnnnnnnnnnnnnnnnnnnnnnnnnnnnnnnnnnnnnnnnnnnnnnnnnnnnnnnnnnnnnnnnnnnnnnnnnnnnnnnnnnnnnnnnnnnnnnnnnnnnnnnnnnnnnnnnnnnnnnnnnnnnnnnnnnnnnnnnnnnnattccctcctaggccaagacaagaaggaatgccatgtcctcaaatacctgctcttctccatgggactgggttggaggggactgagggaggaagagtcaatgacaagtcgatgactctgaaattctgtgcatcacagctgaggcatnnnnnnnnnnnnnnnnnnnnnnnnnnnnnnnnnnnnnnnnnnnnnnnnnnnnnnnnnnnnnnnnnnnnnnnnnnnnnnnnnnnnnnnnnnnnnnnnnnnnnnnnnnnnnnnnnnnnnnnnnnnnnnnnnnnnnnnnnnnnnnnnnnnnnnnnnnnnnnnnnnnnnnnnnnnnnnnnnnnnnnnnnnnnnnnnnnnnnnnnnnnnnnnnnnnnnnnnnnnnnnnnnnnnnnnnnnnnnnnnnnnnnnnnnnnnnnnnnnnnnnnnnnnnnnnnnnnnnnnnnnnnnnnnnnnnncagtgtgttatcctggccattgcttccctggcgctccctgcaacactccagccaaaagcctgcccttctggatggttgcattctggattctgttgacaatcagagtaataattattgcagcctgtatttctggagttcttcatgccttttaatctcatttgaatctcggaaaactct

SEQ ID NO: 19334 - DNA, 1784 bp, Macaca Mulatta
  misc_feature (1)...(1784): n = A,T,C or G
tcttgcaggggtcccccaggccaagcagggtcccgaggccgattcgaacgccgacctggagacacaaggtgctcagggcaggggccaggcccgtctcctccccttggaggcttctcccacaggggttgtgggaggtgggttggggccgaggaggcaggagacccctgttcagcagggcgcgtagccttctgcggggcgtctgcagcccctcgccctcccctcggcgctcctggcggcatcagtaactttagcatgagaaggcgcttccagaaggaggttaaaatgcaaaatcccgccagacagtgcannnnnnnnnnnnnnnnnnnnnnnnnnnnnnnnnnnnnnnnnnnnnnnnnnnnnnnnnnnnnnnnnnnnnnnnnnnnnnnnnnnnnnnnnnnnnnnnnnnnnnnnnnnnnnnnnnnnnnnnnnnnnnnnnnnnnnnnnnnnnnnnnnnnnnnnnnnnnnnnnnnnnnnnnnnnnnnnnnnnnnnnnnnnnnnnnnnnnnnnnnnnnnnnnnnnnnnnnnnnnnnnnnnnnnnnnnnnnnnnnnnnnnnnnnnnnnnnnnnnnnnnnnnnnnnnnnnnnnnnnnnnnnnnnnnnnnnnnnnnnnnnnnnnnnnnnnnnnnnnnnnnnnnnnnnnnnnnnnnnnnnnnnnnnnnnnnnnnnnnnnnnnnnnnnnnnnnnnnnnnnnnnnnnnnnnnnnnnnnnnnnnnnnnnnnnnnnnnnnnnnnnnnnnnnnnnnnnnnnnnnnnnnnnnnnnnnnnnnnnnnnnnnnnnnnnnnnnnnnnnnnnnnnnnnnnnnnnnnnnnnnnnnnnnnnnnnnnnnnnnnnnnnnnnnnnnnnnnnnnnnnnnnnnnnnnnnnnnnnnnnnnnnnnnnnnnnnnnnnnnnnnnnnnnnnnnnnnnnnnnnnnnnnnnnnnnnnnnnnnnnnnnnnnnnnnnnnnnnnnnnnnnnnnnnnnnnnnnnnnnnnnnnnnnnnnnnnnnnnnnnnnnnnnnnnnnnnnnnnnnnnnnnnnnnnnnnnnnnnnnnnnnnnnnnnnnnnnnnnnnnnnnnnnnnnnnnnnnnnnnnnnnnnnnnnnnnnnnnnnnnnnnnnnnnnnnnnnnnnnnnnnnnnnnnnnnnnnnnnnnnnnnnnnnnnnnnnnnnnnnnnnnnnnnnnnnnnnnnnnnnnnnnnnnnnnnnnnnnnnnnnnnnnnnnnnnnnnnnnnnnnnnnnnnnnnnnnnnnnnnnntggatgtaaggtaggactgggtgaggtggagtccttgtgctgtcaggaagcagcagacctgcagaataatgctgcccatgaaggcccacatcctttgtggagacaaccccttttcatgtcagctaggttgcaaggagaataattttagtaatttatttcctaccgccttatactttaccaaatactttatgttcccttatatattaccgccaccctttaaagttcatgggggcaatatcaccagcatcttacactttagaaaacagaggctgaggccgggcatggtggctcacgcctataatcccagcactttgggaggccgaggcctgtggctcacgaggtcaggagattgagaccatcctggctaacacggtgaaaccccgtctctactaaaaatacaaaaaattagcggggcatggtgacgggcacctgtggtcccagctactcaggaggctgaggcaggagaatggcgtgaacctgggaggtggagcttgcagtgagctgagatcacgccactgcactccagcctgggcgacagagcgagactccatctc

SEQ ID NO: 19335 - DNA, 149 bp, Macaca Mulatta
  misc_feature (1)...(149): n = A,T,C or G
ntgcctcagtctggataaacacctgacaacatatcatttgcaaaatttgaaaccttatacaaactatagtttatcattacatgcctacatcattgcaaaagtgcaacgtaatggaactgctgcaacatgtaatttcacaactgaaagtg

SEQ ID NO: 19336 - DNA, 544 bp, Macaca Mulatta
  misc_feature (1)...(544): n = A,T,C or G
catccagtcggttttctgttgctgctgttgctgttcagtgcagaagcgnnnnnnnnnnnnnnnnnnnnnnnnnnnnnnnnnnnnnnnnnnnnnnnnnnnnnnnnnnnnnnnnnnnnnnnnnnnnnnnnnnnnnnnnnnnnnnnnnnnnnnntccaacacgggctgtgtgcagccgtcaaaacgaaagccactgcctcccctcccaccctctgaggttgctgaagagaagattcaagtcaaggcactttatgattttctgcccagagaaccctgtaatttagccttaaggagagcagaagaatacctgatactggagaaatataatcctcattggtggaaggcaagagaccgtttgggnnnnnnnnnnnnnnnnnnnnnnnnnnnnnnnnnnnnnnnnnnnnnnnnnnnnnnnnnnnnnnnnnnnnnnnnnnnnnnnnnnnnnnnnnnnnnnnnnnnnnnnnnnnnnnnnnnnnnngtctaaagaaggtgcatttattgtcagagattcatgacatttaggatcctacacaatttccgtatttat

SEQ ID NO: 19337 - DNA, 1920 bp, Macaca Mulatta
  misc_feature (1)...(1920): n = A,T,C or G
tgagggaagcggtttacgagtgacttggctggagcgccatgtgcgggcactggcacggaacacaccctgaggccagccctggctgcccaggcggagctgccgcttctccggcggttggtggacccgctcagcgcggaattggggaggctctttcacttcggaggattgctcaacaaccatgctgggcacctggaccctcctacctctggttcttacctctgttgttagattattgtccaaatgtgttaatgcccaagtgactgatatcagctccaagggatttgaattgaggaagatcgttactacaattgagactcagaacttggaaggcctgcatcacgagggccaattctgccgtaacccctgtcctccaggtgaaaggaaagctagggactgcacagtcaatgaggatgaaccagactgcgtgccctgccaagaagggaaggagtacacagacaaaggccatttttcttccaaatgcagaagatgtagattgtgtgatgaaggacatggcttagaagtggaaataaactgcacccggacccagaataccaagtgcagatgtaaaccaaactttttttgtaactctgctgtatgtgaacactgtgacccttgcaccaagtgtaaacatggaatcatcgaggaatgcacactcaccagcaacaccaagtgcaaagaggaagattccagatctgatttgctgtggttatgnnnnnnnnnnnnnnnnnnnnncctaattccaccaattgtttatgtggtgataaaggaaccatgcagaaagcgcagaaaggaaaaccaaggtcctcatgaatctacaaccttaaatcctgaaacagcaataaatttatctgatgttgacttgagtaaatatatcaccactatcgctggagccatgacactaagtcaagttaaagactttgttcgaaagaatggtgtcagtgaagccaaaatagatgagatcaagaatgacaatgtccaagacacagcagaacaaaaagttcaactgcttcgtaattggtatcaacttcatggaaagaaagatgcatgtgacacattgattaaaggtctaaaaacagctgatctttgtactcttgcagagaaaattcacgctgtcatcctcaaggacattactagtgacacagaaaattcgaacttcggtaatgaagtccaaaacttggtctagagcaaaaaacgacaaattcagttctgagtatatgcaattagtgtttgaaaagattcttaatagctggctgtaaatactgcttggtttcttactgggtacattttatcatttattagctctgaagagccaacatatttatagatttttaatgtctcatgattctgcctccaaggatatttaaaatctagttgggaagacaagtgtcatcaagagtaaatgcagtggcatgctaactacccaaataggagtatatgcagaggacgaaagattaagattatcttctggtatctaacatatgattctgtaatatgaatgtaatcagtgtatattagtacaaatgtctatccacaggctaaccccattccatgaatcaacagaagaagctatgaccttctgttggaatgtcagttactgaacaggccactttgcctctaaattacctctgatcattctagagattttaccatatttctaaactttgtttacaactctgagaggatcatatttatgtaaagtatatgtattcgaatgaagaatttaaataaggctctacctcaaagaattttgcatagattaatcgtatcatagaatacaatatttcaattgtgaattcacatagaaaacattaaattataatgttttactattatgtatgtgtatgcattttaccggctcaaaaccacctacttctttctcagatgtcaaaagcattttgagcaggagagtattgctagagc

SEQ ID NO: 19338 - DNA, 946 bp, Macaca Mulatta
  misc_feature (1)...(946): n = A,T,C or G
atgaagttgaaatagatgggaagacatatcaagnnnnnnnnnnnnnnnnnnnnnnnnnnnnnnnnnnnnnnnnnnnnnnnnnnnnnnnnnnnnnnnnnnnnnnnnnnnnnnnnnnnnnnnnnnnnnnnnnnnnnnnnnnnnnnnnnnnnnnnnnnnnnnnnnnnnnnnnnnnnnnnnnnnnnnnnnnnnnnnnnnnnnnnnnnnnnnnnnnnnnnnnnnnnnnnnnnnnnnnnnnnnnnnnnnnnnnnnnnnnnnnnnnnnnnnnnnnnnnnnnnnnnnnnnnnnnnnnnnnnnnnnnnnnnnnnnnnnnnnnnnnnnnnnnnnnnnnnnnnnnnnnnnnnnnnnnnnnnnnnnnnnnnnnnnnnnnnnnnnnnnnnnnnnnnnnnnnnnnnnnnnnnnnnnnnnnnnnnnnnnnnnnnnnnnnnnnnnnnnnnnnnnnnnnnnnnnnnnnnnnnnnnnnnnnnnnnnnnnnnnnnnnnnnnnnnnnnnnnnnnnnnnnnnnnnnnnnnnnnnnnnnnnnnnnnnnnnnnnnnnnnnnnnnnnnnnnnnnnnnnnnnnnnnnnnnnnnnnnnnnnnnnnnnnnnnnnnnnnnnnnnnnnnnnnnnnnnnnnnnnnnnnnnnnnnnnnnnnnnnnnnnnnnnnnnnnnnnnnnnnnnnnnnnnnnctaatgtaattaaccaacgaaaaagctttcaggacttttaaatgctaactgtttttccccttcctgtctaggacaatgctataaagctcaaattagttaggaatgacttatacgttttgttttgaatacctaagagatactttttggatatttatattgccatattcttacttgaatgctttgaatgactacatccagttctgcacctataccctctggtgttgctttttaaccttcctggaatccattttctaaaaaataaagacattttcagatctgaga

SEQ ID NO: 19339 - DNA, 1156 bp, Macaca Mulatta
  misc_feature (1)...(1156): n = A,T,C or G
atgatgttaagaggaaacctgaagcaagtgcgcattgagaaaaacccggcccgccttcgcgccctggagtccgcggcgggcgagagcgagccggcggccgcggcagccatggcgctcgcgcttgcgggggagccggcaccgcccgcggccgcgccgccggaggaccacccggacgaggagctggggttcactatcgacatcaagagtttcctcaagccgggcgagaagacgtacacgcagcgctgtcgcctcttcgtggggaacctgcccaccgacatcacggaggaggagttcaagaggctcttcgaacgctatggcgagcccagcgaagacttcttcannnnnnnnnnnnnnnnnnnnnnnnnnnnnnnnnnnnnnnnnnnnnnnnnnnnnnnnnnnnnnnnnnnnnnnnnnnnnnnnnnnnnnnnnnnnnnnnnnnnnnnnnnnnnnnnnnnnnnnnnnnnnnnnnnnnnnnnnnnnnnnnnnnnnnnnnnnnnnnnnnnnnnnnnnnnnnnnnnnnnnnnnnnnnnnnnnnnnnnnnnnnnnnnnnnnnnnnnnnnnnnnnnnnnnnnnnnnnnnnnnnnnnnnnnnnnnnnnnnnnnnnnnnnnnnnnnnnnnnnnnnnnnnnnnnnnnnnnnnnnnnnnnnnnnnnnnnnnnnnnnnnnnnnnnnnnacccctcgtccagtcattgtggaacccatggagcagtttgatgatgaagatggcttgccagagaagctgatgcagaaaactcaacaatatcataagnnnnnnnnnnnnnnnnnnnnnnnnnnnnnnnnnnnnnnnnnnnnnnnnnnnnnnnnnnnnnnnnnnnnnnnnnnnnnnnnnnnnnnnnnnnnnnnnnnnnnnnnnnnnnnnnnnnnnnnnnnnnnnnnnnnnnnnnnnnnnnnnnnnnnnnnnnnnnnnnnnnnnnnnnnnnnnnnnnnnnnnnnnnnnnnnnnnnnnnnnnnnnnnnnnnnnnnnnnnnnnnnnnnnnnnnnnnnnnnnnnnnnnnnnnnnnnnnnnnnnnnnnnnnnnnnnnnnnnnagacatgaggaggagcatcgccggcgtgaggaagaaatgatccgacacagagaacaggaggaactgaggcgacagcaagagggctttaacccaaactacatggaaaat

SEQ ID NO: 19340 - DNA, 488 bp, Macaca Mulatta
gcaactcacgcagcaattccagaaccccgacttcccacccgaagtagaggaacaggacaccagcaccctgcctgtgtcttgtgcctgggagagtgggatgaaacgccacccagcagcctgtgcttcagctggtattaatgtgtagatatcaccctagtagctgttaactacaagtttagcttaaattaagggatttggggggaccatgtaacttaattactgctagttttgaaatgtctttgtaagagtagggtcggcacgatgcagccatatggaagactaggatatgggtcacacttatctgtgttcctatggaaactatttgaatatttgttttacatggatttttattcactcttcagacacgctactcaagagtgcccctcagctgctgaacaagcgtttgtagcttgtacaatggcagaatgggccaaaagcttagtgttgtgacctgtttttaaaataaagtatcttgaaataattaggca

SEQ ID NO: 19341 - DNA, 2621 bp, Macaca Mulatta
  misc_feature (1)...(2621): n = A,T,C or G
tgggtttgaggacccaccagcaaaggcgaacggtgtcgcagagacatcttctggctgtttccgtcgcctgcgtggccctgtcaccccggtcttccattagaggcgcagacgtttgggcctaagcgctggcgaagcgacgccctgcccctccccaccaacggccattctctggacctttcttccgggaggcggtgacagcagctgggacgtgttgcagccggagtctctcccctgtaatgcgctcccgttagtgctttcccccgccctggaaaatcgtggcttctgtattatttgccatctttcctgtgtaggagcagggagggcttcctcccagggtcctaggcggcggtatagcccgtcgtagaagaattagagtagaagttgttgggtccgctctgaggactcagccgcctcatgggggtccaggggctctggaagctgctggagtgctctgggcgtcaggtcagccccgaggcactggaagggaagatcctggctgttnnnnnnnnnnnnnnnnnnnnnnnnnnnnnnnnnnnnnnnnnnnnnnnnnnnnnnnnnnnnnnnnnnnnnnnnnnnnnnnnnnnnnnnnnnnnnnnnnnnnnnnnnnnnnnnnnnnnnnnnnnnnnnnnnnnnnnnnnnnnnnnnnnnnnnnnnnnnnnnnnnnnnnnnnnnnnnnnnnnnnnnnnnnnnnnnnnnnnnnnnnnnnnnnnnnnnnnnnnnnnnnnnnnnnnnnnnnnnnnnnnnnnnnnnnnnnnnnnnnnnnnnnnnnnnnnnnnnnnnnnnnnnnnnnnnnnnnnnnnnnnnnnnnnnnnnnnnnnnnnnnnnnnnnnnnnnnnnnnnnnnnnnnnnnnnnnnnnnnnnnnnnnnnnnnnnnnnnnnnnnnnnnnnnnnnnnnnnnnnnnnnnnnnnnnnnnnnnnnnnnnnnnnnnnnnnnnnnnnnnnnnnnnnnnnnnnnnnnnnnnnnnnnnnnnnnnnnnnnnnnnnnnnnnnnnnnnnnnnnnnnnnnnnnnnnnnnnnnnnnnnnnnnnnnnnnnnnnnnnnnnnnnnnnnnnnnnnnnnnnnnnnnnnnnnnnnnnnnnnnnnnnnnnnnnnnnnnnnnnnnnnnnnnnnnnnnnnnnnnnnnnnnnnnnnnnnnnnnnnnnnnnnnnnnnnnnnnnnnnnnnnnnnnnnnnnnnnnnnnnnnnnnnnnnnnnnnnnnnnnnnnnnnnnnnnnnnnnnnnnnnnnnnnnnnnnnnnnnnnnnnnnnnnnnnnnnnnnnnnnnnnnnnnnnnnnnnnnnnnnnnnnnnnnnnnnnnnnnnnnnnnnnnnnnnnnnnnnnnnnnnnnnnnnnnnnnnnnnnnnnnnnnnnnnnnnnnnnnnnnnnnnnnnnnnnnnnnnnnnnnnnnnnnnnnnnnnnnnnnnnnnnnnnnnnnnnnnnnnnnnnnnnnnnnnnnnnnnnnnnnnnnnnnnnnnnnnnnnnnnnnnnnnnnnnnnnnnnnnnnnnnnnnnnnnnnnnnnnnnnnnnnnnnnnnnnnnnnnnnnnnnnnnnnnnnnnnnnnnnnnnnnnnnnnnnnnnnnnnnnnnnnnnnnnnnnnnnnnnnnnnnnnnnnnnnnnnnnnnnnnnnnnnnnnnnnnnnnnnnnnnnnnnnnnnnnnnnnnnnnnnnnnnnnnnnnnnnnnnnnnnnnnnnnnnnnnnnnnnnnnnnnnnnnnnnnnnnnnnnnnnnnnnnnnnnnnnnnnnnnnnnnnnnnnnnnnnnnnnnnnnnnnnnnnnnnnnnnnnnnnnnnnnnnnnnnnnnnnnnnnnnnnnnnnnnnnnnnnnnnnnnnnnnnnnnnnnnnnnnnnnnnnnnnnnnnnnnnnnnnnnnnnnnnnnnnnnnnnnnnnnnnnnnnnnnnnnnnnnnnnnnnnnnnnnnnnnnnnnnnnnnnnnnnnnnnnnnnnnnnnnnnnnnnnnnnnnnnnnnnnnnnnnnnnnnnnnnnnnnnnnnnnnnnnnnnnnnnnnnnnnnnnnnnnnnnnnnnnnnnnnnnnnnnnnnnnnnnnnnnnnnnnnnnnnnnnnnnnnnnnnnnnnnnnnnnnnnnnnnnnnnnnnnnnnnnnnnnnnnnnnnnnnnnnnnnnnnnnnnnnnnnnnnnnnnnnnnnnnnnnnnnnnnnnnnnnnnnnnnnnnnnnnnnnnnnnnnnnnnnnnnnnnnnnnnnnnnnnnnnnnnnnnnnnnnnnnnnnnnnnnnnnnnnnnnnnnnnnnnnnnnnnnnnnnnnnnnnnnnnnnnnnnnnnnnnnnnnnnnnnnnnnnnnnnnnnnnnnnnnnnnnnnnnnnnnnnnnnnnnnnnnnnnnnnnnnnnnnnnnnnnnnnnnnnnnnnnnnnnnnnnnnnnnnnnnnnnnnnnnnnnnnnnnnnnnnngaagtttcattgaagtgcaaagtgtgattagtgatgaggaacttcaagcagaattgcatgaaacgtccaaacctccctcagaacaaggcgaagaggaactgataggaactagggaggaagaagcccctgctgagcccgagagcctcctgagggacaaccctgagagggaggacgtggttggtgagccacaggaagctgagaaagatgcggaagattcactccatgaatggcaagatattaatttgg

SEQ ID NO: 19342 - DNA, 2164 bp, Macaca Mulatta
  misc_feature (1)...(2164): n = A,T,C or G
ggcccatcgtcctgagcacagagagcccggcggccctcaagctgggcacccagcagctgatccccaagagcctggccgtggccagcaaggcgaagaccccagcccgccaccagagcttcggggcggctgtacttagcagggaggccgcccggcgggaccctaagctcctcccagcccccagcttctctctggacgacatggacatggacaaggaccccgggggcatgctgaggcggaacctgcggaaccaatcctaccgggcggccatgaagggcctggggaagccaggtggccagggggacgccatcccgctaagccctaagctccaggctctggccgaggaacccagccagcctcacactcggaacccagccaaaaacaagacccccagctctaccaggagatccaggagcggggcctgaacaccagccaggagtctgatgatgacatccttgatgagtcctccagccccgagggagcccggaagatggacaccaccattgtggtcaagagctaccggcctgcccagatcacctggagccagctcccggaggnnnnnnnnnnnnnnnnnnnnnnnnnnnnnnnnnnnnnnnnnnnnnnnnnnnnnnnnnnnnnnnnnnnnnnnnnnnnnnnnnnnnnnnnnnnnnnnnnnnnnnnnnnnnnnnnnnnnnnnnnnnnnnnnnnnnnnnnnnnnnnnnnnnnnnnnnnnnnnnnnnnnnnnnnnnnnnnnnnnnnnnnnnnnnnnnnnnnnnnnnnnnnnnnnnnnnnnnnnnnnnnnnnnnnnnnnnnnnnnnnnnnnnnnnnnnnnnnnnnnnnnnnnnnnnnnnnnnnnnnnnnnnnnnnnnnnnnnnnnnnnnnnnnnnnnnnnnnnnnnnnnnnnnnnnnnnnnnnnnnnnnnnnnnnnnnnnnnnnnnnnnnnnnnnnnnnnnnnnnnnnnnnnnnnnnnnnnnnnnnnnnnnnnnnnnnnnnnnnnnnnnnnnnnnnnnnnnnnnnnnnnnnnnnnnnnnnnnnnnnnnnnnnnnnnnnnnnnnnnnnnnnnnnnnnnnnnnnnnnnnnnnnnnnnnnnnnnnnnnnnnnnnnnnnnnnnnnnnnnnnnnnnnnnnnnnnnnnnnnnnnnnnnnnnnnnnnnnnnnnnnnnnnnnnnnnnnnnnnnnnnnnnnnnnnnnnnnnnnnnnnnnnnnnnnnnnnnnnnnnnnnnnnnnnnnnnnnnnnnnnnnnnnnnnnnnnnnnnnnnnnnnnnnnnnnnnnnnnnnnnnnnnnnnnnnnnnnnnnnnnnnnnnnnnnnnnnnnnnnnnnnnnnnnnnnnnnnnnnnnnnnnnnnnnnnnnnnnnnnnnnnnnnnnnnnnnnnnnnnnnnnnnnnnnnnnnnnnnnnnnnnnnnnnnnnnnnnnnnnnnnnnnnnnnnnnnnnnnnnnnnnnnnnnnnnnnnnnnnnnnnnnnnnnnnnnnnnnnnnnnnnnnnnnnnnnnnnnnnnnnnnnnnnnnnnnnnnnnnnnnnnnnnnnnnnnnnnnnnnnnnnnnnnnnnnnnnnnnnnnnnnnnnnnnnnnnnnnnnnnnnnnnnnnnnnnnnnnnnnnnnnnnnnnnnnnnnnnnnnnnnnnnnnnnnnnnnnnnnnnnnnnnnnnnnnnnnnnnnnnnnnnnnnnnnnnnnnnnnnnnnnnnnnnnnnnnnnnnnnnnnnnnnnnnnnnnnnnnnnnnnnnnnnnnnnnnnnnnnnnnnnnnnnnnnnnnnnnnnnnnnnggtggctctacggcgagaggctccgggacggagagacaggctggttccctgaggactttgcccgcttcatcaccagccgtgtggccgtggagggcaatgtccgcaggatggagcgtctgcgggtggagacagacgtgtagccttggtgaggccagccggcggcagcacagcctgtcccctgatcagcaagtggccgtgcctggctacagagagtgtgaggggcttgtctcaaggacccagtatggttccctggggcttcccaagaccctgtgactgtggtgccgggctccggacacttcacagaaggaagatcacatgtccctcgagaggcacccctagtcaagctcgagggggccacaccgtgtcccaaggagcccagcctagtcccattggctggctgggcctctctcagctgctgggccccacc

SEQ ID NO: 19343 - DNA, 140 bp, Macaca Mulatta
ggcaagaaaacagcatatcactggtgaaagcttactggaatgaactttttactcttggtcttgcccagtgctggcaagtgatgaatgtagcaactatattagcaacatttgtcaattgtcttcacaatagtcttcaacaa

SEQ ID NO: 19344 - DNA, 128 bp, Macaca Mulatta
gacaacttcacagtgtgcatggaaaccatcacagcttgcttgtggggaccactcagcctgtgggtggtgatcgcctttctccgccagcatcctctccgcttcgttctacagcttgtggtctctgtggg

SEQ ID NO: 19345 - DNA, 131 bp, Macaca Mulatta
atggggagagaaagttctgcctggcctgcatctggttccagcccacctgccctcccctttttctgacctctgtattccctcctgggctgaccacagcttccccctttccaaccaataaagtaaccactttc

SEQ ID NO: 19346 - DNA, 465 bp, Macaca Mulatta
tacgactatgactgcggggaggatttctaccgctccacggcgcccagcgaggacatctggaagaaattcgagctggtgccatcgccccccacgtcgccgccctggggcttgggtcccggcgcaggggacccggcccccgggattggtcccccggagccgtggcccggagggtgcaccggggacgaagcggaatcccggggccactcgaaaggttggggcaggaactacgcctccatcatccgccgcgactgcatgtggagcggcttctcggcccgggaacggctggagagagctgtgagcgaccggctcgccgctggcgcgccccgggggaacccgcccaaggcgtccgccgccccggactgcactcccagcctcgaagccggcaacccggcgcccgccgccccctgtccgctgggcgaacccaagacccaggcctgctccgggtccgagagcccaagcgactcg

SEQ ID NO: 19347 - DNA, 337 bp, Macaca Mulatta
  misc_feature (1)...(337): n = A,T,C or G
agctgaaggacacttgtatattgtgatggaatactgtgatggaggggatctgatgcaaaagattaaacagcaaaaaggaaagttatttcctgaagacatnnnnnnnnnnnnnnnnnnnnnnnnnnnnnnnnnnnnnnnnnnnnnnnnnnnnnnnnnnnnnnnnnnnnnnnnnnnnnnnnnnnnnnnnnnnnnnnnnnnnnnnnnnnnnnnnnnnnnnnnnnnnnnnnnnnnnnnnnnnnnnnnnnnnnnnnnnnatggcatttgcttgtacctatgtgggaacaccttattatgtgcctccagaaatttgggaaaacctgccttataacaataaaag

SEQ ID NO: 19348 - DNA, 920 bp, Macaca Mulatta
ggggggttttgttcttgcctgttttgttcttccgtggtgttgatctgtgagttgtgttaggactgctaataggaagatgtcttcaggaaatgctaaaattgggcaccctgcccccaacttcaaagccacagccgttatgccagatggtcagtttaaagatatcagcctgtctgactacaaaggaaaatatgttgtgttcttcttttatcctcttgacttcacctttgtgtgccctacggagatcattgctttcagtgatagggcagaagaatttaagaaactcaactgccaagtgattggtgcttctgtggattctcacttctgtcatctagcatggatcaaacacacctaaataaaccaaggaggactggggacccatggaacattccctttggtatcagaccccgaagcgcacccattgcttcaggaatttatgggggttctttaaagggcttgatgaaggccatttcacttcagggggcctcctttatccattgaatgataacggggtatttccttccggcagaatcactgtaaaaatgtacctcccactgattggcccgcttcctttaggatgaaagacttttgagaactagtttctaaggcctttccggtttccacttgaacataacatgggtgaatattgtggcacctgcttggcctgggaaaaaacttggacatcctgaattctcattttaaggccctggtatgtttccagaagttcacagttatttcaaagaaattttattcagcaccatgcaaaaaatttgtgccgccttaacccgtttttttattttgaccagtgttcttacagttgatgcaagtcccttggtaaaagaaatattcacttccttcgcgtgcggtttcaatcttattcatcccgccatttccagtataagccccgcagagaaaatatgcgc

SEQ ID NO: 19349 - DNA, 1527 bp, Macaca Mulatta
  misc_feature (1)...(1527): n = A,T,C or G
ggggggcttttcctgtagcagcatccggggtgagaggaacgtggttttctcctctctccgccatggcgtgtgctcgcccactgatatcggtgtactccgaaaagggggagtcatctggcaaaaatgtcactttgcctgctgtattcaaggctcctattcgaccagatattgtgaactttgttcacaccaacctgcgcaaaaacaacagacagccctacgctgtcagtgaattagcaggtcatcagaccagtgctgagtcttggggtactggcagagctgtggctcgaattcccagagttcgaggtggtgggactcaccgctctggccagggtgcttttggaaacatgtgtcgtggaggccgaatgtttgcaccaaccaaaacctggcgccgttggcatcgtagagtgaacacaacccaaaaacgatatgccatctgttctgccctggctgcctcagccctaccagcactggtcatgtctaaaggtcatcgtattgaggaagttcctgaacttcctttggtagtggaagataaagttgaaggctacaagaagaccaaggaagctgttttgctccttaagaaacttaaagcctggaatgatatcaaaaaggtctatgcctctcagcgaatgagagctggcaaaggcaaaatgagaaaccgtcgccgtatccagcgcagggggccatgcatcatctataatgaggataatggtatcatcaagggccttcagaaacatccctggaattactctggcttaatgtaagcaaactgaacattttgaagcttgctcctggtgggcatgtgggacgtttctgcatttggactgagagtgctttccggaagttagatgaattgtatggcacttggcgtaaagccgcttctcccaagagtaactacaatctttcccatgcacaagaatgatttaataccgaatcttaagcagaattcttgaaaaagcccagaaggatccaaaagagcccctttcgaggcaaccacgcaaaggaagattctttccttccggccagaaattccccttataaggaaaagaaaaacgccccacactttgtaaactaaaataccccttgaagacgaagatctccaatggtttgtttggaaaaaagatcatttaaaaaaacacccaccattatagatggcccataaaagtaaaacccccctaatggcgcggtccnnccggtggtaaatatataacccacattttatctatttttcccgtccccagagggtccccggaggggtaaaaaatctcatacaacaaagaccacttcaccgcggggtgtgaggggaaataacaaagggggcnacaatccttgtgcccctggtcaaaaacatgatacccaacatcccacacctccgtaaagaaaataccgcgaaaagattttcatattattacctagcaccaaatgnggctccgtaccgtgtgttattgtgtcaccgatccccccaacaaataagaccctttgtgggggggcttttatggtgtataaacgaaaaaaataggcggaaaaaag

SEQ ID NO: 19350 - DNA, 386 bp, Macaca Mulatta
  misc_feature (1)...(386): n = A,T,C or G
gttcttaaacacttccagtaaccatgaaaactcagactcggaaatgccttctttaacttccacccctctcattggtcacaaattgactgttacaacaccatttcatagagaccagactgtgaaaactcaaaaggaaaatactgtnnnnnnnnnnnnnnnnnnnnnnnnnnnnnnnnnnnnnnnnnnnnnnnnnnnnnnnnnnnnnnnnnnnnnnnnnnnnnnnnnnnnnnnnnnnnnnnnnnnnnnnnnnnnnnnnnnnnnnnnnnnnnnnnnnnnnnnnnnnnnnnnnnnnnnnnnnnnnnnnnnnnnnnnnnnnnnnnnnnnnnnnnnnnnnnnnnnnnnnnnnnnnnnnnnnnnnnnnnnnctgaagaaaatcaaacaagagg

SEQ ID NO: 19351 - DNA, 644 bp, Macaca Mulatta
  misc_feature (1)...(644): n = A,T,C or G
ggaaactactaaagttcctggggaagcaaagtagaatttcataagaacaaaatgnnnnnnnnnnnnnnnnnnnnnnnnnnnnnnnnnnnnnnnnnnnnnnnnnnnnnnnnnnnnnnnnnnnnnnnnnnnnnnnnnnnnnnnnnnnnnnnnnnnnnnnnnnnnnnnnnnnnnnnnnnnnnnnnnnnnnnnnnnnnncaggtcagtttgctgagaacgaaaccaatgaggtcaattttagagagataccttcacatgtgctatcaaaagtatgcatgtattttacgtacaaggttcgctacactaacagctccaccgagattcccgaattcccaattgcacctgaaattgcactagaactgctgatggctgcgaacttcctagattgttaaataaaataaattataataaactgttaactcttttcagtatttaatacctgtagttcagttagtaactttttcatatatagcatgttgcctgtatgcagttgaactatataaagttcattgcaaagcagattatcttctgtttttttgcatagcaatcaaagttgaaatttgtttgctacatcaacaaattaaggacattttcacaaactgagaaataaacaaatatgccaattggtaggtggttttgccttatcc

SEQ ID NO: 19352 - DNA, 468 bp, Macaca Mulatta
gtctgagagaggaggagataccttgggatcaagactgcagttggggaatgcatggacaccggatttgtttcttactccttcacttttggggaaaatctcttgtttttaaaaagtgataaatttggtgttaggtccttggcactttccttctttcccaacttggagaatcctttctccctgccttcttgccctgccctctctgcagcccccacccgcctgccaagctgcctctgggaaggaagaacagaggagctgggcagaagcctcgagcagggaagagttcttcccctagccctgactttactttctgtgggaagagagatgagggtcagataggtgggaggactaacttccaggctgccaagaaggaagaaaagcccccggttctcttttcttattgaggaacgatctgaccacctcacaggcctgccctgcagctggaacactcggcgctctaaggcctgtgcc

SEQ ID NO: 19353 - DNA, 281 bp, Macaca Mulatta
aatgggcaagaagtaaataatgtggctggaatacaagttgaacaaactagaagacacaaatctaacacagtttttatggaccaaggaacttgtatattgtataagctttagtaaaaggtacattttcaccatacctttttttatatcacggtattatagtacaccttgttaccaaataggttgttctcttccccacttacctttgagcttttgctctaaaatacattcaggttccaagcctgaccatgcttgtttaatctaattgtcatactcttccaggt

SEQ ID NO: 19354 - DNA, 244 bp, Macaca Mulatta
tttatttcccaataaagaagggctttcaaattcatgctggagacttgtggagcagtcccaagctccatgtcaggtgggctccgagtgtacacagtgtttatgttcatgagtcagatggtaaagatcatctggagcaagggtatgtgacaggacagacatagtggcctaactcttgtgtgccaaggtgcatcaggtggaggcagcagctatccgatcgatgtaaagctcctaggatggctacttg

SEQ ID NO: 19355 - DNA, 1131 bp, Macaca Mulatta
gggggctgggggcggaggaggggggggagtccgagtggagcgagcgagctgactggttgtgtggtcgcgtctcggaaaccggtagcgcttgcagcatggctgaccaactgaccgaagagcagattgcagaattcaaagaagctttttcactatttgacaaagatggtgatggaactataacaacaaaggaattgggaactgtaatgaggtctcttgggcagaatcccacagaagcagagttacaggacatgattaatgaagtagatgctgatggtaatggcacaattgacttccctgaatttctgacaatgatggcaagaaaaatgaaagacacagacagtgaagaagaaattagagaagcattccgtgtgtttgataaggatggcaatggctatattagtgctgcagaacttcgccatgtgatgacaaaccttggagagaagttaacagatgaagaagttgatgaaatgatcagggaagcagatattgatggtgatggtcaagtaaactatgaagagtttgtacaaatgatgacagcaaagtgaagaccttgtacagaatgtgttaaatttcttgtacaaaattgtttatttgccttttctttgtttgtaacttatctgtaaaaggtttctccctactgtcaaaaaaatatgcatgtatagtaattaggacttcattcctccatgttttcttcccttatcttactgtcattgtcctgaaaccttatttttagaaaaattgatcaagtaacatgtttgcatgtgggcttactctgggatataatctaagcccttctgcacatctgaagttagatggagttggtcaaatgagggaacatctgggttatgcctttttttaaagtagttttctttaggaactgtcagcatgttgttgttgaagtgtggagttgtaactctgcgtggactatggacagtcaacaatatgtacttaaaagttgcactattgcaaaacgggtgtattatccaggtactcgtacactattttttttgtactggctggtcctgtaccagaaaacattttcttttattgttacttgctttttaaactttgtttagccacttaaaatctgcttatggcacaatttgccctcaaaatccattccaagttgta

SEQ ID NO: 19356 - DNA, 634 bp, Macaca Mulatta
  misc_feature (1)...(634): n = A,T,C or G
gggggaaatcatccctcttgggaaccaggagtgacctgggagcgctgtgtgcggccgcgtgtggtatgtggagccgaggccgtcctgcaggaagcccacgtgactgccgccgcctccccgtgctctgtggctctggactgtgaccgcgcctggattctgccattgcgacacgtttttgtgcctttcagcccctggtgtctgcagtggggtgtttaaggcacccgcttccacttctttcttcttttttttccctgagatggagtctcgnnnnnnnnnnnnnnnnnnnnnnntnnnnnnnnnnnnnnnnnnnnnnnnnnnnnnnnnnnnnnnnnnnnnnnnnnnnnnnnnnnnnnnnnnnnnnnnnnnnnnnnnnnnnnnntgcccgccacctcgcccggctaatcnnnnnnnnnnnnnannnnnnnnnnnnnnnnncgtgtgtgcgaggatggtctcaatctcctgacctcgtaatccgcccgcctcggnnnnnnnnnnnnnnnnnnnnnnnnnnnnnnnnacgcccggcccacttctttcttgtttggagttttctgtcggaaccactggtattggctctgtagactctaagcacgccgccggcacaccttctgcgcacaggatgtttcacggg

SEQ ID NO: 19357 - DNA, 803 bp, Macaca Mulatta
ggctaaactccgatcttgatacgggtgattgatgacagcgattgtaaataagcatagagatcagatcttaacccagccttgtccaacccacggcccatgggctacatgtggctcaggacaaccttgaatgtggcccaacataaattcataaacttccttaaaacattatgagatattttgggatttttttttccagctcattagctaccgttagtgttagtgtattttatgtgtggcccagtgaagccaaaagattggacatccctgctaaacaaatgctagatttcagttctgcttggaacctttcaacaagtatttattgaacaaattttgatgggccattttgcataaccatatcttcgtagtaactaataccttttttgttagccttaaacttttgggttttcctttttcaggagtacacagtgaaactaagtaatatccctacaattaagagattccttgaacctggcagcaagaagaagcctccccctgatgaaatttatgtgagaaccgtctacaacatctttaagccgtaaaacaacacatccatctgtgagtgagagcgtgttcctaaaaatggttctgtccacagtcatggtcttaatggatcccaccttctgcctggggctatgcattaccgttggggcctaggtttgggccttttggggcaaagaaatcctcccctttcctgaaaatatccccccttttttttgcccagtcaataacttgttccgggggcgacttctcttgggcaaccctttttttgggggcacggccttggtcctttcaaggttgaaatt

SEQ ID NO: 19358 - DNA, 348 bp, Macaca Mulatta
tgcccgcccggccccgcagccccgggcggtccatggggcgggtacggcgtcgctgcgggcgccggcagccctggagggcagctgcttaggcgctgcgctcttgttcccgcaggtcgcagccagggcggcggggcgcgcccagccccggcccctggagcgcccgccgcggtccccacctccatggacgccttcaaggggggcatgagcctggagcggctaccggaggggctccggccgccgccgccgccaccccatgacatggggcccgccttccacctggcccggcccgccgaccaccgcgagcagctcgagaactccgccagcgagtcgtctgacacggagctgcca

SEQ ID NO: 19359 - DNA, 540 bp, Macaca Mulatta
ttggtgggggaactggttctgggttcacctccctgctcatggaacgtctctcacttgattatggcaagaaatccaagctggagttctccatttacccagcgccccaggtttccacagctgtagttgagccctacaactccatcctcaccacccacaccaccctggagcactctgattgtgccttcatggtagacaatgaggccatctatgacatctgtcgtagaaacctcgatattgagcgcccaacctacactaaccttaaccgccttattagccagattgtgtcctccatcactgcttccctgagatttgatggagccctgaatgttgacctgacagaattccagaccaacctggtgccctatccccgcatccacttccctctggccacatacgcccctgtcatctctgctgagaaagcctaccatgaacagcttactgtagcagagatcaccactgcttgctttgagccagccgaccagatggtgaaatgtgaccctcgccatggtaaatacatggcttgatgcctgttggaccgtg

SEQ ID NO: 19360 - DNA, 487 bp, Macaca Mulatta
  misc_feature (1)...(487): n = A,T,C or G
ggtgatgttggtgagaaaggccctgagggagcccctggaaaggatggtggacgagtaagtgaatgcgggttgccggactgccgggcattgggatcccagccctgcacccaggagagctgggaagggggctgggcagtctgccagtggggtccctggnnnnnnnnnnnnnnnnnnnnnnnnnnnnnnnnnnnnnnnnnnnnnnnnnnnnnnnnnnnnnnnnnnnnnnnnnnnnnnnnnnnnnnnnnnnnnnnnnnnnnnnnnnnnnnnnnnnnnnnnnnnnnnnnnnnnnnnnnnnnnnnnnnnnnnnnnnnnnnnnnnnnnnnnnnnnnnnnnnnnnnnnnnnnnnnnnnnnnnnnnnnnnnnnnnnnnnnnnnnnnnnggtgctgatggccagcctggggccaagggtgagcaaggagaggccggccagaaaggcgacgctggtgcccctggtcctcagggcccctctggagcgcctgggcctcag

SEQ ID NO: 19361 - DNA, 452 bp, Macaca Mulatta
accacagtccatgccatcactgccacccagaagactgtggatggcccctccgggaaactgtggcgtgatggccgcggagctctccagaacatcatccctgcctctactggcgctgccaaggctgtgggcaaggtcatccctgagctgaacgggaagctcactggcatggccttccgtgtccccactgccaacgtgtcagtggtggacctgacctgccgtctggaaaaacctgccaagtacgatgacatcaagaaggtagtgaagcaggcgtcggagggccccctcaagggcatcctgggctacactgagcaccaggtggtctcctccgacttcaacagcgacacccactcttccaccttcgacgctggggctggcattgccctcaacgaccactttgtcaagctcatttcctggtatgacaacgaatttggctacagcaacagggtggtgga

SEQ ID NO: 19362 - DNA, 132 bp, Macaca Mulatta
ggatagcctatgctgggggcgtgatagcagcactgtggtcagctcacacagtgatggcagctacgctgtctggtctgtggatgccggcagctccccaacgctgcagcccacggtagccaccacaccttacgg

SEQ ID NO: 19363 - DNA, 139 bp, Macaca Mulatta
ttcctatcctgagaatgagatgatctacaagtgggaaaatttcaagcttgaaatcaatgagaagaattcctggaagctcttccaatttgattttacaggagtgagcaacaaaactgaaataatcacaaccccagttggt

SEQ ID NO: 19364 - DNA, 8086 bp, Macaca Mulatta
  misc_feature (1)...(8086): n = A,T,C or G
gaagaagatacagaaatgaaaatgaaaagaaaatttggtactacagcacaaaggtccagcttgcagaattaattgactgtctgaacaaagattattgggaagcagagatctgcaaaattctggaagaaatgcgtgaagaaatccaccgacacatggatataaccgaattttttaccgataaggctcggggcagtaacaaatcctttctggcggcagctaatggnnnnnnnnnnnnnnnnnnnnnnnnnnnnnnnnnnnnnnnnnnnnnnnnnnnnnnnnnnnnnnnnnnnnnnnnnnnnnnnnnnnnnnnnnnnnnnnnnnnnnnnnnnnnnnnnnnnnnnnnnnnnnnnnnnnnnnnnnnnnnnnnnnnnnnnnnnnnnnnnnnnnnnnnnnnnnnnnnnnnnnnnnnnnnnnnnnnnnnnnnnnnnnnnnnnnnnnnnnnnnnnnnnnnnnnnnnnnnnnnnnnnnnnnnnnnnnnnnnnnnnnnnnnnnnnnnnnnnnnnnnnnnnnnnnnnnnnnnnnnnnnnnnnnnnnnnnnnnnnnnnnnnnnnnnnnnnnnnnnnnnnnnnnnnnnnnnnnnnnnnnnnnnnnnnnnnnnnnnnnnnnnnnnnnnnnnaggtactggtagttaactctcaaggggaaatttcacggttgagcaccaaaaaggaagtggtcatgaaaggaaatatcaacaattattttaaattgggtcaagaagggaagtatcgcgtctaccacaatcaatactccaccaattcatttgctttgaataagcaccagcacagagaagatcatgnnnnnnnnnnnnnnnnnnnnnnnnnnnnnnnnnnnnnnnnnnnnnnnnnnnnnnnnnnnnnnnnnnnnnnnnnnnnnnnnnnnnnnnnnnnnnnnnnnnnnnnnnnnnnnnnnnnnnnnnnnnnnnnnnnnnnnnnnnnnnnnnnnnnnnnnnnnnnnnnnnnnnnnnnnnnnnnnnnnnnnnnnnnnnnnnnnnnnnnnnnnnnnnnnnnnnnnnnnnnnnnnnnnnnnnnnnnnnnnnnnnnnnnnnnnnnnnnnnnnnnnnnnnnnnnnnnnnnnnnnnnnnnnnnnnnnnnnnnnnnnnnnnnnnnnnnnnnnnnnnnnnnnnnnnnnnnnnnnnnnnnnnnnnnnnnnnnnnnnnnnnnnnnnnnnnnnnnnnnnnnnnnnnnnnnnnnnnnnnnnnnnnnnnnnnnnnnnnnnnnnnnnnnnnnnnnnnnnnnnnnnnnnnnnnnnnnnnnnnnnnnnnnnnnnnnnnnnnnnnnnnnnnnnnnnnnnnnnnnnnnnnnnnnnnnnnnnnnnnnnnnnnnnnnnnnnnnnnnnnnnnnnnnnnnnnnnnnnnnnnnnnnnnnnnnnnnnnnnnnnnnnnnnnnnnnnnnnnnnnnnnnnnnnnnnnnnnnnnnnnnnnnnnnnnnnnnnnnnnnnnnnnnnnnnnnnnnnnnnnnnnnnnnnnnnnnnnnnnnnnnnnnnnnnnnnnnnnnnnnnnnnnnnnnnnnnnnnnnnnnnnnnnnnnnnnnnnnnnnnnnnnnnnnnnnnnnnnnnnnnnnnnnnnnnnnnnnnnnnnnnnnnnnnnnnnnnnnnnnnnnnnnnnnnnnnnnnnnnnnnnnnnnnnnnnnnnnnnnnnnnnnnnnnnnnnnnnnnnnnnnnnnnnnnnnnnnnnnnnnnnnnnnnnnnnnnnnnnnnnnnnnnnnnnnnnnnnnnnnnnnnnnnnnnnnnnnnnnnnnnnnnnnnnnnnnnnnnnnnnnnnnnnnnnnnnnnnnnnnnnnnnnnnnnnnnnnnnnnnnnnnnnnnnnnnnnnnnnnnnnnnnnnnnnnnnnnnnnnnnnnnnnnnnnnnnnnnnnnnnnnnnnnnnnnnnnnnnnnnnnnnntaacaaaagcaaaagaagggtgtccgattgactcgatgcgacaagaacagagcccgaatgcaaataatgatcgacctgaggacttgattccgggatgttcagaaagtgattcctcagttcttggaatgagggatcctagtcgtaccaccaacaaactttatccaaaagatcaagtgttagatgatgtctcctttcggagcccagaaacaaactgtcagaaagaaaattccgttgaaaatgacatagaagaaaatgcctctgaccctgccaggaaaggccaggaacccagtaagagtagaacaaaaggaaatggtattttcattgatgactctaaactagccaatgcaggtgatattggttctttgatctataggaacgaaaaactgctcatacaggaggaaaatgacaccatcgtttcttcttccaagagtgctttacattcatcagtgcctaaaagtaccaatgacagagatgccacacctctgtcaaaagcaatggactttgaaggaaaactgggatgtgactctgaatctaatagcactttggaaaatagttctgatactgtgtctattcacgatagcagtgaagaagatatgattgttcagaatagcaatgaaagtatttctgaacagttcagaactcaagaacaaggtattgaaggcttggagccattaaaatgtgaattggtttctgagaagtccactggaaactgtgaggacagacagctgggtaaggtaactgaagcaaatggtnnnnnnnnnnnnnnnnnnnnnnnnnnnnnnnnnnnnnnnnnnnnnnnnnnnnnnnnnnnnnnnnnnnnnnnnnnnnnnnnnnnnnnnnnnnnnnnnnnnnnnnnnnnnnnnnnnnnnnnnnnnnnnnnnnnnnnnnnnnnnnnnnnnnnnnnnnnnnnnnnnnnnnnnnnnnnnnnnnnnnnnnnnnnnnnnnnnnnnnnnnnnnnnnnnnnnnnnnnnnnnnnnnnnnnnnnnnnnnnnnnnnnnnnnnnnnnnnnnnnnnnnnnnnnnnnnnnnnnnnnnnnnnnnnnnnnnnnnnnnnnnnnnnnnnnnnnnnnnnnnnnnnnnnnnnnnnnnnnnnnnnnnnnnnnnnnnnnnnnnnnnnnnnnnnnnnnnnnnnnnnnnnnnnnnnnnnnnnnnnnnnnnnnnnnnnnnnnnnnnnnnnnnnnnnnnnnnnnnnnnnnnnnnnnnnnnnnnnnnnnnnnnnnnnnnnnnnnnnnnnnnnnnnnnnnnnnnnnnnnnnnnnnnnnnnnnnnnnnnnnnnnnnnnnnnnnnnnnnnnnnnnnnnnnnnnnnnnnnnnnnnnnnnnnnnnnnnnnnnnnnnnnnnnnnnnnnnnnnnnnnnnnnnnnnnnnnnnnnnnnnnnnnnnnnnnnnnnnnnnnnnnnnnnnnnnnnnnnnnnnnnnnnnnnnnnnnnnnnnnnnnnnnnnnnnnnnnnnnnnnnnnnnnnnnnnnnnnnnnnnnnnnnnnnnnnnnnnnnnnnnnnnnnnnnnnnnnnnnnnnnnnnnnnnnnnnnnnnnnnnnnnnnnnnnnnnnnnnnnnnnnnnnnnnnnnnnnnnnnnnnnnnnnnnnnnnnnnnnnnnnnnnnnnnngcagtgtggacatcatctaagtaaaggagcagagcaaaactgtggtcaccacgacagtgacagactccttgaccaccacaggaggcacgctggttacatctatgactgtgagcaaagagtattccacacgagacaaagtgaaactgatgaaattttcaagaccaaagaagactcgctcaggtacagctctgccatcctatagaaaatttgttaccaagagcagcaagaagagcatttttgttttgcctaacgatgacttaaaaaagttggccagaaaaggaggaatccgagaggtcccttattttaattacaaagcaaaacctgctttggatatatggccatatccttctcctnnnnnnnnnnnnnnnnnnnnnnnaggtatagacttcagaccgtaaagtccttagctggagtgagcctgatgttacggttactgtgggcaagtttgagatgggatgacatggcggccaaggctcctccaggaggagggactacacggacannnnnnnnnnnnnnnnnnnnnnnnnnnnnnnnnnnnnnnnnnnnnnnnnnnnnnnnnnnnnnnnnnnnnnnnnnnnnnnnnnnnnnnnnnnnnnnnnnnnnnnnnnnnnnnnnnnnnnnnnnnnnnnnnnnnnnnnnnnnnnnnnnnnnnnnnnnnnnnnnnnnnnnnnnnnnnnnnnnnnnnnnnnnnnnnnnnnnnnnnnnnnnnnnnnnnnnnnnnnnnnnnnnnnnnnnnnnnnnnnnnnnnnnnnnnnnnnnnnnnnnnnnnnnnnnnnnnnnnnnnnnnnnnnnnnnnnnnnnnnnnnnnnnnnnnnnnnnnnnnnnnnnnnnnnnnnnnnnnnnnnnnnnnnnnnnnnnnnnnnnnnnnnnnnnnnnnnnnnnnnnnnnnnnnnnnnnnnnnnnnnnnnnnnnnnnnnnnnnnnnnnnnnnnnnnnnnnnnnnnnnnnnnnnnnnnnnnnnnnnnnnnnnnnnnnnnnnnnnnnnnnnnnnnnnnnnnnnnnnnnnnnnnnnnnnnnnnnnnnnnnnnnnnnnnnnnnnnnnnnnnnnnnnnnnnnnnnnnnnnnnnnnnnnnnnnnnnnnnnnnnnnnnnnnnnnnnnnnnnnnnnnnnnnnnnnnnnnnnnnnnnnnnnnnnnnnnnnnnnnnnnnnnnnnnnnnnnnnnnnnnnnnnnnnnnnnnnnnnnnnnnnnnnnnnnnnnnnnnnnnnnnnnnnnnnnnnnnnnnnnnnnnnnnnnnnnnnnnnnnnnnnnnnnnnnnnnnnnnnnnnnnnnnnnnnnnnnnnnnnnnnnnnnnnnnnnnnnnnnnnnnnnnnnnnnnnnnnnnnnnnnnnnnnaggtgctcctcagcaagtgatgactcaaatcatcaggggacagcctgtctccactgcaatctctgcccctaacacagtttcctcaacacctgggcagaaaagcttaacttcagcaacatccacttcaaatatacagtcttcagcctcacaaccccctcgcccccaacaaggacannnnnnnnnnnnnnnnnnnnnnnnnnnnnnnnnnnnnnnnnnnnnnnnnnnnnnnnnnnnnnnnnnnnnnnnnnnnnnnnnnnnnnnnnnnnnnnnnnnnnnnnnnnnnnnnnnnnnnnnnnnnnnnnnnnnnnnnnnnnnnnnnnnnnnnnnnnnnnnnnnnnnnnnnnnnnnnnnnnnnnnnnnnnnnnnnnnnnnnnnnnnnnnnnnnnnnnnnnnnnnnnnnnnnnnnnnnnnnnnnnnnnnnnnnnnnnnnnnnnnnnnnnnnnnnnnnnnnnnnnnnnnnnnnnnnnnnnnnnnnnnnnnnnnnnnnnnnnnnnnnnnnnnnnnnnnnnnnnnnnnnnnnnnnnnnnnnnnnnnnnnnnnnnnnnnnnnnnnnnnnnnnnnnnnnnnnnnnnnnnnnnnnnnnnnnnnnnnnnnnnnnnnnnnnnnnnnnnnnnnnnnnnnnnnnnnnnnnnnnnnnnnnnnnnnnnnnnnnnnnnnnnnnnnnnnnnnnnnnnnnnnnnnnnnnnnnnnnnnnnnnnnnnnnnnnnnnnnnnnnnnnnnnnnnnnnnnnnnnnnnnnnnnnnnnnnnnnnnnnnnnnnnnnnnnnnnnnnnnnnnnnnnnnnnnnnnnnnnnnnnnnnnnnnnnnnnnnnnnnnnnnnnnnnnnnnnnnnnnnnnnnnnnnnnnnnnnnnnnnnnnnnnnnnnnnnnnnnnnnnnnnnnnnnnnnnnnnnnnnnnnnnnnnnnnnnnnnnnnnnnnnnnnnnnnnnnnnnnnnnnnnnnnnnnnnnnnnnnnnnnnnnnnnnnnnnnnnnnnnnnnnnnnnnnnnnnnnnnnnnnnnnnnnnnnnnnnnnnnnnnnnnnnnnnnnnnnnnnnnnnnnnnnnnnnnnnnnnnnnnnnnnnnnnnnnnnnnnnnnnnnnnnnnnnnnnnnnnnnnnnnnnnnnnnnnnnnnnnnnnnnnnnnnnnnnnnnnnnnnnnnnnnnnnnnnnnnnnnnnnnnnnnnnnnnnnnnnnnnnnnnnnnnnnnnnnnnnnnnnnnnnnnnnnnnnnnnnnnnnnnnnnnnnnnnnnnnnnnnnnnnnnnnnnnnnnnnnnnnnnnnnnnnnnnnnnnnnnnnnnnnnnnnnnnnnnnnnnnnnnnnnnnnnnnnnnnnnnnnnnnnnnnnnnnnnnnnnnnnnnnnnnnnnnnnnnnnnnnnnnnnnnnnnnnnnnnnnnnnnnnnnnnnnnnnnnnnnnnnnnnnnnnnnnnnnnnnnnnnnnnnnnnnnnnnnnnnnnnnnnnnnnnnnnnnnnnnnnnnnnnnnnnnnnnnnnnnnnnnnnnnnnnnnnnnnnnnnnnnnnnnnnnnnnnnnnnnnnnnnnnnnnnnnnnnnnnnnnnnnnnnnnnnnnnnnnnnnnnnnnnnnnnnnnnnnnnnnnnnnnnnnnnnnnnnnnnnnnnnnnnnnnnnnnnnnnnnnnnnnnnnnnnnnnnnnnnnnnnnnnnnnnnnnnnnnnnnnnnnnnnnnnnnnnnnnnnnnnnnnnnnnnnnnnnnnnnnnnnnnnnnnnnnnnnnnnnnnnnnnnnnnnnnnnnnnnnnnnnnnnnnnnnnnnnnnnnnnnnnnnnnnnnnnnnnnnnnnnnnnnnnnnnnnnnnnnnnnnnnnnnnnnnnnnnnnnnnnnnnnnnnnnnnnnnnnnnnnnnnnnnnnnnnnnnnnnnnnnnnnnnnnnnnnnnnnnnnnnnnnnnnnnnnnnnnnnnnnnnnnnnnnnnnnnnnnnnnnnnnnnnnnnnnnnnnnnnnnnnnnnnnnnnnnnnnnnnnnnnnnnnnnnnnnnnnnnnnnnnnnnnnnnnnnnnnnnnnnnnnnnnnnnnnnnnnnnnnnnnnnnnnnnnnnnnnnnnnnnnnnnnnnnnnnnnnnnnnnnnnnnnnnnnnnnnnnnnnnnnnnnnnnnnnnnnnnnnnnnnnnnnnnnnnnnnnnnnnnnnnnnnnnnnnnnnnnnnnnnnnnnnnnnnnnnnnnnnnnnnnnnnnnnnnnnnnnnnnnnnnnnnnnnnnnnnnnnnnnnnnnnnnnnnnnnnnnnnnnnnnnnnnnnnnnnnnnnnnnnnnnnnnnnnnnnnnnnnnnnnnnnnnnnnnnnnnnnnnnnnnnnnnnnnnnnnnnnnnnnnnnnnnnnnnnnnnnnnnnnnnnnnnnnnnnnnnnnnnnnnnnnnnnnnnnnnnnnnnnnnnnnnnnnnnnnnnnnnnnnnnnnnnnnnnnnnnnnnnnnnnnnnnnnnnnnnnnnnnnnnnnnnnnnnnnnnnnnnnnnnnnnnnnnnnnnnnnnnnnnnnnnnnnnnnnnnnnggtctcacaacaacaaactgcagtctacagctccttaaagttnnnnnnnnnnnnnaacataaaatgcagcaagaatctggttgtctgaactattttaaattaaggaaccagatgtttttagtcnnnnnnnnnnnnnnnnnnnnnnctaaactttgtttttattggtcataataatccaattatattgttggccaattttgtccaatggacaagaaaaaagcaaagtcaacggcagcattatcttgtcaggatcaaatggttttactattgtggcagaagctagaaaactctgcttattnnnnnnnnnnnnnnnnnnnnnnnnnnnnnnnnatactatggggtcaagcgcagctccatggaaatgctacatctgctcttccgtgaagaagctggtttagagtctcaaagacagcttttgactgtgtatattaattgtcgcaaaaaagacacgtttttattgctgccttcatttgtcagctaattattttctcttataaaatccagccctggttacgtataatccttctgtatcttatcatgattcctgtacgtaaaagtacaagacgacctctagatgtcttttctttctatgaaaggagctgctatgtacacatgtgcacacacacataactgggaatcaacaatgagtttattgttcctggtagattaaaattaagcttacataaagattgggctaagtggtcctggactgcagactctgttgccttgaatataacagtacaatttgtcaattacaatgcaccaggttaaaatgagtaaaatctgtttgaaggtatcttgttt

SEQ ID NO: 19365 - DNA, 454 bp, Macaca Mulatta
ctgttgacataagcctgcttcttcctctctgcgtgctttaccgctgagtttctgttcttcctgggaagctgcaccagcacctttgagccttgggccacactgaggcttaggcccttcctgggaccggctcctgccctcccctgaggatggcctggactcacgccctcttgcttccttttgggctcaaagcccttcttacctctgttgatggtttccacaggaacaacagcatctttcaccaagatgggtggcaccaaccttgctgggacttggatcccaggggcttacctcttcaagtggggagacagggcagggtccatgcctctgctgtagtgtatgaaattaactaattcaaaattcactgattggtggatgcacatttctctttaacctgggtttccctgggtctcatggacagcttcagcttgatttgggtggggattttcttccagat

SEQ ID NO: 19366 - DNA, 365 bp, Macaca Mulatta
tccttcaaggaagccactctggccaagaggtttgctctgaagaccagaagtcagatcactaagcggaaaaggatgtccctcgtcaaggagaagaaagcagcccagaccctcagtgcgatcttgcttgccttcatcatcacttggaccccatacaatatcatggttctggtgaacaccttttgtgacagctgcatacccaaaaccttttggaatctgggctactggctgtgctacatcaacagcaccgtgaaccccgtgtgctatgccctgtgcaacaaaacattcagaaccactttcaagatgctgctgctgtgccagtgtgacaaaaaaaagaggcgcaagcagcagtaccagcagagacagtc

SEQ ID NO: 19367 - DNA, 1851 bp, Macaca Mulatta
  misc_feature (1)...(1851): n = A,T,C or G
nggaggaaccagaactacttggacatcctgcggctgctctcgctgggcgaccggcagctcagtgcctttgacatctctctgcgtttcacacacctcttctggtttggggacctcaactaccgcctggacatggatatccagnnnnnnnnnnnnnnnnnnnnnnnnnnnnnnnnnnnnnnnnnnnnnnnnnnnnnnnnnnnnnnnnnnnnnnnnnnnnnnnnnnnnnnnnnnnnnnnnnnnnnnnnnnnnnnnnnnnnnnnnnnnnnnnnnnnnnnnnnnnnnnnnnnnnnnnnnnnnnnnnnnnnnnnnnnnnnnnnnnnnnnnnnnnnnnnnnnnnnnnnnnnnnnnnnnnnnnnnnnnnnnnnnnnnnnnnnnnnnnnnnnnnnnnnnnnnnnnnnnnnnnnnnnnnnnnnnnnnnnnnnnnnnnnnnnnnnnnnnnnnnnnnnnnnnnnnnnnnnnnnnnnnnnnnnnnnnnnnnnnnnnnnnnnnnnnnnnnnnnnnnnnnnnnnnnnnnnnnnnnnnnnnnnnnnnnnnnnnnnnnnnnnnnnnnnnnnnnnnnnnnnnnnnnnnnnnnnnnnnnnnnnnnnnnnnnnnnnnnnnnnnnnnnnnnnnnnaatacaagaagagctccttgaaagatgcccaaagcagtgacaacatcaacttcctcaaagtgcagtggtcttcacgccagctgcccacgngctcaaaccaattctggctgatatcgagtacctgcaggaccagcacctcctgctcacagtcaagtccatggatggctatgaatcctatggnnnntgtgtggttgcactcaagtccatgattggcagcacggcccaacagttcctgaccttcctgtcccaccgtggcgaggagacaggcaatatcagaggctccatgaaggtgcgggtgcccacggagcgcctgggcacccgtgagcggctctacnnnnnnnnnnnnnnnnnnnnnnnnnnnnnnnnnnnnnnnnnnnnnnnnnnnnnnnnnnnnnnnnnnnnnnnnnnnncaggtcagggagccgcaagccagccttcacagaggcctcctgcccgctctccaggttattcgaagaaccagagaaacctccaccaactgggaggcccccagccccaccccgagcagctccccgggaggagcccttgacccccaggnnnnnnccaggttgaagccagagggaactcctgaaccagaaggngtggccgcccccccacccaagaacagcttcaataaccctgcctactacgtccttgaagnnnnnnnnnnnnnnnnnnnnnnnnnnnnnnnnnnnnnnnnnnnnnnnnnnnnnnnnnnnnnnnnnnnnnnnnnnnnnnnnnnnnnnnnnnnnnnnnnnnnnnnnnnnnnnnnnnnnnnnnnnnnnnnnnnnnnnnnnnnnnnnnnnnnnnnnnnnnnnnnnnnnnnnnnnnnnnnnnnncagacattccacctccaccactgccggactcagccatcttcctgtcacctagcctggatcctttaccagggccagtggtccggggccgtggtggggnnnnnnnnnnnnnnnnnnnnnnnnnnnnnnnnnnnnnnnnnnnnnnnnnnnnnnnnnnnnnncaccagccagcactttcctgggggaagtggccggtggggatgaccggtcctgctcggtgctgcagatggccaagacgctgagcgaggtggactacttccctgctgggcccgcacgctcagcactcctcccaggccccctggagctgcagccacaccggggactgtcctcggactatggccggcccctcagcttccctccaccccgcatccgggagagcatccaggaagacctggcagaggagg

SEQ ID NO: 19368 - DNA, 642 bp, Macaca Mulatta
  misc_feature (1)...(642): n = A,T,C or G
gggggaaggaggaagtaacttgtggtatgctgagaaagcttcagaagaactgaccattgctggcatgacgtttacaacttttgatctgggtggacatgttcaagctcgaagagtgtggaaaaactatcttcctgctatcaatggcattgtatttctggtggattgtgcagaccatgaaaggctgttagagtcaaaagaagaacttgattcactaatgacagatgaaaccattgctaatgtgcctatactgattcttgggaataagatcgacagacctgaagccatcagtgaagagaggttgcgagagatgtttggtttatatggtcagacaacaggaaaggggagtgtatctctgaaagaactgaatgccccaacccttaaaagttttcatgtgtaatgtggcccaaaaaacaaggttacggagaagggtttcccttggatggcaccataccttgattaaccccaccccccggtttggttccccgttgtcacggttcaggctttacccaaaaatttgttttcccacccggccaaaattggaattcaaaaactttttgggggttaannnnnnnnnnnnnnnnnnnnnagggtaacaccccttttttgggggaaattaaaaccttttcccggtttttaactccg

SEQ ID NO: 19369 - DNA, 969 bp, Macaca Mulatta
  misc_feature (1)...(969): n = A,T,C or G
cagctctatgagatgttctcttcggtgatgaaacacctgccaggaccacagcaacaggcctttaaggagctgcaagggctggaggacttcatagccaagaaggtggagcacaacaggcgcacgctggatcccaactccccacgggacttcatcgactcctttctcatccgcatgcaggaggnnnnnnnnnnnnnnnnnnnnnnnnnnnnnnnnnnnnnnnnnnnnnnnnnnnnnnnnnnnnnnnnnnnnnnnnnnnnnnnnnnnnnnnnnnnnnnnnnnnnnnnnnnnnnnnnnnnnnnnnnnnnnnnnnnnnnnnnnnnnnnnnnnnnnnnnnnnnnnnnnnnnnnnnnnnnnnnnnnnnnnnnnnnnnnnnnnnnnnnnnnnnnnnnnnnnnnnnnnnnnnnnnnnnnnnnnnnnnnnnnnnnnnnnnnnnnnnnnnnnnnnnnnnnnnnnnnnnnnnnnnnnnnnnnnnnnnnnnnnnnnnnnnnnnnnnnnnnnnnnnnnnnnnnnnnnnnnnnnnnnnnnnnnnnnnnnnnnnnnnnnnnnnnnnnnnnnnnnnnnnnnnnnnnnnnnnnnnnnnnnnnnnnnnnnnnnnnnnnnnnnnnnnnnnnnnnnnnnnnnnnnnnnnnnnnnnnnnnnnnnnnnnnnnnnggaaagcagaactgtttcggagaaggcctggccagaatggagctctttctcttcttcaccaccatcatgcagaacttccgcttcaagtccccccagtcgcccaaggacatcgacgtgtcccccaaacacgtgggctttgccacgatcccacgaaactacaccatgagcttcctgccccgctgagtgagggctgcgctggtgcaggtctggtgggcggggccgtggaaagggcggggctaggggcggggctcgtgggaggggcagggctaagaatggggacgggatgcgggaaaggaagccgcgaggtggttagaggga

SEQ ID NO: 19370 - DNA, 1870 bp, Macaca Mulatta
  misc_feature (1)...(1870): n = A,T,C or G
agttggacaaagttgtggaaaaacataaagaatcttacagacgaatcctgggacagcttttagtggtagaaaaatcccataggcaaaccatattggagttggaggaagaaaagagaaaacataaagaatatatggagaagagtgatgaattcatatgcttactagaacaggaatgtgaaangattaaagaagctaattgatcaagaaatcaagtctcaggaggagaaggagcaagaaaaggagaaaagggtcaccaccctgaaagaggagctgaccaagctgaagtcttttgctttgatggtggtggatgaacaacaaaggctgacggcacagctcacccttcaaaggcagaaaatccaagagctgaccacaaatgcaaaggaaacacataccaaactagcccttgctgaagccagagttcaggaggaagagcagaaggcaaccagactagagaaggaactgcaaacacagaccacaaagtttcaccaggaccaacacacaattatggcgaagctcaccaatgaggacagtcaaaatcgccagcttcaacaaaagctggcagcactcagccggcagattgatgagttagaagagacaaacaggtctttacgannnnnnnnnnnnnnnnnnnnnnnnnnnnnnnnnnnnnnnnnnnnnnnnnnnnnnnnnnnnnnnnnnnnnnnnnnnnnnnnnnnnnnnnnnnnnnnnnnnnnnnnnnnnnnnnnnnnnnnnnnnnnnnnnnnnnnnnnnnnnnnnnnnnnnnnnnnnnnnnnnnnnnnnnnnnnnnnnnnnnnnnnnnnnnnnnnnnnnnnnnnnnnnnnnnnnnnnnnnnnnnnnnnnnnnnnnnnnnnnnnnnnnnnnnnnnnnnnnnnnnnnnnnnnnnnnnnnnnnnnnnnnnnnnnnnnnnnnnnnnnnnnnnnnnnnnnnnnnnnnnnnnnnnnnnnnnnnnnnnnnnnnnnnnnnnnnnnnnnnnnnnnnnnnnnnnnnnnnnnnnnnnnnnnnnnnnnnnnnnnnnnnnnnnnnnnnnnnnnnnnnnnnnnnnnnnnnnnnnnnnnnnnnnnnnnnnnnnnnnnnnnnnnnnnnnnnnnnnnnnnnnnnnnnnnnnnnnnnnnnnnnnnnnnnnnnnnnnnnnnnnnnnnnnnnnnnnnnnnnnnnnnnnnnnnnnnnnnnnnnnnnnnnnnnnnnnnnnnnnnnnnnnnnnnnnnnnnnnnnnnnnnnnnnnnnnnnnnnnnnnnnnnnnnnnnnnnnnnnnnnnnnnnnnnnnnnnnnnnnnnnnnnnnnnnnnnnnnnnnnnnnnnnnnnnnnnnnnnnnnnnnnnnnnnnnnnnnnnnnnnnnnnnnnnnnnnnnnnnnnnnnnnnnnnnnnnnnnnnnnnnnnnnnnnnnnnnnnnnnnnnnnnnnnnnnnnnnnnnnnnnnnnnnnnnnnnnnnnnnnnnnnnnnnnnnnnnnnnnnnnnnnnnnnnnnnnnnnnnnnnnnnnnnnnnnnnnaagctaaaggacacgatagccattgaggacgacctcatgaaaacagaagatgaacatgagactctagaacgaaggtacgctaatgaaagagacaaagctcaatttttatctaaagagctggagcatgttaaaatggaacttactaagtacaaattagcagaaaagacagagaccagccatgaacaatggcttttcaaaaggcttcaagaagaagaagctaagtcagggcacctctcaagagaagtggatgcattaaaagagaaaattcatgaatacatggcaactgaagacctaatatgtcacctccagggagatcactcagtcctgcaaaaaaaactaaatcaacaagaaaacaggaacagagatttaggaagagagattga

SEQ ID NO: 19371 - DNA, 661 bp, Macaca Mulatta
ggatctgaaggagttcgactttaatgccctgttgggtatagatgacctggaaaccatgccagatgagcttctggccacgttggatgactcgtgtgatctctttgtccccctagtccaggagactaataaggagccccctcagatggtgaacccgatttgccatctcccagaaaggtgaacaaaacccaaccaggttgcccccttcaccttcttgcaacctcttcccctttccccagaggtcctgtcctccactctagattattcctgtagtctagagctgggaagggaagcagatatctctgaaggagataggaagccagacttcactgcttacatttccatgatccctcagtgcataaaggaggaagtcactccctcagataatgatagtggcatctgtatgagcccagagtcctatctcagctctccccagtacacctccaggggctctccgagtaggagcctgccatctccaggtgtcctctgtggctctgcctgtcccaaaccttatgaccctcctggggagaagatggtagcagcacaagtaaagggtgagaaactggataagaagctgaaaaaatggagcaaaaacagaacagcaggaactaggtatcaccagaagaagagggtggagtaggaggtcctcaatggtgagtgcaaa

SEQ ID NO: 19372 - DNA, 310 bp, Macaca Mulatta
  misc_feature (1)...(310): n = A,T,C or G
agtgacctagagtcccgcagggatgtgaaaagagaagaaggagaggcctttgctagggagcatggacttatattcatggaaacttcagccaaaacagcctgcaatgttgaagagnnnnnnnnnnnnnnnnnnnnnnnnnnnnnnnnnnnnnnnnnnnnnnnnnnnnnnnnnnnnnnnnnnnnnnnnnnnnngcatatacaatctgcttcccactaagaattagggtcaaggacattctgcttgaacacttggaattacccagatttggttggcctttggttgatagatcctctgcctcagaatttcattg

SEQ ID NO: 19373 - DNA, 1669 bp, Macaca Mulatta
  misc_feature (1)...(1669): n = A,T,C or G
gattttagccattggtttaattaatgaagccctggatgaaggtgatgcccaaaagactctgcaggccctacagattcctgcagctaaacttgagggagtccttgcagaagtggcccagcattaccaagacacactgattagagcgaagagagagaaagcccaggnnnnnnnnnnnnnnnnnnnnnnnnnnnnnnnnnnnnnnnnnnnnnnnnnnnnnnnnnnnnnnnnnnnnnnnnnnnnnnnnnnnnnnnnnnnnnnnnnnnnnnnnnnnnnnnnnnnnnnnnnnnnnnnnnnnnnnnnnnnnnnnnnnnnnnnnnnnnnnnnnnnnnnnnnnnnnnnnnnnnnnnnnnnnnnnnnnnnnnnnnnnnnnnnnnnnnnnnnnnnnnnnnnnnnnnnnnnnnnnnnnnnnnnnnnnnnnnnnnnnnnnnnnnnnnnnnnnnnnnnnnnnnnnnnnnnnnnnnnnnnnnnnnnnnnnnnnnnnnnnnnnnnnnnnnnnnnnnnnnnnnnnnnnnnnnnnnnnnnnnnnnnnnnnnnnnnnnnnnnnnnnnnnnnnnnnnnnnnnnnnnnnnnnnnnnnnnnnnnnnnnnnnnnnnnnnnnnnnnnnnnnnnnnnnnnnnnnnnnnnnnnnnnnnnnnnnnnnnnnnnnnnnnnnnnnnnnnnnnnnnnnnnnnnnnnnnnnnnnnnnnnnnnnnnnnnnnnnnnnnnnnnnnnnnnnnnnnnnnnnnnnnnnnnnnnnnnnnnnnnnnnnnnnnnnnnnnnnnnnnnnnnnnnnnnnnnnnnnnnnnnnnnnnnnnnnnnnnnnnnnnnnnnnnnnnnnnnnnnnnnnnnnnnnnnnnnnnnnnnnnnnnnnnnnnnnnnnnnnnnnnnnnnnnnnnnnnnnnnnnnnnnnnnnnnnnnnnnnnnnnnnnnnnnnnnnnnnnnnnnnnnnnnnnnnnnnnnnnnnnnnnnnnnnnnnnnnnnnnnnnnnnnnnnnnnnnnnnnnnnnnnnnnnnnnnnnnnnnnnnnnnnnnnnnnnnnnnnnnnnnnnnnnnnnnnnnnnnnnnnnnnnnnnnnnnnnnnnnnnnnnnnnnnnnnnnnnnnnnnnnnnnnnnnnnnnnnnnnnnnnnnnnnnnnnnnnnnnnnnnnnnnnnnnnnnnnnnnnnnnnnnnnnnnnnnnnnnnnnnnnnnnnnnnnnnnnnnnnnnnnnnnnnnnnnnnnnnnnnnnnnnnnnnnnnnnnnnnnnnnnnnnnnnnnnnnnnnnnnnnnnnnnnnnnnnnnnnnnnnnnnnnnnnnnnnnnnnnnnnnnnnnnnnnnnnnnnnnnnnnnnnnnnnnnnnnnttatttcagaccaatcccacctatctggccaagctaatttttcagatgccccagaacaagtccaccaagttcatggactctgtaatcttcacactctacaactacgcatccaaccagcgagaagagtacctgctcctgcggctctttaagacagcgcttcaagaggaaatcaagtngtcgaaggtagatcagattcaagagattgtcacaggaaatcctacggttattaaaatggttgtaagtttcaaccgtggtgcgcgtggncagaatgccctgagacagatcttggccccagtcgtgaaaggaaatatggatgacaatctctcacatcaaactgaccctgtggatatta

SEQ ID NO: 19374 - DNA, 400 bp, Macaca Mulatta
tcactctgtaattgggatctctgtggaaacaccaggtcaggcgaggtcctagatactgaattccagagattagtggagtcaggatcacctgatggcttgggtcctgtgaccctcaaagagaacctctatgctgtccagagggttgcacttgctggtgaggcagatgtggggctgggaagcttttggggaccacacaggcacactagcagaggtgggggaaagcaagcaatatccaggcatggagaatcccgtgttcaactggagttatgttggaaaccaaggatttgactgtggtcatggccattgcaggtcgagcccatttaccctgcaatcacatggtccagctgttcatgctgctacatgtgagcccaaagtaactggcataatagtcataatggct

SEQ ID NO: 19375 - DNA, 823 bp, Macaca Mulatta
gggctttctttttgaggaagacgcggtcgtaggacttgcggatctttggttcgcacgctcctgctcctgactcaccgctgttcgctctcgccgaggaacaagtcggtcaggaagccgcgcagcaggcatggcttttaaggatactggaaaaacacccgtggagccggaggtggcaattcaccgaattcgaatcaccctaacgagccgcaacgttaaatccctggaaaaggtgtgtgctgacttgatcagaggcgcgaaggaaaagaacctgaaagtgaaaggaccagttcgaatgcctaccaagactttgagaatcactacaagaaaaactccttgtggtgaaggttctaagacatgggatcgtttcccgatgagaatccccaagcgactcattgacttgcacagtccttctgagattggtaagcagattactttccatcagtattgagccaggagttgaggtggaagtcaccattgcagatgcttaagtcaactattttattaattgattaccagttgtttaaaaatataactctatgtagacgtatgcgttggagaggggagagcaatacggaactgaagacatatttgttcgttaatgcacacgggtatagtgatctattcttctgtatccgatagtctcgaggggatgcctcgggtaaagtggtgcttgttggctaggcgccctcgccgttcctaaagacaccttttccttcaacctctcttgtgtggggcggggagttcccctatttagcaagagtcaaactcgctactatagtgtttttccccagaagaaaccccgccgtatactacacgtcggacg

SEQ ID NO: 19376 - DNA, 897 bp, Macaca Mulatta
  misc_feature (1)...(897): n = A,T,C or G
gaagcagaggcggatagaacggataaagcagaagcgggcccagttgcaagaacttcttctacagnnnnnnnnnnnnnnnnnnnnnnnnnnnnnnnnnnnnnnnnnnnnnnnnnnnnnnnnnnnnnnnnnnnnnnnnnnnnnnnnnnnnnnnnnnnnnnnnnnnnnnnnnnnnnnnnnnnnnnnnnnnnnnnnnnnnnnnnnnnnnnnnnnnnnnnnnnnnnnnnnnnnnnnnnnnnnnnnnnnnnnnnnnnnnnnnnnnnnnnnnnnnnnnnnnnnnnnnnnnnnnnnnnnnnnnnnnnnnnnnnnnnnnnnnnnnnnnnnnnnnnnnnnnnnnnnnnnnnnnnnnnnnnnnnnnnnnnnnnnnnnnnnnnnnnnnnnnnnnnnnnnnnnnnnnnnnnnnnnnnnnnnnnnnnnnnnnnnnnnnnnnnnnnnnnnnnnnnnnnnnnnnnnnnnnnnnnnnnnnnnnnnnnnnnnnnnnnnnnnnnnnagtgtaaaccaagggttatgcttggatgcagaagtggccttagcaactgggcagttcctggccccaaacagtcaccagtccagcagtgcagcctctcactgctccgagtcccgaggcgagaccccctgttcgttcaatgatgaagatgaggaagatgatgaggaggattcctcctccccagaataaagacaagagaaagcctacgtttcaatatgtgatgctcatgtgtgtttgtagtgtgagctcttgtttttgaaatgattgcttcagtctttgcctttgtttgcactgtgtgttcagtgaaaactagagaaacacaataagcaaatcacatgaaggctgagatgattgagatgaaagttaacatagtgtgaatgaaagtctggccaacagagcagtagatgatataa

SEQ ID NO: 19377 - DNA, 779 bp, Macaca Mulatta
  misc_feature (1)...(779): n = A,T,C or G
gggacatccggtgtggtcgacgggtcctctaggagttttgggcgcgcggaccggagtaccttgcgtgtagttatgtcggcgtcggtagtgtctgtcatttcgcgtttcttagaagagtacttgagctccactccgcagcgtctgaagttgctggacgcgtacctgctgtatatactgctgaccggggcgctgcaattcggttactgtctcctcgtgggaaccttccccttcaactcttttctctcgggcttcatctcttgtgtggggagtttcatcctagcggtttgcctgagaatacagatcaacccacagaacaaagcggatttccaaggcatctccccagagcgagcctttgctgattttctctttgccagcaccatcctgcaccttgttgtcatgaactttgttggctgaatcattcccatttacgtaattgaggagtaggagactaaaagaatgttcactctttgaaatttcctggataagagttctggagatggcagcttgttggacacatggattttcttcagattttcagtagctctgatttttttgcaggagaaaagcccagagttcactctgtgtcagaacaacttttctacaaacattttattaattcaaacctgcctttcatttaaatgtaaccctttttgcccttcctaatttaaagaactcccatgcccactcctccnnnnnnnnnnnnnnnnnnntgggctctatatgctttaccatctgacatgaaccccaatccagactttatccacccactgactaataga

SEQ ID NO: 19378 - DNA, 432 bp, Macaca Mulatta
agaattgaagaggagctgggcagcaaggctaagtttgccggcaggaacttcagaaaccccctggccaagtaagctgtgggcaggcaagcccttcggtcacctgttggctaaatagacccctccccttgtgtcagctcgggcagcttgaggccccgaccaacgcttgcaggggtccctgctagttagcgcccctcacccgccgccgtggagtccgtgccgcttccttagaacttctacagaaccgagctccctggagccctgtttggcagctctagctttgccgtcgtgtaattggcccaaatcactgtttttctcgccttactttccaccaagtgtctggagtcatgtgagcctcgtgtcatctccgaggtggccacaggcaagatgcctggtggttttgtgcttaaaataaaaagcctcagtgacccatga

SEQ ID NO: 19379 - DNA, 309 bp, Macaca Mulatta
gatgaagcccggggcaagaactgtggtgtcttggtacattgcttggctggcattagccggtcagtcactgtgactgtggcttaccttatgcagaagctcaatctgtcgatgaacgatgcctatgacattgtcaagatgaagaaatccaacatatcccctaacttcaacttcatgggtcagctgctggacttcgagaggacactgggactcagcagcccctgtgacaaccgggttccagcacagcagctgtattttaccaccccctccaaccagaatgtctaccaggtggactccctgcaatctacgtga

SEQ ID NO: 19380 - DNA, 761 bp, Macaca Mulatta
  misc_feature (1)...(761): n = A,T,C or G
gggagagctgcttggagagctaagctggaaagacgtgggggtgcttatccctgcgtggaaacgcttgccaatgctttctcatttggacccagactccggatcgggagtcttatagctgaatcagctaccaagagaagttctaaagcgagaagagaaaagcacttcaatttgggacatttatttgcacctggaaatggggaatgggctatcagaccagacttctatcctgtccagcctgccttcatttcagtccttccacattcttattctgggtttggactgtgctggaaagacaactgtcttatacaggctgcagttcaatgaatttgtaaataccgtacctaccaaaggatttaacactgagaaaattaaggtaaccttgggaaattctaaaacagtcacgtttcacttctgggatgtaggtggtcaggagaagttaaggccactgtggaagtcatataccagatgcacagatggcattgtatttgttgtggactctgttgatgtcgaaaggatggaggaagccaaaactgaacttcacaaaataactaggatatcagaaaatcaaggagtccctgtacttatagttgctaacaaacaagacttgaggaactcattgtctctttcagaaattgagaaattgttagcaatgggtgaaactgagctcatcaactccttggcatttgcagnctaacctgtgcaatcttaagagatggcccttaagggaaggacttgtagaaactacatggatatgatcctta

SEQ ID NO: 19381 - DNA, 854 bp, Macaca Mulatta
tctaagagagaatggaatatatgggataaagaaagttactggaactaataggacacgctgtggctcatctgaagaaagctgatgaggccaatgataatctcttccgtgtctgttccattcttgccagcctccatgctctagcagatcagtatgaagaagcagagtattacttccaaaaggaattcagtaaagagcttactcctgtagcgaaacaactgctccatctgcggtatggcaactttcagctgtatcaaatgaagtgtgaagacaaggccatccaccactttatagagggagtaaaaataaaccagaaatcaagggagaaagaaaagatgaaagacaaactgcaaaaaattgccaaaatgcgactttctaaaaatggagcagattctgaggctttgcatgtcttggcattccttcaggagctgaataaaaaaatgcaacaagcagatgaagactctgagaggggtttggagtctggaagcctcatcccttcagcatcaagctggaatggggaatgaagaatagagatgtggtgcccactaggctactgctgaaagggagctgaaattcctccaccaagttggtattcaaaatatgtaatgactggtatggcaaaagattggactaagacactggccataccactggacaggactatgttaattgctgggtcttcagaaagcccaaggagttctgggagagggaccagattggggggtaggtccaagggcttggtgatagaattatttctcaattgacttcttgagtgcagtttgaactgtaacatttgcttagtcacctttagtggagtagtccactgggcttgtttctatgtttatataaagcagcca

SEQ ID NO: 19382 - DNA, 236 bp, Macaca Mulatta
cagggacttgtacagcaaaagcacagcagccatgagcacttacacaggcatttttactgaccaagttctttctgtgctgaagggagaggaataacagccagaccctccatctgtggacaaggggagagtcccccgctcccctgatcccccaggttcggactgagctcccccttcccagtagctcttgcatcctgctcccaactctagcctgaattcttttcaacaaaaaatacaat

SEQ ID NO: 19383 - DNA, 308 bp, Macaca Mulatta
  misc_feature (1)...(308): n = A,T,C or G
ggagtctagtggattttctcaagacctcttcaggcatcaagttgaccatcaacaaactcctggacatggcagcccaanattgcagaaggcatggcattcattgaagagcggaattatattcatcgtgaccttcgggctgccaacattctggtgtctgacaccctgagctgcaagattgcagactttggcctagcacgcctcattgaagacaacgagtacacagccagggagggngccaagtttcccattaagtggacagcgccagaagccattaactatgggacattcaccatcaagtcggatgtgtg

SEQ ID NO: 19384 - DNA, 687 bp, Macaca Mulatta
  misc_feature (1)...(687): n = A,T,C or G
atgaatcaaactgccattctgatttgctgccttgtctttctgactctaagtggtattcaaggaatacctctctcaagaactgtacgctgtacctgcatcagcattagtaatcaacctgttaatccaaggtctttagaaaaacttgaaattattcctccaagtcaattttgtccacatgttgagatcattgctacaatgaaaaagaagggtgagaagaggtgtctgaatccagaatctaaggccatcaagaatttactgaaagcagttagcaaggaaaggtctaaaagatctccctaaaaccagagggaaacaaagtgctgccaagaatggaccacacagaggctgcctctcccatcacttccctacatggagtatatgtcaagccctaattgttcttagtttgcagttccattaaaaggtgaccaatcatggtcacaaatcagctgctactactcctgtaggaaggtcaatgttcatcatcctaagctactcagtaataactctaccctggcactaaaatgtaagctgtactgcggtgctatgttcttagtggatgtgccaagtcctaaccttgcttccggtatttccctcacctttcccatcttccaagggtactaaggaatctttctgctttggggtttatcagaattctcagaatctcnaataactaanaggcatcaaaatgaa

SEQ ID NO: 19385 - DNA, 650 bp, Macaca Mulatta
  misc_feature (1)...(650): n = A,T,C or G
caatgaatctgcccacgcctatgacattagctgcccctctcaatatagcaatgagacctgtagagagcatgcctttcttgccccaagctttgcctacatcaccgccttggtaaacagtattataaaatcaaaatatgggttaaagtaaatatttaccagcaacttaacttttagttgattaaagcaaaaagtaaaccatgaaattgggagattttgttatattagttaataagagtgtggtagcattttcctccaatttggctgggattattcaaagtagggtgtgtatgtaacttatcactggaccactttagtttaatcagaaattccttttagctgacaacattgcttaaacaggatagtagttggcaagatgaaatgccagaattaaaaccaatcataaataagtagaacccacnnnnnnnnnnnnnnnnnnnnnnnnnnnnnnnnnnnnnnnnnnnnnnnnnnnnnnnnnnnnnnnnnnnnnnnnnnnnnnnnnnnnnnnnnnnnnnnnnnnnnnnnnnnnnnnnnnnnnnnnnnnnnnnnnnnnnnnnnnnnnnnnnnnnnnnnnnnnnnnnnnnnnnnnnnnnnnnnnnnnnnnnnnnnnnnnnnnnnnnnnnnnnnnnnnnnnnnnnnnnnnnnnnnnnnnn

SEQ ID NO: 19386 - DNA, 424 bp, Macaca Mulatta
  misc_feature (1)...(424): n = A,T,C or G
aaccacaccaccaaatgtcacaccttcttaataaagtgtgaacaaggaatgtcatgtttttgtgggtattttgtcagacttagcggtttcatttcagggcatagtcaaaggcatcatcttcccaactactcacttgattgcgtgtttcagatcccctccgtgggggccttcttatgacagagtgcattcttcgaggtccgcagtagttcttttgtcggcaaagactnnnnnnnnnnnnnnnnnnnnnnnnnnnnnnnnnnnnnnnnnnnnnnnnnnnnnnnnnnnnnnnnnnnnnnnnnnnnnnnnnnnnnnnnnnnngtcatggaataaagtactgtccttgcagatgaaaagctgtgtccagagcagacttatgccaggaaaggtttaggtgctgcagagttgaagaggtataagaagagat

SEQ ID NO: 19387 - DNA, 2238 bp, Macaca Mulatta
  misc_feature (1)...(2238): n = A,T,C or G
caggaacatctggattatgagattatccagtctctaaatcctgaatttaacaaagcagtgatcagagtgaatgtatttcgagaacacaggcagactattcannnnnnnnnnnnnnnnnnnnnnnnnnnnnnnnnnnnnnnnnnnnnnnnnnnnnnnnnnnnnnnnnnnnnnnnnnnnnnnnnnnnnnnnnnnnnnnnnnnnnnnnnnnnnnnnnnnnnnnnnnnnnnnnnnnnnnnnnnnnnnnnnnnnnnnnnnnnnnnnnnnnnnnnnnnnnnnnnnnnnnnnnnnnnnnnnnnnnnnnnnnnnnnnnnnnnnnnnnnnnnnnnnnnnnnnnnnnnnnnnnnnnnnnnnnnnnnnnnnnnnnnnnnnnnnnnnnnnnnnnnnnnnnnnnnnnnnnnnnnnnnnnnnnnnnnnnnnnnnnnnnnnnnnnnnnnnnnnnnnnnnnnnnnnnnnnnnnnnnnnnnnnnnnnnnnnnnnnnnnnnnnnnnnnnnnnnnnnnnnnnnnnnnnnnnnnnnnnnnnnnnnnnnnnnnnnnnnnnnnnnnnnnnnnnnnnnnnnnnnnnnnnnnnnnnnnnnnnnnnnnnnnnnnnnnnnnnnnnnnnnnnnnnnnnnnnnnnnnnnnnnnnnnnnnnnnnnnnnnnnnnnnnnnnnnnnnnnnnnnnnnnnnnnnnnnnnnnnnnnnnnnnnnnnnnnnnnnnnnnnnnnnnnnnnnnnnnnnnnnnnnnaggtgtgcctcgaaggggagatttctcgccagtccatcttgaacagtctgtctcgaggcaagaaggcttcaggggacctgattccatggacagtgtcagaacagnacagttccaagatccagactttggtggtctttctggtggaagggtcgttcgcattgctgttcacccggattatcaagggnnnnnnnnnnnnnnnnnnnnnnnnnnnnnnnnnnnnnnnnnnnnnnnnnnnnnnnnnnnnnnnnnnnnnnnnnnnnnnnnnnnnnnnnnnnnnnnnnnnnnnnnnnnnnnnnnnnaggctgtcagcttgctggaagaggtcatcactccccggaaggacctgcctcctttactcctcaaattgaatgagaggcccgctgagcgcctggattacctgggtgtttcctatggcttgacccccaggctcctcaagnnnnnnnnnnnnnnnnnnnnnnnnnnnnnnnnnnnnnnnnnnnnnnngaatgacctgaccggagagcactcgtgcatcatgctgaagacactcactgatgaggacgaggatgaccagggaggctggcttgcagccttctggaaannnnnnnnnnnnnnnnnnnnnnnnnnnnnnnnnnnnnnnnnnnnnnnnnnnnnnnnnnnnnnnnnnnnnnnnnnnnnnnnnnnnnnnnnnnnnnnnnnnnnnnnnnnnnnnnnnnnnnnnnnnnnnnnnnnnnnnnnnnnnnnnnnnnnnnnnnnnnnnnnnnnnnnnnnnnnnnnnnnnnnnnnnnnnnnnnnnnnnnnnnnnnnnnnnnnnnnnnnnnnnnnnnnnnnnnnnnnnnnnnnnnnnnnnnnnnnnnnnnnnnnnnnnnnnnnnnnnnnnnnnnnnnnnnnnnnnnnnnnnnnnnnnnnnnnnnnnnnnnnnnnnnnnnnnnnnnnnnnnnnnnnnnnnnnnnnnnnnnnnnnnnnnnnnnnnnnnnnnnnnnnnnnnnnnnnnnnnnnnnnnnnnnnnnnnnnnnnnnnnnnnnnnnnnnnnnnnnnnnnnnnnnnnnnnnnnnnnnnnnnnnnnnnnnnnnnnnnnnnnnnnnnnnnnnnnnnnnnnnnnnnnnnnnnnnnnnnnnnnnnnnnnnnnnnnnnnnnnnnnnnnnnnnnnnnnnnnnnnnnnnnnnnnnnnnnnnnnnnnnnnnnnnnnnnnnnnnnnnnnnnnnnnnnnnnnnnnnnnnnnnnnnnnnnnnnnnnnnnnnnnnnnnnnnnnnnnnnnnnnnnnnnnnnnnnnnnnnnnnnnnnnnnnnnnnnnnnnnnnnnnnnnnnnnnnnnnnnnnnnnnnnnnnnnnnnnnnnnnnnnnnnnnnnnnnnnnnnnnnnnnnnnnnnnnnnnnnnnnnnnnnngcatcagtgtttgatcatgggaagatactctcacttcctgaaccctctctggctggactgttaaaagcaacaagagtccccggcacacctgcaaactggctgcggattcagcctccaggcctgtgtcagtctgtgagctcaacctggct

SEQ ID NO: 19388 - DNA, 204 bp, Macaca Mulatta
tctaggcctgattcttcactacctgagacatcgaaaaaggagcacatctcagctgaaaacatgtctttagaaactctgagaaacagcagcccagaagacctctttgatgagatttaacagtctcaaaaaacactttgatgttcactagactatgttttctattcatttctttaaaatgaaaaggcagaatttcaagttagcagc

SEQ ID NO: 19389 - DNA, 811 bp, Macaca Mulatta
ggggctgctagtctccggcggagactagcgctctggagtttgaggtgctgggcggccacgaggtgcggggatcctgcgtccaaacgcgtctgcaagtcgagatgtcgcatccgtccccccaagtcaagccctccaaccccagtaaccctcgagtcttctttgacgtggacataggaggggagcgagttggtcgaattgtcttagaattgtttgcagatattgtacccaaaactgcggaaaattttcgtgcactgtgtacaggagaaaaaggcattggacccacgactgggaaacctctccatttcaaaggatgcccttttcatcgaattattaagaaatttatgattcagggtggagacttctcaaatcagaatgggacaggtggagaaagtatttatggtgaaaaatttgaagatgaaaatttccactataagcatgatcgggagggtttactgagcatggcaaacgcaggccgcaacacaaatggttctcagttttttatcacaacagttcccactcctcatttggatgggaaacatgtggtgttttggccaagtaattaaaggaataggagtgaccaagatatttggaaaatgtggcagctgaaaggggaaaaaccctgctaaaaatacgtgggacaggttcaaagggctgtttattgaggacagccagaatagaagcccaagctgcaaccctaatagccttttaacctggggtactggaaatattgggtgcctttgcaaacctgaaaaaatgtccaaatttggcccgggaaacccctttgcaccagtttgtttggcaggcgcctctg

SEQ ID NO: 19390 - DNA, 816 bp, Macaca Mulatta
gggacaacactctcttgaaaactgcagcttccttctcaccttgaagaataatcctagaacttacaaaatgtgtgatgcttttgtaggtacctggaaacttgtctccagtgaaaactttgatgattatatgaaagaagtaggagtgggctttgccaccaggaaagtggcaggcatggccaaacctaacatgatcatcagtgtgaatggcgatgtgatcaccattaaatccgaaagtacctttaaaaatactgagatttccttctaactgggtcaggaatttgacgaagtcaccgcagatgacacgaaagtcaagagcaccataaccttagatgggggtgtcctggtacatgtgcagaaatgggatggaaaatcaaccaccatatagagaatacgagaggatgacaaactggtgatcgaatgcatcatgaaaggcgtcacttccaccagagtttatgacacagcataagccaagaggcattgacctggactgaagtttgcattgaactctacaacattgctgttggatatattgttcaaaaagatgttgttgctttccagtgatcatcaagcaactgatttgctcccgagctgattttattccatttggttatgctagttaaataaaactttttgtaaatttctgtcgggccgccctcggcccctcaaaaagctctttgtcggcccgcctttctgccctcggaaaacctttcctagaccatttcattttgggccccgcccgggcctctcctagggtaaatcccaacactgggtcccataagcttgtttttgccatggcgaaaatcccttgggattaaa

SEQ ID NO: 19391 - DNA, 2454 bp, Macaca Mulatta
  misc_feature (1)...(2454): n = A,T,C or G
actattcttagctccgtcactgactccaagttcatcccctctgtctttcagtttggnnnnnnnnnnnnnnnnnnnnnnnnnnnnnnnnnnnnnnnnnnnnnnnnnnnnnnnnnnnnnnnnnnnnnnnnnnnnnnnnnnnnnnnnnnnnnnnnnnnnnnnnnnnnnnnnnnnnnnnnnnnnnnnnnnnnnnnnnnnnnnnnnnnnnnnnnnnnnnnnnnnnnnnnnnnnnnnnnnnnnnnnnnnnnnnnnnnnnnnnnnnnnnnnnntaaacaatcgtggggcctggaaaatgaggctttaattgtgagatgtcctagacaaggaaaacctagttacatcgtggattggtattactcacaaacaaacaaaagtattcccacccaggaaagaaatcgtgtgtttgcctcaggccaacttcttaagtttctaccagctgaagttgctgattctggtatttatacctgcattgtcagaagnnnnnnnnnnnnnnnnnnnnnnnnnnnnnnnnnnnnnnnnnnnnnnnnnnnnnnnnnnnnnnnnnnnnnnnnnnnnnnnnnnnnnnnnnnnnnnnnnnnnnnnnnnnnnnnnnnnnnnnnnnnnnnnnnnnnnnnnnnnnnnnnnnnnnnnnnnnnnnnnnnnnnnnnnnnnnnnnnnnnnnnnnnnnnnnnnnnnnnnnnnnnnnnnnnnnnnnnnnnnnnnnnnnnnnnnnnnnnnnnnnnnnnnnnnnnnnnnnnnnnnnnnnnnnnnnnnnnnnnnnnnnnnnnnnnnnnnnnnnnnnnnnnnnnnnnnnnnnnnnnnnnnnnnnnnnnnnnnnnnnnnnnnnnnnnnnnnnnnnnnnnnnnnnnnnnnnnnnnnnnnnnnnnnnnnnnnnnnnnnnnnnnnnnnnnnnnnnnnnnnnnnnnnnnnnnnnnnnnnnnnnnnnnnnnnnnnnnnnnnnnnnnnnnnnnnnnnnnnnnnnnnnnnnnnnnnnnnnnnnnnnnnnnnnnnnnnnnnnnnnnnnnnnnnnnnnnnnnnnnnnnnnnnnnnnagtttcagcaatgggctggcttgtgtaaacacggttttaagaatagctgatgtaaaggaagaggatttattgctgcggtacgactgtctggccctgaatttgcatggcttgagaaggcacaccataagactaagtaggaaaaatccaagtaaggagtgtttctgagactttggtcacctgaactttctgtagcaagggtaagcggaatggagtgtggttccgagagatccatcaagacaatgggaatggcttgtgccataaaatgtacttctcttctttgggaaggtgtttgctatctggtctttgtagattgttcctgtttgctgggagcttctctgctgcttannnnnnnnnnnnnnnnnnnnnnnnnnnnnnnnnnnnnnnnnnnnnnnnnnnnnnnnnnnnnnnnnnnnnnnnnnnnnnnnnnnnnnnnnnnnnnnnnnnnnnnnnnnnnnnnnnnnnnnnnnnnnnnnnnnnnnnnnnnnnnnnnnnnnnnnnnnnnnnnnnnnnnnnnnnnnnnnnnnnnnnnnnnnnnnnnnnnnnnnnnnnnnnnnnnnnnnnnnnnnnnnnnnnnnnnnnnnnnnnnnnnnnnnnnnnnnnnnnnnnnnnnnnnnnnnnnnnnnnnnnnnnnnnnnnnnnnnnnnnnnnnnnnnnnnnnnnnnnnnnnnnnnnnnnnnnnnnnnnnnnnnnnnnnnnnnnnnnnnnnnnnnnnnnnnnnnnggtgatttatatgaaatgacgttaattggctcacggttctgcaggctgtgcgggaagcatggcggcatctgcttctggggacacctcaggagctttactcatggcagaaggcaaaacaaaggcaggcacttcaaacggtgaaagcaggagcnnnnnnnnnnnnnacacttaaacagccagatctcatgagaaatcactcactattgcaaagacagcatcaagaggatggtgctaaaccattcatgatgagcttacccccatggtccaatcacctcccatcaggctccaccttgaatactggggattaccattcagcatgagatttgggcaggaacacagacccaaaccatatcacacacattatgattgttaaactttataaagtatttaaggtatatggaacacatgggaagtctggtagctcaacccatttctttattgcctctgttattcaccatgcaattcaggtaccacctattccggggaacttttcttggccctcggtttgcggtatacatgctttctaagtactcttgtagcatcctgtttgtatcgtagcactggtcacattgccttgccaaaatctgtttgacagtctgctcaacatgactgcaagctccatgaggggagggacatcatctcaaccatctttgggtccttagcgcaatacctggcagctagccagtgctcagttaaatattttttga

SEQ ID NO: 19392 - DNA, 806 bp, Macaca Mulatta
  misc_feature (1)...(806): n = A,T,C or G
gggaaaaaatgacgagaagtatggttgccaaggtagcactgtgagaaatctcacttggatgttatgtaaggggtgagacacaacagtctgactatgagtgaggaaaatatctgggtcttctcgtcagtttggtgcatttgctgctgctgttgctactgtttgcctcaaacgctgtgtttaaacaacgttaaactcttagcctacaaggtggctcttatgtacatagttgttaatacatccaattaatgatgtctgacatgctatttttgtagggagaaaatatgtgctaatgatattttgagttaaaatatcttttggggaggatttgctgaaaagttgcacttttgttacaacgcttatgcttggtacaagcttatgctgtcttannnnnnnnnnnnnnnnnnnnnnctgtctgcaagaaaccagctggtttagaaattaatnnnnnnnnnnnnnnnnnnnnnnnnnnnnnnnnnnnnnnnnnnnnnnnnnnnnnnnnnnnnnnnnnnnnnnnnnnnnnnnnnnnnnnnnnnnnnnnnnnnnnnnnnnnnnnnnnnnnnnnnnnnnnnnnnnnnnnnnnnnnnnnnnnnnnnnnnnnnnnnnnnnnnnnnnnnnnnnnnnnnnnnnnnnnnnnnnnnnnnnnnnnnnnnnnnnnnnnnnnnnnnnnnnnnnnnnnnnnnnnnnnnnnnnnnnnnnnnnnnnnnnnnnnnnnnnnnnnnnnnnnnnnnnnnnnnnnnnnnnnnnnnnnnnnnnnnnnnnnnnnnnnnnnnnnnnnnnnnnnnnnnnnnnnnnnnnnnnnnnnnnnn

SEQ ID NO: 19393 - DNA, 2169 bp, Macaca Mulatta
  misc_feature (1)...(2169): n = A,T,C or G
tagtgtccttgacctaaatgcatttgagcgacaaaacaaagctgaaggtcttgggatggtgacagaggaaggatcaggnnnnnnnnnnnnnnnnnnnnnnnnnnnnnnnnnnnnnnnnnnnnnnnnnnnnnnnnnnnnnnnnnnnnnnnnnnnnnnnnnnnnnnnnnnnnnnnnnnnnnnnnnnnnnnnnnnnnnnnnnnnnnnnnnnnnnnnnnnnnnnnnnnnnnnnnnnnnnnnnnnnnnncaggaatcaattagtgacttttactggtattactctgggaaagatgttattgatgaacaaggacaacggaatttctccaaagctattcaagtggcaaaacaagtctttaacactcttacagagtatattcaggnnnnnnnnnnnnnnnnnnnnnnnnnnnnnnnnnnnnnnnnnnnnnnnnnnnnnnnnnnnnnnnnnnnnnnnnnnnnnnnnnnnnnnnnnnnnnnnnnnnnnnnnnnnnnnnnnnnnnnnnnnnnnnnnnnnnnnnnnnnnnnnnnnnnnnnnnnnnnnnnnnnnnnnnnnnnnnnnnnnnnnnnnnnnnnnnnnnnnnnnnnnnnnnnnnnnnnnnnnnnnnnnnnnnnnnnnnnnnnnnnnnnnnnnnnnnnnnnnnnnnnnnnnnnnnnnnnnnnnnnnnnnnnnnnnnnnnnnnnnnnnnnnnnnnnnnnnnnnnnnnnnnnnnnnnnnnnnnnnnnnnnnnnnnnnnnnnnnnnnnnnnnnnnnnnnnnnnnnnnnnnnnnnnnnnnnnnnnnnnnnnnnnnnnnnnnnnnnnnnnnnnnnnnnnnnnnnnnnnnnnnnnnnnnnnnnnnnnnnnnnnnnnnnnnnnnnnnnnnnnnnnnnnnnnnnnnnnnnnnnnnnnnnnnnnnnnnnnnnnnnnnnnnnnnnnnnnnnnnnnnnnnnnnnnnnnnnnnnnnnnnnnnnnnnnnnnnnnnnnnnnnnnnnnnnnnnnnnnnnnnnnnnnnnnnnnnnnnnnnnnnnnnnnnnnnnnnnnnnnnnnnnnnnnnnnnnnnnnnnnnnnnnnnnnnnnnnnnnnnnnnnnnnnnnnnnnnnnnnnnnnnnnnnnnnnnnnnnnnnnnnnnnnnnnnnnnnnnnnnnnnnnnnnnnnnnnnnnnnnnnnnnnnnnnnnnnnnnnnnnnnnnnnnnnnnnnnnnnnnnnnnnnnnnnnnnnnnnnnnnnnnnnnnnnnnnnnnnnnnnnnnnnnnnnnnnnnnnnnnnnnnnnnnnnnnnnnnnnnnnnnnnnnnnnnnnnnnnnnnnnnnnnnnnnnnnnnnnnnnnnnnnnnnnnnnnnnnnnnnnnnnnnnnnnnnnnnnnnnnnnnnnnnnnnnnnnnnnnnnnnnnnnnnnnnnnnnnnnnnnnnnnnnnnnnnnnnnnnnnnnnnnnnnnnnnnnnnnnnnnnnnnnnnnnnnnnnnnnnnnnnnnnnnnnnnnnnnnnnnnnnnnnnnnnnnnnnnnnnnnnnnnnnnnnnnnnnnnnnnnnnnnnnnnnnnnnnnnnnnnnnnnnnnnnnnnnnnnnnnnnnnnnnnnnnnnnnnnnnnnnnnnnnnnnnnnnnnnnnnnnnnnnnnnnnnnnnnnnnnnnnnnnnnnnnnnnnnnnnnnnnnnnnnnnnnnnnnnnnnnnnnnnnnnnnnnnnnnnnnnnnnnnnnnnnnnnnnnnnnnnnnnnnnnnnnnnnnnnnnnnnnnnnnnnnnnnnnnnnnnnnnnnnnnnnnnnnnnnnnnnnnnnnnnnnnnnnnnnnnnnnnnnnnnnnnnnnnnnnnnnnnnnnnnnnnnnnnnnnnnnnnnnnnnnnnnnnnnnnnnnnnnnnnnnnnnnnnnnnnnnnnnnnnnnnnnnnnnnnnnnnnnnnnnnnnnnnnnnnnnnnnnnnnnnnnnnnnnnnnnnnnnnnnnnnnnnnnnnnnnnnnnnnnnnnnnnnnnnnnnnnnnnnnnnaggtctccacttcttctgtggttgaaggaaaggagctccccactagaagttcaagtgaaaatgccaaagtgaccagcctggacagcagctcccatagaatcatcgcagttcactatgtactggaggagagcagtggctacatggagcccacgttgcgtatcttagctattctccacacggtcatttccttcttctgcatcattggatactactgcttgaaagt

SEQ ID NO: 19394 - DNA, 669 bp, Macaca Mulatta
  misc_feature (1)...(669): n = A,T,C or G
gaaggtccctcaaaccccactgcacaccagccgggtcctgaaggaggacaaggagcggtgggaggatgtcaaggaggagatgaccagtgccgtggccacaatgcgcgtcgactacgagcagatcaagataaaaaagattgaggatgcgtccaaccctctgctgctgaagaggcggaagaaagctcgggccctggaggctgcggccctggcccactgagccaccgcgccctcctgcccgcgggaggacaagcaataactctctacaggaatatattttttaaacgaagagacacggaactgtccacatccgccgcctctcctcagctgcatggagcctggaactgtgtcagtggctgaattctgccttggctctggccaccccagagtgggagaggttgggaggttgggaggctatggagagaagtgagcaaggtgctcttgaacctgtgctcattttgcaattttatcagtaatttgacttagagtttttatgaaacctcttttgttgtccttgccccactcctcctctccaccagacgccttcctctctggatactgcaaaggcttgtggtttgtcagagggtatttgtggaaactgtcatagggattgtccctgtgtttgtcccatctgncctccctgttttctccacaacagtctggggtcgtccc

SEQ ID NO: 19395 - DNA, 488 bp, Macaca Mulatta
taagcttttggtaaagctgaactaagccattcggccacaaaatatagagtagacaaaattatgctaccattttacacatgtcaagccagcaaagagtttttatttactagtggaacactgatctttcaaatacagaatagtggctaagtgaaaataaaacagcttagaaatcgactatgttttgagtgtctttccaatgagccactctgcatcttatgagaactggaacacattggacaggattctcagctgagtcagctcggtggggccccaaaggcaggcaactctagtggatatggctggctctctaggaaggttctagaaggaggcacaagataagaattgaggggaagaaacaagtggaagcagataggtggctggtggcagaaatgcctggtcacaggtaatccgtatttcatcccagccctagaggcttaagtacatagaaccagaaggagctctaactaaggttagttaccatctaaaga

SEQ ID NO: 19396 - DNA, 780 bp, Macaca Mulatta
  misc_feature (1)...(780): n = A,T,C or G
gggaacagccgcggccccagcgggaggacgataatgcaaagtgctatgttcttggctgttcaacacgactgcagacctatggacactagcgctggcagcggccacaagagcgaggagaagcgggaaaagatgaaacggacccttttaaaagattggaagacccgtttgagctacttcttgcaaaattcctctactcctgggaaacccaaaaccggcaaaaaaagcaaacaacaagctttcatcaaaccttctcctgaggaagcacagctgtggtcagaagcatttgacgagctgctagctagcaaatatggtcttgctgcattcagggcttttttaaagtcggaattctgtgaagaaaatattgaattctggctggcctgtgaagacttcaaaaaaaccaaatcaccccaaaaattgtcctcaaaagcaaggaaaatatatactgattttatagaaaaggaagctccaaaagagataaacatagattttcaaaccaaaactctgattgcccagaatatacaagaagctacaagtggctgcttcacaactgcccagaaaagggtatacagcttgatggagaacaactcttatccccgtttcttggagtcagaattctaccagggacttgtgtaaaaagcctcaaatcaccacagagcctcatgctacatgaaatgtaaaaagggagccccagaaatgggaggacatttcatttctttttccnntagggggaaaagactgaccctgccataaagaactggacccttgaaattccaagcccgg

SEQ ID NO: 19397 - DNA, 924 bp, Macaca Mulatta
  misc_feature (1)...(924): n = A,T,C or G
accaagaggtggttaaagccatattggaatagagaggaatctgattccaagcaaaaaccagnnnnnnnnnnnnnnnnnnnnnnnnnnnnnnnnnnnnnnnnnnnnnnnnnnnnnnnnnnnnnnnnnnnnnnnnnnnnnnnnnnnnnnnnnnnnnnnnnnnnnnnnnnnnnnnnnnnnnnnnnnnnnnnnnnnnnnnnnnnnnnnnnnnnnnnnnnnnnnnnnnnnnnnnnnnnnnnnnnnnnnnnnnnnnnnnnnnnnnnnnnnnnnnnnnnnnnnnnnnnnnnnnnnnnnnnnnnnnnnnnnnnnnnnnnnnnnngataccagtttttgaccacttagttgatgcctctgaaaggaagagagaatctgatcgctaatatttgatgtgtcgtcagtgtggatcctactcagtagtgtcacaacgaagctgaaaataatattaagtgcttttagcacagaaatgtaaactgctcaggtaaaataaccttgtaaagaaaaataagaatatattgcggaggccttggctaggttcatgatgacacaggaccttgtctgaacataatgatttcaaaatttgagcttaaaaatgacactctgaaatccagtcagtgtgcctcattagacttttcgatttcaagattttctgcagaaagtgttgtgaaaactttgaatacttaaaaatggcagatgtagtattgcactttgctagttgctcagatactcttttttatttgtatagatattctgaattccttttttttcctacatgttgtacgttgttgaaagctaaaaggaaacttatccttggaccacagaaggcacaggcacttgttgagatggaaacaaggatgtgtgaaaatgagactaccacctctcggatnnnnnnnnnnnnngccagagttctagggatctaagtgatgtcca

SEQ ID NO: 19398 - DNA, 784 bp, Macaca Mulatta
ctcaggccctgccgccatcgcgggagatccagtgcccagagagacacgagagaacccaccatggccccctttgagcccctggcttccggcatcctgttgttgctgtggctgatagcccccagcagggcctgcacctgtgtcctaccccacccacagacggccttctgcaattccgacctcgtcatcagggccaagttcgtggggacaccagaagtcaaccagaccaccttataccagcgttatgagatcaagatgaccaagatgtataaagggttccaggccttaggggatgccgctgacatccggttcgtctacacccccgccatggagagtgtctgcggatacttccacaggtcccacaaccgcagcgaggagtttctcattgctggaaaactgcaggacggactcttgcacatcaccacctgcagtttcgtggctccctggaacagtctgagcttagctcagcgccggggcttcaccaagacctacactgttggctgtgaggaatgcacagtgtttccctgtttatccatcccctgcaaactgcagagtggcactcattgcttgtggacggaccagctcctccaaggctctgaaaagggcttccagtcccgtcaccttgcctgcctgcctcgggagccagggctgtgcacctggcagtccctgcggacccggatggcctgaatcctgccggagtggaagctgaagcctgcgcagtgtccaccctgttccccactcccatccttcttctagacaatgaaattaagagtttaccacccagcag

SEQ ID NO: 19399 - DNA, 889 bp, Macaca Mulatta
  misc_feature (1)...(889): n = A,T,C or G
agtccagcaagctaaaagctcctgaaggtggagccctggaacagcgtgcgtgtgacattcaacatcccccgggaagcagcggagcggctacggatccttgctcagagcaacaaccagcagcttcgggatttagggattctctccgttcagattgaaggnnnnnnnnnnnnnnnnnnnnnnnnnnnnnnnnnnnnnnnnnnnnnnnnnnnnnnnnnnnnnnnnnnnnnnnnngaaattcagttaggatggaggcaggatttcccatggcaggtggtccaggnnnnnnnnnnnnnnnnnnnnnnnnnnnnnnnnnnnnnnnnnnnnnnnnnnnnnnnnnnnnnnnnnnnnnnnnnnnnnnnnnnnnnnnnnnnnnnnnnnnnnnnnnnnnnnnnnnnnnnnnnnnnnagatgcaatggatccacttctctctgggctccatatacagcagcaaagtcatccctcaggatctttagctcccccacaccacccaatgcagcctgtctctgtgaatagacaaatgaacccagctaattttccccanacccccacagcaacatcagcaacaacagccacagggaattcgaccccagtttacttcaccaactcaggtgcctgttcctccaggctggaaccagctgccttctggagcccttcaacctcctccagcccagggttctctgggcacaatgactgcaaaccaagggtggaagaaggctcccttgcctggcccaatgcaacagcaactccaggcaagaccatccttagctacggtacagacgccttcccaccctccccctccatatccctttggcagccagcaagcctcacaagcccacacaaactttcctcagatgagcaacccaggccagttcacagctcctcagatgaa

SEQ ID NO: 19400 - DNA, 169 bp, Macaca Mulatta
ctgctaattttcatagaagttgatggcaattcttcacgtgtaaacaataccagtgcacagaacctttatatattttttgaaaccagtactgtgctcttcatataacaaagctgcttcaaggatgtgacctttttctaaaggtatgtaatgtgagaagccggcctgcctt

SEQ ID NO: 19401 - DNA, 639 bp, Macaca Mulatta
tatcccatttttctgtcttttaggtttacatttaccacatttctcttctctgctccccttgtccactggggactcctctttggctccttaaagtttgctgcttagagttggaagtgcagcaggcaggtgatcatgctgcaagttctttctggacctctggcaaagggagtggtcaatgaaggccatctcgttaccttgggatctgccaggctggggtgttttcggtatctgctgtccacagctctccactgtaatccgaatactttgccagtgcactaatctctttggagataaaattcattagtgtgttactaaatgttaattttcttttgcagaaagtacagtaccgtgtctgaattaattattaatatttaaaatatttcattccttaactctccctcatttgcccacagcctactcagttcctttgtttggcaggattctgcaaaatgtgtctcacccactactgagattgttcagcccctgatgtatttgtattgatttgtttctggtggtagcttgtcctgaaatgtgtgtagaaagcaagtatgttctgataaaattgtagtgtagtgcatgctgtgtggagttcagaggaaacccagattcagtgattaacaatgccaaaaaatgcgagta

SEQ ID NO: 19402 - DNA, 1133 bp, Macaca Mulatta
ggggaccacagacctgggctgactgtgtgacctgggcctgccaccactggcacacccagtactcaaacaacatccggcagctgctgcacaacttccctcctgaccagctcacaagctcaggagcccctttctggtctggccccaaacgctgtccacacccgctcacctttgatgtcaacaaccccctgcatctggactatgtgatggctgctgccaacctgtttgcccagacctacgggctgacaggctctcaggaccgagctgctgtggccacactcctgcagtctgtgcaggtccccgaattcacccccaagtctggcgtcaagatccatgtttctgaccaggagctgcagagcgccaatgcctctgttgatgacagtcgtctagaggagctcaaagctactctgcccagcccagacaagctccctggattcaagatgtaccccattgactttgagaaggatgatgacagcaactttcatatggatttcatcgtggctgcatccaacctccgggcagaaaactatgacattcctcctgcagaccggcacaagagcaagctgattgcggggaagatcatcccagccattgccacgaccacagcagccgtggttggccttgtgtgtctggagctgtacaaggttgtgcaggggcaccgacagcttgactcctacaagaatggtttcctcaacttggccctgcctttcttcggtttctctgaaccccttgccgcaccacgtcaccagtattataaccaagagtggacattgtgggatcgctttgaggtacaagggctgcagcctaatggtgacgagatgaccctcaaacagttcctcgactactttaagacagagcacaaattagagatcaccatgctgtcccagggcgtgtccatgctctattccttcttcatgccagctgccaagctcaaggaacggttggatcagccgatgacagagattgtgagccgtgtgtcgaagcgaaaactgggccgccacgtgcgggcgctgggtgctttgagctgttgctggtaacgaccaaagagcggcggagggatgttcaagggtttcccctatggtccggattaaaaccaatcccggcttggaccccccgcggcctgggcgtcccttcga

SEQ ID NO: 19403 - DNA, 724 bp, Macaca Mulatta
gtttggttttctggcctagaacattcccttctttattagacaactcttatccttccttcaacacatcttggatatttcattccttgagtcttctaagtcaaagctatgagactctctcctgtcctcccttaattccctatatagttcaccattacactatatcaaaattatccattcacttcacttcaacagtgtgaaagcaggactttttcagcacaatatctctattgcctatcacgtaataggaggaccctgcagtgtccagctaagctgatgacttggagataaatctgcctaaccctgggatgaagtatctgtgaactattttgagagcagatgtaagtcatgatctctaaagaacttaccagttactattaatattttttttatttagtatgtttaaatctccatttgttttatgtatctcatttcataagttcaagagtgggtgaaaaaaagaggtgctaattttggttccctaaaattccaatatttcagggtaatctctcttagacactaaattttacttcttaccaggcccaccctggccaatatatagatcctcagatgaatggggctttcacaacagttttattcatttattctcaatcatccacttttcattgattaaacaactactaggtgctagatactggaaattctagatgattaatatgtcatccccccgctcaagacctagtccctgagctccaggagggaaggg

SEQ ID NO: 19404 - DNA, 160 bp, Macaca Mulatta
tctttccctcacgtatacttcaagtaagatcaagaatcttttgtgaaactatagaaatttactatgtaaatgcttgatggaatgttttcctgctagtgtagcttctgaaaggtgctttccatttatgtaaaactacccatgcaattaaaaggtacaatgc

SEQ ID NO: 19405 - DNA, 308 bp, Macaca Mulatta
  misc_feature (1)...(308): n = A,T,C or G
cgtctccgagacctcgggctcccgtagggtccccgtggccccgagttgtagtcgggacaccccggccgcgggtgatcgtcggctctccacgcgcccgggtcgctggcgcggatccggcctcggcgccttctcagggcgccctggaaggccgcaggcaggatgaacattctggcgcccgtgcggagggatcgcgtcctggcagagctgccccagnagtgcctgaggaaggaggccgctttgcacgtgcacaaagacttccacccccgcgtcacctgcgcctgccaggaacaccggacaggcaccgtggg

SEQ ID NO: 19406 - DNA, 155 bp, Macaca Mulatta
ggtgactattatatggttaaaaagatttgggaggaaaacagttcaggtgactagaacataaattgcgtagatgtgcttgggagaaatgctgttaccataactattgaaaacgaaaacttggatatactgcagcttcttttggactacggttgtca

SEQ ID NO: 19407 - DNA, 715 bp, Macaca Mulatta
agccgggggcagcacctgtggcagcgcctgtccatccacatcaacaagaaagaaaatcccaaccaaacggcagtcatcaagcccttccccaagagcacggagagccgcggcctgggcgctggcgctggcgcaggcgggagcgcgggggggatgggggccacgggcggtgcgggctgcgcaggcgccggccctggcgggcccgagcccccagacgccagccccaaggggctgtatgatgtggccgagaccgaggagcacttcccggcgcccacgcggccgcgctcaccatcgcccatcagcacgctgagccaccgcgcgggctcggccagccgcacggacgacgacgtgccgtcgctgcattcggagcccgctgcgcgcagcagctcgtcgcagggctccctcatggagcagatcagcagtgtggtcacccgcttcacggccaacatcagcgagctcaactccatgatgctgtccaccgcggcccccagccccggcgtgggcgccccgctctgctcatcgtacctgatccccaaagagatccagctgcccacaaccatgacgaccttcgccgaaatccagcctctgccagccatcgaggtcacgggcggcgcgcagcccgcggcgggggctcaggcggctgaggacgcggcccgggagagcccggcagcggggcccgaggctgcggccgccaagccagacctggaggagttggtgg

SEQ ID NO: 19408 - DNA, 519 bp, Macaca Mulatta
  misc_feature (1)...(519): n = A,T,C or G
ggggtgatcctgtacatcctgctccttggctacccacccttctgggacgaggaccagcacaagctgtaccagcagatcaaggccggcgcctannnnttcccgtcccccgaatgggacactgtcactcctgaagccaaaaacctaatcaaccagatgctgaccatcaaccctgccaagcgcatcacagcccatgaggccctgaagcatccgtgggtctgcnnnnnnnnnnnnnnnnnnnnnnnnnnnnnnnnnnnnnnnnnnnnnnnnnnnnnnnnnnnnnnnnnnnnnnnnnnnnnnnnnnnnnnnnnnnnnnnnnnnnnnnnnnnnnnnnnnnnnnnnnnnncagcccggaagcaggagatcattaagaccacggagcagctcatcgaggctgtcaacaacggtgactttgaggcctacgcgngaaaatctgtgacccagggctgacctcatttgagcctgaagcactgggcaacctggttgaagggatggacttccacagattctacttcgagaacc

SEQ ID NO: 19409 - DNA, 1003 bp, Macaca Mulatta
gggcccctcccctgcgcagcgcacgtcttggttcgggccgggcataaaaggcttcgcggcccagggctcacttggcgctgagaacgcgggtccacacgtgtgatcgtccgtgcgtctagcccttgcccacgcagctttcagtcatggcctccggtaacgcgcgcatcggaaagccagcccctgacttcaaggccacagccgtggttgacggcgccttcaaagaggtgaagctgtcggactacaaagggaagtacgtggtcctctttttctaccctctggacttcacttttgtgtgccccacggagatcatcgcgttcagcaaccgtgccgaggacttccgcaagctgggctgcgaagtgctgggcgtctcggtggactctcagttcacccacctggcttggatcaacaccccccggaaggaaggaggcttgggccccctgaacatccccctgcttgctgacgtgaccagacgcttgtctgatgattacggcgtgctgaaaacagatgaaggcattgcctacaggggcctatttatcatcgatggcaagggtgtccttcgccagatcactgttaatgatttgcctgtgggacgctccgtggatgaagctctgcggctggtccaggcctttcagtacacagacgagcatggagaaattttgtcccgcctggctggaaagcctgggccattgacacgaatttaaagcccaacgtgggatgacagcaaggaatatttctccaaacacaattaggctagccaacgggatagtaagcttgtgcccctaccctagttgcctgtgctgggtggtccacctgttgcccccacctgggtgccctgtgctgacccaagaaaggccagacctgcccctccaaaccctacagtctgggaccctggagggctaggccaaggccttctcatgcctccacctaggagctgaatagtgacgccctcccccgagcccacccagctgcacacaggcctagaggtgaccaataaagtattagg

SEQ ID NO: 19410 - DNA, 297 bp, Macaca Mulatta
  misc_feature (1)...(297): n = A,T,C or G
agggttacctgtttcatacagttgctgggaaacatcaggatttaaaatacatctctccagaaattnnnnnnnnnnnnnnnnnnnnnnnnnnnnnnnnnnnnnnnnnnnnnnnnnnnnnnnnnnnnnnnnnnnnnnnnnnnnnnnnnnnnnnnnnnnnnnnnnagggtgcagtgaacttgcacatggaagaagaggttgaagacttcttactgaagaagcccattgtacctactgatggcaagcgtgtcattgttgtatttcactgcgagttttcttctgagagaggtccccgcatgt

SEQ ID NO: 19411 - DNA, 168 bp, Macaca Mulatta
cccgtgaggaggaaaaggtgtgtccgctgccacccagtgtgagcgggtgacaccacccggttaggaaatcccagctcccaagagggtataaatccctgcttgactgctgagctcctgctggaggtgaaaatctggcctggcagcctttcccaggtgagcagcaacaag

SEQ ID NO: 19412 - DNA, 703 bp, Macaca Mulatta
ttttacagacgtccttaaggcaacagtgcagagatgtaatccttaaaagaactgggaatggcaaaactactgtcggttgatgtgtcctgaaaattattggagttatggcagaagtgcttttttgatcaactggtttgtgttttgctgctgcatttatcccaagaaaaacagctttaatctccagaagaaaaccaaaataccatgggatttatgctgtattgacatcttgccctaaacatacaacatcatagtaatttgtcatgggcaacatgaccagagagaagatttttgtcatgattttaaatacactgacacgctactgttggttaaatttaaacatgttttacctgcagaaattctctcacaagtaacctgcaataacttgaaatgcatacccttttgaacacttccttttctcatgtataaattaaaatgtttgctgcattttgcaaaatgtcaattctctaaaaatgtgtccgtatatttctgtacctgcagtgtagtaaaggtttagacgaaaccccataattatagtggcatactgtcacttaggtttcaagcagcaaaataaacagtgcagctcagaaattgtagtttggttcttgatgtgtttttattacatttggagttgttgttttgttttttagtaccttcgaaatttcaaattattttatcttctagttgaagattttaaaaagcctgg

SEQ ID NO: 19413 - DNA, 325 bp, Macaca Mulatta
ggcgtggacaatgaggatgaccatggccgtggagatctggggcgcctcaagaagcagaaggatcaccacaaccctcatctaatcctcatgatgattcccccacaccggctcgacaacccgggccaggggggtcagaggaagaagcgggccttggacaccaattactgcttccggcaacttggaggagaactgctgtgtgcgccccctctacattgacttccgacaggatctgggctggaagtgggtccatgaacctaagggctactatgccaacttctgctcaggcccttgcccatacctccgcagtgcggacaccacccacagc

SEQ ID NO: 19414 - DNA, 879 bp, Macaca Mulatta
  misc_feature (1)...(879): n = A,T,C or G
nggagcctacagcaaacccaccctctcagccctgcccagccctgtggtggcctcaggagggaacgtgaccctccgatgtggctcacagcagggatatcagcattttgttctgattgaggaagaacacaggctcccctggaccctaaactcacggcagctccacagtgggtggtaccaggccctgttccctgtgggccccatgacccccagccacaggtggatgttcagatgctatggatactacaggaacacctcccaggtgtggtcccacctcagtgaccccctggagattctggcctcagnnnnnnnnnnnnnnnnnnnnnnnnnnnnnnnnnnnnnnnnnnnnnnnnnnnnnnnnnnnnnnnnnnnnnnnnnnnnnnnnnnnnnnnnnnnnnnnnnnnnnnnnnnnnnnnnnnnnnnnnnnnnnnnnnnnnnnnnnnnnnnnnnnnnnnnnnnnnnnnnnnnnnnnnnnnnnnnnnnnnnnnnnnnnnnnnnnnnnnnnnnnnnnnnnnnnnnnnnnnnnnnnnnnnnnnnnnnnnnnnnnnnnnnnnnnnnnnnnnnnnnnnnnnnnnnnnnnnnnnnnnnnnnnnnnnnnnnnnnnnnnnnnnnnnnnnnnntccctctcagtgcagctgggccccacggtggcctcaggagagaaggtgaccctgttgtgtcagtcatggggtccgatgttcactttccttctggccaaggagggggcagcccatcccccgctgcgtctaagatccacttacagagctcagcagtaccaggctgaattccccatgagtcccgtgacctcggcccacgcggggacctacaggtgctacggctcacgcagctccgacccctacctgctgtctcactccagtgagc

SEQ ID NO: 19415 - DNA, 750 bp, Macaca Mulatta
  misc_feature (1)...(750): n = A,T,C or G
gggttttttcccagagcaaccatgttttagcataatgggatgacctggtgtcccattataaataaagggtggtatggctagaagggtatgagcagtaggcttatgtacacctcttatagaggttgataggactgcttgggtcctccactgtcccttgtcaatctagttagatgtgcttttgaatgactgtagaattggaactagaaactacgcctggccttggagccagattttagttaacgatattgagcctgggagcagtactaagtagtactaaggcgtcttttgtaggcttaagagtttatcccaatggcctttataggaccaatgcnnnnnnnnnnnnnnnnnntagttcctattatgtggtgaaattttgtaaataaatgattatacaaaacagtcatcacctagaactgggtattctttgtacattgtcagatatctttcaaagtataaattaggaataaaaatgttccacatgatacatgtataaattctttttaagattgtcatcttgtacagcaaaatattatgttggtatattacttacttattaatttgcaaatgattggattaaaaagctcgctgtattccctactcacctgttgtgtgaaaaataacatttggccatcgagggagtcagaaacttgggaattcccagccctcacttccttctggtgttttgcgtgaaccacaatcttctggcctgggaaataaggattttccaggggaagaagttcttggttattg

SEQ ID NO: 19416 - DNA, 746 bp, Macaca Mulatta
  misc_feature (1)...(746): n = A,T,C or G
gtgaagcatcccaacatcctacaactggtggatgtgtttgtgacccgcaaggagtactttatcttcctggagctgnggccacggggagggaggtgtttgactggatcctggaccagggctactactcggagcgagacacaagcaacgtggtacggcaggtcctggaggctgtggcctatttgcactcactcaagatcgtgcacaggaatctnnnnnnnnnnnnnnnnnnnnnnnnnnnnnnnnnnnnnnnnnnnnnnnnnnnnnnnnnnnnnnnnnnnnnnnnnnnnnnnnnnnnnnnnnnnnnnnnnnnnnnnnnnnnnnnnnnnnnnnnnnnnnnnnnnnnnnnnnnnnnnnnnnnnnnnnnnnnnnnnnnnnnnnnnnnnnnnnnnnnnnnnnnnnnnnnnnnnnnnnnnnnnnnnnnnnnnnnnnnnnnnnnnnnnnnnnnnnnnnnnnnnnnnnnnnnnnnnnnnnnnnnnnnnnnnnnnnnnnnnnnnnnnnnnnnnnnnnnnnnnnnnnnnnnnnnnnnnnnnnnnnnnnnnnnnnnnnnnnnnnnnnnnnnnnnnnnnnnnnnnnnnnnnnnnnnnnnnnnnnnnnaaggctgatggaggtggacctttccagcggatcactgcagaagaggccatctcccatgagtgnggatttctggcaatgctgcttctgataagaacatcaaggatggtgtctgtgcccagattgaaaagaactttgccagggccaagtggaag

SEQ ID NO: 19417 - DNA, 6135 bp, Macaca Mulatta
  misc_feature (1)...(6135): n = A,T,C or G
ccgagattttagatgaagataaacgcttagtcagtgcagtggattactactttattcaagatgacggaagcagatttaaggtnaggtggccttgccttataagccgtatttctacattgcaaccagannnnnnnnnnnnnnnnnnnnnnnnnnnnnnnnnnnnnnnnnnnnnnnnnnnnnnnnnnnnnnnnnnnnnnnnnnnnnnnnnnnnnnnnnnnnnnnnnnnnnnnnnnnnnnnnnnnnnnngcgaaattacatcaagctgtccttccacaccgtggaggatcttgtcaaagtcaggaaggagatctcccctgccgtgaagaagaacagggagcaggatcatgccagcgacgcgtacacagctctgctttccannnnnnnnnnnnnnnnnnnnnnnnnnnnnnnnnnnnnnnnnnnnnnnnnnnnnnnnnnnnnnnnnnnnnnnnnnnnnnnnnnnnnnnnnnnnnnnnnnnnnnnnnnnnnnnnnnnnnnnnnnnnnnnnnnnnnnnnnnnnnnnnnnnnnnnnnnnnnnnnnnnnnnnnnnnnnnnnnnnnnnnnnnnnnnnnnnnnnnnnnnnnnnnnnnnnnnnnnnnnnnnnnnnnnnnnnnnnnnnnnnnnnnnnnnnnnnnnnnnnnnnnnnnnnnnnnnnnnnnnnnnnnnnnnnnnnnnnnnnnnnnnnnnnnnnnnnnnnnnnnnnnnnnnngggctacctcatcaccaacagggagattgtttcagaagatattgaagattttgagttcacccccaagccagaatatgaagggccgttttgtgtcttcaatgaacccgatgaggnaggctcatctgatccaaaggtggtttgaacacgtccagnnnnnnnnnnnnnnnnnnnnnnnnnnnnnnnnnnnnnnnnnnnnnnnnnnnnnnnnnnnnnnnnnnnnnnnnnnnnnnnnnnnnnnnnnnnnnnnnnnnnnnnnnnnnnnnnnnnnnnnnnnnnnnnnnnnnnnnnnnnnnnnnnnnnnnnnnnnnnnnnnnnnnnnnnnnnnnnnnnnnnnnnnnnnnnnnnnnnnnnnnnnnnnnnnnnnnnnnnnnnnnnnnnnnnnnnnnnnnnnnnnnnnnnnnnnnnnnnnnnnnnnnnnnnnnnnnnnnnnnnnnnnnnnnnnnnnnnnnnnnnnnnnnnnnnnnnnnnnnnnnnnnnnnnnnnnnnnnnnnnnnnnnnnnnnnnnnnnnnnnnnnnnnnnnnnnnnnnnnnnnnnnnnnnnnnnnnnnnnnnnnnnnnnnnnnnnnnnnnnnnnnnnnnnnnnnnnnnnnnnnnnnnnnnnnnnnnnnnnnnnnnnnnnnnnnnnnnnnnnnnnnnnnnnnnnnnnnnnnnnnnnnnnnnnnnnnnnnnnnnnnnnnnnnnnnnnnnnnnnnnnnnnnnnnnnnnnnnnnnnnnnnnnnnnnnnnnnnnnnnnnnnnnnnnnnnnnnnnnnnnnnnnnnnnnnnnnnnnnnnnnnnnnnnnnnnnnnnnnnnnnnnnnnnnnnnnnnnnnnnnnnnnnnnnnnnnnnnnnnnnnnnnnnnnnnnnnnnnnnnnnnnnnnnnnnnnnnnnnnnnnnnnnnnnnnnnnnnnnnnnnnnnnnnnnnnnnnnnnnnnnnnnnnnnnnnnnnnnnnnnnnnnnnnnnnnnnnnnnnnnnnnnnnnnnnnnnnnnnnnnnnnnnnnnnnnnnnnnnnnnnnnnnnnnnnnnnnnnnnnnnnnnnnnnnnnnnnnnnnnnnnnnnnnnnnnnnnnnnnnnnnnnnnnnnnnnnnnnnnnnnnnnnnnnnnnnnnnnnnnnnnnnnnnnnnnnnnnnnnnnnnnnnnnnnnnnnnnnnnnnnnnnnnnnnnnnnnnnnnnnnnnnnnnnnnnnnnnnnnnnnnnnnnnnnnnnnnnnnnnnnnnnnnnnnnnnnnnnnnnnnnnnnnnnnnnnnnnnnnnnnnnnnnnnnnnnnnnnnnnnnnnnnnnnnnnnnnnnnnnnnnnnnnnnnnnnnnnnnnnnnnnnnnnnnnnnnnnnnnnnnnnnnnnnnnnnnnnnnnnnnnnnnnnnnnnnnnnnnnnnnnnnnnnnnnnnnnnnnnnnnnnnnnnnnnnnnnnnnnnnnnnnnnnnnnnnnnnnnnnnnnnnnnnnnnnnnnnnnnnnnnnnnnnnnnnnnnnnnnnnnnnnnnnnnnnnnnnnnnnnnnnnnnnnnnnnnnnnnnnnnnnnnnnnnnnnnnnnnnnnnnnnnnnnnnnnnnnnnnnnnnnnnnnnnnnnnnnnnnnnnnnnnnnnnnnnnnnnnnnnnnnnnnnnnnnnnnnnnnnnnnnnnnnnnnnnnnnnnnnnnnnnnnnnnnnnnnnnnnnnnnnnnnnnnnnnnnnnnnnnnnnnnnnnnnnnnnnnnnnnnnnnnnnnnnnnnnnnnnnnnnnnnnnnnnnnnnnnnnnnnnnnnnnnnnnnnnnnnnnnnnnnnnnnnnnnnnnnnnnnnnnnnnnnnnnnnnnnnnnnnnnnnnnnnnnnnnnnnnnnnnnnnnnnnnnnnnnnnnnnnnnnnnnnnnnnnnnnnnnnnnnnnnnnnnnnnnnnnnnnnnnnnnnnnnnnnnnnnnnnnnnnnnnnnnnnnnnnnnnnnnnnnnnnnnnnnnnnnnnnnnnnnnnnnnnnnnnnnnnnnnnnnnnnnnnnnnnnnnnnnnnnnnnnnnnnnnnnnnnnnnnnnnnnnnnnnnnnnnnnnnnnnnnnnnnnnnnnnnnnnnnnnnnnnnnnnnnnnnnnnnnnnnnnnnnnnnnnnnnnnnnnnnnnnnnnnnnnnnnnnnnnnnnnnnnnnnnnnnnnnnnnnnnnnnnnnnnnnnnnnnnnnnnnnnnnnnnnnnnnnnnnnnnnnnnnnnnnnnnnnnnnnnnnnnnnnnnnnnnnnnnnnnnnnnnnnnnnnnnnnnnnnnnnnnnnnnnnnnnnnnnnnnnnnnnnnnnnnnnnnnnnnnnnnnnnnnnnnnnnnnnnnnnnnnnnnnnnnnnnnnnnnnnnnnnnnnnnnnnnnnnnnnnnnnnnnnnnnnnnnnnnnnnnnnnnnnnnnnnnnnnnnnnnnnnnnnnnnnnnnnnnnnnnnnnnnnnnnnnnnnnnnnnnnnnnnnnnnnnnnnnnnnnnnnnnnnnnnnnnnnnnnnnnnnnnnnnnnnnnnnnnnnnnnnnnnnnnnnnnnnnnnnnnnnnnnnnnnnnnnnnnnnnnnnnnnnnnnnnnnnnnnnnnnnnnnnnnnnnnnnnnnnnnnnnnnnnnnnnnnnnnnnnnnnnnnnnnnnnnnnnnnnnnnnnnnnnnnnnnnnnnnnnnnnnnnnnnnnnnnnnnnnnnnnnnnnnnnnnnnnnnnnnnnnnnnnnnnnnnnnnnnnnnnnnnnnnnnnnnnnnnnnnnnnnnnnnnnnnnnnnnnaggtcacgatggccgaggcctcagaagacagtccgaggccaagtgctcccgacatggaggacttcggcctcgtgaagccgcctcacccagcagcccctgtcgctgtgaagaggaagcgagttctttgggagagccaggaggagtcccaggacctcacgccgactgtgccctggcaggagatcttgggacagcctcccgccctaggaaccacccaggnnnnnnnnnnnnnnnnnnnnnnnnnnnnnnnnnnnnnnnnnnnnnnnnnnnnnnnnnnnnnnnnnnnnnnnnnnnnnnnnnnnnnnnnnnnnnnnnnnnnnnnnnnnnnnnnnnnnnnnnnnnnnnnnnnnnnnnnnnnnnnnnnnnnnnnnnnnnnnnnnnnnnnnnnnnnnnnnnnnnnnnnnnnnnnnnnnnnnnnnnnnnnnagatcagcgagaccagccaggccggcctgttcaggctgtgggcgctcattggcagtgacttgcactgcatnnnnnnnnnnnnnnnnnnnnnnnnnnnnnnnnnnnnnnnnnnnnnnnnnnnnnnnnnnnnnnnnnnnnnnnnnnnnnnnnnnnnnnnnnnnnnnnnnnnnnnnnnnnnnnnnnnnnnnnnnnnnnnnnnnnnnnnnnnnnnnnnnnnnnnnnnnnnnnnnnnnnnnnnnnnnnnnnnnnnnnnnnnnnnnnnnnnnnnnnnnnnnnnnnnnnnnnnnnnnnnnnnnnnnnnnnnnnnnnnnnnnnnnnnnnnnnnnnnnnnnnnnnnnnnnnnnnnnnnnnnnnnnnnnnnnnnnnnnnnnnnnnnnnnnnnnnnnnnnnnnnnnnnnnnnnnnnnnnnnnnnnnnnnnnnnnnnnnnnnnnnnnnnnnnnnnnnnnnnnnnnnnnnnnnnnnnnnnnnnnnnnnnnnnnnnnnnnnnnnnnnnnnnnnnnnnnnnnnnnnnnnnnnnnnnnnnnnnnnnnnnnnnnnnnnnnnnnnnnnnnnnnnnnnnnnnnnnnnnnnnnnnnnnnnnnnnnnnnnnnnnnnnnnnnnnnnnnnnnnnnnnnnnnnnnnnnnnnnnnnnnnnnnnnnnnnnnnnnnnnnnnnnnnnnnnnnnnnnnnnnnnnnnnnnnnnnnnnnnnnnnnnnnnnnnnnnnnnnnnnnnnnnnnnnnnnnaggaggagcgccgggggcccacgctcatcgccgttcagtccagctgggagctgaagaggctggccagtgagattcctgtcttggaggaattcccgctggtgcctatctgtgtggccgacaagatcaactatggggtcctggactggcagcgccatggagcccggcgcatgatccggcactacctcaacctggacacctgcctgtcgcaggcctttgagatgagcaggnnnnnnnnnnnnnnnnnnnnnnnnnnnnnnnnnnnnnnnnnnnnnnnnnnnnnnnnnnnnnnnnnnnnnnnnnnnnnnnnnnnnnnnnnnnnnnnnnnnnnnnnnnnnnnnnnnnnnnnnnnnnnnnnnnnnnnnnnnnnnnnnnnnnnnnnnnnnnnnnnnnnnnnnnnnnnnnnnnnnnnnnnnnnnnnnnnnnnnnnnnnnnnnnnnnnnnnnnnnnnnnnnnnnnnnnnnnnnnnnnnnnnnnnnnnnnnnnnnnnnnnnnnnnnnnnnnnnnnnnnnnnnnnnnnnnnnnnnnnnnnnnnnnnnnnnnnnnnnnnnnnnnnnnnnnnnnnnnnnnnnnnnnnnnnnnnnnnnnnnnnnnnnnnnnnnnnnnnnnnnnnnnnnnnnnnnnnnnnnnnnnnnnnnnnnnnnnnnnnnnnnnnnnnnnnnnnnnnnnnnnnnnnnnnnnnnnnnnnnnnnnnnnnnnnnnnnnnnnnnnnnnnnnnnnnnnnnnnnnnnnnnnnnnnnnnnnnnnnnnnnnnnnnnnnnnnnnnnnnnnnnnnnnnnnnnnnnnnnnnnnnnnnnnnnnnnnnnnnnnnnnnnnnnnnnnnnnnnnnnnnnnnnnnnnnnnnnnnnnnnnnnnnnnnnnnnnnnnnnnnnnnnnnnnnnnnnnnnnnnnnnnnnnnnnnnnnnnnnnnnnnnnnnnnnnnnnnnnnnnnnnnnnnnnnnnnnnnnnnnnnnnnnnnnnnnnnnnnnnnnnnnnnnnnnnnnnnnnnnnnnnnnnnnnnnnnnnnnnnnnnnnnnnnnnnnnnnnnnnnnnnnnnnnnnnnnnnnnnnnnnnnnnnnnnnnnnnnnnnnnnnnnnnnnnnnnnnnnnnnnnnnnnnnnnnnnnnnnnnnnnnnnnnnnnnnnnnnnnnnnnnnnnnnnnnnnnnnnnnnnnnnnnnnnnnnnnnnnnnnnnnnnnnnnnnnnnnnnnnnnnnnnnnnnnnnnnnnnnnnnnnnnnnnnnnnnnnnnnnnnnnnnnnnnnnnnnnnnnnnnnnnnnnnnnnnnnnnnnnnnnnnnnnnnnnnnnnnnnnnnnnnnnnnnnnnnnnnnnnnnnnnnnnnnnnnnnnnnnnnnnnnnnnnnnnnnnnnnnnnnnnnnnnnnnnnnnnnnnnnnnnnnnnnnnnnnnnnnnnnnnnnnnnnnnnnnnncttccaggaatgatcaccttctctcaggattatgtcgcaaatgaactcactcagagcttcttcaccatcactcagaagattcagaagaaagtcacaggctctcggaactccactgagctctcagagatgtttcctgtcctccctggttcccacttgctgctcaataaccctgctctggagttcatcaaatacgtgtgcaaggt

SEQ ID NO: 19418 - DNA, 2992 bp, Macaca Mulatta
  misc_feature (1)...(2992): n = A,T,C or G
cagtgctgggccgcccaaccctgtcggtgcagcagacccctgagggcagcctcctagcacgctgggagccccccgccggcaccgcggaggaccaggtgctgggttaccgcctgcagtttggccgcgaggactccacgcccctggccaccctggagttcccgccctccgaggaccgctacacggcgtcaggcgtgcacaagggggccacgtatgtgttccggctggcggcccggagccgcggcggcctgggcgaggnnnnnnnnnnnnnnnnnnnnnnnnnnnnnnnnnnnnnnnnnnnnnnnnnnnnnnnnnnnnnnnnnnnnnnnnnnnnnnnnnnnnnnnnnnnnnnnnnnnnnnnnnnnnnnnnnnnnnnnnnnnnnnnnnnnnnnnnnnnnnnnnnnnnnnnnnnnnnnnnnnnnnnnnnnnnnnnnnnnnnnnnnnnnnnnnnnnnnnnnnnnnnnnnnnnnnnnnnnnnnnnnnnnnnnnnnnnnnnnnnnnnnnnnnnnnnnnnnnnnnnnnnnnnnnnnnnnnnnnnnnnnnnnnnnnnnnnnnnnnnnnnnnnnnnnnnnnnnnnnnnnnnnnnnnnnnnnnnnnnnnnnnnnnnnnnnnnnnnnnnnnnnnnnnnnnnnnnnnnnnnnnnnnnnnnnnnnnnnnnnnnnnnnnnnnnnnnnnnnnnnnnnnnnnnnnnnnnnnnnnnnnnnnnnnnnnnnnnnnnnnnnnnnnnnnnnnnnnnnnnnnnnnnnnnnnnnnnnnnnnnnnnnnnnnnnnnnnnnnnnnnnnnnnnnnnnnnnnnnnnnnnnnnnnnnnnnnnnnnnnnnnnnnnnnnnnnnnnnnnnnnnnnnnnnnnnnnnnnnnnnnnnnnnnnnnnnnnnnnnnnnnnnnnnnnnnnnnnnnnnnnnnnnnnnnnnnnnnnnnnnnnnnnnnnnnnnnnnnnnnnnnnnnnnnnnnnnnnnnnnnnnnnnnnnnnnnnnnnnnnnnnnnnnnnnnnnnnnnnnnnnnnnnnnnnnnnnnnnnnnnnnnnnnnnnnnnnnnnnnnnnnnnnnnnnnnnnnnnnnnnnnnnnnnnnnnnnnnnnnnnnnnnnnnnnnnnnnnnnnnnnnnnnnnnnnnnnnnnnnnnnnnnnnnnnnnnnnnnnnnnnnnnnnnnnnnnnnnnnnnnnnnnnnnnnnnnnnnnnnnnnnnnnnnnnnnnnnnnnnnnnnnnnnnnnnnnnnnnnnnnnnnnnnnnnnnnnnnnnnnnnnnnnnnnnnnnnnnnnnnnnnnnnnnnnnnnnnnnnnnnnnnnnnnnnnnnnnnnnnnnnnnnnnnnnnnnnnnnnnnnnnnnnnnnnnnnnnnnnnnnnnnnnnnnnnnnnnnnnnnnnnnnnnnnnnnnnnnnnnnnnnnnnnnnnnnnnnnnnnnnnnnnnnnnnnnnnnnnnnnnnnnnnnnnnnnnnnnnnnnnnnnnnnnnnnnnnnnnnnnnnnnnnnnnnnnnnnnnnnnnnnnnnnnnnnnnnnnnnnnnnnnnnnnnnnnnnnnnnnnnnnnnnnnnnnnnnnnnnnnnnnnnnnnnnnnnnnnnnnnnnnnnnnnnnnnnnnnnnnnnnnnnnnnnnnnnnnnnnnnnnnnnnnnnnnnnnnnnnnnnnnnnnnnnnnnnnnnnnnnnnnnnnnnnnnnnnnnnnnnnnnnnnnnnnnnnnnnnnnnnnnnnnnnnnnnnnnnnnnnnnnnnnnnnnnnnnnnnnnnnnnnnnnnnnnnnnnnnnnnnnnnnnnnnnnnnnnnnnnnnnnnnnnnnnnnnnnnnnnnnnnnnnnnnnnnnnnnnnnnnnnnnnnnnnnnnnnnnnnnnnnnnnnnnnnnnnnnnnnnnnnnnnnnnnnnnnnnnnnnnnnnnnnnnnnnnnnnnnnnnnnnnnnnnnnnnnnnnnnnnnnnnnnnnnnnnnnnnnnnnnnnnnnnnnnnnnnnnnnnnnnnnnnnnnnnnnnnnnnnnnnnnnnnnnnnnnnnnnnnnnnnnnnnnnnnnnnnnnnnnnnnnnnnnnnnnnnnnnnnnnnnnnnnnnnnnnnnnnnnnnnnnnnnnnnnnnnnnnnnnnnnnnnnnnnnnnnnnnnnnnnnnnnnnnnnnnnnnnnnnnnnnnnnnnnnnnnnnnnnnnnnnnnagaaacgcgaggtccgccagttccattttacggcatggccagaccacggcgtgcccgaatacccacactcccttcctggctttcctgcggagagtcaagacctgcaacccaccagatgccggccccatcgtggttcactgcagngcagtgccggtgtgggccgcacaggctgctttatcgtcatcgacgccatgctggagcggatcaagccagagaagacagtcgatgtctatggccacgtgacgctcatgaggtcccagcgcaactacatggtgcagacagaggaccagtacagcttcatccacgaggccctgctggaggccgtgggctgtggcaacacagaagtacctgcacgcagcctctatgcctacatccagaagctggcccaggtggagcctggcgagcacgtcactggcatggaactcgagttcaagnagcggctggccaactccaaggcccacacgtcacgcttcatcagtgccaatctgccttgtaacaagttcaagannnnnnnnnnnnnnnnnnnnnnnnnnnnnnnnnnnnnnnnnnnnnnnnnnnnnnnnnnnnnnnnnnnnnnnnnnnnnnnnnnnnnnnnnnnnnnnnnnnnnnnnnnnnnnnnnnnnnnnnnnnnnnnnnnnnnnnnnnnnnnnnnnnnnnnnnnnnnnnnnnnnnnnnnnnnnnnnnnnnnnnnnnnnnnnnnnnnnnnnnnnnnnnnnnnnnnnnnnnnnnnnnnnnnnnnnnnggagaagtgtcaccagtactggccggccgagcgctctgcccgctaccagtactttgtggtagatccgatggcggaatacaacatgcctcagtatatcctgcgagagttcaaggtcacagatgcccgg

SEQ ID NO: 19419 - DNA, 646 bp, Macaca Mulatta
tgggattgactttcccctagaagcacctgaatcacatttctccctcatctcctctccagcgttccaatccacatgctgcctatcccaaccctggaccaagcacatcacagccgcagagcagcatgggatactcagctacctcccagcagcctccacagtactcacatcagacacatcggtactgagctgcatcggaatcttgtccatgcactgttgcgaatgctgcagggctgactgtgcagctctccgcgggaacctggtatgggccatgagaatgtactgtacaaccacatcttcaaaatgtccagtagccaagttccaccacttttcacacagattggggtagtggcttccaagttgtacctgttttggagttagacttgaaaagaaagtgctagcacagtttgtgttgtggatttgctacttccatagtttacttgacatggttcagactgaccaatgcatttttttcagtgacagtctgtagcagttgaagctgtgaatgtgctaggggcaagcatttgtctttgtatgtggtgaattttttcagtgtaacaacattatctgaccaatagtacacacacagacacaaagtttaactggtacttgaaacatacagtatatgttaacgaaataaccaagactc

SEQ ID NO: 19420 - DNA, 815 bp, Macaca Mulatta
ggcaatgcgaatggtagtctaaccaaatgcatcaatcctgtgtggtttagtgtaaaaatgagaacatgttggtatttatctattgtaagataaaaaagctggtgggtgaaagaaatcatgttatgataaaaaattttgtaattttcttgatgactggaatttttattatgcataactgacaaatcaagtttccaagcaaatgttacatagtgtaggctttacttagcttatcaatttgtcattttgaggctaattattttaattaggttaactatgtacaatattttaagcattactcttgtaagattttgaaaactacattttaacatggaactctagggatagtcaccttttaaatcctgttgaaaagccatgtttaagatttaatttgccaaaataatgtcttgttaatattctttcaataacgaagttgggcaatataaccaatgtttgaaaaagtttaaaatgtataagttgaggcatttgggtggtaagagaatgttatagtgaattatcccttttcttgactattggaggaccaaaaaaataaggtgtattgcgtcttagcagtgatttttatccaatcttgtttccaaaaaccatatgtctcccagggccttaaaagccatcatgtaaattaccagtaaagtataacatatgcaaacataacaaaatcacttccatagtgacgatactccaaccatatggatattagtcatagaaaaactagaggttttatgatatttttttaagtcttttttttttttgtccaagtagtcagtctgcacttaaatatcaatccattttcctttttt

SEQ ID NO: 19421 - DNA, 294 bp, Macaca Mulatta
  misc_feature (1)...(294): n = A,T,C or G
ttggcgccgatgacgtggtctgtaccagaatttatgtccgagagtgaaggcagctggcttgctcctcctttcaggaagggatgcaggctcccctgaagaatatatcatagttctgagctgccggtggaccgcccttttctcctaccaatattaggtgaccccattttccccatgacaatgttgtagtgtnnnnnnnnnnnnnnnnnnggccttggtgcctcttgtatccctaatgctccatagtttggcatttgcatggtttcgaagtcattaaactggttggatgtgtctcaa

SEQ ID NO: 19422 - DNA, 1490 bp, Macaca Mulatta
  misc_feature (1)...(1490): n = A,T,C or G
ttcaccaccagccatgcgaccccaagagccttaatgactctagaagagactccaggcaggagaagctgaaaggacctttgactccctacttttggccagggccttctgtgctacctgccaaggccagcagnnnaggcctaccctctgaagaggtccaagcaacggaagtactactacgaagctgcctttgtggccatccttgagaaaaacagacagatggccaaggagaggggcctaataagccccagtgattttgcccagctgcaaaaatacatggaatnnnnnnnnnnnnnnnnnnnnnnnnnnnnnnnnnnnnnnnnnnnnnnnnnnnnnnnnnnnnnnnnnnnnnnnnnnngccattgggtacgagggattccagcaattcctgaaaatctatctggaagtggataatgttcccagacacctaagcctggcactgtttcaatcctttaagactgatcactgcttaaatgaggcaaatgtgacaaaaggtatggtcaagcannnnnnnnnnnnnnnnnnnnnnnnnnnnnnnnnnnnnnnnnnnnnnnnnnnnnnnnnnnnnnnnnnnnnnnnnnnnnnnnnnnnnnnnnnnnnnnnnnnnnnnnnnnnnnnnnnnnnnnnnnnnnnnnnnnnnnnngaagtggacaaaattatcctacagatgatgcgagtggctgaatacctggattgggatgtgtctgagctgaggccnnnncttcaggagatgatgaaagagattgactatgatggtagtggctctgtctctcaagcagaggtgggtccgggctggggccaccactgtgccactgctagtgctgctgggtctggagatnnnnnnnnnnnnnnnnnnnnnnnnnnnnnnnnnnnnnnnnnnnnnnnnnnnnnnnnnnnnnnnnnnnnnnnnnnnnnnnnnnnnnnnnnnnnnnnnnnnnnnnnnnnnnnnnnnnnnnnnnnnnnnnnnnnnnnnnnnnnnnnnnnnnnnnnnnnnnnnnnnnnnnnnnnnnnnnnnnnnnnnnnnnnnnnnnnnnnnnnnnnntccaatcacatgtgtgggtgcgaggaggctgtgagtccgggcgctgcgaccgctgtcagaaaaagatccggatctaccacagtctaaccgggctgcattgtgtatggtgccacctagagnnnnnnnnnnnnnnnnnnnnnnnnnnnnnnnnnnnnnnnnnnnnnnnnnnnnnnnnnnnnnnnnnnnnnnnnnnnnnnnnnnnnnnnnnnnnnnnnnnnnnnnnnnnnnnnnnnnnnnnnnnnnnnnnnnnnnnnnnnnnnnnnnnnnnnnnnnnnnnnnnnnnnnnnnnnnnnnnnnnnnnnnnnnnnnnnnnnnnnnnnnnnnnnnnnnnnnnnnnnnnnnnnnnnctaagagtggcgggaagcaggggcanagggtgctctggaagttccagtatatattaaaccctcgacaggtgttcaacctcctgaaggatggtcctgagataggg

SEQ ID NO: 19423 - DNA, 681 bp, Macaca Mulatta
ggtggtgatcggcgcctacctgggtcgggggaagcgggccggccggtacgggggcttcctgctggcctcctacgacgaggacagtgaggagctgcaggccatatgcaagcttggaactggcttcagcgacgaggagctggaggagcatcaccagagcctcaaggccctggtgctgcccagcccccgcccttatgtgcggatagatggtgccgtgactcccgaccactggctggaccccagcgccgtgtgggaggtgaagtgtgccgacctctccctctcccccatctaccctgctgcgcggggcctggtggatagtgacaaggggatctcccttcgcttccctcggtttattcgagtccgtgaagacaagcagccggagcaggccaccaccagtgcacaggtggcctgtttgtaccggaagcaaagtcagattcagaaccaacaaggcgaggactcaggctctgaccctgaagatacctactaagtccttgccctcctagggcctgggtacagggcatgagttggacggaacccagggttattattgcctttgctctttagcaaatctgctgtggcaggctatggtactcgagactcaggcgaggggtgtgtgtgtgaggggggtggcttacacctgagcctgggattatcccatcattctttcaataatattatcggata

SEQ ID NO: 19424 - DNA, 2724 bp, Macaca Mulatta
  misc_feature (1)...(2724): n = A,T,C or G
cttgtccttgtgagtttctgacatggtcctcctctgtctcttcctcgccagcttggctgccacccctcaggctggggtcactggggcatggcccaccagcggcctctccattctggcccagctccagccgtcctgtgagctcannnnnnnnnnnnnnnnnnnnnnnnnnnnnnnnnnnnnnnnnnnnnnnnnnnnnnnnnnnnnnnnnnnnnnnnnnnnnnnnnnnnnnnnnnnnnnnnnnnnnnnnnnnnnnnnnnnnnnnnnnnnnnnnnnnnnnnnnnnnnnnnnnnnnnnnnnnnnnnnnnnnnnnnnnnnnnnnnnnnnnnnnnnnnnnnnnnnnnnnnnnnnnnnnnnnnnnnnnnnnnnnnnnnnnnnnnnnnnnnnnnnnnnnnnnnnnnnnnnnnnnnnnnnnnnnnnnnnnnnnnnnnnnnnnnnnnnnnnnnnnnnnnnnnnnnnnnnnnnnnnnnnnnnnnnnnnnnnnnnnnnnnnnnnnnnnnnnnnnnnnnnnnnnnnnnnnnnnnnnnnnnnnnnnnnnnnnnnnnnnnnnnnnnnnnnnnnnnnnnnnnnnnnnnnnnnnnnnnnnnnnnnnnnnnnnnnnnnnnnnnnnnnnnnnnnnnnnnnnnnnnnnnnnnnnnnnnnnnnnnnnnnnnnnnnnnnnnnnnnnnnnnnnnnnnnnnnnnnnnnnnnnnnnnnnnnnnnnnnnnnnnnnnnnnnnnnnnnnnnnnnnnnnnnnnnnnnnnnnnnnnnnnnnnnnnnnnnnnnnnnnnnnnnnnnnnnnnnnnnnnnnnnnnnnnnnnnnnnnnnnnnnnnnnnnnnnnnnnnnnnnnnnnnnnnnnnnnnnnnnnnnnnnnnnnnnnnnnnnnnnnnnnnnnnnnnnnnnnnnnnnnnnnnnnnnnnnnnnnnnnnnnnnnnnnnnnnnnnnnnnnnnnnnnnnnnnnnnnnnnnnnnnnnnnnnnnnnnnnnnnnnnnnnnnnnnnnnnnnnnnnnnnnnnnnnnnnnnnnnnnnnnnnnnnnnnnnnnnnnnnnnnnnnnnnnnnnnnnnnnnnnnnnnnnnnnnnnnnnnnnnnnnnnnnnnnnnnnnnnnnnnnnnnnnnnnnnnnnnnnnnnnnnnnnnnnnnnnnnnnnnnnnnnnnnnnnnnnnnnnnnnnnnnnnnnnnnnnnnnnnnnnnnnnnnnnnnnnnnnnnnnnnnnnnnnnnnnnnnnnnnnnnnnnnnnnnnnnnnnnnnnnnnnnnnnnnnnnnnnnnnnnnnnnnnnnnnnnnnnnnnnnnnnnnnnnnnnnnnnnnnnnnnnnnnnnnnnnnnnnnnnnnnnnnnnnnnnnnnnnnnnnnnnnnnnnnnnnnnnnnnnnnnnnnnnnnnnnnnnnnnnnnnnnnnnnnnnnnnnnnnnnnnnnnnnnnnnnnnnnnnnnnnnnnnnnnnnnnnnnnnnnnnnnnnnnnnnnnnnnnnnnnnnnnnnnnnnnnnnnnnnnnnnnnnnnnnnnnnnnnnnnnnnnnnnnnnnnnnnnnnnnnnnnnnnnnnnnnnnnnnnnnnnnnnnnnnnnnnnnnnnnnnnnnnnnnnnnnnnnnnnnnnnnnnnnnnnnnnnnnnnnnnnnnnnnnnnnnnnnnnnnnnnnnnnnnnnnnnnnnnnnnnnnnnnnnnnnnnnnnnnnnnnnnnnnnnnnnnnnnnnnnnnnnnnnnnnnnnnnnnnnnnnnnnnnnnnnnnnnnnnnnnnnnnnnnnnnnnnnnnnnnnnnnnnnnnnnnnnnnnnnnnnnnnnnnnnnnnnnnnnnnnnnnnnnnnnnnnnnnnnnnnnnnnnnnnnnnnnnnnnnnnnnnnnnnnnnnnnnnnnnnnnnnnnnnnnnnnnnnnnnnnnnnnnnnnnnnnnnnnnnnnnnnnnnnnnnnnnnnnnnnnnnnnnnnnnnnnnnnnnnnnnnnnnnnnnnnnnnnnnnnnnnnnnnnnnnnnnnnnnnnnnnnnnnnnnnnnnnnnnnnnnnnnnnnnnnnnnnnnnnnnnnnnnnnnnnnnnnnnnnnnnnnnnnnngcagacgagacttgtaattgtgactctgcagtcatcagtgaccgcccttgttctataccactcctctgccatcttcaatatttctattttgtggtccaagacagtggctctaatttttgtcattacatctgcattctagccagctggaaaaagaaagaaaaggggaagggaagggcacatgccttctctttaaggacacttcccagacattgaacacattgctttaacttatatcccactggccagtacttagtcacacggctacatctagctgtagagacactggaaaatatgtctttattccaagtggctgcatagttggctaatttttataaggttctattattttttaaaaaggtaagaacaggcatcagaagacaagtagcagtctctgccacccttggaaacaagagtggacattacagattgatgtcataagaatagccacagtcagccttgggtgtaatctctagagccaggtggcaagagccaattggaatcttattctgaccagatgctagctaggcaatgctgggcacattggttaatctccctgaacctcagttttctcttctgtaaataatagcaataacaatgacttccaagaattgtaaacagaacgaaatgagtgatgtgtgtagagtactttgtgccctttttgtatggggtcatgggccagcagtaaatattgagaataactctattt

SEQ ID NO: 19425 - DNA, 208 bp, Macaca Mulatta
tggttaaacattttcccactcattcctaattaattaatttggagcacaaaattcaaagcatgaacatttagaaaaaagatgtttggcgtagcagagttaaatctcaaataggctattaaaaaagtctacaacatagcagatctgttttgtggtttggaatattataaaatttcatgtaattttattttaaaatttcatagctgtactt

SEQ ID NO: 19426 - DNA, 653 bp, Macaca Mulatta
  misc_feature (1)...(653): n = A,T,C or G
gagccgaagaactcccgaactgaagagccaactgtggcttctgaaagtgtggaaaatggacatcgtaaacgatcttctcgacctgcgtcagcctccagctctactaaagacataaccagtgcggtgcaatccaagcgaagaaaatccaagtaaacaagcaggacggcgacttgatacttgtaaatgtgtgtgacttttacaaagagcaattttgagctgtgacttttttaaatcaatttctgtacagttagtaattttaataatgtggcccttttcctagtccctgcaacctgtttcataaagtgcaatggggaaagcaggattgttgagcccttttggtgttgcaagttgaagttcaaggtttctaaaatgttgtcttgtattgaaaggggctaaaaacattataaatgttattagttttcacatttcctaagcagcctagagtacagggtgagcatttttagatatcctaatgacgtattgtgctgtggaagtactgtgtgtgaatagcagtagtgggggcaaaagcaatcttctcatttggaaatgttgtaaataattttattatatagtgttttggatgtatttgttgtagaaatgganccagtgaataaagagaatctaatacagcacaagtccgaaaaaaaaaaaaa

SEQ ID NO: 19427 - DNA, 848 bp, Macaca Mulatta
  misc_feature (1)...(848): n = A,T,C or G
tacactttatcgtcgtttatatagttcgatagaaatataattcaatacaacatctacacatgtgaaattgattgagtctgtcactagatcttatcatattgtaatgaaacctaattttggttgaaatttttacgcggtgttccctctctatttgctagcagtggactagtactactgtcttctaagtataactttattatcaatgtcatatactaaaagaatagtatataaacactcagacgataaattagcccctaactacgatagttaaccctatatccgtagatgtagacaaatctaccaattatgtagtcttctatgggctccgtttgcgagtttgtttgctttatgactctccacccctctacttttattcgtctcattttatttttgtttctgtaatggtatccaattctatactaaaaaatacatactttcctacctctcatcccatctaccagtgctgaggtaannnnnnnnnnnnnnnnnnnnnnnnnnnnnnnnnnnnnngaggtttcccccgcgggccccttgttttggggttacctttctcccctccccatgtggaggaaagtgttggaggtgacagttcttacgatgtgtagcttctcaaggccatttttgtaaataggcttatccataggcactgtgggggctttagtggaaatcttggtgatgcctgtannggttnnttggtttagggatccgtgttgggattctccgcttgcatacctccttgattgtaatttgtgattgtcgaggaagaggtgtggctgttggtgtgatagtaatactgctggtgactttattggctgttttgtttagtgccccgttaattaagccttgcc

SEQ ID NO: 19428 - DNA, 2718 bp, Macaca Mulatta
  misc_feature (1)...(2718): n = A,T,C or G
ctcggaacccaggcctggggggcggtggggccgcgtatggagccccagccccccggagctgccaacattgccaatgccaccgccacgctacacacaggtacccttgggatggcgtgagcactcccccagtgatggacccatctgtgacgctgtggcagtttctgctgcagctgctcagacagcaaggcaatggccacatcatctcctggacttcacgggatggtggtgaattcaagctggtggatgcagaggaggtggcccgggctgtgggggctacgcaagaacaagaccaacatgaattacgacaagctcagccgggccttgcggtactactatgacaagaatatcatccgccaaagtgagcggccaaaagttcgtttacaagtttgtgtcccatcctgaggtcgcaaggtgctccactgaagactgcgcgccccagtcagaaggtgtctgttacctccgccccaagccaaatgtggcccctgctgctgtacatgccaccccaggggacactgcctctggaaagccaggcacacccaagggtgcaggaatggcaggcccgggtggtttggcacgcagcagccggaacgagtacatgcgttcgggcctctattccaccttcaccatccagtctctgcagccacagccaccccctcatcctcggcctgctgtggtgctccccaatgcagctcctgcaggagcagcagcgcccccctcggggagcaggagcaccagtccaagccccttggaggcctgcctggaggctgaggaggccggcttgcctctgcaggtcatcctgaccccacccgaggccccaaacctgaaatcgcaggagctgaatatggagccaggtttgggccgggctttgcccgcagaagtgaaagtggaagggcccaagaagagttggaagttgccggggagagagggtttgtgccggaaactaccaaggccgagccagaagtccctccataggagggcgtgccagcccggcnnnnnnnnnnnnnnnnnnnnnnnnnnnnnnnnnnnnnnnnnnnnnnnnnnnnnnnnnnnnnnnnnnnnnnnnnnnnnnnnnnnnnnnnnnnnnnnnnnnnnnnnnnnnnnnnnnnnnnnnnnnnnnnnnnnnnnnnnnnnnnnnnnnnnnnnnnnnnnnnnnnnnnnnnnnnnnnnnnnnnnnnnnnnnnnnnnnnnnnnnnnnnnnnnnnnnnnnnnnnnnnnnnnnnnnnnnnnnnnnnnnnnnnnnnnnnnnnnnnnnnnnnnnnnnnnnnnnnnnnnnnnnnnnnnnnnnnnnnngcgccccgtagtccgtccaagctctccttccagtgtccgtccagtggcagcgcccaggtgcacatcccttccatcagcgtggctggcctctcgacccccgtggtgctctccccagggccccagaagccatgactacnnnnnnnnnnnnnnnnnnttctggggtcactctatccatgctctctccagccagccatctcaaggagaaacatagttcaactgaaagactcacgctctgattgtggtggggtagggatccttgggaagaattactcccaggagtaactgactctcattaactcctccacagaaaacacacagcttccacagcttctctcttttctgtcggtcccccagtggctgcccttacacgtctcctacttcagtggtaggggcggtttgtttattttttgaaggccactgggaggcgactgacctaaccttttaggatggttaggacatctcccccacctccccacttttttccgcaagacaagacaatcagggtctggcctagacctttctttctttattcctcaccctgcccttggggagatgagggagccctgtctgcattttcggatgtgagtagaatagttagtttatttcgttctattattcctggccatactcaggggtccaggaagaatttgtaccatttaatgggttggaagtcttggccaaggaagaatcgccccctggaatagaagtttcgacctccccagcctttctcnnnnnnnnnnnnnnnnnnnnnnnnnnnnnnnnnnnnnnnnnnnnnnnnnnnnnnnnnnnnnnnnnnnnnnnnnnnnnnnnnnnnnnnnnnnnnnnnnnnnnnnnnnnnnnnnnnnnnnnnnnnnnnnnnnnnnnnnnnnnnnnnnnnnnnnnnnnnnnnnnnnnnnnnnnnnnnnnnnnnnnnnnnnnnnnnnnnnnnnnnnnnnnnnnnnnnnnnnnnnnnnnnnnnnnnnnnnnnnnnnnnnnnnnnnnnnnnnnnngtcatctcttcttatctttggtggggtgggtgggaaggaagggatttgggggggaatcttcctgccgcctccctcctccaagtgtttatttttgataccaaacgtgtattttcagttccctccctcccagccccccaattacctgcgggagggtacaaaagaccctttcaatgtccctggagttgggagggaggaatgggggacgtaaagcctgtcctgtctctattctaggcaagagagagcgggttcaaaagactcccgggctcacctgttagcgctggcccagcccaggcctccggacctgggagttggtgatttgggggacggtgctacactcatctctactgtttgttttacttccccaaagtggacctttttttcccctaaagagtcccagagaatggggaattgttcctgtaaatatatatttttcaaagtg

SEQ ID NO: 19429 - DNA, 247 bp, Macaca Mulatta
  misc_feature (1)...(247): n = A,T,C or G
tggatggcaagcggcggccaggcccagggcccggggtgcccccaaagcgggcccgtgggagcctctgggacgacgatgatgcacttccgccatcccaattcgaggaggacctggcactgatggaggagatggaggcagagcacaggctgcaggagcaggaggaggaggaactgcagtcagtcctagagggggttgcagacggngggcaggtcccaccgtcagccatagatcctcgctggcatcggcc

SEQ ID NO: 19430 - DNA, 688 bp, Macaca Mulatta
ttgcggatctttggttcgcacgctcctgctcctgactcaccgctgttcgctctcgccgaggaacaagtcggtcaggaagccgcgcagcaggcatggcttttaaggatactggaaaaacacccgtggagccggaggtggcaattcaccgaattcgaatcaccctaacgagccgcaacgttaaatccctggaaaagggtcagtgcagtcgtgcggtgggggcgggaattggacaaaaagcgccgagctttactcgttaatgttagtgtacaaggtggactccaagaactgaagtgacaagttgcttactttaaaaaggtaaagcatggcctaaaactgctttcattgtcatacagctggcgatgaggaggtacctactgtgttgaataacggtgatagttttatacgctattctgagccagtagaagtgaaggtcttaagccgattttaattgttttgattgtactgagaggtctttttatttcctgcagtgtgtgctgacttgatcagaggcgcgaaggaaaagaacctgaaagtgaaaggaccagttcgaatgcctaccaaggtaaagtaaatcggaggggcaggaagtaggagagttgcttctggatgttgtgtacattcaggttctttaagaagtttggctgccaaaattgttaaccctgatgttatctacaaacgcgtattgaaa

SEQ ID NO: 19431 - DNA, 775 bp, Macaca Mulatta
ggggacatggtcattttaaacaccacacatccaattttataccactctttaaatagtcatttacccagccaaggaaaacacagattaaagactcccttatgttatacttctccaaaagtatatattaaacatttagtaggtgtctctaaaatagatgaaaggataatgacctttaaaatgccttaatattgtcctataacatgaaaataaagatgcattcaggcctactaaataagaatatacactagaggtagtcgtaaaaaaaactacgaccatctcaacacgtactcataataaccagtaaatgaatatttaagatgtttatttcagtatcttcattccccactgtaatacatttgaatccccacgtatttcagttccgtaaatagactctcttaatttggataactatgtaattacccttcagagttgtagacaacaatggaaccttaaaaacctcttaaacacataaattctacccctaaactaaaagaattcaggggttaaataaaacaagtaagaagccacttacttacatcagtttggtttatagacatttgaatcttatttgaatgactgacttgtttctaatgtgaaaaccaaattaaaaataacttgatcactttgcttcaaacacaactgttcacatatcaaattctaactccatctatgtaaaattcaacttttctgtatcagagaaaaaagctatttaaattcagtggcattgaatctttcatgaacagcatgaaaatatgagttgacggaagatattcca

SEQ ID NO: 19432 - DNA, 3508 bp, Macaca Mulatta
  misc_feature (1)...(3508): n = A,T,C or G
agaagcccctggtctcccccagccagtagtctgttataacgcagaccagattcctccagaaaactctccttttatggagaggtgcttcatatgtcgtctgaggtgtctgctggataattcatctggttttctgnnnnnnnnnnnnnnnnnnnnnnnnnnnnnnnnnnnnnnnnnnnnnnnnnnnnnnnnnnnnnnnnnnnnnnnnnnnnnnnnnnnnnnnnnnnnnnnnnnnnnnnnnnnnnnnnnnnnnnnnnnnnnnnnnnnnnnnnnnnnnnnnnnnnnnnnnnnnnnnnnnnnnnnnnnnnnnnnnnnnnnnnnnnnnnnnnnnnnnnnnnnnnnnnnnnnnnnnnnnnnnnnnnnnnnnnnnnnnnnnnnnnnnnnnnnnnnnnnnnnnnnnnnnnnnnnnnnnnnnnnnnnnnnnnnnnnnnnnnnnnnnnnnnnnnnnnnnnnnnnnnnnnnnnnnnnnnnnnnnnnnnnnnnnnnnnnnnnnnnnnnnnnnnnnnnnnnnnnnnnnnnnnnnnnnnnnnnnnnnnnnnnnnnnnnnnnnnnnnnnnnnnnnnnnnnnnnnnnnnnnnnnnnnnnnnnnnnnnnnnnnnnnnnnnnnnnnnnnnnnnnnnnnnnnnnnnnnnnnnnnnnnnnnnnnnnnnnnnnnnnnnnnnnnnnnnnnnnnnnnnnnnnnnnnnnnnnnnnnnnnnnnnnnnnnnnnnnnnnnnnnnnnnnnnnnnnnnnnnnnnnnnnnnnnnnnnnnnnnnnnnnnnnnnnnnnnnnnnnnnnnnnnnnnnnnnnnnnnnnnnnnnnnnnnnnnnnnnnnnnnnnnnnnnnnnnnnnnnnnnnnnnnnnnnnnnnnnnnnnnnnnnnnnnnnnnnnnnnnnnnnnnnnnnnnnnnnnnnnnnnnnnnnnnnnnnnnnnnnnnnnnnnnnnnnnnnnnnnnnnnnnnnnnnnnnnnnnnnnnnnnnnnnnnnnnnnnnnnnnnnnnnnnnnnnnnnnnnnnnnnnnnnnnnnnnnnnnnnnnnnnnnnnnnnnnnnnnnnnnnnnnnnnnnnnnnnnnnnnnnnnnnnnnnnnnnnnnnnnnnnnnnnnnnnnnnnnnnnnnnnnnnnnnnnnnnnnnnnnnnnnnnnnnnnnnnnnnnnnnnnnnnnnnnnnnnnnnnnnnnnnnnnnnnnnnnnnnnnnnnnnnnnnnnnnnnnnnnnnnnnnnnnnnnnnnnnnnnnnnnnnnnnnnnnnnnnnnnnnnnnnnnnnnnnnnnnnnnnnnnnnnnnnnnnnnnnnnnnnnnnnnnnnnnnnnnnnnnnnnnnnnnnnnnnnnnnnnnnnnnnnnnnnnnnnnnnnnnnnnnnnnnnnnnnnnnnnnnnnnnnnnnnnnnnnnnnnnnnnnnnnnnnnnnnnnnnnnnnnnnnnnnnnnnnnnnnnnnnnnnnnnnnnnnnnnnnnnnnnnnnnnnnnnnnnnnnnnnnnnnnnnnnnnnnnnnnnnnnnnnnnnnnnnnnnnnnnnnnnnnnnnnnnnnnnnnnnnnnnnnnnnnnnnnnnnnnnnnnnnnnnnnnnnnnnnnnnnnnnnnnnnnnnnnnnnnnnnnnnnnnnnnnnnnnnnnnnnnnnnnnnnnnnnnnnnnnnnnnnnnnnnnnnnnnnnnnnnnnnnnnnnnnnnnnnnnnnnnnnnnnnnnnnnnnnnnnnnnnnnnnnnnnnnnnnnnnnnnnnnnnnnnnnnnnnnnnnnnnnnnnnnnnnnnnnnnnnnnnnnnnnnnnnnnnnnnnnnnnnnnnnnnnnnnnnnnnnnnnnnnnnnnnnnnnnnnnnnnnnnnnnnnnnnnnnnnnnnnnnnnnnnnnnnnnnnnnnnnnnnnnnnnnnnnnnnnnnnnnnnnncatatccagctgaattaaataacataaataacactcaggttaccacacatcttcagccacttcatcatccgtcagaagccagaccttttcctgatttgacatccggtggattcctgtaattccaagcccaattttgaccctggtttttggattaaattagtttgtgaaggattatggaataataaaactgtcactgttggacgtcagcaagttcacatggaggcattgatgcatgctattcacaattattccaaaccaaattttaatttttgcttttagaaaaggaagtttaataaatggtatcaaaatagtacctataatatagtcattaaggtagaaagtgtactgccacagagtagtgagataccatctacatttcacattattctgagcaccacaaaatatgcaaaactttatcagggaaactaagactcttttaaattagaaagcattctttatttgaattatttctgtcagaataaaaataaaatactttgagttttgaactactggattcttattagtttcccaaatacaaagttacacaactaaactagtttttcctatcatgttaacctctgcttttatctcggatgttaaaataaatggtttggtgctttttataaaaggatgatctcagtgctctcctcctccactgttcatctaagtgcctcacatttttttctacctataacactgtaggatgtatattttatataaagaattctttttctttttnnnnnnnnnnnnnnnnnnnnnnnnnnnnnnnnnnnnnnnnnnnnnnnnnnnnnnnnnnnnnnnnnnnnnnnnnnnnnnnnnnnnnnnnnnnnnnnnnnnnnnnnnnnnnnnnnnnnnnnnnnnnnnnnnnnnnnnnnnnnnnnnnnnnnnnnnnnnnnnnnnnnnnnnnnnnnnnnnnnnnnnnnnnnnnnnnnnnnnnnnnnnnnnnnnnnnnnnnnnnnnnnnnnnnnnnnnnnnnnnnnnnnnnnnnnnnnnnnnnnnnnnnnnnnnnnnnnnnnnnnnnnnnnnnnnnnnnnnnnnnnnnnnnnnnnnnnnnnnnnnnnnnnnnnnnnnnnnnnnnnnnnnnnnnnnnnnnnnnnnnnnnnnnnnnnnnnnnnnnnnnnnnnnnnnnnnnnnnnnnnnnnnnnnnnnnnnnnnnnnnnnnnattaagcaaaacacccgtttcaatgtgtataaattgtctttaaaaattgttttagacctataaaccttgataatctattgtgttgactttataaatttcgcttcttagaacagtggaaactatttgtttttctcatatttgaggagtgttaagattgcagatagcaatgtttggtgcaaagtattgtaatgagtgaattgaatggtgcattgtatagatataatgaacaaaattatttgtaagatatttgcagtttttcattttaaaaagtccataccttatatatgcacttaaataatttgttggggcttttcatactttatcagtgtgtctttgtaagaaataaagtaatgaatccaactgcttaaagttggtattaagaaaaagacaaccacacagttcatttaccttcaaacattaggttgtttttaatgatatactgatcttctttaccaataggcaaattaatcactctaccaactttactgtcc

SEQ ID NO: 19433 - DNA, 121 bp, Macaca Mulatta
aagctttataagcgatacgcttttctacgttgtgaagaagaaagagagcagtttctttaccaccttctttctctcaatgctgtggactatttctgcttcaccagtgtgttcactactatca

SEQ ID NO: 19434 - DNA, 778 bp, Macaca Mulatta
  misc_feature (1)...(778): n = A,T,C or G
gccattgggtacgagggattccagcaattcctgaaaatctatctggaagtggataatgttcccagacacctaagcctggcactgtttcaatcctttaagactgatcactgcttaaatgaggcaaatgtgacaaaannnnnnnnnnnnnnnnnnnnnnnnnnnnnnnnnnnnnnnnnnnnnnnnnnnnnnnnnnnnnnnnnnnnnnnnnnnnnnnnnnnnnnnnnnnnnnnnnnnnnnnnnnnnnnnnnnnnnnnnnnnnnnnnnnnnnnnnnnnnnnnnnnnnnnnnnnnnnnnnnnnnnnnnnnnnnnnnnnnnnnnnnnnnnnnnnnnnnnnnnnnnnnnnnnnnnnnnnnnnnnnnnnnnnnnnnnnnnnnnnnnnnnnnnnnnnnnnnnnnnnnnnnnnnnnnnnnnnnnnnnnnnnnnnnnnnnnnnnnnnnnnnnnnnnnnnnnnnnnnnnnnnnnnnnnnnnnnnnnnnnnnnnnnnnnnnnnnnnnnnnnnnnnnnnnnnnnnnnnnnnnnnnnnnnnnnnnnnnnnnnnnnnnnnnnnnnnnnnnnnnnnnnnnnnnnnnnnnnnnnnnnnnnnnnnnnnnnnnnnnnnnnnnnnnnnnnnnnnnnnnnnnnnnnnnnnnnnnnnnnnnnnnnnnnnnnnnnnnnnnnnntccaatcacatgtgtgggtgcgaggaggctgtgagtccgggcgctgcgaccgctgtcagaaaaagatccggatctaccacagtctaaccgggctgcattgtgtatggtgccacctagag

SEQ ID NO: 19435 - DNA, 676 bp, Macaca Mulatta
  misc_feature (1)...(676): n = A,T,C or G
agcttccaatcagaagactatacaacctcctagggtaagttaaagtttattaaatgaattgtgaatgatcatttgagggattagactgaggaaattggtaattgatatattttgctatctgtttagtgtcacatcaaattaagagaagtttgaagtcattgcatgacctttgcatgaatgggcccagttctattttaaaacctgtgtttggtcattttagtatcaatgggatggaatacatgatttcttaagattgtactgacttctcacacccagaactgcaaagtaggaataatggctatattatctctgcaatcagaaggaagctgattccaatatatcgcctcacctcttggattcattggatatgcatacacagaatgacaatttcaggcttanaaatgaggagaaattcatactaaattgacatcattaanaatggatattataaaaacaaatgtaaatattgctgaaaacatctatttcgagnntatgatcgatccctcccatacaaatgttttacacattttttcccttaaactgtgcttaanggttcattgtaccttagataccccttatagccatctgagaaattccnnagaaggagtanttttangaggncatnnaatgagagaaaagcatggttataacatagacttatcacggtgacaggcca

SEQ ID NO: 19436 - DNA, 546 bp, Macaca Mulatta
acagatgtcctgccatggaaccttcacctcctcgtgcaccctggggactgagcccatgacaccaaagctgccccttggctattcctggactccctacccaaccccagggactgcaggttgtgccctgtggctgcctgcaccccaggaaagaagggatctcaggccatccagcccccacctacagtccttggtacgaggcaggctcccttcccggagaagagaagcacccagaccccgcgcccggctgacctttgcttcagtccttgaatcacttgtgggacttgaggactcgggagcttcaggatgactggagaagcgtggcttcctgccacccgccagccaaggaggctgctggggtggggaaccccagggggatttttgacacagcctttggctgcccctctctgagctaattccacactcctgtacccctccaaggggccctctgcctcatggcagaggcttgccccaaatcacaactactcagatgttccatacctccaaatgccaatttcagcacccaactgagatccaaggagctcctgg

SEQ ID NO: 19437 - DNA, 7468 bp, Macaca Mulatta
  misc_feature (1)...(7468): n = A,T,C or G
gagcttaacttagatagcagtaatttccctggagtaaaactacggtcaaaaatgtccctccgttcttatggaagccgggaaggatctgtatcaagccgttctggagagtgcagtcctgttcctatgggttcatttccaagaagagggtttgtaaatggaagcagagaaagtactggatatttagaagaacttgagaaagagaggtnnnaggtcgttgcttcttgctgatcttgacaaagaagaaaaggaaaaagactggtattatgctcaacttcagaatctcactaaaagaatagatagtcttcctttaactgaaaannnnnnnnnnnnnnnnnnnnnnnnnnnnnnnnnnnnnnnnnnnnnnnnnnnnnnnnnnnnnnnnnnnnnnnnnnnnnnnnnnnnnnnnnnnnnnnnnnnnnnnnnnnnnnnnnnnnnnnnnnnnnnnnnnnnnnnnnnnnnnnnnnnnnnnnnnnnnnnnnnnnnnnnnnnnnnnnnnnnnnnnnnnnnnnnnnnnnagaggtcatctcagaacaagcatgaaaccggctcacatgatgctgagcggcagaatgaaggtcaaggagtggcagaaatcaacatggcaacttctggtaatggtcagnnnnnnnnnnnnnnnnnnnnnnnnnnnnnnnnnnnnnnnnnnnnnnnnnnnnnnnnnnnnnnnnnnnnnnnnnnnnnnnnnnnnnnnnnnnnnnnnnnnnnnnnnnnnnnnnnnnnnnnnnnnnnnnnnnnnnnnnnnnnnnnnnnnnnnnnnnnnnnnnnnnnnnnnnnnnnnnnnnnnnnnnnnnnnnnnnnnnnnnnnnnnnnnnnnnnnnnnnnnnnnnnnnnnnnnnnnnnnnnnnnnnnnnnnnnnnnnnnnnnnnnnnnnnnnnnnnnnnnnnnnnnnnnnnnnnnnnnnnnnnnnnnnnnnnnnnnnnnnnnnnnnnnnnnnnnnnnnnnnnnnnnnnnnnnnnnnnnnnnnnnnnnnnnnnnnnnnnnnnnnnnnnnnnnnnnnnnnnnnnnnnnnnnnnnnnnnnnnnnnnnnnnnnnnnnnnnnnnnnnnnnnnnnnnnnnnnnnnnnnnnnnnnnnnnnnnnnnnnnnnnnnnnnnnnnnnnnnnnnnnnnnnnnnnnnnnnnnnnnnnnnnnnnnnnnnnnnnnnnnnnnnnnnnnnnnnnnnnnnnnnnnnnnnnnnnnnnnnnnnnnnnnnnnnnnnnnnnnnnnnnnnnnnnnnnnnnnnnnnnnnnnnnnnnnnnnnnnnnnnnnnnnnnnnnnnnnnnnnnnnnnnnnnnnnnnnnnnnnnnnnnnnnnnnnnnnnnnnnnnnnnnnnnnnnnnnnnnnnnnnnnnnnnnnnnnnnnnnnnnnnnnnnnnnnnnnnnnnnnnnnnnnnnnnnnnnnnnnnnnnnnnnnnnnnnnnnnnnnnnnnnnnnnnnnnnnnnnnnnnnnnnnnnnnnnnnnnnnnnnnnnnnnnnnnnnnnnnnnnnnnnnnnnnnnnnnnnnnnnnnnnnnnnnnnnnnnnnnnnnnnnnnnnnnnnnnnnnnnnnnnnnnnnnnnnnnnnnnnnnnnnnnnnnnnnnnnnnnnnnnnnnnnnnnnnnnnnnnnnnnnnnnnnnnnnnnnnnnnnnnnnnnnnnnnnnnnnnnnnnnnnnnnnnnnnnnnnnnnnnnnnnnnnnnnnnnnnnnnnnnnnnnnnnnnnnnnnnnnnnnnnnnnnnnnnnnnnnnnnnnnnnnnnnnnnnnnnnnnnnaggcaaattctaagagagaacaactgtctacagactttattacaacacttaaaatctcatagtttgacaatagtcagtaatgcttgtggaactttgtggaatctctcagcaagaaatcctaaagacnnnnnnnnnnnnnnnnnnnnnnnnnnnnnnnnnnnnnnnnnnnnnnnnnnnnnnnnnnnnnnnnnnnnnnnnnnnnnnnnnnnnnnnnnnnnnnnnnnnnnnnnnnnnnnnnnnnnnnnnnnnnnnnnnnnnnnnnnnnnnnnnnnnnnnnnnnnnnnnnnnnnnnnnnnnnnnnnnnnnnnnnnnnnnnnnnnnnnnnnnnnnnnnnnnnnnnnnnnnnnnnnnnnnnnnnnnnnnnnnnnnnnnnnnnnnnnnnnnnnnnnnnnnnnnnnnnnnnnnnnnnnnnnnnnnnnnnnnnnnnnnnnnnnnnnnnnnnnnnnnnnnnnnnnnnnnnnnnnnnnnnnnnnnnnnnnnnnnnnnnnnnnnnnnnnnnnnnnnnnnnnnnnnnnnnnnnnnnnnnnnnnnnnnnnnnnnnnnnnnnnnnnnnnnnnnnnnnnnnnnnnnnnnnnnnnnnnnnnnnnnnnnnnnnnnnnnnnnnnnnnnnnnnnnnnnnnnnnnnnnnnnnnnnnnnnnnnnnnnnnnnnnnnnnnnnnnnnnnnnnnnnnnnnnnnnnnnnnnnnnnnnnnnnnnnnnnnnnnnnnnnnnnnnnnnnnnnnnnnnnnnnnnnnnnnnnnnnnnnnnnnnnnnnnnnnnnnnnnnnnnnnnnnnnnnnnnnnnnnnnnnnnnnnnnnnnnnnnnnnnnnnnnnnnnnnnnnnnnnnnnnnnnnnnnnnnnnnnnnnnnnnnnnnnnnnnnnnnnnnnnnnnnnnnnnnnnnnnnnnnnnnnnnnnnnnnnnnnnnnnnnnnnnnnnnnnnnnnnnnnnnnnnnnnnnnnnnnnnnnnnnnnnnnnnnnnnnnnnnnnnnnnnnnnnnnnnnnnnnnnnnnnnnnnnnnnnnnnnnnnnnnnnnnnnnnnnnnnnnnnnnnnnnnnnnnnnnnnnnnnnnnnnnnnnnnnnnnnnnnnnnnnnnnnnnnnnnnnnnnnnnnnnnnnnnnnnnnnnnnnnnnnnnnnnnnnnnnnnnnnnnnnnnnnnnnnnnnnnnnnnnnnnnnnnnnnnnnnnnnnnnnnnnnnnnnnnnnnnnnnnnnnnnnnnnnnnnnnnnnnnnnnnnnnnnnnnnnnnnnnnnnnnnnnnnnnnnnnnnnnnnnnnnnnnnnnnnnnnnnnnnnnnnnnnnnnnnnnnnnnnnnnnnnnnnnnnnnnnnnnnnnnnnnnnnnnnnnnnnnnnnnnnnnnnnnnnnnnnnnnnacaggtcacggggagccaacggttcagaaacaaatcgagtgggttctaatcatggaattaatcaaaatgtaagccagtctttgtgtcaagaagatgactatgaagatgataagcctaccaactatagtgaacgttactctgaagaagaacagcatgaagaagaagagagaccaacaaattatagcataaaatacaatgaagagaaacatcatgtggatcagcctattgattatagtttaaaatatgccacagatattccttcgtcacagaaacagtcattttcattctcaaagagttcatctggacaaagcactaaaactgaacatatctcttcaagcagtgagaatacgtccacaccttcatctaatgccaagaggcagaatcagctccatccaagttcggcacagagtagaagtggtcagactcaaaaggctgccacttgcaaagtttcttctattaaccaagaaacaatacagacttattgtgtagaagatactccaatatgtttttcaagatgtagttcattatcatctttgtcatcagctgaagatgaaataggatgtgatcagacgacacaggaagcagattctgctaataccctgcaaatagcagaaataaaagacaagannnnnnnnnnnnnnnnnnnnnnnnnnnnnnnnnnnnnnnnnnnnnnnnnnnnnnnnnnnnnnnnnnnnnnnnnnnnnnnnnnnnnnnnnnnnnnnnnnnnnnnnnnnnnnnnnnnnnnnnnnnnnnnnnnnnnnnnnnnnnnnnnnnnnnnnnnnnnnnnnnnnnnnnnnnnnnnnnnnnnnnnnnnnnnnnnnnnnnnnnnnnnnnnnnnnnnnnnnnnnnnnnnnnnnnnnnnnnnnnnnnnnnnnnnnnnnnnnnnnnnnnnnnnnnnnnnnnnnnnnnnnnnnnnnnnnnnnnnnnnnnnnnnnnnnnnnnnnnnnnnnnnnnnnnnnnnnnnnnnnnnnnnnnnnnnnnnnnnnnnnnnnnnnnnnnnnnnnnnnnnnnnnnnnnnnnnnnnnnnnnnnnnnnnnnnnnnnnnnnnnnnnnnnnnnnnnnnnnnnnnnnnnnnnnnnnnnnnnnnnnnnnnnnnnnnnnnnnnnnnnnnnnnnnnnnnnnnnnnnnnnnnnnnnnnnnnnnnnnnnnnnnnnnnnnnnnnnnnnnnnnnnnnnnnnnnnnnnnnnnnnnnnnnnnnnnnnnnnnnnnnnnnnnnnnnnnnnnnnnnnnnnnnnnnnnnnnnnnnnnnnnnnnnnnnnnnnnnnnnnnnnnnnnnnnnnnnnnnnnnnnnnnnnnnnnnnnnnnnnnnnnnnnnnnnnnnnnnnnnnnnnnnnnnnnnnnnnnnnnnnnnnnnnnnnnnnnnnnnnnnnnnnnnnnnnnnnnnnnnnnnnnnnnnnnnnnnnnnnnnnnnnnnnnnnnnnnnnnnnnnnnnnnnnnnnnnnnnnnnnnnnnnnnnnnnnnnnnnnnnnnnnnnnnnnnnnnnnnnnnnnnnnnnnnnnnnnnnnnnnnnnnnnnnnnnnnnnnnnnnnnnnnnnnnnnnnnnnnnnnnnnnnnnnnnnnnnnnnnnnnnnnnnnnnnnnnnnnnnnnnnnnnnnnnnnnnnnnnnnnnnnnnnnnnnnnnnnnnnnnnnnnnnnnnnnnnnnnnnnnnnnnnnnnnnnnnnnnnnnnnnnnnnnnnnnnnnnnnnnnnnnnnnnnnnnnnnnnnnnnnnnnnnnnnnnnnnnnnnnnnnnnnnnnnnnnnnnnnnnnnnnnnnnnnnnnnnnnnnnnnnnnnnnnnnnnnnnnnnnnnnnnnnnnnnnnnnnnnnnnnnnnnnnnnnnnnnnnnnnnnnnnnnnnnnnnnnnnnnnnnnnnnnnnnnnnnnnnnnnnnnnnnnnnnnnnnnnnnnnnnnnnnnnnnnnnnnnnnnnnnnnnnnnnnnnnnnnnnnnnnnnnnnnnnnnnnnnnnnnnnnnnnnnnnnnnnnnnnnnnnnnnnnnnnnnnnnnnnnnnnnnnnnnnnnnnnnnnnnnnnnnnnnnnnnnnnnnnnnnnnnnnnnnnnnnnnnnnnnnnnnnnnnnnnnnnnnnnnnnnnnnnnnnnnnnnnnnnnnnnnnnnnnnnnnnnnnnnnnnnnnnnnnnnnnnnnnnnnnnnnnnnnnnnnnnnnnnnnnnnnnnnnnnnnnnnnnnnnnnnnnnnnnnnnnnnnnnnnnnnnnnnnnnnnnnnnnnnnnnnnnnnnnnnnnnnnnnnnnnnnnnnnnnnnnnnnnnnnnnnnnnnnnnnnnnnnnnnnnnnnnnnnnnnnnnnnnnnnnnnnnnnnnnnnnnnnnnnnnnnnnnnnnnnnnnnnnnnnnnnnnnnnnnnnnnnnnnnnnnnnnnnnnnnnnnnnnnnnnnnnnnnnnnnnnnnnnnnnnnnnnnnnnnnnnnnnnnnnnnnnnnnnnnnnnnnnnnnnnnnnnnnnnnnnnnnnnnnnnnnnnnnnnnnnnnnnnnnnnnnnnnnnnnnnnnnnnnnnnnnnnnnnnnnnnnnnnnnnnnnnnnnnnnnnnnnnnnnnnnnnnnnnnnnnnnnnnnnnnnnnnnnnnnnnnnnnnnnnnnnnnnnnnnnnnnnnnnnnnnnnnnnnnnnnnnnnnnnnnnnnnnnnnnnnnnnnnnnnnnnnnnnnnnnnnnnnnnnnnnnnnnnnnnnnnnnnnnnnnnnnnnnnnnnnnnnnnnnnnnnnnnnnnnnnnnnnnnnnnnnnnnnnnnnnnnnnnnnnnnnnnnnnnnnnnnnnnnnnnnnnnnnnnnnnnnnnnnnnnnnnnnnnnnnnnnnnnnnnnnnnnnnnnnnnnnnnnnnnnnnnnnnnnnnnnnnnnnnnnnnnnnnnnnnnnnnnnnnnnnnnnnnnnnnnnnnnnnnnnnnnnnnnnnnnnnnnnnnnnnnnnnnnnnnnnnnnnnnnnnnnnnnnnnnnnnnnnnnnnnnnnnnnnnnnnnnnnnnnnnnnnnnnnnnnnnnnnnnnnnnnnnnnnnnnnnnnnnnnnnnnnnnnnnnnnnnnnnnnnnnnnnnnnnnnnnnnnnnnnnnnnnnnnnnnnnnnnnnnnnnnnnnnnnnnnnnnnnnnnnnnnnnnnnnnnnnnnnnnnnnnnnnnnnnnnnnnnnnnnnnnnnnnnnnnnnnnnnnnnnnnnnnnnnnnnnnnnnnnnnnnnnnnnnnnnnnnnnnnnnnnnnnnnnnnnnnnnnnnnnnnnnnnnnnnnnnnnnnnnnnnnnnnnnnnnnnnnnnnnnnnnnnnnnnnnnnnnnnnnnnnnnnnnnnnnnnnnnnnnnnnnnnnnnnnnnnnnnnnnnnnnnnnnnnnnnnnnnnnnnnnnnnnnnnnnnnnnnnnnnnnnnnnnnnnnnnnnnnnnnnnnnnnnnnnnnnnnnnnnnnnnnnnnnnnnnnnnnnnnnnnnnnnnnnnnnnnnnnnnnnnnnnnnnnnnnnnnnnnnnnnnnnnnnnnnnnnnnnnnnnnnnnnnnnnnnnnnnnnnnnnnnnnnnnnnnnnnnnnnnnnnnnnnnnnnnnnnnnnnnnnnnnnnnnnnnnnnnnnnnnnnnnnnnnnnnnnnnnnnnnnnnnnnnnnnnnnnnnnnnnnnnnnnnnnnnnnnnnnnnnnnnnnnnnnnnnnnnnnnnnnnnnnnnnnnnnnnnnnnnnnnnnnnnnnnnnnnntaagtagacctatacagtctcctgttcgaaactcaatttcccctggtagaaatggaataagtcctcttaacaaattatctcagcttccaaggacatcatctcctagtactgcttcaactaagtcctcaggttctggaaaaatgtcgtatacatctccaggcagacagatgagccaacagaaccttaccaaacaaacaggtttatccaagaacgccagtagtattccaagaagtgagtctgcctccaaaggactaaatcaggtgaataatggtaatggagccaataaaaaggtagagctttctagaatgtcttcaactaaatcaagtggaagtgaatctgatagatcagaaagacctgtattagtacgccagtcaactttcatcaaagaagctccaagcccaaccttaagaagaaaattggaggaatctgcttcatttgaatccctttctccatcgtctagaccggcttctcccactaggtcccaggcacaaactccagttttaagtccttcccttcctgatatgtctctatccacacattcatctgttcaggctggtggatggcgaaaactaccccctaatctcagtcccactatagagtataatgatggaagaccagcaaagcgccatgatattgcacggtctcattctgaaagtccttctagacttccaatcaataggtcaggaacctggaaacgtgagcacagcaaacattcatcatcccttcctcgagtaa

SEQ ID NO: 19438 - DNA, 120 bp, Macaca Mulatta
aggttctctgtatggacaagtataagctgagctgcttggaggaggagcagctgctgttggtggtgaccagcacgttccggaatggagactgctctggcaacggagaggtgggtggcctga

SEQ ID NO: 19439 - DNA, 530 bp, Macaca Mulatta
aacaaagctgcatgcaacagcttgaaattgtgtattcaggtattaaaggtgcaatactggttagaaaaaactcagggcctcccactggggagctgcctttatttaattctaaagaaaacaaaatttaactcctaaagtccaattcatatttccccttcccctctttaagtaattttacatggccatagtcattattctaactgatatgtctataaagttgcacccccagtccgctgagccttggtatttgttgtaaattctcctttcacagcgattgttaaatctattcgtgccctgagatgtatggctttatgctgaagattggctggatgcgtcctctgatgtgtgttgtaggaatttaatgtggttgtctcctgctttattatactgtgacttgttaggaaaccctgggcctcatttggctctcccttgggagaggttgatggtgcacctttatgaacatggaaaggtttatcacagcagttaacccccacttgctcctcccctctataccaagctcttctggtttt

SEQ ID NO: 19440 - DNA, 1675 bp, Macaca Mulatta
  misc_feature (1)...(1675): n = A,T,C or G
ggacagtgatgaagactggcctggagagtgttaaaagtgcactcagagcttttctggacaatgccgcagaggatctggagaagaccatggaaaacctcaagcagggccagttcactcacacccgaaaccagcccaaaggggttactcagattatcaattacaccacagtggccctgcttccaatgctgtcgtcattatttgaacatattggccagcatcagttcggagaagacctcatatnnnnnnnnnnnnnnnnnnnnnnnnnnnnnnnnnnnnnnnnnnnnnnnnnnnnnnnnnnnnnnnnnnnnnnnnnnnnnnnnnnnnnnnnnnnnnnnnnnnnnnnnnnnnnnnnnnnnnnnnnnnnnnnnnnnnnnnnnnnnnnnnnnnnnnnnnnnnnnnnnnnnnnnnnnnnnnnnnnnnnnnnnnnnnnnnnnnnnnnnnnnnnnnnnnnnnnnnnnnnnnnnnnnnnnnnnnnnnnnnnnnnnnnnnnnnnnnnnnnnnnnnnnnnnnnnnnnnnnnnnnnnnnnnnnnnnnnnnnnnnnnnnnnnnnnnnnnnnnnnnnnnnnnnnnnnnnnnnnnnnnnnnnnnnnnnnnnnnnnnnnnnnnnnnnnnnnnnnnnnnnnnnnnnnnnnnnnnnnnnnnnnnnnnnnnnnnnnnnnnnnnnnnnnnnnnnnnnnnnnnnnnnnnnnnnnnnnnnnnnnnnnnnnnnnnnnnnnnnnnnnnnnnnnnnnnnnnnnnnnnnnnnnnnnnnnnnnnnnnnnnnnnnnnnnnnnnnnnnnnnnnnnnnnnnnnnnnnnnnnnnnnnnnnnnnnnnnnnnnnnnnnnnnnnnnnnnnnnnnnnnnnnnnnnnnnnnnnnnnnnnnnnnnnnnnnnnnnnnnnnnnnnnnnnnnnnnnnnnnnnnnnnnnnnnnnnnnnnnnnnnnnnnnnnnnnnnnnnnnnnnnnnnnnnnnnnnnnnnnnnnnnnnnnnnnnnnnnnnnnnnnnnnnnnnnnnnnnnnnnnnnnnnnnnnnnnnnnnnnnnnnnnnnnnnnnnnnnnnnnnnnnnnnnnnnnnnnnnnnnnnnnnnnnnnnnnnnnnnnnnnnnnnnnnnnnnnnnnnnnnnnnnnnnnnnnnnnnnnnnnnnnnnnnnnnnnnnnnnnnnnnnnnnnnnnnnnnnnnnnnnnnnnnnnnnnnnnnnnnnnnnnnnnnnnnnnnggcagcggtttctgatcaggaaaggaagaaaatgaagcgcaaaggagatcggtattccatgcagacctctctgattgtagcagctctgaagcgcttactgcccattgggttgaacatctgtgccccaggggaccaggagctcattgctctagccaaaaatcgatttagcctgnnnnnnnnnnnnnnnnnnnnnnnnnnnnnnnnnnnnnnnnnnnnnnnnnnnnnnnnnnnnnnnnnnnnnnnnnnnnnnnnnnnnnnnnnnnnnnnnnnnnnnnnnnnnnnnnnnnnnnnnnnnnnnnnnnnnnnnnnnnnnnnnnnnnnnnnnnnnnnnnnnnnnnnnnnnnnnnnnnnnnnnnnnnnnnnnnnnnnnnnnnncctcaaagatctaaaaaggntgtatggnataaactactctccaagcagaggaaaagagctgttgtcgcctgcttccggatggcccccttatataatctgccaaggc

SEQ ID NO: 19441 - DNA, 675 bp, Macaca Mulatta
  misc_feature (1)...(675): n = A,T,C or G
ggggatttgnnnnnnnnnnnnnnnnnnnnnnnnnnnnnnnnnnnnnnnnnnnnnnacgccctgcccatgtgttccctcttaacgtatgattacattgatcataaacatggtccttctctcctcattcttcaactatctttgataggggtctttcaaggggaaaaaaatccaannnnnnnnnnnnnnnnnnnnnnnnnnnnggacacaaaaccaaatgttactgcccaactgaaatatgagttaagatggagatagagtttctcctgagaaactctgagttgaattacctgagctgaattagctgtcactttcaaaaacatgaccttccacaatccttagaatctgcctttttttaaatattactaaggcctaaaagtaagcattactcattttattttgcccaaaatgcactgatgtaaagtaggaaaaataaaaacagagctctaaaatccctttcagccacccattgaccccactcaccaactcatagcaaagtcacttccgttaatcccttatctgatttgtttggatatttatctgaccgctgctaacacccacagaggaatctgaacctcagctgccattaatctttatctggtcgtgaacaggaaaagccctcaaaatcaaacttcaattctgccctaatcattaataagcccaaacagtcgacctttg

SEQ ID NO: 19442 - DNA, 589 bp, Macaca Mulatta
aaccagcaatgatagcatggaagagacggataatccaagacttctgagcatgaatcttgaaaacccctcatgtaattcagtgttagacccaagagacttgagacagctccatcagatgtcctcttccagtatgtcggcaggtgccaattccaatactactgtttttgtttcacaatcagatgcatttgagggatctgacttcagttgtgcagataacagcatgataaatgagtcgggcccatcaaacagtactaatccaaacagtcatagttttgttcaagatagtcagtattcaggtattggcagtatgcaaaatgagcaattgagtgactcttttccatatgaattttttcaagtataacttgcaagatttaaatccttttaaatcttgataccacctgtatagatgcagcgttttgtatttgtctaactgggaatataatactgtatttatactgtatatataatactgactgagaagaataatactgtatttgagaatataaaaaacttttttcagggaagaagcatacaactttggacatagtgaatacaaaattggaagctgtcataaaaggacaactcagag

SEQ ID NO: 19443 - DNA, 784 bp, Macaca Mulatta
ctgctgggtggtaaactcttaatttcattgtctagaagaaggatgggagtggggaacagggtggacactgcgcaggcttcagcttccactccggcaggattcaggccatccgggtccgcagggactgccaggtgcacagccctggctcccgaggcaggcaggcaaggtgacgggactggaagcccttttcagagccttggaggagctggtccgtccacaagcaatgagtgccactctgcagtttgcaggggatggataaacagggaaacactgtgcattcctcacagccaacagtgtaggtcttggtgaagccccggcgctgagctaagctcagactgttccagggagccacgaaactgcaggtggtgatgtgcaagagtccgtcctgcagttttccagcaatgagaaactcctcgctgcggttgtgggacctgtggaagtatccgcagacactctccatggcgggggtgtagacgaaccggatgtcagcggcatcccctaaggcctggaaccctttatacatcttggtcatcttgatctcataacgctggtataaggtggtctggttgacttctggtgtccccacgaacttggccctgatgacgaggtcggaattgcagaaggccgtctgtgggtggggtaggacacaggtgcaggccctgctgggggctatcagccacagcaacaacaggatgccggaagccaggggctcaaagggggccatggtgggttctctcgtgtctctctgggcactggatctcccgcgatggcggcagggcctgag

SEQ ID NO: 19444 - DNA, 1815 bp, Macaca Mulatta
  misc_feature (1)...(1815): n = A,T,C or G
atgaggcggaaggagaagcggctcctgcaggcggtggcgctggtgctggcggccctggtcttcctgcccaacgtggggctttgggcgctgtaccgcgagcggcagcccgnnnnnnnnnnnnnnnnnnnnnnnnnnnnnnnnnnnnnnnnnnnnnnnagggctcacacagtcgacaaaagaagacgtttttcttgggagatggacagaagctgaaggactggcatgacaaagaggccatccggagggacgctcagcgcgtagnnntaggaaatggagaacaaggaagaccttaccccatgaccgatgctgagagagtggatcaggcgtaccgagaaaatggatttaacatctacgtcagtgacaaaatctccttgaatcgctctctcccagatatccggcacccaannnnnnnnnnnnnnnnnnnnnnnnnnnnnnnnnnnnnnnnnnnnnnnnnnnnnnnnnnnnnnnnnnnnnnnnnnnnnnnnnnnnnnnnnnnnnnnnnnnnnnnnnnnnnnnnnnnnnnnnnnnnnnnnnnnnnnnnnnnnnnnnnnnnnnnnnnnnnnnnnnnnngagcacctgaagaagcctcttgaagactacatggctcttttccccagcgtgcgaattcttcgaaccaagaaacgggaagggctgataaggacccgaatgctgggggcctcagtggcaactggggatgtcatcacgttcttggattcacactgtgaagccaatgtcaactggcttccccccttgctnaccgcattgctcggaaccgcaagaccattgtgtgcccgatgattgacgtgattgaccatgatgactttcggtacgagacacaggcaggggatgccatgcggggagcctttgactgggagatgtactacaagcggatcccaatccctccagaactgcagaaagctgaccccannnnnnnnnnnnnnnnnnnnnnnnnnnnnnnnnnnnnnnnnnnnnnnnnnnnnnnnnnnnnnnnnnnnnnnnnnnnnnnnnnnnnnnnnnnnnnnnnnnnnnnnnnnnnnnnnnnnnnnnnnnnnnnnnaggtgtggatgtgtgggggccgcatggaggacatcccctaataacagggtgggccatatctacaggaagtatgtgccctacaaggtcccggccggagtcagcctggcccgnnnnnnnnnnnnnnnnnnnnnnnnnnnnnnnnnnnnnnnnnnnnnnnnnnnnnnnnnnnnnnnnnnnnnnnnnnncacctctccgctggggacgtcgccgcccagaaaaagctccgcagctcccttaactgcaaaagtttcaagtggtttatgaggaagatagcgctgggacctgcccaaattctacccacccgtggagcccccggctgcagcttgggggganagatccgaaatgtgggcacagggctgtgcgcagacacaaaacacggggccttgggctccccactgaggctagagggctgcgtccggggccgcggggaagccgcctggaacaacatgcaggtnnnnnnnnnnnnnnnnnnnnnnnnnnnnnnnnnnnnnnnnnnnnnnnnnnnnnnnnnnnnnnnnnnnnnnnnnnnnnnnnnnnnnnnnnnnnnnnnnnnnnnnnnnnnnnnnnnnnnnnnnnnnnnnnnnnnnnnnnnnnnnnnnnngacaagaccctgtaccaccctgtcagtggcagctgcatggactgcagtgaaagtgaccataggatcttcatgaacacctgcaacccatcctccctcacccagcagtggctgtttgaacacaccaactcaacagtcttggaaaaattcaataggaactg

SEQ ID NO: 19445 - DNA, 641 bp, Macaca Mulatta
  misc_feature (1)...(641): n = A,T,C or G
ccggagcgccgtgaacgtcacccagcggcgccgaggccccgggttgagcgggaggcgcgatcggtccggtcggtggctccccgcagcggggccgggcccgatctcgggcaggaaccgagcccagagctggtnnnnnnnnnnnnnnnnnnnnnnnnnnnnnnnnnnnnnnnnnnnnnnnnnnnnnnnnnnnnnnnnnnnnnnnnnnnnnnnnnnnnnnnnnnnnnnnnnnnnnnnnnnnnnnnnnnnnnnnnnnnnnnnnnnnnnnnnnnnnnnnnnnnnnnnnnnnnnnnnnnnnnagatgtcctgccacccggagctgaatcagtatatccaggacacgctgcactgcgtcaagccactcttggagaagnnnnnnnnnnnnnnnnnnnnnnnnnnnnnnnnnnnnnnnnnnnnnnnnnnnnnnnnnnnnnnnnnnnnnnnnnnnnnnnnnnnnnnnnnnnnnnnnnnnnnnnnnnnnnnnnnnnnnnnnnnnnnnnnnnnnnnnnnnnnnnnnnnnnnnnnnnnnnnnnnnnnnnnnnnnnnnnnnnnnnnnnnnnnnnnnccaggctgtaccttcacagtcctagtgcacacaagagaagccgccactcgcaatatggagaagatccaggtcatcaagg

SEQ ID NO: 19446 - DNA, 739 bp, Macaca Mulatta
  misc_feature (1)...(739): n = A,T,C or G
attcattaatggggatggaaggaaatggtcaggcacatgtgatgagcccagagctttcactggcttcagcaattgggcatngtcattgtgatggtggttgtggcctggacctttgacagttgtgaattagactaggaataaggtaccagtgggggttcctgacatgtgcttaatcacaaattctgcaggccatcaagaataagtatgcaagcagcaaactcctgaagatcagcacgatccctcagctgaactcaaaagccgtcaaagatcttgcctccccactgatgggaaggtcctaggctgccatcgcccctggggatgtgtgcttcgttgtaccctttttcttactggtttagaactcttgattttgtacatagtcctctggtctatctcatgaaacctcttctcagaccaattttctaaatatatattgaggaaaaataaagtgattggtttttcttaaggtatcccatgtgtatttatttgtgtattctgtactgaagaaatcagtgaaagcttgctttgactaatttctttttgagctattatgaatagcatgtaaattattgccattatggcttgggcaagacctttctaccattttctcaaacggaaaaactagaacttggcctcagtgaacagtaaacctattcctaagcttcttgaatacaaataagtctattatgaaaatttaaaatggaaagataagcaagacactttcctttctagaagctagtca

SEQ ID NO: 19447 - DNA, 278 bp, Macaca Mulatta
ccccgccggtcgcgccgccgaccgcggtggccgcggtggccggaggagcccgcatgccatgcgccgagctagtccgggagccgggctgcggctgctgctcggtgtgcgcccggctggagggcgaggcgtgcggcgtctacaccccgcgctgcggccaggggctgcgctgctatccccacccgggctccgagctgcccctgcaggcgctggttatgggcgagggcacttgtgagaagcgccgggacgccgagtatggcgccagcccggagcaggttgca

SEQ ID NO: 19448 - DNA, 510 bp, Macaca Mulatta
  misc_feature (1)...(510): n = A,T,C or G
accacgcagtgattgggtctgtgctgctggcttcgggttgtggctgaggccgggtctccgctccagggccggggaagatggtgctaggtggttgcccggttagttacttacttctgtgcggccaggcggctttgctgctggggaatttactgctgctgcattgtgtgtctcggagccactcgcaaaatgcgaccgctgagcctgagctcacatccgctggcgccgcccacccggagggccccgggggtgctgcgaactgggaatatggcgacccccactctccggtcatcctctgctcttacctnnnnnnnnnnnnnnnnnnnnnnnnnnnnnnnnnnnnnnnnnnnnnnnnnnnnnnnnnnnnnnnnnnnnnnnnnnnnnnnnnnnnnngtttggcggtcaggcctacagcgacgtggaacacacttcagtccagtgccatgccttagatggaattgagtgtgccagtcctaggaccttcctacgagaaaataaaccttgtataaagta

SEQ ID NO: 19449 - DNA, 1377 bp, Macaca Mulatta
gggagaaggcaaccaaagtgcaggacatcaaaaacaacctgaaagaggcaatcgaaaccattgtggccgccatgagcaacctggtgccccccgtggagctggccaaccccgagaaccagttcagagtggactacattctgagtgtgatgaacgtgcctgactttgacttccctcccgaattctacgagcatgccaaggctctgtgggaggacgaaggagtacgtgcctgctatgaacgctccaacgagtaccagctgattgactgtgcccagtacttcctggacaagatcgatgtgatcaagcaggctgactatgtgccgagcgaccaggacctgcttcgctgccgcgtcctgacttctggaatcttcgagaccaagttccaggtggacaaagtcaacttccacatgtttgacgtgggtggccagcgcgatgaacgccgcaagtggatccaatgcttcaatgatgtgactgccatcatcttcgtggtggccagcagcagctacaacatggtcatccgggaggacaaccagaccaaccgcctgcaggaggctctgaacctcttcaagagcatctggaacaacagatggctgcgcaccatctctgtgattctgttcctcaacaagcaagatctgctcgctgagaaagtccttgctgggaaatcgaagattgaggactactttccagaatttgctcgctacactactcctgaggatgctactcccgagcccggagaggacccacgcgtgacccgggccaagtacttcattcgagatgagtttctgaggatcagcactgccagtggagatgggcgtcactactgctaccctcacttcacctgcgctgtggacactgagaacatccgccgtgtgttcaacgactgccgtgacatcattcagcgcatgcaccttcgtcagtacgagctgctctaagaagggaacccccaaatttaattaaagccttaagcacaattaattaaaagtgaaacgtaattgtacaagcagttaatcacccaccataggggcatgattaacaaagcaaccttttcccttccccccaagtgattttgcgaaaaccccctttttcccttcagcttgcttagatgttccaaattttgaaaagcttaagggcggccttacggaaaaaggagaaaaggcccacagaagtttccctcctgacctttcaataaaaattaaattaaaacaactgcaggcaaacaaacaaagtggggtagaagaaacaaatgaaataaatattgtgtggtcgggccgcccctcgggcccctcggagaaaccttttctaaaaccatttccgtttgggggcgccccgggccccagttagggtaaaggtgaacaatggggctcataaccgtgtttcccc

SEQ ID NO: 19450 - DNA, 3665 bp, Macaca Mulatta
  misc_feature (1)...(3665): n = A,T,C or G
cctggcatcctcgtgctcctgtttaccttggtgcagaggagcaatggggagtgtaaagaggcactagcaaagtccgagatgaatgtgaatatgaagtatcagcttcccaacttcaccgcggaaacagccatccagaatgtcattctacatgagcatcacattttcctcggtgccaccaactacatttatgttttaaatgaggaagaccttcagaaggttgctgagtacaagaccgggcctgtgctggaacacccagattgtttcccgtgtcaggactgcagcagcaaagccaatttatcaggaggcgtttggaaagataacatcaacatggctctggttgtcgacacctactatgatgatcaactcattagctgtggcagcgtcaacagagggacctgccagcgacatgtctttccccataatcatactgctgacatacagtcggaggttcactgcatattctccccacagatagaagagcccaaccagtgccctgactgtgtggtgagcgccctgggagccaaagtcctttcatctgtaaaggaccggttcatcaacttctttgtaggcaataccataaattcttcttatttcccacatcatccgttgcattcgatatcagtgagaaggctaaaggaaacgaaagatggttttatgtttttgacggaccagtcctacattgatgttttacctgagttcagagattcttaccccattaagtacatccatgcttttgaaagcaacaattttatttacttcttgacggtccaaagggaaactctaaatgctcagacttttcacacaagaataatcaggttctgttccttaaactctggattgcactcctacatggaaatgcctctagagtgtattctcacagaaaagannnnnnnnnnnnnnnnnnnnnnnnnnnnnnnnnnnnnnnnnnnnnnnnnnnnnnnnnnnnnnnnnnnnnnnnnnnnnnnnnnnnnnnnnnnnnnnnnnnnnnnnnnnnnnnnnnnnnnnnnnnnnnnnnnnnnnnnnnnnnnnnnnnnnnnnnnnnnnnnnnnnnnnnnnnnnnnnnnnnnnnnnnnnnnnnnnnnnnnnnnnnnnnnnnnnnnnnnnnnnnnnnnnnnnnnnnnnnnnnnnnnnnnnnnnnnnnnnnnnnnnnnnnnnnnnnnnnnnnnnnnnnnnnngacacttctgagaaattcatcaggctgtgaagcgcgccgtgatgaatatcgagcagagtttaccacagctttgcagcgcgttgacttattcatgggtcaattcagcgaagtcctcttaacatctatatccaccttcgtgaaaggagacctcaccatcgctaatcttgggacatcagagggtcgcttcatgcaggnnnaggttgtggtttctcgatcaggaccatcaacccctcatgtgaattttctcctggactctcacccggtgtctccagaagtgattgtggagcatccattaaaccagaatggctacacactggttgtcacggggaagaannnnnnnnnnnnnnnnnnnnnnnnnnnnnnnnnnnnnnnnnnnnnnnnnnnnnnnnnnnnnnnnnnnnnnnnnnnnnnnnnnnnnnnnnnnnnnnnnnnnnnnnnnnnnnnnnnnnnnnnnnnnnnnnnnnnnnnnnnnnnnnnnnnnnnnnnnnnnnnnnnnnnnnnnnnnnnnnnnnnnnnnnnnnnnnnnnnnnnnnnnnnnnnnnnnnnnnnnnnnnnnnnnnnnnnnnnnnnnnnnnnnnnnnnnnnnnnnnnnnnnnnnnnnnnnnnnnnnnnnnnnnnnnnnnnnnnnnnnnnnnnnnnnnnnnnnnnnnnnnnnnnnnnnnnnnnnnnnnnnnnnnnnnnnnnnnnnnnnnnnnnnnnnnnnnnnnnnnnnnnnnnnnnnnnnnnnnnnnnnnnnnnnnnnnnnnnnnnnnnnnnnnnnnnnnnnnnnnnnnnnnnnnnnnnnnnnnnnnnnnnnnnnnnnnnnnnnnnnnnnnnnnnnnnnnnnnnnnnnnnnnnnnnnnnnnnnnnnnnnnnnnnnnnnnnnnnnnnnnnnnnnnnnnnnnnnnnnnnnnnnnnnnnnnnnnnnnnnnnnnnnnnnnnnnnnnnnnnnnnnnnnnnnnnnnnnnnnnnnnnnnnnnnnnnnnngctgttaaattgaaaattgacttagccaaccgagagacaagcatcttcagttaccgggaagaccccattgtctatgaaattcatccaaccaaatcttttattannnnnnnnnnnnnnnnnnnnnnnnnnnnnnnnnnnnnnnnnnnnnnnnnnnnnnnnnnnnnnnnnnnnnnnnnnnnnnnnnnnnnnnnnnnnnnnnnnnnnnnnnnnnnnnnnnnnnnnnnnnnnnnnnnnnnnnnnnnnnnnnnnnnnnnnnnnnnnnnnnnnnnnnnnnnnnnnnnnnnnnnnnnnnnnnnnnnnnnnnnnnnnnnnnnnnnnnnnnnnnnnnnnnnnnnnnnnnnnnnnnnnnnnnnnnnnnnnnnnnnnnnnnnnnnnnnnnnnnnnnnnnnnnnnnnnnnnnnnnnnnnnnnnnnnnnnnnnnnnnnnnnnnnnnnnnnnnnnnnnnnnnnnnnnnnnnnnnnnnnnnnnnnnnnnnnnnnnnnnnnnnnnnnnnnnnnnnnnnnnnnnnnnnnnnnnnnnnnnnnnnnnnnnnnnnnnnnnnnnnnnnnnnnnnnnnnnnnnnnnnnnnnnnnnnnnnnnnnnnnnnnnnnnnnnnnnnnnnnnnnnnnnnnnnnnnnnnnnnnnnnnnnnnnnnnnnnnnnnnnnnnnnnnnnnnnnnnnnnnnnnnnnnnnnnnnnnnnnnnnnnnnnnnnnnnnnnnnnnnnnnnnnnnnnnnnnnnnnnnnnnnnnnnnnnnnnnnnnnnnnnnnnnnnnnnnnnnnnnnnnnnnnnnnnnnnnnnnnnnnnnnnnnnnnnnnnnnnnnnnnnnnnnnnnnnnnnnnnnnnnnnnnnnnnnnnnnnnnnnnnnnnnnnnnnnnnnnnnnnnnnnnnnnnnnnnnnnnnnnnnnnnnnnnnnnnnnnnnnnnnnnnnnnnnnnnnnnagatcagtttcctaattcatctcagaacggttcatgccgacaagtgcagtatcctctgacagacatgtcccccatcctgactagtggggactctgatatatccagtccattactgcaaaacactgtccacattgacctcagcgctctaaatccagagctggtccaggcagtgcagcatgtagtgattgggcccagtagcctgattnnnnnnnnnnnnnnnnnnnnnnnnnnnnnnnnnnnnnnnnnnnnnnnnnnnnnnnnnnnnnnnnnnnnnnnnnnnnnnnnnnnnnnnnnnnnnnnnnnnnnnnnnnnnnnnnnnnnnnnnnnnnnnnnnnnnnnnnnnnnnnnnnnnnnnnnnnnnnnnnnnnnnnnnnnnnnnnnnnnnnnnnnnnnnnnnnnnnnnnnnnnnnnnnnnnnnnnnnnnnnnnnnnnnnnnnnnnnnnnnnnnnnnnnnnnnnnnnnnnnnnnnnnnnnnnnnnnnnnnnnnnnnnnnnnnnnnnnnnnnnnnnnnnnnnnnnnnnnnnnnnnnnnnnnnnnnnnnnnnnatgaaatatcttgcatgcacaaagtttgtccacagagacttggctgcaagaaactgtatg

SEQ ID NO: 19451 - DNA, 432 bp, Macaca Mulatta
tgggaggtggtgttgggactggcttggtacaagtaccagcaggaaccaggctctgtgtcctaatttattatgactacatagcccacattcctctgcccatgcatccgtggagtccagagcccagaaagcctcctgttgccctgccagaccttggagctccccaagagcgaactgtgttatttttttatcagctcaagcagaatggcagggcttcagctgttcttttgtgtgcgtagccagagcaaagaattcatgaagctgtctgactccacctccacctctgataatgcgagggtgcttttgggatagagcacgagcctgtagaaattagtcagcaacatttaaggttggagggtcctcctatgctcacctgcccaccagctgccagggccttcctgctgcactcaccgaacaagcacattccgggtcttg

SEQ ID NO: 19452 - DNA, 502 bp, Macaca Mulatta
gtgctattgctcaccatatcctcataaatatattttcataaatgttgataatccacgtgatccccactaccaggtcaaatccgaagagtaattccctgaacacaaaacccatgctggccactcaggtgtctctgccaggaaagccaggtgtggctagagctgcaggaaggccctggaatgccctttcccagtcaggcacgtgggcaaggagctggagccagaggatgtgcagtgggctggccttgaggtggctctctcaagggagcaggaagactgggcagaaaaagagagctatacccacaagcacagccacggtaccagcccaccagcagacaggtgcagaaaggtcggcactgacccgccaaataaacctttcctcctgtgggaggctaagcaaggggcttagtgagaggtaccagaagtggacagaggcggctcagtggaagttccctccatgctatggtcaggggcagaaggtaggggaaggggaggagtcccttca

SEQ ID NO: 19453 - DNA, 381 bp, Macaca Mulatta
acttgctttgaagtacctgatgctgattgattcccctaaaagtaggaagcaagagacttaactatgagggacattaggtgaatcctaagtctcaccagtccttgcattagtacattaaatttggatattttggaagcaaattcataggaccgtgactgatttctccaaagaaaaaaaccttgtccagcctcaccaacatggtgaaaccccatctctactaaaaatacaaaattaactggacgcagtggtgagcacgcctgtagtcccagctactcaggaggctgaggcaggagaacctcttgaacctgggaggcagaggttgcagtgagccgagatcgcaccactgtactccagcctgagtgacagagcaagactgcatct

SEQ ID NO: 19454 - DNA, 387 bp, Macaca Mulatta
  misc_feature (1)...(387): n = A,T,C or G
ggtatggatgccaacaatgtgacttatgtctggggtgttgtgagttggggggaaaactgtggaaaaccagagttcccaggtgtttacaccaaagtggccaattattttgactggattagctaccatgtgggaaggcctcttatttctcagcacaatgtataaaattgtgatctccctcttctttctgttctttttctctcaagagttccatttaatggaaataaaactgtataattaataattctctaggggcaaaaatgaagcaaatctcactggatatttttaaaggtcttcacaaagtttatgccatattggaattttgttgtataattctcaaataaatattttggtnnnnnnnnnnnnnnnnnnnnnnnnnnnnnnnnnnnn

SEQ ID NO: 19455 - DNA, 283 bp, Macaca Mulatta
  misc_feature (1)...(283): n = A,T,C or G
gtgcagggctcgcggcctggcaagaatgtacagctgacagagaacgagatccgcggcctgtgcctgaaatcccgggagattttcctgagccagcccattcttctggagctggaggcacccctcaagatctgtggtganggtgatatacacggccagtactatgaccttctgcgactatttgagtatggcggtttccctccggagagcaactacctctttctgggggactatgtggacaggggcaagcagtccttggagacatctgcctgctgctggcctataa

SEQ ID NO: 19456 - DNA, 419 bp, Macaca Mulatta
ctcacctctccatagctttgagggtagcggtaaagaacacgttgtgagcacactcaccttccacagtaataggaatagctggccccatggcccactgctctgtaataacataaagccttttgcccccgcccccatctctaaatttacatcttcagcttgtaccaaatttataaataacaagttagatatttatatttagtttagcaaaatttgaatccttaaatacatataactaactcttaacaaatgaccatatacaaacctgaactccagtgctacttcatcaccccatttggcaccccaatatggcaattactttattgtcattatctgtagacatgccacatagttaagagaccaggtacccaggaaaattaacttcttgctatctgtcttccatgctaatctgctaatctctt

SEQ ID NO: 19457 - DNA, 344 bp, Macaca Mulatta
acgtgcaggtgactgaggatgccgcgcgcctctacctgacagggaagcccatgaccactaaggacctgctgaaaaagttccagaccaagaagacagggctgatcagcgagcagacagtgaacctactggcccagatcctcaggtgcctcaaccccgagcccaagatgatcagtgacaaaatgcacttctccctcaaggagtgaggctctgtccaacacacggctctgccctccagaactcaggctctcactgcccctttgccatcctggagtgaggctctgtccagtacacgggctctgccctccagaacttcagggtctcactgccccttcgccatcatgctc

SEQ ID NO: 19458 - DNA, 664 bp, Macaca Mulatta
acagctgggagcacctggcagttctggtcctcctgggagtggccgcctgtgcggcgcaccccgcggtcggatcctgggcggcagagaggccgaggcccacgcgcggccctacatggcgtcggtgcaggtgaacggcgagcacctgtgcggcggcgtcctggtggccgagcagtgggtgctgagcgcggcgcactgcctggaggacgcggccgacgggaaggtgcaggttctcctgggcgctcactccctgtcgcagccggagccctccaagcgcctgtacgacgtgctccgcgcagtgccgcacccggacagccggcccgacaccatcgaccacgacctcctcctgctgcagctgtccgagaaggccacgctgggccctgctgtgcgccccctgccctggcagcgcgtggaccgcgacgtggagccgggcactctctgcgacgtggctggctggggcatagtcagccacgcgggccgccgcccggaccgcctgcagcacgtgctcttgccagtgctggaccgcgccacctgcaaccggcgcacgcaccacgacggcgccatcacccagcgtatgatgtgcgcggagagcaaccgccgggacagctgcaaaggcgactccgggggcccgctggtgtgcgggggcgtgcctcgaggggcgtggtca

SEQ ID NO: 19459 - DNA, 150 bp, Macaca Mulatta
ttgacaaaacacagccaaggggatatttactgacctttattgcagaatgtgggtattgagtgtgatttgaatgatttttcactggcttagggcagattttcatgcaaaaatttccagataagaggagaaaaagctaaatgattctgatat

SEQ ID NO: 19460 - DNA, 1426 bp, Macaca Mulatta
  misc_feature (1)...(1426): n = A,T,C or G
cctggacttttacatccaggtcatgacatttaatcaggcagaaacttttccatttaatccatttgatctcaccaaggtttggcctcacaaggactaccctctcatcccagttggtaaactggtcttaaaccggaatccagttaattactttgctgaggttgaacagatagccttcgacccaagcaacatgccccctggcattgagagcagccctgacaaaatgcttcagggccgcctttttgcctatcctgacactcaccgccaccgcctgggacccaattatcttcagatacctgtgaactgtccctaccgtgctcgagtggccaactaccagcgtgacggccccatgtgcatgcaggacaatcagggtggtgctccaaattactaccctaacagctttggtgctccagaacaacagccttctgtcctggagcatagcacccaatattctggagaagtgcggagattcaacactgccaatgatgataatgttactcaggtgcgggcattctatgtgaacgtgctgaatgaggaacagaggaaacgtctgtgtgagaacattgcaggccacctgaaagatgcacaaattttcatccaaaagaaagcggtcaagaacttcactgaggtccaccctgaatacgggtcccgcatccagactcttctggacaagtacaatgctgagaagcctaagaatgcgattcacacctttgtgcagtctgagtctcacttggctgcaagggagaaggcaaatctgtgaggccggggccctgcgcctatgcagcgaagcttagtgttcacctgtgtaacccgctcgtcactggatgaagattctccggtgctagatgcgcaaatgcaagctagtggcttcaaaatagagaatcccgctttccatagcagatcgtgtaacaattttaatgctctttccccaggggaaaatgaaggttaggatttaacagtcnnnnnnnnnnnnnnnnnntttgatagttgggttggattattcatttaaaatgattagaaaggaaaagttctagctagaaatatgaattttattttgattaaatttttttgaaattatgtatggtttacatatcaccctcatgggcctatttatattaaaatatgggctataattattttaaaaagggaaagacgaagaatgatccccctcagaaaggtttttaattttttctaagggttccttcatgggaaaaagccacctttttaataacccccacgggggtgggccgaaaaaaatacccctgtgaggccacccacccacgggggtttaaatgggtnttatttccccggagccagcaaaatgggacgcaagaaattcccttctttctttgcccacttcggaaaacacggaattgcgaaagggctaaacattttcccccagtggcgatttgttccaacaccaagccgc

SEQ ID NO: 19461 - DNA, 171 bp, Macaca Mulatta
  misc_feature (1)...(171): n = A,T,C or G
cgtctctggagcagaatttacctgattcttcaggnctgctaggggcaactgtgccatttgccagttttcctactctcacccggttctcaatgaaaaacagtgtctttgtgattttgagtaaagctcctgtctgtttnnnnnnnnnnnnnnnnnnnnnnnnnnnnnnnnnnn

SEQ ID NO: 19462 - DNA, 920 bp, Macaca Mulatta
  misc_feature (1)...(920): n = A,T,C or G
caacggatgggagattgaagatttctgttgaaacgtacactcttgcatctcagcttttgatggtactgatgagtcgatctacatacaggactgcttccttactcagtttcaaagtgtctcattctcagagtaaaataggcaccattgcttaaaagaaggttaactgacttaactaggcattgtgatgtttaggggcaaacatcacaaaatgtaatttaatgcctgcctattacagaagtatttatcaggagaaggtggtggcatttttgcctcctattgtcaggacagcttgtgtgtaaggaggtttgtataagtaattcagtgggaattgcagcatatcgtttaattttaagaaggcagtggcatctgcttttaatggatgtataatacatccattctacatccataatggttggtgacttgtctgcctcctgttttgggaagactgaggcatccctgaggcagggacaagtcttcgtcttctttgagaccccagtgcctgcacatcatgagccttcagtcagggtttgtcagaggaacaaaccaggggacgctttgttagaaagtgcttagaggttctgcctctatttttgttggggggnngagaggggaccttaaaatgtatacagtgaacaaatgtcttaaagggaatcatttttataggaagcactttttaaattttctaagttgtgcacttttcttggtccactcttgttgaagtgctgttttattactatttctaaactagaattggctttctatagttgtgataatagcatttttgtaacttgacagctgcacagaaaataggagaaaatctgcatgtttgattttagtattaatgggcaaataagtttttgctaaatgtgagtatgtctgttcttttttgtaaatatgggacattcctgattgatttgggt

SEQ ID NO: 19463 - DNA, 790 bp, Macaca Mulatta
  misc_feature (1)...(790): n = A,T,C or G
gggatcaggatccatataaacaaaatctaaactcacatctaattcagggtatggtttcagtcaatctgaccacttctacatccactttagtattctgtaactcactacaagaccttggacaaataacccagaggctagaggaagtgagtagatgctctaagataatggtgaccaaacctggaatcacctggggaaactaaggattactgaggatgtctgcgttccaccctcagacggtggtttaaatttcaaaataacttgaaaaattcccaggtgatttacattaagacaaatttgagaactactcttccaactagtaacacttttattactaacaagtcgtgtcttaagatactacttaaaaatactttgaagagaaaatttcaaatggcgaacaccttcagtaagaaacaaccagttttagagtagagtgagatgataaatcatgaaatgccaaagtttaaaaaccatccttttagttttatttcagccatgttaagttatccccgagctgtgaaaagttatgctactgggtagctgggtaaaaccatcagttctatatactatgtaaagttgacctctagtgtttcacataccctcaaaccaatttatttttgtgcccnnnnnnnnnnnnnnnnnnnnnnnnctgaatcccagaagaaattggtatcctggtcaccactatataaaaaacatccatggggtccatcggttcaccaattttactgggccatctaaggaacgctaatttttgccttttttcccaggggccaaatataaaaaagtttaa

SEQ ID NO: 19464 - DNA, 402 bp, Macaca Mulatta
  misc_feature (1)...(402): n = A,T,C or G
aaatacatggagtttgnccttaatggaaacggcgatattgatatcatgtccctgaagcgaatgctggagaaacttggggtccccaagactcacctagagctaaagaaattaattggagaggtgtccagtggctccggggagacgttcagctaccctgactttctcaggatgatgctgggcaagagatctgccattctaaaaatgatcctgatgtatgaggaaaaagcgagagaaaaggaaaagccaacaggccccccagccaagaaagctatttctgagttgccctgatttgaagggaaaaggggtgatgggattgaaggggcttctaatgacccagatatggaaacaaaagacaaaattgtaagccagagtcaacaaattaaataaattaccctcctccct

SEQ ID NO: 19465 - DNA, 858 bp, Macaca Mulatta
  misc_feature (1)...(858): n = A,T,C or G
ggggagtgcagtggggcagtcatagcttcagacttccattcttttttgctgcggaattttatttatttgtatttttttgagacggatctcgnnnnnnnnnnnnnnnnnnnnnnnnncggtgcannnnnnnnnnnnnnnnnnnnnnnnnnnnnnngttcaagcagttctcctgtctgagcctccgaagtagctgggatcacaggtgcccaccaccatgcctgcctaatcttttttgaatgnnnnnnnnnnnnnnnnnnnnnnnnnattggtcaggctgaccacaggtgatcctcccaccttggcctcccaaatctggcttctcagagaagcacaagtttagagggtttgaagaaggtggacagattctgtgttctcaacttcccaggagtggggctgtgtctgaccacatctaggatggggaaacttaccacttgaggtctgaattttctttttttccctccccatcattttatctttctccttccaagaaatgaaaaggagctgggcagcaaggctatgtttggccggcaggaacttccaaaaaccccctggcccaagtaagctgtggggcaggcaaagccctttggctccctggtgggctgaatagaaaccctcccccttgggttcactccgggatgctagagggccccccaacaacatttggtgggggtctctggctagtttgcgacccccttatcccgccagctttggatatcacgtgcccctttttcttataaactttctacaagatacgaaacttctccagagaacctagttttgggacgactctgacttttgggccccgtgtaaatatgggtcagacatcagttgtattattccgatctgaacattctcggn

SEQ ID NO: 19466 - DNA, 1104 bp, Macaca Mulatta
  misc_feature (1)...(1104): n = A,T,C or G
aaatccgtccccgccccaccgggcggaggcgcgtgctcggttacccccacgcggcggcgccgcctgtttacnnnnnnnnnnnnnnnnnnnnnnnnnnnnnnnnnnnnnnnnnnnnnnnnnnnnnnnnnnnnnnnnnnnnnnnnnnnnnnnnnnnnnnnnnnnnnnnnnnnnnnnnnnnnnnnnnnnnnnnnnnnnnnnnnnnnnnnnnnnnnnnnnnnnnnnnnnnnnnnnnnnnnnnnnnnnnnnnnnnnnnnnnnnnnnnnnnnnnnnnnnnnnnnnnnnnnnnnnnnnnnnnnnnnnnnnnnnnnnnnnnnnnnnnnnnnnnnnnnnnnnnnnnnnnnnnnnnnnnnnnnnnnnnnnnnnnnnnnnnnnnnnnnnnnnnnnnnnnnnnnnnnnnnnnnnnnnnnnnnnnnnnnnnnnnnnnnnnnnnnnnnnnnnnnnnnnnnnnnnnnnnnnnnnnnnnnnnnnnnnnnnnnnnnnnnnnnnnnnnnnnnnnnnnnnnnnnnnnnnnnnnnnnnnnnnnnnnnnnnnnnnnnnnnnnnnnnnnnnnnnnnnnnnnnnnnnnnnnnnnnnnnnnnnnnnnnnnnagatcctggctgcagctctgaccgagtgtcaccggaaatccagtgcccaaggcaagcctctggccctgaaggtcttcgtggctggcagaaaccgtctggagaacgatggcgccactgccttggcagaagcttttagggnngtcatcgggaccctggaggaagtccacatgccacagaatgggatcaaccaccctggtgtcactgctctggcccaggctttcgccgtcaaccccctgctgcgggtcatcaacctgaacgacaacaccttcaccgagaaaggcgcccgtggccatggccgannnnnnnnnnnnnnnnnnnnnnnnnnnnnnnnnnnnnnnnnnnnnnnnnnnnnnnnnnnnnnnnnnnnnnnnnnnnnnnnnnnnnnnnnnnnnnnnnnnnnnnnnnnnnnnnnaggagatgaacttgtcattctgtgaaatcaagagggacgctgccctggctgttgccggggcactggcagacaaaactgagctggagaagctggacctgaacggta

SEQ ID NO: 19467 - DNA, 484 bp, Macaca Mulatta
ggagggcggcgaggcggtgcacgaggtggaggtgatcatcaagcacaaccggttcacaaaggagacctatgacttcgacatcgccgtgctccggctcaagagccccatcaccttccgcatgaacgtggcacccgcctgcctccccgagcgcgactgggccgagtccacgctgatgacgcagaagacggggattgtgagcggcttcgggcgcacccacgagaagggccggcagtccaccaggctcaagatgctggaggtgccctacgtggaccgcaacagctgcaagctctccagcagcttcatcatcacccagaacatgttctgtgccggctaccacgccaagcaggaagacgcctgccagggggacagtgggggcccccacgtcacccgcttcaaggacacctacttcgtgacaggcatcgtcagctggggagagggctgcgcccggaaggggaagtacgggatctacaccaaggtcaccgcc

SEQ ID NO: 19468 - DNA, 549 bp, Macaca Mulatta
cctaaaggacaagccaggcgtctacacgagagtctcacgcttcttgccctggattcacagtcacaccagggaagagaatggcctagccctctgagggtccccagggaggaaacgggcacgagccgctttcttgctggctgtcatttttgcagtagagtcatctccatcagctgtaagaagaggctgggaagacaggctctgcacagatggattttcctgtgccacccaccagggcgaacaatagctttaccctcaggcataggcctgggtgctggccgcccagacccctctggccaggatggaggggtggtcctgactcaagatgttactgaccagcaacttgtctttttctggactgaagcctgcaggagttaaaaaaggcagggcatctcctgtgcatgggtgaagggagagccagctcccctgatggtgggcattcataaggcccatgattgagaaatgaataatttcccaattaggaagtgtaacagctgaggcctcttgagggcgcttagccaatatgggagcagcagtttggggagtagagac

SEQ ID NO: 19469 - DNA, 601 bp, Macaca Mulatta
  misc_feature (1)...(601): n = A,T,C or G
tacggggtcatttcttgatcaaatatatgactgggggtcctgggttgggtgcgccggtccacccatttcttttaaagtattcttaacatgaaatccacaaaagcagaaacaatgaaccattcttgcactttacagaatcattgtccttagctttagaggttgttaatttttgttgtttttaacatgaatagaatgtgtggtgctgaaggtgtgtgggggtctcaagaaattgtcctttggggctgnnnnnnnnnnnnnnnnnnnnnnnnnnnnnnnnnnnnnnnnnnnnnnnnggggcggatcacctgaggccaagagttcgagaccatcctgaccaacatcgtgaaaccccgtctgtcctaaaatacaaaaattagacagtcgtggtcgcctgtaatctcagctctnnnnnnnnnnnnnnnnnnnnnnnnnnnnngaatccannnnnnnnnnnnnnnnnnnnnnnnnnnntnnnnnnnnnnnnnnnnnnnnnnnnnnnnnnntannnnnnnnnnnnnnnnncagaacagaaaagaaattgtcctttggttgccttagttaccagagttgactgactgtccatatttcggtagttgggggg

SEQ ID NO: 19470 - DNA, 10428 bp, Macaca Mulatta
  misc_feature (1)...(10428): n = A,T,C or G
gaaatctttcagtgtgtcctctcagcccgtgaannnnnnnnnnnnnnnnnnnnnnnnnnnnnnnnnnnnnnnnnnnnnnnnnnnnnnnnnnnnnnnnnnnnnnnnnnnnnnnnnnnnnnnnnnnnnnnnnnnnnnnnnnnnnnnnnnnnnnnnnnnnnnnnnnnnnnnnnnnnnnnnnnnnnnnnnnnnnnnnnnnnnnnnnnnnnnnnnnnnnnnnnnnnnnnnnnnnnnnnnnnnnnnnnnnnnnnnnnnnnnnnnnnnnnnnnnnnnnnnnnnnnnnnnnnnnnnnnnnnnnnnnnnnnnnnnnnnnnnnnnnnnnnnnnnnnnnnnnnnnnnnnnnnnnnnnnnnnnnnnnnnnnnnnnnnnnnnnnnnnnnnnnnnnnnnnnnnnnnnnnnnnnnnnnnnnnnnnnnnnnnnnnnnnnnnnnnnnnnnnnnnnnnnnnnnnnnnnnnnnnnnnnnnnnnnnnnnnnnnnnnnnnnnnnnggtcctatgcacagtcagttggaatccctgagtgactcttgggctcgcctgaaacatagcagagactggttatgcaactcctcctattcctttgagtctgattttgatcttaccaagtctttgggagttcacactttgattgaaaatgttgtaagctttgtgagtggagatgtnnnnnnnnnnnnnnnnnnnnnnnnnnnnnnnnnnnnnnnnnnnnnnnnnnnnnnnnnnnnnnnnnnnnnnnnnnnnnnnnnnnnnnnnnnnnnnnnnnnnnnnnnnnnnnnnnnnnnnnnnnnnnnnnnnnnnnnnnnnnnnnnnnnnnnnnnnnnnnnnnnnnnnnnnnnnnnnnnnnnnnnnnnnnnnnnnnnnnnnnnnnnnnnnnnnnnnnnnnnnnnnnnnnnnnnnnnnnnnnnnnnnnnnnnnnnnnnnnnnnnnnnnnnnnnnnnnnnnnnnnnnnnnnnnnnnnnnnnnnnnnnnnnnnnnnnnnnnnnnnnnnnnnnnnnnnnnnnnnnnnnnnnnnnnnnnnnnnnnnnnnnnnnnnnnnnnnnnnnnnnnnnnnnnnnnnnnnnnnnnnnnnnnnnnnnnnnnnnnnnnnnnnnnnnnnnnnnnnnnnnnnnnnnnnnnnnnnnnnnnnnnnnnnnnnnnnnnnnnnnnnnnnnnnnnnnnnnnnnnnnnnnnnnnnnnnnnnnnnnnnnnnnnnnnnnnnnnnnnnnnnnnnnnnnnnnnnnnnnnnnnnnnnnnnnnnnnnnnnnnnnnnnnnnnnnnnnnnnnnnnnnnnnnnnnnnnnnnnnnnnnnnnnnnnnnnnnnnnnnnnnnnnnnnnnnnnnnnnnnnnnnnnnnnnnnnnnnnnnnnnnnnnnnnnnnnnnnnnnnnnnnnnnnnnnnnnnnnnnnnnnnnnnnnnnnnnnnnnnnnnnnnnnnnnnnnnnnnnnnnnnnnnnnnnnnnnnnnnnnnnnnnnnnnnnnnnnnnnnnnnnnnnnnnnnnnnnnnnnnnnnnnnnnnnnnnnnnnnnnnnnnnnnnnnnnnnnnnnnnnnnnnnnnnnnnnnnnnnnnnnnnnnnnnnnnnnnnnnnnnnnnnnnnnnnnnnnnnnnnnnnnnnnnnnnnnnnnnnnnnnnnnnnnnnnnnnnnnnnnnnnnnnnnnnnnnnnnnnnnnnnnnnnnnnnnnnnnnnnnnnnnnnnnnnnnnnnnnnnncaggtattcctctggttggtaacttaagaacaaggctccttgcacttcatgtccttgaagctgtgctgccagcttgtgaatctggtgtagaagatgatcaaatggcccannnnnnnnnnnnnnnnnnnnnnnnnnnnnnnnnnnnnnnnnnnnnnnnnnnnnnnnnnnnnnnnnnnnnnnnnnnnnnnnnnnnnnnnnnnnnnnnnnnnnnnnnnnnnnnnnnnnnnnnnnnnnnnnnnnnnnnnnnnnnnnnnnnnnnnnnnnnnnnnnnnnnnnnnnnnnnnnnnnnnnnnnnnnnnnnnnnnnnnnnnnnnnnnnnnnnnnnnnnnnnnnnnnnnnnnnnnnnnnnnnnnnnnnnnnnnnnnnnnnnnnnnnnnnnnnnnnnnnnnnnnnnnnnnnnnnnnnnnnnnnnnnnnnnnnnnnnnnnnnnnnnnnnnnnnnnnnnnnnnnnnnnnnnnnnnnnnnnnnnnnnnnnnnnnnnnnnnnnnnnnnnnnnnnnnnnnnnnnnnnnnnnnnnnnnnnnnnnnnnnnnnnnnnnnnnnnnnnnnnnnnnnnnnnnnnnnnnnnnnnnnnnnnnnnnnnnnnnnnnnnnnnnnnnnnnnnnnnnnnnnnnnnnnnnnnnnnnnnnnnnnnnnnnnnnnnnnnnnnnnnnnnnnnnnnnnnnnnnnnnnnnnnnnnnnnnnnnnnnnnnnnnnnnnnnnnnnnnnnnnnnnnnnnnnaggtgaaaatttgtgatatgcagatgcgtggcacaccccgagacttacttccaggagaccctatttgtagtccagtagcagcagtgctggctgaggccactattcaactcatccgtatccttcaccgaacagaccgttggacttactgcattaacaaaaaaatgatggaaaggctgcacaaaattaagatatgtattaaagagtcaggtcagaagctaaagaaaagccgctcggttnnnnnnnnnnnnnnnnnnnnnnnnnnnnnnnnnnnnnnnnnnnnnnnnnnnnnnnnnnnnnncatactaggcatggcctcgctgacctctcagagctgcagctgaggactctttgcatagaagtgtggcctgtgctggctgtgataggaggagttgatgctggtcttagagttggaggtcggtgtgttcacaagcaaactgggcgccatgccacgctgctgggagtggtcaaagagggcagcacgtctgccaaggtccaatgggatgaagcagaaattactatcannnnnnnnnnnnnnnnnnnnnnnnnnnnnnnnnnnnnnnnnnnnnnnnnnnnnnnnnnnnnnnnnnnnnnnnnnnnnnnnnnnnnnnnnnnnnnnnnnnnnnnnnnnnnnnnnnnnnnnnnnnnnnnnnnnnnnnnnnnnnnnnnnnnnnnnnnnnnnnnnnnnnnnnnnnnnnnnnnnnnnnnnnnnnnnnnnnnnnnnnnnnnnnnnnnnnnnnnnnnnnnnnnnnnnnnnnnnnnnnnnnnnnnnnnnnnnnnnnnnnnnnnnnnnnnnnnnnnnnnnnnnnnnnnnnnnnnnnnnnnnnnnnnnnnnnnnnnnnnnnnnnnnnnnnnnnnnnnnnnnnnnnnnnnnnnnnnnnnnnnnnnnnnnnnnnnnnnnnnnnnnnnnnnnnnnnnnnnnnnnnnnnnnnnnnnnnnnnnnnnnnnnnnnnnnnnnnnnnnnnnnnnnnnnnnnnnnnnnnnnnnnnnnnnnnnnnnnnnnnnnnnnnnnnnnnnnnnnnnnnnnnnnnnnnnnnnnnnnnnnnnnnnnnnnnnnnnnnnnnnnnnnnnnnnnnnnnnnnnnnnnnnnnnnnnnnnnnnnnnnnnnnnnnnnnnnnnnnnnnnnnnnnnnnnnnnnnnnnnnnnnnnnnnnnnnnnnnnnnnnnnnnnnnnnnnnnnnnnnnnnnnnnnnnnnnnnnnnnnnnnnnnnnnnnnnnnnnnnnnnnnnnnnnnnnnnnnnnnnnnnnnnnnnnnnnnnnnnnnnnnnnnnnnnnnnnnnnnnnnnnnnnnnnnnnnnnnnnnnnnnnnnnnnnnnnnnnnnnnnnnnnnnnnnnnnnnnnnnnnnnnnnnnnnnnnnnnnnnnnnnnnnnnnnnnnnnnnnnnnnnnnnnnnnnnnnnnnnnnnnnnnnnnnnnnnnnnnnnnnnnnnnnnnnnnnnnnnnnnnnnnnnnnnnnnnnnnnnnnnnnnnnnnnnnnnnnnnnnnnnnnnnnnnnnnnnnnnnnnnnnnnnnnnnnnnnnnnnnnnnnnnnnnnnnnnnnnnnnnnnnnnnnnnnnnnnnnnnnnnnnnnnnnnnnnnnnnnnnnnnnnnnnnnnnnnnnnnnnnnnnnnnnnnnnnnnnnnnnnnnnnnnnnnnnnnnnnnnnnnnnnnnnnnnnnnnncagcgttgtcagacccaagcagtagactttcaacttctcctcctcctccagcaattgcagttcccttgctggaaatggggttctctcttcggcagattgccaaagccatggaagctacaggnnnnnnnnnnnnnnnnnnnnnnnnnnnnnnnnnnnnnnnnnnnnnnnnnnnnnnnnnnnnnnnnnnnnnnnnnnnnnnnnnnnnnnnnnnnnnnnnnnnnnnnnnnnnnnnnnnnnnnnnnnnnnnnnnnnnnnnnnnnnnnnnnnnnnnnnnnnnnnnnnnnnnnnnnnnnnnnnnnnnnnnnnnnnnnnnnnnnnnnnnnnnnnnnnnnnnnnnnnnnnnnnnnnnnnnnnnnnnnnnnnnnnnnnnnnnnnnnnnnnnnnnnnnnnnnnnnnnnnnnnnnnnnnnnnnnnnnnnnnnnnnnnnnnnnnnnnnnnnnnnnnnnnnnnnnnnnnnnnnnnnnnnnnnnnnnnnnnnnnnnnnnnnnnnnnnnnnnnnnnnnnnnnnnnnnnnnnnnnnnnnnnnnnnnnnnnnnnnnnnnnnnnnnnnnnnnnnnnnnnnnnnnnnnnnnnnnnnnnnnnnnnnnnnnnnnnnnnnnnnnnnnnnnnnnnnnnnnnnnnnnnnnnnnnnnnnnnnnnnnnnnnnnnnnnnnnnnnnnnnnnnnnnnnnnnnnnnnnnnnnnnnnnnnnnnnnnnnnnnnnnnnnnnnnnnnnnnnnnnnnnnnnnnnnnnnnnnnnnnnnnnnnnnnnnnnnnnnnnnnnnnnnnnnnnnnnnnnnnnnnnnnnnnnnnnnnnnnnnnnnnnnnnnnnnnnnnnnnnnnnnnnnnnnnnnnnnnnnnnnnnnnnnnnnnnnnnnnnnnnnnnnnnnnnnnnnnnnnnnnnnnnnnnnnnnnnnnnnnnnnnnnnnnnnnnnnnnnnnnnnnnnnnnnnnnnnnnnnnnnnnnnnnnnnnnnnnnnnnnnnnnnnnnnnnnnnnnnnnnnnnnnnnnnnnnnnnnnnnnnnnnnnnnnnnnnnnnnnnnnnnnnnnnnnnnnnnnnnnnnnnnnnnnnnnnnnnnnnnnnnnnnnnnnnnnnnnnnnnnnnnnnnnnnnnnnnnnnnnnnnnnnnnnnnnnnnnnnnnnnnnnnnnnnnnnnnnnnnnnnnnnnnnnnnnnnnnnnnnnnnnnnnnnnnnnnnnnnnnnnnnnnnnnnnnnnnnnnnnnnnnnnnnnnnnnnnnnnnnnnnnnnnnnnnnnnnnnnnnnnnnnnnnnnnnnnnnnnnnnnnnnnnnnnnnnnnnnnnnnnnnnnnnnnnnnnnnnnnnnnnnnnnnnnnnnnnnnnnnnnnnnnnnnnnnnnnnnnnnnnnnnnnnnnnnnnnnnnnnnnnnnnnnnnnnnnnnnnnnnnnnnnnnnnnnnnnnnnnnnnnnnnnnnnnnnnnnnnnnnnnnnnnnnnnnnnnnnnnnnnnnnnnnnnnnnnnnnnnnnnnnnnnnnnnnnnnnnnnnnnnnnnnnnnnnnnnnnnnnnnnnnnnnnnnnnnnnnnnnnnnnnnnnnnnnnnnnnnnnnnnnnnnnnnnnnnnnnnnnnnnnnnnnnnnnnnnnnnnnnnnnnnnnnnnnnnnnnnnnnnnnnnnnnnnnnnnnnnnnnnnnnnnnnnnnnnnnnnnnnnnnnnnnnnnnnnnnnnnnnnnnnnnnnnnnnnnnnnnnnnnnnnnnnnnnnnnnnnnnnnnnnnnnnnnnnnnnnnnnnnnnnnnnnnnnnnnnnnnnnnnnnnnnnnnnnnnnnnnnnnnnnnnnnnnnnnnnnnnnnnnnnnnnnnnnnnnnnnnnnnnnnnnnnnnnnnnnnnnnnnnnnnnnnnnnnnnnnnnnnnnnnnnnnnnnnnnnnnnnnnnnnnnnnnnnnnnnnnnnnnnnnnnnnnnnnnnnnnnnnnnnnnnnnnnnnnnnnnnnnnnnnnnnnnnnnnnnnnnnnnnnnnnnnnnnnnnnnnnnnnnnnnnnnnnnnnnnnnnnnnnnnnnnnnnnnnnnnnnnnnnnnnnnnnnnnnnnnnnnnnnnnnnnnnnnnnnnnnnnnnnnnnnnnnnnnnnnnnnnnnnnnnnnnnnnnnnnnnnnnnnnnnngtaatgacatgtgtttggtgtaataaaaaaggtcttttggctacaagtggcaatgatggcaccatccgcgtatggaatgttaccaagaagcaatattcactgcaacagacctgtgtgttcaacagattnnnnnnnnnnnnnnnnnnnnnnnnnnnnnnnnnnnnnnnnnnnnnnnnnnnnnnnnnnnnnnnnnnnnnnnnnnnnnnnnnnnnnnnnnnnnnnnnnnnnnnnnnnnnnnnnnnnnnnnnnnnnnnnnnnnnnnnnnnnnnnnnnnnnnnnnnnnnnnnnnnnnnnnnnnnnnnnnnnnnnnnnnnnnnnnnnnnnnnnnnnnnnnnnnnnnnnnnnnnnnnnnnnnnnnnnnnnnnnnnnnnnnnnnnnnnnnnnnnnnnnnnnnnnnnnnnnnnnnnnnnnnnnnnnnnnnnnnnnnnnnnnnnnnnnnnnnnnnnnnnnnnnnnnnnnnnnnnnnnnnnnnnnnnnnnnnnnnnnnnnnnnnnnnnnnnnnnnnnnnnnnnnnnnnnnnnnnnnnnnnnnnnnnnnnnnnnnnnnnnnnnnnnnnnnnnnnnnnnnnnnnnnnnnnnnnnnnnnnnnnnnnnnnnnnnnnnnnnnnnnnnnnnnnnnnnnnnnnnnnnnnnnnnnnnnnnnnnnnnnnnnnnnnnnnnnnnnnnnnnnnnnnnnnnnnnnnnnnnnnnnnnnnnnnnnnnnnnnnnnnnnnnnnnnnnnnnnnnnnnnnnnnnnnnnnnnnnnnnnnnnnnnnnnnnnnnnnnnnnnnnnnnnnnnnnnnnnnnnnnnnnnnnnnnnnnnnnnnnnnnnnnnnnnnnnnnnnnnnnnnnnnnnnnnnnnnnnnnnnnnnnnnnnnnnnnnnnnnnnnnnnnnnnnnnnnnnnnnnnnnnnnnnnnnnnnnnnnnnnnnnnnnnnnnnnnnnnnnnnnnnnnnnnnnnnnnnnnnnnnnnnnnnnnnnnnnnnnnnnnnnnnnnnnnnnnnnnnnnnnnnnnnnnnnnnnnnnnnnnnnnnnnnnnnnnnnnnnnnnnnnnnnnnnnnnnnnnnnnnnnnnnnnnnnnnnnnnnnnnnnnnnnnnnnnnnnnnnnnnnnnnnnnnnnnnnnnnnnnnnnnnnnnnnnnnnnnnnnnnnnnnnnnnnnnnnnnnnnnnnnnnnnnnnnnnnnnnnnnnnnnnnnnnnnnnnnnnnnnnnnnnnnnnnnnnnnnnnnnnnnnnnnnnnnnnnnnnnnnnnnnnnnnnnnnnnnnnnnnnnnnnnnnnnnnnnnnnnnnnnnnnnnnnnnnnnnnnnnnnnnnnnnnnnnnnnnnnnnnnnnnnnnnnnnnnnnnnnnnnnnnnnnnnnnnnnnnnnnnnnnnnnnnnnnnnnnnnnnnnnnnnnnnnnnnnnnnnnnnnnnnnnnnnnnnnnnnnnnnnnnnnnnnnnnnnnnnnnnnnnnnnnnnnnnnnnnnnnnnnnnnnnnnnnnnnnnnnnnnnnnnnnnnnnnnnnnnnnnnnnnnnnnnnnnnnnnnnnnnnnnnnnnnnnnnnnnnnnnnnnnnnnnnnnnnnnnnnnnnnnnnnnnnnnnnnnnnnnnnnnnnnnnnnnnnnnnnnnnnnnnnnnnnnnnnnnnnnnnnnnnnnnnnnnnnnnnnnnnnnnnnnnnnnnnnnnnnnnnnnnnnnnnnnnnnnnnnnnnnnnnnnnnnnnnnnnnnnnnnnnnnnnnnnnnnnnnnnnnnnnnnnnnnnnnnnnnnnnnnnnnnnnnnnnnnnnnnnnnnnnnnnnnnnnnnnnnnnnnnnnnnnnnnnnnnnnnnnnnnnnnnnnnnnnnnnnnnnnnnnnnnnnnnnnnnnnnnnnnnnnnnnnnnnnnnnnnnnnnnnnnnnnnnnnnnnnnnnnnnnnnnnnnnnnnnnnnnnnnnnnnnnnnnnnnnnnnnnnnnnnnnnnnnnnnnnnnnnnnnnnnnnnnnnnnnnnnnnnnnnnnnnnnnnnnnnnnnnnnnnnnnnnnnnnnnnnnnnnnnnnnnnnnnnnnnnnnnnnnnnnnnnnnnnnnnnnnnnnnnnnnnnnnnnnnnnnnnnnnnnnnnnnnnnnnnnnnnnnnnnnnnnnnnnnnnnnnnnnnnnnnnnnnnnnnnnnnnnnnnnnnnnnnnnnnnnnnnnnnnnnnnnnnnnnnnnnnnnnnnnnnnnnnnnnnnnnnnnnnnnnnnnnnnnnnnnnnnnnnnnnnnnnnnnnnnnnnnnnnnnnnnnnnnnnnnnnnnnnnnnnnnnnnnnnnnnnnnnnnnnnnnnnnnnnnnnnnnnnnnnnnnnnnnnnnnnnnnnnnnnnnnnnnnnnnnnnnnnnnnnnnnnnnnnnnnnnnnnnnnnnnnnnnnnnnnnnnnnnnnnnnnnnnnnnnnnnnnnnnnnnnnnnnnnnnnnnnnnnnnnnnnnnnnnnnnnnnnnnnnnnnnnnnnnnnnnnnnnnnnnnnnnnnnnnnnnnnnnnnnnnnnnnnnnnnnnnnnnnnnnnnnnnnnnnnnnnnnnnnnnnnnnnnnnnnnnnnnnnnnnnnnnnnnnnnnnnnnnnnnnnnnnnnnnnnnnnnnnnnnnnnnnnnnnnnnnnnnnnnnnnnnnnnnnnnnnnnnnnnnnnnnnnnnnnnnnnnnnnnnnnnnnnnnnnnnnnnnnnnnnnnnnnnnnnnnnnnnnnnnnnnnnnnnnnnnnnnnnnnnnnnnnnnnnnnnnnnnnnnnnnnnnnnnnnnnnnnnnnnnnnnnnnnnnnnnnnnnnnnnnnnnnnnnnnnnnnnnnnnnnnnnnnnnnnnnnnnnnnnnnnnnnnnnnnnnnnnnnnnnnnnnnnnnnnnnnnnnnnnnnnnnnnnnnnnnnnnnnnnnnnnnnnnnnnnnnnnnnnnnnnnnnnnnnnnnnnnnnnnnnnnnnnnnnnnnnnnnnnnnnnnnnnnnnnnnnnnnnnnnnnnnnnnnnnnnnnnnnnnnnnnnnnnnnnnnnnnnnnnnnnnnnnnnnnnnnnnnnnnnnnnnnnnnnnnnnnnnnnnnnnnnnnnnnnnnnnnnnnnnnnnnnnnnnnnnnnnnnnnnnnnnnnnnnnnnnnnnnnnnnnnnnnnnnnnnnnnnnnnnnnnnnnnnnnnnnnnnnnnnnnnnnnnnnnnnnnnnnnnnnnnnnnnnnnnnnnnnnnnnnnnnnnnnnnnnnnnnnnnnnnnnnngaggacggaagtgtaagcccatttttgtccaaatagcgagacaagtagttaagctgaatgcatcagacctccgtctgccttcccgagcgtggaaggttaagctggttggagaaggggctgatgatgctggaggagtgtttgatgacaccatcacagagatgtgccaggnnnnnnnnnnnnnnnnnnnnnnnnnnnnnnnnnnnnnnnnnnnnnnnnnnnnnnnnnnnnnnnnnnnnnnnnncaggttcctttttaacccttctgcctgcctcgatgaacacttaatgcagtttaagtttttaggaattttaatgggggttgccattcgcacaaagaagcctctggaccttcacttggcccctctggtgtagaagcagctgtgctgtgtcccactcacnnnnnnnnnnnnnnnnnnnnnnnnnnnnnnnnnnnnnnnnnnnnnnnnnnnnnnnnnnnnnnnnnnnnnnnnnnnnnnnnnnnnnnnnnnnnnnnnnnnnnnnnnnnnnnnnnnnnnnnnnnnnnnnnnnnnnnnnnnnnnnnnnnnnnnnnnnnnnnnnnnnnnnnnnnnnnnnnnnnnnnnnnnnnnnnnnnnnnnnnnnnnnnnnnnnnnnnnnnnnnnnnnnnnnnnnnnnnnnnnnnnnnnnnnnnnnnnnnnnnnnnnnnnnnnnnnnnnnnnnnnnnnnnnnnnnnnnnnnnnnnnnnnnnnnnnnnnnnnnnnnnnnnnnnnnnnnnnnnnnnnnnnnnnnnnnnnnnnnnnnnnnnnnnnnnnnnnnnnnnnnnnnnnnnnnnnnnnnnnnnnnnnnnnnnnnnnnnnnnnnnnnnnnnnnnnnnnnnnnnnnnnnnnnnnnnnnnnnnnnnnnnnnnnnnnnnnnnnnnnnnnnnnnnnnnnnnnnnnnnnnnnnnnnnnnnnnnnnnnnnnnnnnnnnnnnnnnnnnnnnnnnnnnnnnnnnnnnngccttacgacagtctgcctacctcacagacctgcttcttccagctgaggctgcccccgtactccagccagctggtcatggccgagcgcctgcgctatgccatcaacaactgccgctcgatcgacatggacaactacatgctctcaagaaacgtggacaacgccgagggctccgacactgactactg

SEQ ID NO: 19471 - DNA, 891 bp, Macaca Mulatta
  misc_feature (1)...(891): n = A,T,C or G
agttctacctgcgggaggaggacatcggtaaaaaccgggccgaggtatcacagccccgcctcgctgagctcaacagctatgtgcctgtcactgcctacactggacccctcgttgaggacttccttagtggtttccaggtnnnnnnnnnnnnnnnnnnnnnnnnnnnnnnnnnnnnnnnnnnnnnnnnnnnnnnnnnnnnnnnnnnnnnnnnnnnnnnnnnnnnnnnnnnnnnnnnnnnnnnnnnnnnnnnnnnnnnnnnnnnnnnnnnnnnnnnnnnnnnnnnnnnnnnnnnnnnnnnnnnnnnnnnnnnnnnnnnnnnnnnnnnnnnnnnnnnnnnnnnnnnnnnnnnnnnnnnnnnnnnnnnnnnnnnnnnnnnnnnnnnnnnnnnnnnnnnnnnnnnnnnnnnnnnnnnnnnnnnnnnnnnnnnnnnnnnnnnnnnnnnnnnnnnnnnnnnnnnnnnnnnnnnnnnnnnnnnnnnnnnnnnnnnnnnnnnnnnnnnnnnnnnnnnnnnnnnnnnnnnnnnnnnnnnnnnnnnnnnnnnnnnnnnnnnnnnnnnnnnnnnnnnnnnnnnnnnnnnnnnnnnnnnnnnnnnnnnnnnnnnnnnnnnnnnnnnnnnnnnnnnnnnnnnnnnnnnnnnnnnnnnnnnnnnnnnnnnnnnnnnnnnnnnnnnnnnnnnnnnnnnnnnnnnnnnnnnnnnnnnnnnnnnnnnnnnaggaggatgcaacagaactggtggccttagcacaggctgtgaatgctcgagccctgccagcagtgcagcaagagaacctggacgaggacctcatccggaagttggcatatgtggctgctggggatctggcacccataaacgccttcattgggggcctgactgcccaggaagtcatgaag

SEQ ID NO: 19472 - DNA, 252 bp, Macaca Mulatta
cgggaagctcgtcatcaatggaagccccatcaccatcttccaggagcgagatccctccaaaatcaagtggggcgatgctggcgctgagtacgtcgtggagtccactggcgtcttcaccaccacggagaaggctggggctcatttgcaggggggagccaaaagggtcatcatctctgccccctctgctgacgcccccatgttcgtcatgggtgtgaaccatgagaagtatgacaacagcctcaagatcgtcag

SEQ ID NO: 19473 - DNA, 6262 bp, Macaca Mulatta
  misc_feature (1)...(6262): n = A,T,C or G
gccaatagcaatccttgtgagcatgcaggaaaatgtgtgaacacagatggcgccttccactgtgagtgtctgaaaggttatgcaggacctcgttgtgagatggacatcaatgagtgccattcagatccctgccagaatgatgctacctgtctggataagattggaggcttcacatgtctgtgcatgccaggnnnnnnnnnnnnnnnnnnnnnnnnnnnnnnnnnnnnnnnnnnnnnnnnnnnnnnnnnnnnnnnnnnnnnnnnnnnnnnnnnnnnnnnnnnnnnnnnnnnnnnnnnnnnnnnnnnnnnnnnnnnnnnnnnnnnnnnnnnnnnnnnnnnnnnnnnnnnnnnnnnnnnnnnnnnnnnnnnnnnnnnnnnnnnnnnnnnnnnnnnnnnnnnnnnnnnnnnnnnnnnnnnnnnnnnnnnnnnnnnnnnnnnnnnnnnnnnnnnnnnnnnnnnnnnnnnnnnnnnnnnnnnnnnnnnnnnnnnnnnnnnnnnnnnnnnnnnnnnnnnnnnnnnnnnnnnnnnnnnnnnnnnnnnnnnnnnnnnnnnnnnnnnnnnnnnnnnnnnnnnnnnnnnnnnnnnnnnnnnnnnnnnnnnnnnnnnnnnnnnnnnnnnnnnnnnnnnnnnnnnnnnnnnnnnnnnnnnnnnnnnnnnnnnnnnnnnnnnnnnnnnnnnnnnnnnnnnnnnnnnnnnnnnnnnnnnnnnnnnnnnnnnnnnnnnnnnnnnnnnnnnnnnnnnnnnnnnnnnnnnnnnnnnnnnnnnnnnnnnnnnnnnnnnnnnnnnnnnnnnnnnnnnnnnnnnnnnnnnnnnnnnnnnnnnnnnnnnnnnnnnnnnnnnnnnnnnnnnnnnnnnnnnnnnnnnnnnnnnnnnnnnnnnnnnnnnnnnnnnnnnnnnnnnnnnnnnnnnnnnnnnnnnnnnnnnnnnnnnnnnnnnnnnnnnnnnnnnnnnnnnnnnnnnnnnnnnnnnnnnnnnnnnnnnnnnnnnnnnnnnnnnnnnnnnnnnnnnnnnnnnnnnnnnnnnnnnnnnnnnnnnnnnnnnnnnnnnnnnnnnnnnnnnnnnnnnnnnnnnnnnnnnnnnnnnnnnnnnnnnnnnnnnnnnnnnnnnnnnnnnnnnnnnnnnnnnnnnnnnnnnnnnnnnnnnnnnnnnnnnnnnnnnnnnnnnnnnnnnnnnnnnnnnnnnnnnnnnnnnnnnnnnnnnnnnnnnnnnnnnnnnnnnnnnnnnnnnnnnnnnnnnnnnnnnnnnnnnnnnnnnnnnnnnnnnnnnnnnnnnnnnnnnnnnnnnnnnnnnnnnnnnnnnnnnnnnnnnnnnnnnnnnnnnnnnnnnnnnnnnnnnnnnnnnnnnnnnnnnnnnnnnnnnnnnnnnnnnnnnnnnnnnnnnnnnnnnnnnnnnnnnnnnnnnnnnnnnnnnnnnnnnnnnnnnnnnnnnnnnnnnnnnnnnnnnnnnnnnnnnnnnnnnnnnnnnnnnnnnnnnnnnnnnnnnnnnnnnnnnnnnnnnnnnnnnnnnnnnnnnnnnnnnnnnnnnnnnnnnnnnnnnnnnnnnnnnnnnnnnnnnnnnnnnnnnnnnnnnnnnnnnnnnnnnnnnnnnnnnnnnnnnnnnnnnnnnnnnnnnnnnnnnnnnnnnnnnnnnnnnnnnnnnnnnnnnnnnnnnnnnnnnnnnnnnnnnnnnnnnnnnnnnnnnnnnnnnnnnnnnnnnnnnnnnnnnnnnnnnnnnnnnnnnnnnnnnnnnnnnnnnnnnnnnnnnnnnnnnnnnnnnnnnnnnnnnnnnnnnnnnnnnnnnnnnnnnnnnnnnnnnnnnnnnnnnnnnnnnnnnnnnnnnnnnnnnnnnnnnnnnnnnnnnnnnnnnnnnnnnnnnnnnnnnnnnnnnnnnnnnnnnnnnnnnnnnnnnnnnnnnnnnnnnnnnnnnnnnnnnnnnnncagaccctggtgaacctctgcagtcggtctccatgtaaaaacaaaggtacttgcattcaggataaagcagagnnnnnnnnnnnnnnnnnnnnnnnnnnnnnnnnnnnnnnnnnnnnnnnnnnnnnnnnnnnnnnnnnnnnnnnnnnnnnnnnnnnnnnnnnnnnnnnnnnnnnnnnnnnnnnnnnnnnnnnnnnnnnnnnnnnnnnnnnnnnnnnnnnnnnnnnnnnnnnnnnnnnnnnnnnnnnnnnnnnnnnnnnnnnnnnnnnnnnnnnnnnnnnnnnnnnnnnnnnnnnnnnnnnnnnnnnnnnnnnnnnnnnnnnnnnnnnnnnnnnnnnnnnnnnnnnnnnnnnnnnnnnnnnnnnnnnnnnnnnnnnnnnnnnnnnnnnnnnnnnnnnnnnnnnnnnnnnnnnnnnnnnnnnnnnnnnnnnnnnnnnnnnnnnnnnnnnnnnnnnnnnnnnnnnnnnnnnnnnnnnngcctactctgtgaagaaaacattgatgactgtgccaggggtccacattgccttaatggtggtcagtgcgtggataggattggaggctacagttgtcgctgcttgcctggctttgctggggagcgatgtgagggagacatcaacgagtgcctctccaacccctgcagctctgagggcagcctggactgtatacagctcaccaatgactacctgtgtgtttgccgtagtgcctttactggnnnnnnnnnnnnnnnnnnnnnnnnnnnnnnnnnnnnnnnnnnnnnnnnnnnnnnnnnnnnnnnnnnnnnnnnnnnnnnnnnnnnnnnnnnnnnnnnnnnnnnnnnnnnnnnnnnnnnnnnnnnnnnnnnnnnnnnnnnnnnnnnnnnnnnnnnnnnnnnnnnnnnnnnnnnnnnnnnnnnnnnnnnnnnnnnnnnnnnnnnnnnnnnnnnnnnnnnnnnnnnnnnnnnnnnnnnnnnnnnnnnnnnnnnnnnnnnnnnnnnnnnnnnnnnnnnnnnnnnnnnnnnnnnnnnnnnnnnnnnnnnnnnnnnnnnnnnnnnnnnnnnnnnnnnnnnnnnnnnnnnnnnnnnnnnnnnnnnnnnnnnnnnnnnnnnnnnnnnnnnnnnnnnnnnnnnnnnnnnnnnnnnnnnnnnnnnnnnnnnnnnnnnnnnnnnnnnnnnnnnnnnnnnnnnnnnnnnnnnnnnnnnnnnnnnnnnnnnnnnnnnnnnnnnnnnnnnnnnnnnnnnnnnnnnnnnnnnnnnnnnnnnnnnnnnnnnnnnnnnnnnnnnnnnnnnnnnnnnnnnnnnnnnnnnnnnnnnnnnnnnnnnnnnnnnnnnnnnnnnnnnnnnnnnnnnnnnnnnnnnnnnnnnnnnnnnnnnnnnnnnnnnnnnnnnnnnnnnnnnnnnnnnnnnnnnnnnnnnnnnnnnnnnnnnnnnnnnnnnnnnnnnnnnnnnnnnnnnnnnnnnnnnnnnnnnnnnnnnnnnnnnnnnnnnnnnnnnnnnnnnnnnnnnnnnnnnnnnnnnnnnnnnnnnnnnnnnnnnnnnnnnnnnnnnnnnnnnnnnnnnnnnnnnnnnnnnnnnnnnnnnnnnnnnnnnnnnnnnnnnnnnnnnnnnnnnnnnnnnnnnnnnnnnnnnnnnnnnnnnnnnnnnnnnnnnnnnnnnnnnnnnnnnnnnnnnnnnnnnnnnnnnnnnnnnnnnnnnnnnnnnnnnnnnnnnnnnnnnnnnnnnnnnnnnnnnnnnnnnnnnnnnnnnnnnnnnnnnnnnnnnnnnnnnnnnnnnnnnnnnnnnnnnnnnnnnnnnnnnnnnnnnnnnnnnnnnnnnnnnnnnnnnnnnnnnnnnnnnnnnnnnnnnnnnnnnnnnnnnnnnnnnnnnnnnnnnnnnnnnnnnnnnnnnnnnnnnnnnnnnnnnnnnnnnnnnnnnnnnnnnnnnnnnnnnnnnnnnnnnnnnnnnnnnnnnnnnnnnnnnnnnnnnnnnnnnnnnnnnnnnnnnnnnnnnnnnnnnnnnnnnnnnnnnnnnnnnnnnnnnnnnnnnnnnnnnnnnnnnnnnnnnnnnnnnnnnnnnnnnnnnnnnnnnnnnnnnnnnnnnnnnnnnnnnnnnnnnnnnnnnnnnnnnnnnnnnnnnnnnnnnnnnnnnnnnnnnnnnnnnnnnnnnnnnnnnnnggctgaagatgaagtcttactctcagaagaagacgaccccattgatcgacggccatggacacagcagcaccttgaagctgcagacatccgtaggacaccatcactggccctcacccctcctcaggcagagcaggaggtggatgtgttggatgtgaatgtccggggcccagnnnnnnnnnnnnnnnnnnnnnnnnnnnnnnnnnnnnnnnnnnnnnnnnnnnnnnnnnnnnnnnnnnnnnnnnnnnnnnnnnnnnnnnnnnnnnnnnnnnnnnnnnnnnnnnnnnnnnnnnnnnnnnnnnnnnnnnnnnnnnnnnnnnnnnnnnnnnnnnnnnnnnnnnnnnnnnnnnnnnnnnnnnnnnnnnnnnnnnnnnnnnnnnnnnnnnnnnnnnnnnnnnnnnnnnnnnnnnnnnnnnnnnnnnnnnnnnnnnnnnnnnnnnnnnnnnnnnnnnnnnnnnnnnnnnnnntcttctagattctgattcgcaaccgagtaactgatctagatgccaggatgaatgatggtactacacccctgatcctggctgcccgcctggctgtggagggaatggtggcagaactgatcaactgccaagcagatgtgaatgcagtggatgaccatgnnnnnnnnnnnnnnnnnnnnnnnnnnnnnnnnnnnnnnnnnnnnnnnnnnnnnnnnnnnnnnnnnnnnnnnnnnnnnnnnnnnnnnnnnnnnnnnggaagagacaccgctgtttcttgctgcccgggaggggagctatgaagcagccaagatcctgttagaccattttgccaatcgagacatcacagaccatatggatcgtcttccccgggatgtggctcgggatcgcatgcaccatgacattgtgcgcctcctggatgaatacaatgtgaccccaagccctccaggcaccgtgttgacttctgctctctcacctgtcatctgtgggcccaacagatctttcctcagcctgaagcacacaccaatgnnnnnnnnnnnnnnnnnnnnnnnnnnnnnnnnnnnnnnnnnnnnnnnnnnnnnnnnnnnnnnnnnnnnnnnnnnnnnnnnnnnnnnnnnnnnnnnnnnnnnnnnnnnnnnnnnnnnnnnnnnnnnnnnnnnnnnnnnnnnnnnnnnnnnnnnnnnnnnnnnnnnnnnnnnnnnnnnnnnnnnnnnnnnnnnnnnnnnnnnnnnnnnnnnnnnnnnnnnnnnnnnnnnnnnnnnnnnnnnnnnnnnnnnnnnnnnnnnnnnnnnnnnnnnnnnnnnnnnnnnnnnnnnnnnnnnnnnnnnnnnnnnnnnnnnnnnnnnnnnnnnnnnnnnnnnnnnnnnnnnnnnnnnnnnnnnnnnnnnnnnnnnnnnnnnnnnnnnnnnnnnnnnnnnnnnnnnnnnnnnnnnnnnnnnnnnnnnnnnnnnnnnnnnnnnnnnnnnnnnnnnnnnnnnnnnnnnnnnnnnnnnnnnnnnnnnnnnnnnnnnnnnnnnnnnnnnnnnnnnnnnnnnnnnnnnnnnnnnnnnnnnnnnnnnnnnnnnnnnnnnnnnnnnnnnnnnnnnnnnnnnnnnnnnnnnnnnnnnnnnnnnnnnnnnnnntcgggagcccttgccccccattgtgactttccagctcatccctaaaggcagtattgcccaaccagcgggggctccccagcctcagtccacctgccctccagctgttacgggccccctgcccaccatgtaccagattccagaaatggcccgtttgcccagtgtggctttccccactgccatgatgccccaacaggacgggcaggtagctcagaccattctcccagcctatcatcctttcccagcctctgtgggcaagtaccccacacccccttcacagcacagttatgcttcctcaaatgctgctgagcgaacacccagtcacagtggtcacctccagggtgagcatccctacctgacaccatccccagagtctcctgaccagtggtcaagttcatcaccccactctgcttctgactggtcagatgtgaccaccagccctacccctgggggtgctggaggaggtcagcggggacctgggacacacatgtctgagccaccacacaacaacatgcaggtttatgcgtgaaagagtccacctccagtgtagagacataactgccttttgtaaatgctgctgaggaacaaatgaaggtcatccgggagagaaatgaagaaatctctggagccagattctagaggta

SEQ ID NO: 19474 - DNA, 459 bp, Macaca Mulatta
cttaatcgtgttgggagaagttgccttggaaacatgtatgaactgaagcacgcttgacagatcagcaagttaccaacgggaagcacagtgtcaaaggtttgggcgaaactacccctgacccttcagctagtattagtctggatggtgtagaggttcctcttgggaccgggatttcatctggtgtgaatgacacctgtctactatataacgagtacattgtctacgatatttgctccggtaaatctgaagtatctgctgaaactgaaattcaattttaagacctccctgtggtaattgggagaagtgggcgactcacacccggtggctctggtatgaattcacctgaagcgcttctgcagcaactcacctggtcaactaagttgcgcatggatagtgcctgtactaaaccacctcagaaaggattttacagaaacgcgtttaaggttttctccaactttt

SEQ ID NO: 19475 - DNA, 7387 bp, Macaca Mulatta
  misc_feature (1)...(7387): n = A,T,C or G
ccgagattttagatgaagataaacgcttagtcagtgcagtggattactactttattcaagatgacggaagcagatttaaggtnaggtggccttgccttataagccgtatttctacattgcaaccagannnnnnnnnnnnnnnnnnnnnnnnnnnnnnnnnnnnnnnnnnnnnnnnnnnnnnnnnnnnnnnnnnnnnnnnnnnnnnnnnnnnnnnnnnnnnnnnnnnnnnnnnnnnnnnnnnnnnnngcgaaattacatcaagctgtccttccacaccgtggaggatcttgtcaaagtcaggaaggagatctcccctgccgtgaagaagaacagggagcaggatcatgccagcgacgcgtacacagctctgctttccannnnnnnnnnnnnnnnnnnnnnnnnnnnnnnnnnnnnnnnnnnnnnnnnnnnnnnnnnnnnnnnnnnnnnnnnnnnnnnnnnnnnnnnnnnnnnnnnnnnnnnnnnnnnnnnnnnnnnnnnnnnnnnnnnnnnnnnnnnnnnnnnnnnnnnnnnnnnnnnnnnnnnnnnnnnnnnnnnnnnnnnnnnnnnnnnnnnnnnnnnnnnnnnnnnnnnnnnnnnnnnnnnnnnnnnnnnnnnnnnnnnnnnnnnnnnnnnnnnnnnnnnnnnnnnnnnnnnnnnnnnnnnnnnnnnnnnnnnnnnnnnnnnnnnnnnnnnnnnnnnnnnnnnnnnnnnnnnnnnnnnnnnnnnnnnnnnnnnnnnnnnnnnnnnnnnnnnnnnnnnnnnnnnnnnnnnnnnnnnnnnnnnnnnnnnnnnnnnnnnnnnnnnnnnnnnnnnnnnnnnnnnnnnnnnnnnnnnnnnnnnnnnnnnnnnnnnnnnnnnnnnnnnnnnnnnnnnnnnnnnnnnnnnnnnnnnnnnnnnnnnnnnnnnnnnnnnnnnnnnnnnnnnnnnnnnnnnnnnnnnnnnnnnnnnnnnnnnnnnnnnnnnnnnnnnnnnnnnnnnnnnnnnnnnnnnnnnnnnnnnnnnnnnnnnnnnnnnnnnnnnnnnnnnnnnnnnnnnnnnnnnnnnnnnnnnnnnnnnnnnnnnnnnnnnnnnnnnnnnnnnnnnnnnnnnnnnnnnnnnnnnnnnnnnnnnnnnnnnnnnnnnnnnnnnnnnnnnnnnnnnnnnnnnnnnnnnnnnnnnnnnnnnnnnnnnnnnnnnnnnnnnnnnnnnnnnnnnnnnnnnnnnnnnnnnnnnnnnnnnnnnnnnnnnnnnnnnnnnnnnnnnnnnnnnnnnnnnnnnnnnnnnnnnnnnnnnnnnnnnnnnnnnnnnnnnnnnnnnnnnnnnnnnnnnnnnnnnnnnnnnnnnnnnnnnnnnnnnnnnnnnnnnnnnnnnnnnnnnnnnnnnnnnnnnnnnnnnnnnnnnnnnnnnnnnnnnnnnnnnnnnnnnnnnnnnnnnnnnnnnnnnnnnnnnnnnnnnnnnnnnnnnnnnnnnnnnnnnnnnnnnnnnnnnnnnnnnnnnnnnnnnnnnnnnnnnnnnnnnnnnnnnnnnnnnnnnnnnnnnnnnnnnnnnnnnnnnnnnnnnnnnnnnnnnnnnnnnnnnnnnnnnnnnnnnnnnnnnnnnnnnnnnnnnnnnnnnnnnnnnnnnnnnnnnnnnnnnnnnnnnnnnnnnnnnnnnnnnnnnnnnnnnnnnnnnnnnnnnnnnnnnnnnnnnnnnnnnnnnnnnnnnnnnnnnnnnnnnnnnnnnnnnnnnnnnnnnnnnnnnnnnnnnnnnnnnnnnnnnnnnnnnnnnnnnnnnnnnnnnnnnnnnnnnnnnnnnnnnnnnnnnnnnnnnnnnnnnnnnnnnnnnnnnnnnnnnnnnnnnnnnnnnnnnnnnnnnnnnnnnnnnnnnnnnnnnnnnnnnnnnnnnnnnnnnnnnnnnnnnnnnnnnnnnnnnnnnnnnnnnnnnnnnnnnnnnnnnnnnnnnnnnnnnnnnnnnnnnnnnnnnnnnnnnnnnnnnnnnnnnnnnnnnnnnnnnnnnnnnnnnnnnnnnnnnnnnnnnnnnnnnnnnnnnnnnnnnnnnnnnnnnnnnnnnnnnnnnnnnnnnnnnnnnnnnnnnnnnnnnnnnnnnnnnnnnnnnnnnnnnnnnnnnnnnnnnnnnnnnnnnnnnnnnnnnnnnnnnnnnnnngtgtggaaaaagaagctctcagcggccgtggaggtgggcgacgcggccgaggtgaagcgctgcaagaacatggaggtgctgtacgactcgctgcagctggcccacaagtgcatcctgaactccttctacggctacgtcatgcgcaagggnnnnnnnnnnnnnnnnnnnnnnnnnnnnnnnnnnnnnnnnnnnnnnnnnnnnnnnnnnnnnnnnnnnnnnnnnnnnnnnnnnnnnnnnnnnnnnnnnnnnnnnnnnnnnnnnnnnnnnnnnnnnnnnnnnnnnnnnnnnnnnnnnnnnnnnnnnnnnnnnnnnnnnnnnnnnnnnnnnnnnnnnnnnnnnnnnnnnnnnnnnnnnnnnnnnnnnnnnnnnnnnnnnnnnnnnnnnnnnnnnnnnnnnnnnnnnnnnnnnnnnnnnnnnnnnnnnnnnnnnnnnnnnnnnnnnnnnnnnnnnnnnnnnnnnnnnnnnnnnnnnnnnnnnnnnnnnnnnnnnnnnnnnnnnnnnnnnnnnnnnnnnnnnnnnnnnnnnnnnnnnnnnnnnnnnnnnnnnnnnnnnnnnnnnnnnnnnnnnnnnnnnnnnnnnnnnnnnnnnnnnnnnnnnnnnnnnnnnnnnnnnnnnnnnnnnnnnnnnnnnnnnnnnnnnnnnnnnnnnnnnnnnnnnnnnnnnnnnnnnnnnnnnnnnnnnnnnnnnnnnnnnnnnnnnnnnnnnnnnnnnnnnnnnnnnnnnnnnnnnnnnnnnnnnnnnnnnnnnnnnnnnnnnnnnnnnnnnnnnnnnnnnnnnnnnnnnnnnnnnnnnnnnnnnnnnnnnnnnnnnnnnnnnnnnnnnnnnnnnnnnnnnnnnnnnnnnnnnnnnnnnnnnnnnnnnnnnnnnnnnnnnnnnnnnnnnnnnnnnnnnnnnnnnnnnnnnnnnnnnnnnnnnnnnnnnnnnnnnnnnnnnnnnnnnnnnnnnnnnnnnnngggccatcccacttgccattttccaagcagagcctatggtgaggaagcactttctccggaaatggctcaagagctcttcccttcaagactttgatattcgagcannnnnnnnnnnnnnnnnnnnnnnnnnnnnnnnnnnnnnnnnnnnnnnnnnnnnnnnnnnnnnnnnnnnnnnnnnnnnncaggtaaagaacccagtgccacgcgtcaaacaccccgactggttgcacaaaaaactgctggagaagaatgatgtctacaagcagaagaagatcagtgagctcttcaccctggagggcaggagacaggnnnnaggtcacgatggccgaggcctcagaagacagtccgaggccaagtgctcccgacatggaggacttcggcctcgtgaagccgcctcacccagcagcccctgtcgctgtgaagaggaagcgagttctttgggagagccaggaggagtcccaggacctcacgccgactgtgccctggcaggagatcttgggacagcctcccgccctaggaaccacccaggnnnnnnnnnnnnnnnnnnnnnnnnnnnnnnnnnnnnnnnnnnnnnnnnnnnnnnnnnnnnnnnnnnnnnnnnnnnnnnnnnnnnnnnnnnnnnnnnnnnnnnnnnnnnnnnnnnnnnnnnnnnnnnnnnnnnnnnnnnnnnnnnnnnnnnnnnnnnnnnnnnnnnnnnnnnnnnnnnnnnnnnnnnnnnnnnnnnnnnnnnnnnnnagatcagcgagaccagccaggccggcctgttcaggctgtgggcgctcattggcagtgacttgcactgcatnnnnnnnnnnnnnnnnnnnnnnnnnnnnnnnnnnnnnnnnnnnnnnnnnnnnnnnnnnnnnnnnnnnnnnnnnnnnnnnnnnnnnnnnnnnnnnnnnnnnnnnnnnnnnnnnnnnnnnnnnnnnnnnnnnnnnnnnnnnnnnnnnnnnnnnnnnnnnnnnnnnnnnnnnnnnnnnnnnnnnnnnnnnnnnnnnnnnnnnnnnnnnnnnnnnnnnnnnnnnnnnnnnnnnnnnnnnnnnnnnnnnnnnnnnnnnnnnnnnnnnnnnnnnnnnnnnnnnnnnnnnnnnnnnnnnnnnnnnnnnnnnnnnnnnnnnnnnnnnnnnnnnnnnnnnnnnnnnnnnnnnnnnnnnnnnnnnnnnnnnnnnnnnnnnnnnnnnnnnnnnnnnnnnnnnnnnnnnnnnnnnnnnnnnnnnnnnnnnnnnnnnnnnnnnnnnnnnnnnnnnnnnnnnnnnnnnnnnnnnnnnnnnnnnnnnnnnnnnnnnnnnnnnnnnnnnnnnnnnnnnnnnnnnnnnnnnnnnnnnnnnnnnnnnnnnnnnnnnnnnnnnnnnnnnnnnnnnnnnnnnnnnnnnnnnnnnnnnnnnnnnnnnnnnnnnnnnnnnnnnnnnnnnnnnnnnnnnnnnnnnnnnnnnnnnnnnnnnnnnnnnnnnnnnnnnnnaggaggagcgccgggggcccacgctcatcgccgttcagtccagctgggagctgaagaggctggccagtgagattcctgtcttggaggaattcccgctggtgcctatctgtgtggccgacaagatcaactatggggtcctggactggcagcgccatggagcccggcgcatgatccggcactacctcaacctggacacctgcctgtcgcaggcctttgagatgagcaggnnnnnnnnnnnnnnnnnnnnnnnnnnnnnnnnnnnnnnnnnnnnnnnnnnnnnnnnnnnnnnnnnnnnnnnnnnnnnnnnnnnnnnnnnnnnnnnnnnnnnnnnnnnnnnnnnnnnnnnnnnnnnnnnnnnnnnnnnnnnnnnnnnnnnnnnnnnnnnnnnnnnnnnnnnnnnnnnnnnnnnnnnnnnnnnnnnnnnnnnnnnnnnnnnnnnnnnnnnnnnnnnnnnnnnnnnnnnnnnnnnnnnnnnnnnnnnnnnnnnnnnnnnnnnnnnnnnnnnnnnnnnnnnnnnnnnnnnnnnnnnnnnnnnnnnnnnnnnnnnnnnnnnnnnnnnnnnnnnnnnnnnnnnnnnnnnnnnnnnnnnnnnnnnnnnnnnnnnnnnnnnnnnnnnnnnnnnnnnnnnnnnnnnnnnnnnnnnnnnnnnnnnnnnnnnnnnnnnnnnnnnnnnnnnnnnnnnnnnnnnnnnnnnnnnnnnnnnnnnnnnnnnnnnnnnnnnnnnnnnnnnnnnnnnnnnnnnnnnnnnnnnnnnnnnnnnnnnnnnnnnnnnnnnnnnnnnnnnnnnnnnnnnnnnnnnnnnnnnnnnnnnnnnnnnnnnnnnnnnnnnnnnnnnnnnnnnnnnnnnnnnnnnnnnnnnnnnnnnnnnnnnnnnnnnnnnnnnnnnnnnnnnnnnnnnnnnnnnnnnnnnnnnnnnnnnnnnnnnnnnnnnnnnnnnnnnnnnnnnnnnnnnnnnnnnnnnnnnnnnnnnnnnnnnnnnnnnnnnnnnnnnnnnnnnnnnnnnnnnnnnnnnnnnnnnnnnnnnnnnnnnnnnnnnnnnnnnnnnnnnnnnnnnnnnnnnnnnnnnnnnnnnnnnnnnnnnnnnnnnnnnnnnnnnnnnnnnnnnnnnnnnnnnnnnnnnnnnnnnnnnnnnnnnnnnnnnnnnnnnnnnnnnnnnnnnnnnnnnnnnnnnnnnnnnnnnnnnnnnnnnnnnnnnnnnnnnnnnnnnnnnnnnnnnnnnnnnnnnnnnnnnnnnnnnnnnnnnnnnnnnnnnnnnnnnnnnnnnnnnnnnnnnnnnnnnnnnnnnnnnnnnnnnnnnnnnnnnnnnnnnnnnnnnnnnnnnnnnnnnnnnnnnnnnnnnnnnnnnnnnnnnnnnnnnnnnnnnnnnnnnnnnnnnnnnnnnnnnnnnnnnnnnnnnnnnnnncttccaggaatgatcaccttctctcaggattatgtcgcaaatgaactcactcagagcttcttcaccatcactcagaagattcagaagaaagtcacaggctctcggaactccactgagctctcagagatgtttcctgtcctccctggttcccacttgctgctcaataaccctgctctggagttcatcaaatacgtgtgcaaggtnnnnnnnnnnnnnnnnnnnnnnnnnnnnnnnnnnnnnnnnnnnnnnnnnnnnnnnnnnnnnnnnnnnnnnnnnnnnnnnnnnnnnnnnnnnnnnnnnnnnnnnnnnnnnnnnnnnnnnnnnnnnnnnnnnnnnnnnnnnnnnnnnnnnnnnnnnnnnnnnnnnnnnnnnnnnnnnnnnnnnnnnnnnnnnnnnnnnnnnnnnnnnnnnnnnnnnnnnnnnnnnnnnnnnnnnnnnnnnnnnnnnnnnnnnnnnnnnnnnnnnnnnnnnnnnnnnnnnnnnnnnnnnnnnnnnnnnnnnnnnnnnnnnnnnnnnnnnnnnnnnnnnctgcctgaagtgccgaggggtgaaggagaccagcatgcctgtgtattgcagctgcgcagggggcttcgccctcaccatccacacccaggtncaggtcttcatggaacagatcggaatcttccggaacattgcccagcactacggcatgtcgtacctcctggaaaccctggagtggctgctgcagaagaacccacagcggggccgttagccagccccgggccctgggcacctctgcgtccgtgccaggcctcctgatgccaaggccnacatcccgtgctttcagtgaccagaccactgaccaccctgactgtccaaannnnnnnnnnnnnnnnnnnnnnnnnnnnnnnnnnnnnnnnnnnnnnnnnnnnnnnnnnnnnnnnnnnnnnnnnnnnnnnnnnnnnnnnnnnnnnnnnnnnnnnnnnnnnnnnnnnnnnnnnnnnnnnnnnnnnnnnnnnnnnnnnnnnnnnnnnnnnnntttcttatgcagtgaatgcttttccaggcctccgttgcttcctgcccacacctggtggggtgggagagtcctgcttgtgcccccagttctttgtcctgcctcccagagggaggaaaagcccctgggggcttctggctccctgagattgggctctgagacgagatgggttcccaaggccttggtggggctggagtctcacctgtttgcatggagaaatgggctggccccacagcctcacaggagcagtttgtgggctggtttccccggaatccggaccctaacctgtgggaatctggattttgacttgttgagccctgctcatttggagccaggtctagagggaaccccccatcagcctcaggaaaaaaagacttctgtgcacctcacttccggctcaccacagcccttgtccttcacctccacacaggaccggctggaagcagaaagaa

SEQ ID NO: 19476 - DNA, 177 bp, Macaca Mulatta
ttttccttactaaagaatacatccaggaatcaggaacggcaccttgatacactccataattttgtaagtcgtgcgactaatgaacttatttggttgaatgaaaaagaagaggaggaagttgcttatgactggagtgagagaaacaccaacgtagctaggaaaaaagattatcatgct

SEQ ID NO: 19477 - DNA, 907 bp, Macaca Mulatta
tggccgaggcgaagaggtcacacccgcaggagaagaagcgcaggaaagacagcagcgaggagtcggacagctcagaggagagcgacattgacagcgaggcctcctcggccctcttcatggcgaagaagaagacgccacccaagagagagcggaagccgtcgggagggagctcgaggggcaacagccgcccaggcacgcccagcgcagagggcggcagcacctcctccaccctgcgggcggctgccagcaagctcgagcaagggaagcgggtgagtgagatgcctgcagccaagcggttgcggctggacgcggggccccagagcctgtccgggaagtcgaccccccagccgccatcgggcaagtcaacacccagtagcggcgacgtgcaggtgactgaggatgccgtgcgccgctacctgacacggaagcccatgaccactaaggacctgctgaaaaagttccagaccaagaagacagggctgagcagcgagcagacggtgaacgtgctggcccagatcctcaagcgcctcaaccccgagcgcaagatggtcaacgacaaaatgcacttctccctcaaggagtgaggcgccgtccggcacacagccctgcccccgaactcagcctctcactgccccttcgccatcctagagtgaggcgctgtccggcacacagccctgcccccagaactcaggctctcactggcccttcgctatcttgctccctgactcccatgcccccatattagcaattctggaaaggtaagcatctactcctctggccctcctggaatctacgatgcctgttagacttctgatagtctcttctcctgggtcagctcctcacttgaccaggccgtggtccacttccagtttcctcatccgtatttccttacatatgttccgaacag

SEQ ID NO: 19478 - DNA, 4159 bp, Macaca Mulatta
  misc_feature (1)...(4159): n = A,T,C or G
cagccgccgccatgtctgcgcatctgcaatggatggtcgtgcggaactgctccagtttcctgatcaagaggaataagcagacctacagtactgngagcccaataacttgaaggcccgcaattccttccgctacaacgggctgattcaccgcannnnnnnnnnnnnnnnnnnnnnnnnnnnnnnnnnnnnnnnnnnnnnnnnnnnnnnnnnnnnnnnngccagcggaagcctgccacctcctatgtgcggaccaccatcaacaagaatgctcgcgccacgctcagcagcatcagacacatgatccgcaagaacaagtaccgccccgacctgcgcatggnnnnnnnnnnnnnnnnnnnnnnnnnnnnnnnnnnnnnnnnnnnnnnnnnnnnnnnnnnnnnnnnnnnnnnnnnnnnnnnnnnnnnnnnnnnnnnnnnnnnnnnnnnnnnnnnnnnnnnnnnnnnnnnnnnnnnnnnnnnnnnnnnnnnnnnnnnnnnnnnnnnnnnnnnnnnnnnnnnnnnnnnnnnnnnnnnnnnnnnnnnnnnnnnnnnnnnnnnnnnnnnnnnnnnnnnnnnnnnnnnnnnnnnnnnnnnnnnnnnnnnnnnnnnnnnnnnnnnnnnnnnnnnnnnnnnnnnnnnnnnnnnnnnnnnnnnnnnnnnnnnnnnnnnnnnnnnnnnnnnnnnnnnnnnnnnnnnnnnnnnnnnnnnnnnnnnnnnnnnnnnnnnnnnnnnnnnnnnnnnnnnnnnnnnnnnnnnnnnnnnnnnnnnnnnnnnnnnnnnnnnnnnnnnnnnnnnnnnnnnnnnnnnnnnnnnnnnnnnnnnnnnnnnnnnnnnnnnnnnnnnnnnnnnnnnnnnnnnnnnnnnnnnnnnnnnnnnnnnnnnnnnnnnnnnnnnnnnnnnnnnnnnnnnnnnnnnnnnnnnnnnnnnnnnnnnnnnnnnnnnnnnnnnnnnnnnnnnnnnnnnnagatgggcagcttgctgggtagtcactcatacccgtaagggaggtggcaaccccagggtacagccagtggatgttgaacagccttagcatgtccccctgctccagccctccagctgtccccatccctccccagtctctctgagctggctcttgtctcaggtatcagctcagtggccactcctgggccgccctgtcacccaagctctcctgattgcccagtcctcctgtttcctttggcctgtttgctccctaccatttatgacaggttgtgaggccaggagtttgagaccatcctaggcaacatagtgagacacagtctgtaaaataaaactatctgggtgcgctggtgtgctccctgtggtcccagatcctcagaggttgagtagaggctgaggtgggcgcggcacttgagccaagagtttgaggctgcagtgagcccatgagcccaccactgcagtccagtctggaagacagcgtgacactcgagagagaggcttggatggggaaagagtcatgcnnnnnnnnnnnnnnnnnnnnnnnnnnnnnnnnnnnnnnnnccactgccagggaccgaggatccagcatccaggacacccctggttctggccatcgtggggtacctgattcagagaaggactctactccgtgtctgagactaccnnnnnnnnnnnnnnnnnnnnnnnnnnnnnnnnnnnnnnnnnnnnnnnnnnnnnnnnnnnnnnnnnnnnnnnnnnnnnnnnnnnnnnnnnnnnnnnnnnnnnnnnnnnnnnnnnnnnnnnnnnnnnnnnnnnnnnnnnnnnnnnnnnnnnnnnnnnnnnnnnnnnnnnnnnnnnnnnnnnnnnnnnnnnnnnnnnnnnnnnnnnnnnnnnnnnnnnnnnnnnnnnnnnnnnnnnnnnnnnnnnnnnnnnnnnnnnnnnnnnnnnnnnnnnnnnnnnnnnnnnnnnnnnnnnnnnnnnnnnnnnnnnnnnnnnnnnnnnnnnnnnnnnnnnnnnnnnnnnnnnnnnnnnnnnnnnnnnnnnnnnnnnnnnnnnnnnnnnnnnnnnnnnnnnnnnnnnnnnnnnnnnnnnnnnnnnnnnnnnnnnnnnnnnnnnnnnnnnnnnnnnnnnnnnnnnnnnnnnnnnnnnnnnnnnnnnnnnnnnnnnnnnnnnnnnnnnnnnnnnnnnnnnnnnnnnnnnnnnnnnnnnnnnnnnnnnnnnnnnnnnnnnnnnnnnnnnnnnnnnnnnnnnnnnnnnnnnnnnnnnnnnnnnnnnnnnnnnnnnnnnnnnnnnnnnnnnnnnnnnnnnnnnnnnnnnnnnnnnnnnnnnnnnnnnnnnnnnnnnnnnnnnnnnnnnnnnnnnnnnnnnnnnnnnnnnnnnnnnngtctccctctgttgcccagactggagtgcagtggtgcaatcacggctcactgcagcctcaacctcccaggttcaagcaattctcccacctcagcctcctgagtagctgggannnnnnnnnnnnnnnnnnnnnnnnnnnnnnnnnnnnnnnnnnnnnnnnnnnnnnnnnnnnnnnnnnnnnnnnnnnnnnnnnnnnnnnnnnnnnnnnnnnnnnnnnnnnnnnnnnnnnnnnnnnnnnnnnnnnnnnnnnnnnnnnnnnnnnnnnnnnnnnnnnnnnnnnnnnnnnnnnnnnnnnnnnnnnnnnnnnnnnnnnnnnnnnnnnnnnnnnnnnnnnnnnnnnnnnnnnnnnnnnnnnnnnnnnnnnnnnnnnnnnnnnnnnnnnnnnnnnnnnnnnnnnnnnnnnnnnnnnnnnnnnnnnnnnnnnnnnnnnnnnnnnnnnnnnnnnnnnnnnnnnnnnnnnnnnnnnnnnnnnnnnnnnnnnnnnnnnnnnnnnnnnnnnnnnnnnnnnnnnnnnnnnnnnnnnnnnnnnnnnnnnnnnnnnnnnnnnnnnnnnnnnnnnnnnnnnnnnnnnnnnnnnnnnnnnnnnnnnnnnnnnnnnnnnnnnnnnnnnnnnnnnnnnnnnnnnnnnnnnnnnnnnnnnnnnnnnnnnnnnnnnnnnnnnnnnnnnnnnnnnnnnnnnnnnnnnnnnnnnnnnnnnnnnnnnnnnnnnnnnnnnnnnnnnnnnnnnnnnnnnnnnnnnnnnnnnnnnnnnnnnnnnnnnnnnnnnnnnnnnnnnnnnnnnnnnnnnnnnnnnnnnnnnnnnnnnnnnnnnnnnnnnnnnnnnnnnnnnnnnnnnnnnnnnnnnnnnnnnnnnnnnnnnnnnnnnnnnnnnnnnnnnnnnnnnnnnnnnnnnnnnnnnnnnnnnnnnnnnnnnnnnnnnnnnnnnnnnnnnnnnnnnnnnnnnnnnnnnnnnnnnnnnnnnnnnnnnnnnnnnnnnnnnnnnnnnnnnnnnnnnnnnnnnnnnnnnnnnnnnnnnnnnnnnnnnnnnnnnnnnnnnnnnnnnnnnnnnnnnnnnnnnnnnnnnnnnnnnnnnnnnnnnnnnnnnnnnnnnnnnnnnnnnnnnnnnnnnnnnnnnnnnnnnnnnnnnnnnnnnnnnnnnnnnnnnnnnnnnnnnnnnnnnnnnnnnnnnnnnnnnnctccagctcttagtctggtaactgcatggtgagtgaacccagggcgcaccctggaaggctgccaagcccctttgtgtgcagagtgctggggactccagactccccacagcagcagagactcgggactgaggtgtgctctgttcacaggacatgctggcatctacttgtcagggctgcgttgctgtggctgtgcaaccttgtgcaagttcctcaacctctctgtgtcttcgtaccctcatctgtaacatgtcaatcgaccttactactcagggttgatgagaagatgaaatgtgcagaaactgcttcactgtgcccacaaatcttgattgtaggaataaattaatgactttttataaatattttgatcagatggactcagatgatcacaaatgtcttcacatgcctatgacacatttgcacacaaactaatgctcgtgtttcccgagcacctggaagacaccagatccatgtgcagtaatgcctggtggctccaggtctgccccgccgtcctggggggccgtgagctttcccagcctcctgcctgtgtttgtttctgtccttggctgcatttccagcccaggctgtttggctctgcccgggaattgtattgattcccctttgtttttcttgtagtcagttactggaataaaatcatctactttaaaa

SEQ ID NO: 19479 - DNA, 1935 bp, Macaca Mulatta
  misc_feature (1)...(1935): n = A,T,C or G
ccatgagtgaagacttccttctggatgctttgtctgaggacttctctggtccacaaaatgcttcatctcttnnnnnnnnnnnnnnnnnnnnnnnnnnnnnnnnnnnnnnnnnnnnnnnnnnnnnnnnnnnnnnnnnnnnnnnnnnnnnnnnnnnnnnnnnnnnnnnnnnnnnnnnnnnnnnnnnnnnnnnnnnnnnnnnnnnnnnnnnnnnnnnnnnnnnnnnnnnnnnnnnnnnnnnnnnnnnnnnnnnnnnnnnnnnnnnnnnnnnnnnnnnnnnnnnnnnnnnnnnnnnnnnnnnnnnnnnnnnnnnnnnnnnnnnnnnnnnnnnnnnnnnnnnnnnnnnnnnnnnnnnnnnnnnnnnnnnnnnnnnnnnnnnnnnnnnnnnnnnnnnnnnnnnnnnnnnnnnnnnnnnnnnnnnnnnnnnnnnnnnnnnnnnnnnnnnnnnnnnnnnnnnnnnnnnnnnnnnnnnnnnnnnnnnnnnnnnnnnnnnnnnnnnnnnnnnnnnnnnnnnnnnnnnnnnnnnnnnnnnnnnnnnnnnnnnnnnnnnnnnnnnnnnnnnnnnnnnnnnnnnnnnnngacaacagaggaaacttccaagccaaaagatgatgaaagaaatacaagttaaagtatctggtaagttgggtgtttatttgtaaatgaagacaactgtacctcctgccagttcatgtgttacagaggagagaagtgaagtccacctcgagtaattcatgctcactttacactgttggcatgaaatgcatactgcaagctctacnnnnnnnnnnnnnnnnnnnnnnnnnnnnnnnnnnnnnnnnnnnnnnnnnnnnnnnnnnnnnnnnnnnnnnnnnnnnnnnnnnnnnnnnnnnnnnnnnnnnnnnnnnnnnnnnnnnnnnnnnnnnnnnnnnnnnnnnnnnnnnnnnnnnnnnnnnnnnnnnnnnnnnnnnnnnnnnnnnnnnnnnnnnnnnnnnnnnnnnnnnnnnnnnnnnnnnnnnnnnnnnnnnnnnnnnnnnnnnnnnnnnnnnnnnnnnnnnnnnnnnnnnnnnnnnnnnnnnnnnnnnnnnnnnnnnnnnnnnnnnnnnnnnnnnnnnnnnnnnnnnnnnnnnnnnnnnnnnnnnnnnnnnnnnnnnnnnnnnnnnnnnnnnnnnnnnnnnnnnnnnnnnnnnnnnnnnnnnnnnnnnnnnnnnnnnnnnnnnnnnnnnnnnnnnnnnnnnnnnnnnnnnnnnnnnnnaatcttcagaaaggagaatgcttaatgtaagccttaaaagcatacaagcacttactgaccaaagcgtaaaagaaatcaagtataggttaaatcgagttcagctctctcaccatgatctatctgtatttcctattaaaaaaggagctttattagttagaactgttctaacatttttcccaaaattaaaaaaattctattaatccactttcatgtttacttataggaaattccttcttgtctgttatacaatgcttttgctaagtggtatttactatgcctgtaacaagaaaattacatattaaatgattcactgcattttttatttgaatttttcaaggtatctgcatataaaatcttcagctggtggatggtgacttttgaagaacaaaagcctttggcaacaaaacaattgttctgggtgatttctagactggtttttgttgagcctttgaacatcctaaatattggtttgtttttcttttccagaaagaaaatgaatttgactggttcacctgtgttattgtactgggtattgataaactttgaatttttttaattgccttcaattgggagagaaagaaagctttatatttgtaataaatatatttgataaagtttcttaaagcaacacnnnnnnnnnnnnnnnnnnctaagcgaatttttgcacagtctacacacagtgcctgtaaatctcatttgtattt

SEQ ID NO: 19480 - DNA, 1685 bp, Macaca Mulatta
  misc_feature (1)...(1685): n = A,T,C or G
ggcaaaattttgaaagttatcaggaagaatttggtcaaaaaatgcttagaactctttactgaactggcggaagataaagagaactacaagaagttctatgagcagttctctaaaaacataaagcttggaatacatgaagactcacaaaatcggaagaagctttcagagctgttaaggtactacacatctgcctctggcgatgagatggtttctctcaaggattactgcaccagaatgaaggaaaaccagaaacatatctattatatcacaggtgagaccaaggaccaggtagctaactcagcctttgtggaacgtcttcggaaacatggcttagaagtgatctatatgatcgagcccattgatgagtactgtgtccaacagctaaaagaatttgaggggaagacattagtgtcagtcaccaaagagggcttggaacttccagaggatnnnnnnnnnnnnnnnnnnnnnngggagaaaaaaacaaagtttgagaacctctgcaaaatcatgaaagacatactggagaaaaaagttgaaaaggtggttgtgtcaaaccgattggtgacgtctccatgctgtattgtcacaagcacatatggctggacagcaaacatggagagaatcatgaaagctcaagccctaagagacaactcaacaatgggttacatggcagcaaagaaacacctggagataaaccctgaccattccattattgagaccttaaggcaaaaggcagaggctgataagaacgacaagtctgtgaaggatctggtcatcttgctttacgaaactgcactcctgtcttctggcttcagtctggaagatccccagacacatgccaacaggatctacaggatgatcaaacttggtctgggtatcgatgaagatgatcctactgctgatgataccagtgcagctgtaactgaagaaatgccgcccctcgaaggagatgacgacacatcacgcatggaagaagtagactaacctcccgctgagggatgacttacctgttcaaaactctacaaattcttctgaaaatatattttccaggaaggttttcaattatttatggataatattaaaaaatcttgtttaggcatagacaaacactatctttaaaaggggaaaagataaaaatatgcacttacctatttttctaaaaagaatgaccttagatggaatacccatttaaggccagcataaaatgtcgcaaaagattcatggctattaataggaacgttatgttggttaaagagttatattacccagaatttcggcgcggtcctattaatctaatatcaaaatacggaccaaacgtagtggggagacaaatcaccacatgctggcgttttgattaaaacaaaacgtgctttattcgctacaacacaataagactaggacactttaaccattcagcaatggaagattgccgaatcggacaaatattaaataatcgtatttttcataagtcctcatgaaatcagttcatatagagaaatgaatattagaaacaagcggattaggttctaacctatgnagaataagatttcgtatctccatctttttatctataatacaccacagagtagagagtgtagagaccaaacagcaaatatgattaggtttaaaatcacaatgtataataagaaatttaaactcatgtatgaaaagtattttcaaacaca

SEQ ID NO: 19481 - DNA, 314 bp, Macaca Mulatta
aggtctacatccgcacgccttccggtgaggtgcagacagtccttgtccaggacagccccccagcaacagctgcagccacctctaacaccacctgtagcagccctgcatcccgtgctccccatctgagtgggaccagcaaaaagcactcagctgcaattctccgaaaagagcgtcccctgccaaagattgcccccgccgggagcatcatcagcctgaatgcagcccagttggcggcagctgcccaggcaatgcagaccatcaacatcaatggtgtccaggtccagggcgtgcctgtcactatcaccaacacaggc

SEQ ID NO: 19482 - DNA, 585 bp, Macaca Mulatta
ttgttttatcctgattttggggggaaatgtgtcaaagtcccctcaggaatttcagaggagggaacatcttaagaggctttctctaaagtttcctatgtatatgagtatgctcacttaaatttacagaatgaggtgagctgtgttaaacctcagagtttaaaagctactgataaactgaagaaagtgtctatattggaactagggtcatttgaaagcttcagtctctgagcatgacctttagtctgtggactccatttaaaaataggcatgaataagatgactaagaatgtaatggggaagaattgccctgcctgcccatcccagagccataatgtcaactttgctagagctatttttacctatctatttatcgttcttgatcataagccacttatttatatcatgtatctctaaggacctaaaagcactttatgtagtttttaatattaatcttaagatctagttacggtaactaaaacagcctgtctcccaaatccagtggaaacaagtgcatagatgtgaattggttcttaggtgccccacttcccaattcattaggtatgactggacatacagacaaggatc

SEQ ID NO: 19483 - DNA, 7361 bp, Macaca Mulatta
  misc_feature (1)...(7361): n = A,T,C or G
aggtcagacttgttctaggccaggaggagctgaggctgcagaccccagcagagacgctgctgagtgactccgttccccacactacagtgctgactgtcgtagagggctgggccacattgtcagtcgatgggtttctgaacgcttcctctgcagtcccaggagcccccctcgaggttccctatgggctctttgttgggggcactgggagccttggcctgccctacctgaggggaaccagccgacccctgaggggttgcctccatgcagccaccctcaatggccgcagtctcctccggcctctgacccctgacgtgcatgagggctgtgctgaagagttttctgctggtgatgatgtggccctgggcttctctgggccccactctctggctgccttccctgcctggggcactcaggatgaaggaaccctagagtttacactcaccacacagagccggcaggcacccttggccttccaggcagggggccggcgtggtgattttatctatctagacatatttgnnnnnnnnnnnnnnnnnnnnnnnnnnnnnnnnnnnnnnnnnnnnnnnnnnnnnnnnnnnnnnnnnnnnnnnnnnnnnnnnnnnnnnnnnnnnnnnnnnnnnnnnnnnnnnnnnnnnnnnnnnnnnnnnnnnnnnnnnnnnnnnnnnnnnnnnnnnnnnnnnnnnnnnnnnnnnnnnnnnnnnnnnnnnnnnnnnnnnnnnnnnnnnnnnnnnnnnnnnnnnnnnnnnnnnnnnnnnnnnnnnnnnnnnnnnnnnnnnnnnnnnnnnnnnnnnnnnnnnnnnnnnnnnnnnnnnnnnnnnnnnnnnnnnnnnnnnnnnnnnnnnnnnnnnnnnnnnnnnnnnnnnnnnnnnnnnnnnnnnnnnnnnnnnnnnnnnnnnnnnnnnnnnnnnnnnnnnnnnnnnnnnnnnnnnnnnnnnnnnnnnnnnnnnnnnnnnnnnnnnnnnnnnnnnnnnnnnnnnnnnnnnnnnnnnnnnnnnnnnnnnnnnnnnnnnnnnnnnnnnnnnnnnnnnnnnnnnnnnnnnnnnnnnnnnnnnnnnnnnnnnnnnnnnnnnnnnnnnnnnnnnnnnnnnnnnnnnnnnnnnnnnnnnnnnnnnnnnnnnnnnnnnnnnnnnnnnnnnnnnnnnnnnnnnnnnnnnnnnnnnnnnnnnnnnnnnnnnnnnnnnnnnnnnnnnnnnnnnnnnnnnnnnnnnnnnnnnnnnnnnnnnnnnnnnnnnnnnnnnnnnnnnnnnnnnnnnnnnnnnnnnnnnnnnnnnnnnnnnnnnnnnnnnnnnnnnnnnnnnnnnnnnnnnnnnnnnnnnnnnnnnnnnnnnnnnnnnnnnnnnnnnnnnnnnnnnnnnnnnnnnnnnnnnnnnnnnnnnnnnnnnnnggtcaaccctgtcaatgaccctccccgcatcatcttcccacatggcagcctcatggtgattctggaacacacacagaagccactggggcccgaggttttccaggcctatgacccagactctgcctgtgagggcctcaccttccagttccttggcaccccctctggcctccccgtgcagcgccgagaccagcctggggagccggcaaccgagttctcctgccgggagttggaggccggcagcctagtctatgtccaccgcggtggccctgcacaggacttgacattccgggtcagcgatggactgcaggccagccccccggccacgctgaaggtggtggctgtccggctggccatacagatccaccgcagcannnnnnnnnnnnngcccaaggccctgccatgcccatcttgcccgccaacctgtcggtggagaccaatgccgtggggcaggatgtgagcgtgctgtttcgcgtcaccagagccctgcagtttggggagctgcagaagcagggggcaggtggggtggagggtgctgagtggtgggctacacaggcgttccaccagcgggatgtggagcagggccgcatgaggtacctgagcaccgacccacagcaccacacagaggacaccgtggagaacctggccctggaggtgcaggtgggccaggagatcctgagcaatctgtccttcccagtgacnnnnnnnnnnnnnnnnnnnnnnnnnnnnnnnnnnnnnnnnnnnnnnnnnnnnnnnnnnnnnnnnnnnnnnnnnnnnnnnnnnnnnnnnnnnnnnnnnnnnnnnnnnnnnnnnnnnnnnnnnnnnnnnnnnnnnnnnnnnnnnnnnnnnnnnnnnnnnnnnnnnnnnnnnnnnnnnnnnnnnnnnnnnnnnnnnnnnnnnnnnnnnnnnnnnnnnnnnnnnnnnnnnnnnnnnngggtgacctatggggccacggcacgtgcctcggaggcagtcgaggacaccttccgtttccgtgtcacagctccgccatatttctccccgctctataccttccccatccacattggtggtgacccagacgcgcccgtcctcaccaatgtcctcctcatggtgcccgagggtggtgagggtgtcctctctgctgaccacctctttgtcaagagtctcaatagtgccagctacctctatgaggtcatggagcggccccgccatgggaggttggcttggcgtgggacacaggacaagaccactatggtgacatccttcaccaatgaagacctgttgcgtggccggctggtctaccagcatgatgactccgagaccacagaagatgatatcccatttgttgctacccgccagggtgagagcagtggtgacatggcctgggaggaggtacggggagtcttccgggtggccatccaacccgtgaatgaccannnnnnnnnnnnnnnnnnnnnnnnnnnnnnnnnnnnnnnnnnnnnnnnnnnnnnnnnnnnnnnnnnnnnnnnnnnnnnnnnnnnnnnnnnnnnnnnnnnnnnnnnnnnnnnnnnnnnnnnnnnnnnnnnnnnnnnnnnnnnnnnnnnnnnnnnnnnnnnnnnnnnnnnnnnnnnnnnnnnnnnnnnnnnnnnnnnnnnnnnnnnnnnnnnnnnnnnnnnnnnnnnnnnnnnnnnnnnnnnnnnnnnnnnnnnnnnnnnnnnnnnnnnnnnnnnnnnnnnnnnnnnnnnnnnnnnnnnnnnnnnnnnnnngcctgtcctcaccaatgtcctcgtggtgcctgaggatgatgagggtgtcctgtctactgaccagctcttccagagtctcaacagtgccagttacctctatgaggtcatggagtggcccccgccatgggaggttgacttggcatgggacacaggacaagaccactgtggtgacatccttcaccaatggagacctgttgtgtggccggctggtctaccagcatgatgattctgaggtcacagaaggtgataccccatttgttgctacccgccaggatgagagcagtggtgacatggcctgggaggaggtacggggtgtcttccaagtggccatccagcccgtgaatgaccacgccccaatgcagatcatcagccacgtcttccatgtggcccggggtaggtggcggctgctgactatagtcgacgtggccttcagcagtgctgattcgggctttgctgatgcccagctggtgctgacccgcaaggacctcctctttggcagtatcatgctgtggatgagcccatgcagcccatctactgcttcatccaggagggacctcaggaagaggtgagtcctgtttgcgcactggggctgaccacgctggatccagctgcaggtgtctgatgggcagcaccaaaccatcactctgctggaagtgcaggcctcagagccctacctctgtgtggccagtggctctggcctcacggtccctcaaggaggccagggtaccatcaacacggccgagctccacctggacaccaacctcgacatccgcagtggggatgaggtccactaccacgtcacagagtgtagtcgctagggacaattgctccgggccactcagccagccacagtcgtctcccagcagtacttgctgcatggggccattcnnnnnnnnnnnnnnnnnnnnnnnnnnnnnnnnnnnnnnnnnnnnnnnnnnnnnnnnnnnnnnnnnnnnnnnnnnnnnnnnnnnnnnnnnnnnnnnnnnnnnnnnnnnnnnnnnnnnnnnnnnnnnnnnnnnnnnnnnnnnnnnnnnnnnnnnnnnnnnnnnnnnnnnnnnnnnnnnnnnnnnnnnnnnnnnnnnnnnnnaggcagcccaggaggcagtgccgctggcagacattgtattctcagtgaagaagccaccgagtgccggctacctggtgatggtgtctcgtggcgtcttggcagatgagccacccagcctggaccccgtgcagagcttctcccaggaggcagtggatgtgggcagggtcctgtacctgcactcctgccctgaggcctggagcgatgccttctcactggatgtgcccttgggcctgggtgctcccctcaagggtgtccgcgtggagctagaggtgctgcctgctgccatcccactggagatgcaaaacttcagtgaccccgagggtggcagcctcaccctggcccctccactgctccgtgtcaccgggccctacttccccactctcccgggcctcggtctgcaggtgctggagccaccccggcatggggccctacagaaagaggacgaacctcaagccaggaccctcagcgccttctcctggagnnnnnnnnnnnnnnnnnnnnnnnnnnnnnnnnnnnnnnnnnnnnnnnnnnnnnnnnnnnnnnnnnnnnnnnnnnnnnnnnnnnnnnnnnnnnnnnnnnnnnnnnnnnnnnnnnnnnnnnnnnnnnnnnnnnnnnnnnnnnnnnnnnnnnnnnnnnnnnnnnnnnnnnnnnnnnnnnnncagatgtgggaggaggccactgtgcccatcccaacagaggctctgaggagcatggatggttactctgggcccaaggacctggtctggaccattgagcagcccagcaatgggcgggtagtgctgtgggcggtgccaggcaccgaggtgtgcagcttcacgcaggcccagctggacggcaggcttgtgctgttctcacacagagnnnnnnnnnnnnnnnnnnnnnnnnnnnnnnnnnnnnnnnnnnnnnnnnnnnnnnnnnnnnnnnnnnnnnnnnnnnnnnnnnnnnnnnnnnnnnnnnnnnnnnnnnnnnnnnnnnnnnnnnnnnnnnnnnnnagggtccgtgcagccactcagcagtcagatcctcagagccagctccagcgcaggcaccgacccccagctcctgctctaccgtgtggtgcggggcccccagctaggccggctgttccatgcccagcaggacagcacaggggaggccctggtgaacttcactcaggcagaggtnnnnnnnnnnnnnnnnnnnnnnnnnnnnnnnnnnnnnnnnnnnnnnnnnnnnnnnnnnnnnnnnnnnnnnnnnnnnnnnnnnnnnnnnnnnnnnnnnnnnnnnnnnnnnnnnnnnnnnnnnnnnnnnnnnnnnnnnnnnnnnnnnnnnnnnnnnnnnnnnnnnnnnnnnnnnnnnnnnnnnnnnnnnnnnnnnnnnnnnnnnnnnnnnnnnnnnnnnnnnnnnnnnnnnnnnnnnnnnnnnnnnnnnnnnnnnnnnnnnnnnnnnnnnnnnnnnnnnnnnnnnnnnnnnnnnnnnnnnnnnnnnnnnnnnnnnnnnnnnnnnnnnnnnnnnnnnnnnnnnnnnnnnnnnnnnnnnnnnnnnnnnnnnnnnnnnnnnnnnnnnnnnnnnnnnnnnnnnnnnnnnnnnnnnnnnnncggtgggggtacccaacaggatggcttccactttcgtgcccacctccaggggccagcaggggccaccgtggctggaccccaaacctcagaggcttttgccatcacggtgcgggatgtaaatgagcggccccctcagccacaggcctctgtcccactccggatcacccgaggctctcgcgcccccatctcccgggcccagctgagcgtcgtggacccagactcagctcctggggagattgagtatgaggtccagcgggcaccccacaacggcttcctcagcctggtgggtggtggcccggggcccgtgacccacttcacgcaagccgatgtggattcggggcggctggccttcgtggccaacgggagcagcgtggcaggcgtcttccagctgagcatgtctgatggggccagcccaccgctgcccatgtccctggccgtggacatcctaccatccgccatcgaggtgcagctgcaggcacccctggaggtgccccaagctttggggcgctcctcactgagccagcagcagctccgggtggtttcagatagggaggagccagaggcagcataccgcctcatccagggaccgaagtacgggcatctcctggtgggtgggcggcccgcctcggccttcagccaactccagatagaccagggcgaggtggtctttgccttcaaaaacttctcctcctctcatgaccacttcagagtcctggcactggctaggggtgtcaacgcatcagccgtagtgaacatcactttgagggctctgctgcacgtgtgggcaggtgggccatggccccagggtgctaccctgcgcctggacccaaccatcctagatgctggcgagctggccaaccgcacaggcagtgtgccccacttccgcctcctggagggaccccggcatggccgcgtggtccgtgtgccccgaggcaggacggagcctgggggcagccagctggtggagcagttcactcttttttaccttgaggatgggaggctggggctggaggtgggcaggccagagggaagggcccccagccccacaggcgacagtctcactctggagctgtgggcacagggcgtcccacctgctgtggcctccctggactttgccactgagccttacaatgctgcccggccctacagcgtggccctgctcagtgtccccgaggccacccggatggaagcagggaagccagagagcagcacccccacaggcgagccaggccccatggcatctagccctgtgcctgctgtggccaagggaggcttcctgggcttccttgaggccaacatgttcagtgtcatcatccccgtgtgcctggtccttctgctcctggcgctcatcttgcccctgctcttctacctccgaaaacgcaataagannnnnnnnnnnnnnnnnnnnnnnnnnnnnnnnnnnnnnnnnnnnnnnnnnnnnnnnnnnnnnnnnnnnnnnnnnnnnnnnnnnnnnnnnnnnnnnnnnnnnnnnnnnnnnnnnnnggccaggggccccctcccggtagccagcctgacccagagctgctgcaataaaggcgngaacccaaccctgcccttaagaatggcca

SEQ ID NO: 19484 - DNA, 2955 bp, Macaca Mulatta
  misc_feature (1)...(2955): n = A,T,C or G
nagcaatcaatgcctgtgaaatcagcaatggaggttgctctgccaaggctgactgtaagagaaccaccccaggaaggcgagtgtgcacgtgcaaagcaggctacacgggtgatggcattgtgtgcctgnnnnnnnnnnnnnnnnnnnnnnnnnnnnnnnnnnnnnnnnnnnnnnnnnnnnnnnnnnnnnnnnnnnnnnnnnnnnnnnnnnnnnnnnnnnnnnnnnnnnnnnnnnnnnnnnnnnnnnnnnnnnnnnnnnnnnnnnnnnnnnnnnnnnnnnnnnnnnnnnnnnnnnnnnnnnnnnnnnnnnnnnnnnnnnnnnnnnnnnnnnnnnnnnnnnnnnnnnnnnnnnnnnnnnnnnnnnnnnnnnnnnnnnnnnnnnnnnnnnnnnnnnnnnnnnnnnnnnnnnnnnnnnnnnnnnnnnnnnnnnnnnnnnnnnnnnnnnnnnnnnnnnnnnnnnnnnntcggcccaggccccttcctgttttctacctttatctgcagcctttgatgaggaagcccgggtnggttaaagactgggacaaacagggcttaatgccccaggttcttcggtatcatgtggtcgcctgccaccagctgcttctggaacacttgatattgatctcaaatgctacttccctccaaggagagccaatagtcatctccgtctctcagnnnnnnnnnnnnnnnnnnnnnnnnnnnnnnnnnnnnnnnnnnnnnnnnnnnnnnnnnnnnnnnnnnnnnnnnnnnnnnnnnnnnnnnnnnnnnnnnnnnnnnnnnnnnnnnnnnnnnnnnnnnnnnnnnnnnnnnnnnnnnnnnnnnnnnnnnnnnnnnnnnnnnnnnnnnnnnnnnnnnnnnnnnnnnnnnnnnnnnnncaggactcaggtttgctgagtgtcatcactgatcccatccacaccccagtcactctcttctggcccactgaccgagccctccaagccctacctgctgaacaacaggacttcctgttcaaccaagacaacaaggacaagctgaaggagtatttgaagtttcatgtgatacgagatgccaaggnnnnnnnnnnnnnnnnnnnnnnnnnnnnnnnnnnnnnnnnnnnnnnnnnnnnnnnnnnnnnnnnnnnnnnnnnnnnnnnnnnnnnnnnnnnnnnnnnnnnnnnnnnnnnnnnnnnnnnnnnnnnnnnnnnnnnnnnnnnnnnnnnnnnnnnnnnnnnnnnnnnnnnnnnnnnnnnnnnnnnnnnnnnnnnnnnnnnnnnnnnnnnnnnnnnnnnnnnnnnnnnnnnnnnnnnnnnnnnnnagggtgagaagcagaagtgtctctacaacctgcccttcaagaggaacctggaaggctgccgggagtggtgcagcctggtgatacagatccccaggtgctgcaagggctacttcgggcgagactgtcaggngcctgccctggaggaccagatgccccgtgtaataaccggggtgtctgccttgatcagtacaccggcaccggaatgtgtaaatgcaacaccggcttcaacgggacggcgtgtgagatgtgctggccggggagattcgggcctaattgtctgcncctgtggctgctcggaccatggacagtgcgatgatggcatcacgggctccggacagtgcctctgtgaaacgggctggacaggcccctcgtgtgacactcaggcagngcagttttgcctgcagtgtgtacgcctccttgttctcctcatgccacctgtaaagagaacaacacgtgtgagtgtaacctggattatgaaggtgacggaatcacatgcacagncagtcgtggatttctgcaaacaggacaacgggggctgtgcaaaggtggccagatgctcccagaagggcacgaaggtctcctgcagctgccagaagggatacaaaggggacgggctcagctgcacagagatagacccctgtgcggacggccttaatggagggtgtcacgagcacgccacctgtaagatgacaggcccggngggcaagcacaagtgtgagtgtaaaagtcactatgtgggagatgggctgaactgtgagccggagcagctgcccatcgaccgctgcttacaggacaacgggcagtgccacgcggatgccaaatgtgtcgacctccatttccaggntccagataccactggttggggtgttccatctacgctccccgctgggccagtataagctgacctttgacaaagccaaagaggcctgtgccaacgaaactgcgaccatggcaacctacagccagctctcctatgcccagaaggnnggccaagtaccacctgtgctcagcaggctggctggagagtgggcgggttgcctaccccacagccttcgcctcccagaactgtggctctggtgtggttgggatagtggactatggacctagacccaacaagagtgaaatgtgggatgtcttctgctatcggatgaaaggnaggaagtgctggcctattctaacagctcagctcgaggccgtgcatttctagaacacctgactgacctgtccatccgtggcaccctctttgtgccgcagaacagcgggctgggggagaannagaccctgtctgggcgggacatcgagcaccacctcgccaatgtcagcatgtttttctacaatgaccttgtcaatggcaccaccctgcaaacaaggctggggagcaagctgctcatcaccgccagccacgacccactccaaccgngacggagaccaggtttgttgatggaagagccattctgcagtgggacatctttgcctccaatgagatcattcatatcatttccaggcctttagaagcaccccctgccccnnnnnnttgacccacactggcttgggagcagggatcttctttgccgtcatcttggtcattggagctgttgccttggctgcatattctttctttcggctaaaccggagaacaataggcttccagcattttgag

SEQ ID NO: 19485 - DNA, 539 bp, Macaca Mulatta
  misc_feature (1)...(539): n = A,T,C or G
nnnnnnnnnnnnnnnnnnnnnnnnnnnnnnnnnnnnnnnnnnnnnnnnnnnnnnnnnnnnnnnnnnnnnnnnnnnnnnnnnnnnnnnnnnnnnnnnnnnnnnnnnnnnnnnnnnnnnncnnnnnnnnnnnnnnnnnnnnnnnnnnnnnnnnnnnnnnnnnnnnnnnnnnnnnnnnnnnnnnnnnnnnnnnnnnnnnnnnnnnnnnnnnnnnnnnnnnnnnnnnnnnnnnngaaataaaacatttatttgttttttaaacaattaaaaaatattgtctgggcaggccctttgcttagacctgtgtgtcctgctcagccactctgtcgaccacactgacccaggggctgccccggacatagaagcggaggggtttccgggcccactcccctgcatagccaatgcccacccgggctgctgtcactacagctggctcactgggctccacgggaccacgctccagccatatagcttcatcctgtgccaggtccctctggtcaaagctcttgttgatgccagggcgctggcacagcnttggaggg

SEQ ID NO: 19486 - DNA, 1299 bp, Macaca Mulatta
  misc_feature (1)...(1299): n = A,T,C or G
aactcggcttcggaggacagaatctgtcccctcggacatcaacaacccggtggacagagcagccgaaccccattttggaacccttcccaaagcactgacaaagaaggnnnnnnnnnnnnnnnnnnnnnnnnnnnnnnnnnnnnnnnnnnnnnnnnnnnnnnnnnnnnnnnnnnnnnnnnnnnnnnnnnnnnnnnnnnnnnnnnnnnnnnnnnnnnnnnnnnnnnnnnnnnnnnnnnnnnnnnnnnnnnnnnnnnnnnnnnnnnnnnnnnnnnngctgcctacttcattcatcatagacagcagtttatctttccagnnnnnnnnnnnnnnnnnnnnnnnnnnnnnnnnnnnnnnnnnnnnnnnnnnnnnnnnnnnnnnnnnnnnnnnnnnnnnnnnnnnnnnnnnnnnnnnnnnnnnnnnnnnnnnnnnnnnnnnnnnnnnnnnnnnnnnnnnnnnnnnnnnnnnnnnnnnnnnnnnnnnnnnnnnnnnnnnnnnnnnnnnnnnnnnnnnnnnnnnnnnnnnnnnnnnnnnnnnnnnnnnnnnnnnnnnnnnnnnnnnnnnnnnnnnnnnnnnnnnnnnnnnnnnnnnnnnnnnnnnnnnnnnnnnnnnnnnnnnnnnnnnnnnnnnnnnnnnnnnnnnnnnnnnnnnnnnnnnnnnnnnnnnnnnnnnnnnnnnnnnnnnnnnnnnnnnnnnnnnnnnnnnnnnnnnnnnnnnnnnnnnnnnnnnnnnnnnnnnnnnnnnnnnnnnnnnnnnnnnnnnnnnnnnnnnnnnnnnnnnnnnnnnnnnnnnnnnnnnnnnnnnnnnnnnnnnnnnnnnnnnnnnnnnnnnnnnnnnnnnnnnnnnnnnnnnnnnnnnnnnnnnnnnnnnnnnnnnnnnnnnnnnnnnnnnnnnnnnnnnnnnnnnnnnnnnnnnnnnnnnnnnnnnnnnnnnnnnnnnnnnnnnnnnnnnnnnnnnnnnnnnnnnnnnnnnnnnnnnnnnnnnnnnnnnnnnnnnnnnnnnnnnnnnnnnnnnnnnnnnnnnnnnnnnnnnnnnnnnnnnnnnnnnnnnnnnnnnnnnnnnnnnnnnnnnnnnnnnnnnnnnnnnnnnnnnnnnnnnnnnnnnnnnnnnnnnnnnnnnnnnnnnnnnnnnnnnnnnnnnnnnnnnnnnnnnnnnnnnnnnnnnnnnactgtttggtatgagctgcaagcaagagactggcccttgaagaaccaggctgcggaggcatccatctggcagattggaagcggggaaggaatgaagcgtgtcctggcttctgtcagcctggggaaggaagtcagt

SEQ ID NO: 19487 - DNA, 279 bp, Macaca Mulatta
atgaagctctgcgtgactgtcctgtctctcctcgtgctagcagctgccttctgctctccagcactctcagcaccaatgggctcagaccctcccacctcctgctgcttttcttacaccgcgaggaagcttcctcgcaactttgtggtagattactacgagaccagcagcctctgctcccagccagctgtggtattccagaccaaaagaggcaagcaagtctgcgctgaccccagtgagacctgggtccaggagtatgttaatgacctggaactgaactga

SEQ ID NO: 19488 - DNA, 1397 bp, Macaca Mulatta
  misc_feature (1)...(1397): n = A,T,C or G
gaaactggaggagcaggaccgccgggcactgagcatcaaggagcagctgcagcaggagcatcgcttcctgaagcggcgcctggagcagctgtcggtgcagagtgtggagcgcgtgcgcacagatagcacaggctccgccgtctccacggacgactcagagcaagngaagtggacatagagggcatggagtttggccctggtgagctggacagtgttggcagcagcagtgacgcggacgaccactacagcctgcagagtggcagcggcggcgacagtggctttgggccccactgccggcggctgggccgccccgccctctcgtaggcccgtgccctctgctccttggcctgcctgctcgccagccacgcgtgtcagccctccagttctccttcagttgacgccagcctctccacaggcccactgctgtgccattctggaagctccagctgccacctgggctgcctggcactgcctgcttgccggtcagggcctgccgagctgcctgcccctctcagctgggcagagtcccctgcaaggaggcagggcccagcttccacgtccggagccctggtcagcatagccgcccacggtctgttctcagattcctaatcattccagaagtattaaatatctttgctgcaaacctcggcaggtgccgtgtgaggggcttaatgaccaccacagggagctcannnnnnnnnnnnnnnnnnnnnnnnnnnnnnnnnnnnnnnnnnnnnnnnnnnnnnnnnnnnnnnnnnnnnnnnnnnnnnnnnnnnnnnnnnnnnnnnnnnnnnnnnnnnnnnnnnnnnnnnnnnnnnnnnnnnnnnnnnnnnnnnnnnnnnnnnnnnnnnnnnnnnnnnnnnnnnnnnnnnnnnnnnnnnnnnnnnnnnnnnnnnnnnnnnnnnnnnnnnnnnnnnnnnnnnnnnnnnnnnnnnnnnnnnnnnnnnnnnnnnnnnnnnnnnnnnnnnnnnnnnnnnnnnnnnnnnnnnnnnnnnnnnnnnnnnnnnnnnnnnnnnnnnnnnnnnnnnnnnnnnnnnnnnnnnnnnnnnnnnnnnnnnnnnnnnnnnnnnnnnnnnnnnnnnnnnnnnnnnnnnnnnnnncagcccctgggctgtgcctggttcctctccagctcccgctcgcccacgcccacccattgtgcctgcctgtccgcgtaggagaggggcgtctcttcctggctagggctggggtgagctggaggctggtaaaagttgcagccactgggtcctcaggggcttactcatctcccttttttaaannnnnnnnnnnnnnnnnnntgctgcactgcccagcagcccagtgagggctccgggagccaccttaggaaagggctcttcaccagctctgctgcggcagcctcagcaggcagagaggct

SEQ ID NO: 19489 - DNA, 178 bp, Macaca Mulatta
tctgccccagaacctaccagagcaaagaagggcaggagaggaagatttgtctgcttgctacactcgcacttatcaaacgtgtaatcttctgtacttattattgataagatttacctttatgtaagtttatagccttgaagtgttttcacattgcttctccctttagttctgctgtctc

SEQ ID NO: 19490 - DNA, 250 bp, Macaca Mulatta
  misc_feature (1)...(250): n = A,T,C or G
cagttcagggcgacagctcagtgaagtcttcattcagttaccttcaaggaaagaattaccagaatactatgaattaattagaaagccagtggatttcnnnnnnnnnnaggaaaggattcgtaatcataagtaccggagcctgggcgacctggagaaggatgtcatgcttctctgtcacaacgctcagacattcaacctggaaggatcccangatctatgaagaccccatcgtttcacagtcagtgtttaa

SEQ ID NO: 19491 - DNA, 765 bp, Macaca Mulatta
ggatttcattgtataacacatctatgaaggttatctaccttgcctgctcctatgccacagtgtacctgatctacctgaaatttaaggcaacctacgatggaaatcacgataccttccgagtggagtttctggtggtccctgtgggaggcctctcctttttagtcaatcatgatttctctcctcttgagatcctctggaccttctccatctacctggagtccgtggctatccttccacagctctttatgatcagcaagactggggaggccgagaccatcaccacgcactacttgttcttccttggcctctatcgtgctttgtatcttgtcaactggatctggcgcttttactttgagggcttctttgacctcattgctgtggtggccggcgtagtccagaccatcctatactgtgacttcttctacttgtacattacaaaagtactcaagggaaagaagctcagtttgccagcataagtgccaaagatcatcaccagcatctgtccttcagggtgctcggacagaattcttaccacagcaaaggcataagatgcttgatacggaaaatcagaaacttaactcttttgttgcagatagtcatcagtggctctgtaagaacgcagaggaaaagagccagaaggtttctgtttaatgcatcttgccttatcttttttttattactggtgtacaaagattttttttacacaaaagaaaacttaatgcctgttattaaataaatttcagtggtgttaggctttccaattga

SEQ ID NO: 19492 - DNA, 3270 bp, Macaca Mulatta
  misc_feature (1)...(3270): n = A,T,C or G
ggtggccgaggcagtcgggcgcgcgcgcgaggcttcccctcgcttggcggctgcggcggcttctttgtttcgtgaggagaagcgagacgcccannnnnnnnnnnnnnnnnnnnnnnnnnnnnnnnnnnnnnnnnnnnnnnnnnnnnnnnnnnnnnnnnnngcaggaggccactgtctgcagctcccgtgaagatgtccactccagacccacccctgggcggaactcctcggccgggtccttccccgggccctggcccttcccctggagccatgctgggccctagcccgggtccctcaccgggctccgcccacagcatgatggggcccagcccggggccgccctcagcaggacaccccatccccacccaggggcctggagggtaccctcaggacaacatgcaccagatgcacaannnnnnnnnnnnnnnnnnnnnnnnnnnnnnnnnnnnnnnnnnnnnnnnnnnnnnnnnnnnnnnnnnnnnnnnnnnnnnnnnnnnnnnnnnnnnnnnnnnnnnnnnnnnnnnnnnnnnnnnnnnnnnnnnnnnnnnnnnnnnnnnnnnnnnnnnnnnnnnnnnnnnnnnnnnnnnnnnnnnnnnnnnnnnnnnnnnnnnnnnnnnnnnnnnnnnnnnnnnnnnnnnnnnnnnnnnnnnnnnnnnnnnnnnnnnnnnnnnnnnnnnnnnnnnnnnnnnnnnnnnnnnnnnnnnnnnnnnnnnnnnnnnnnnnnnnnnnnnnnnnnnnnnnnnnnnnnnnnnnnnnnnnnnnnnnnnnnnnnnnnnnnnnnnnnnnnnnnnnnnnnnnnnnnnnnnnnnnnnnnnnnnnnnnnnnnnnnnnnnnnnnnnnnnnnnnnnnnnnnnnnnnnnnnnnnnnnnnnnnnnnnnnnnnnnnnnnnnnnnnnnnnnnnnnnnnnnnnnnnnnnnnnnnnnnnnnnnnnnnnnnnnnnnnnnnnnnnnnnnnnnnnnnnnnnnnnnnnnnnnnnnnnnnnnnnnnnnnnnnnnnnnnnnnnnnnnnnnnnnnnnnnnnnnnnnnnnnnnnnnnnnnnnnnnnnnnnnnnnnnnnnnnnnnnnnnnnnnnnnnnnnnnnnnnnnnnnnnnnnnnnnnnnnnnnnnnnnnnnnnnnnnnnnnnnnnnnnnnnnnnnnnnnnnnnnnnnnnnnnnnnnnnnnnnnnnnnnnnnnnnnnnnnnnnnnnnnnnnnnnnnnnnnnnnnnnnnnnnnnnnnnnnnnnnnnnnnnnnnnnnnnnnnnnnnnnnnnnnnnnnnnnnnnnnnnnnnnnnnnnnnnnnnnnnnnnnnnnnnnnnnnnnnnnnnnnnnnnnnnnnnnnnnnnnnnnnnnnnnnnnnnnnnnnnnnnnnnnnnnnnnnnnnnnnnnnnnnnnnnnnnnnnnnnnnnnnnnnnnnnnnnnnnnnnnnnnnnnnnnnnnnnnnnnnnnnnnnnnnnnnnnnnnnnnnnnnnnnnnnnnnnnnnnnnnnnnnnnnnnnnnnnnnnnnnnnnnnnnnnnnnnnnnnnnnnnnnnnnnnnnnnnnnnnnnnnnnnnnnnnnnnnnnnnnnnnnnnnnnnnnnnnnnnnnnnnnnnnnnnnnnnnnnnnnnnnnnnnnnnnnnnnnnnnnnnnnnnnnnnnnnnnnnnnnnnnnnnnnnnnnnnnnnnnnnnnnnnnnnnnnnnnnnnnnnnnnnnnnnnnnnnnnnnnnnnnnnnnnnnnnnnnnnnnnnnnnnnnnnnnnnnnnnnnnnnnnnnnnnnnnnnnnnnnnnnnnnnnnnnnnnnnnnnnnnnnnnnnnnnnnnnnnnnnnnnnnnnnnnnnnnnnnnnnnnnnnnnnnnnnnnnnnnnnnnnnnnnnnnnnnnnnnnnnnnnnnnnnnnnnnnnnnnnnnnnnnnnnnnnnnnnnnnnnnnnnnnnnnnnnnnnnnnnnnnnnnnnnnnnnnnnnnnnnnnnnnnnnnnnnnnnnnnnnnnnnnnnnnnnnnnnnnnnnnnnnnnnnnnnnnnnnnnnnnnnnnnnnnnnnnnnnnnnnnnnnnnnnnnnnnnnnnnnnnnnnnnnnnnnnnnnnnnnnnnnnnnnnnnnnnnnnnnnnnnnnnnnnnnnnnnnnnnnnnnnnnnnnnnnnnnnnnnnnnnnnnnnnnnnnnnnnnnnnnnnnnnnnnnnnnnnnnnnnnnnnnnnnnnnnnnnnnnnnnnnnnnnnnnnnnnnnnnnnnnnnnnnnnnnnnnnnnnnnnnnnnnnnnnnnnnnnnnnnnnnnnnnnnnnnnnnnnnnnnnnnnnnnnnnnnnnnnnnnnnnnnnnnnnnnnnnnnnnnnnnnnnnnnnnnnnnnnnnnnnnnnnnnnnnnnnnnnnnnnnnnnnnnnnnnnnnnnnnnnnnnnnnnnnnnnnnnnnnnnnnnnnnnnnnnnnnnnnnnnnnnnnnnnnnnnnnnnnnnnnnnnnnnnnnnnnnnnnnnnnnnnnnnnnnnnnnnnnnnnnnnnnnnnnnnnnnnnnnncagatcaaaggcttggagtggctggtgtccctgtacaacaacaacctgaacggcatcctggctgacgagatgggcctggggaagaccatccagaccatcgcgctcatcacgtacctcatggagcacaaacgcatcaacgggccctttctcatcattgtgcctctcnacgctgtccaactgggcgtacgagtttgacaagtgggccccctccgtggtgaaggtgtcctacaaggnnnnnnnnnnnnnnnnnnnnnnnnnnnnnnnnnnnnnnnnnnnnnnnnnnnnnnnnnnnnnnnnnnnnnnnnnnnnnnnnnnnnnnnnnnnnnnnnnnnnnnnnnnnnnnnnnnnnnnnnnnnnnnnnnnnnnnnnnnnnnnnnnnnnnnnnnnnnnnnnnnnnnnnnnnnnnnnnnnnnnnnnnnnnnnnnnnnnnnnnnnnnnnnnnnnnnnnnnnnnnnnnnnnnnnnnnnnnnnnnnnnnnnnnnnnnnnnnnnnnnnnnnnnnnnnnnnnnnnnnnnnnnnnnnnnnnnnnnnnnnnnnnnnnnnnnnnnnnnnnnnnnnnnnnnnnnnnnnnnnnnnnnnnnnnnnnnnnnnnnnnnnnnnnnnnnnnnnnnnnnnnnnnnnnnnnnnnnnnnnnnnnnnnnnnnnnnnnnnnnnnnnnnnnnnnnnnnnnnnnnnnnnnnnnnnnnnnnnnnnnnnnnggtggagtatgtcatcaagtgcgacatgtctgcgctgcagcgagtgctctaccgccacatgcaggccaagggcgtgctgctgactgacggctccgagaaggacaagaagg

SEQ ID NO: 19493 - DNA, 775 bp, Macaca Mulatta
gttgccgtagggctttatgccatgtgaatgcaggcatgctggctcccagggccatgaactttgtccagtggaaggccttctttctggagagggaaatctcttagctggcttccttatcgcgggcactggaggctttcagggcctccatccctctcactgtgtccctctctctggaaagcaggaaggagcctatggcatcttccccaacgaaaagcacatccagccaatggcctaaacttcagagtgggccaaaggatccagccctgcccttcagcatcctcagttcctgcagcagagcctagaagacaccctagatgtggcagctgtctcaaacctccaaaagtcctgagtttgaagtatccttgttgacacggccatgaccactttccccgtgggccatggcaatttttacataaaactgaaaagatgttgtgtcttgtgtttttgtcttatttttgttggagccactctgttcctggctcagcctcaaatgcagtatttttgttgtgttctattgtttttatagcagggttggggtggtttttgagccatgcgtgggtggggagggaggtgtttaacggcactgtggccttggtctaacttttgtgtgaaaaaataaacaacattgtctgatagtaacttgaagtattgttcatgggttttgttattcttggggagctgatcttttcctccctggctacttgcgtgctcagtaggagaggtagtgatggggggttggcaggagctggtctgtttgagaatacagaaggtgagc

SEQ ID NO: 19494 - DNA, 2684 bp, Macaca Mulatta
  misc_feature (1)...(2684): n = A,T,C or G
ggggcggggcgcacagagccagaagggcttgcggaaggcggcggagggacnnnnnnnnnnnnnnnnnnnnnnnnnnnnnnnnnnnnnnnnnnnnnnnnnnnnnnnnnnnnnnnnnnnnnnnnnnnnnnnnnnnnnnnnnnnnnnnnnnnnnnnnnnnnnnnnnnnnnnnnnnnnnnnnnnnnnnnnnnnnnnnnnnnnnnnnnnnnnnnnnnnnnnnnnnnnnnnnnnnnnnnnnnnnnnnnnnnnnnnnnnnnnnnnnnnnnnnnnnnnnnnnnnnnnnnnnnnnnnnnnnnnnnnnnnnnnnnnnnnnnnnnnnnnnnnnnnnnnnnnnnnnnnnnnnnnnnnnnnnnnnnnnnnnnnnnnnnnnnnnnnnnnnnnnnnnnnnnnnnnnnnnnnnnnnnnnnnnnnnnnnnnnnnnnnnnnnnnnnnnnnnnnncaaaagcaacaaatgccaccttagacctttggtcatttcttctcaggaatcccaatgataaatatgaaccattttgggaggatgaggagaaaaatgaaagtgggttaactgaatacagattagtctccatcaataaaagcagtcctcttcaaaaaccacttcctgcgttcatctcagaagatgcctccggatatctgaccagctcctggctgacactctttgtcccatctgtgtacaccggggtgtttgtagtcagcctcccgctaaacatcatggccatcgttgtgttcatcctgaaaatgaaggtcaagaagccggcggtggtgtacatgctgcacctggccacggcagatgtgctctttgtgtctgtgctcccctttaagattagctattacttatccggcagtgattggcagtttgggtctgaattgtgtcgctttgtcactgcagcattttactgtaacatgtacgcctctatcttgctcatgacagtcataagcattgaccggtttctggctgtggtgtatcccatgcagtccctctcctggcgtactctgggaagggcttccttcacttgtctggccatttgggctttggccattgcaggggtagtgcctctgctcctcaaggagcaaaccatccaggtgcccgggctcaacatcaccacctgtcatgatgtgctcaatgaaaccttgctcgaaggctactatgcctactacttctcagccttctctgctgtcttcttttttgtgccgctgatcatttccacggtctgttatgtgtctatcattcgatgtcttagctcttccaccgttgccaaccgcagcaagaagtcccgggctttgttcctgtcagctgctgttttctgcatcttcatcatttgcttcggacccacaaacatcctcctgattgcgcattactcattcctttctcacacttccaccacagaggctacctactttgcctacctcctctgtgtctgtgtcagcagcataagctgctgcatcgaccccctcatttactattatgcttcctctgagtgccannnnnnnnnnnnnnnnnnnnnnnnnnnnnnnnnnnnnnnnnnnnnnnnnnnnnnnnnnnnnnnnnnnnnnnnnnnnnnnnnnnnnnnnnnnnnnnnnnnnnnnnnnnnnnnnnnnnnnnnnnnnnnnnnnnnnnnnnnnnnnnnnnnnnnnnnnnnnnnnnnnnnnnnnnnnnnnnnnnnnnnnnnnnnnnnnnnnnnnnnnnnnnnnnnnnnnnnnnnnnnnnnnnnnnnnnnnnnnnnnnnnnnnnnnnnnnnnnnnnnnnnnnnnnnnnnnnnnnnnnnnnnnnnnnnnnnnnnnnnnnnnnnnnnnnnnnnnnnnnnnnnnnnnnnnnnnnnnnnnnnnnnnnnnnnnnnnnnnnnnnnnnnnnnnnnnnnnnnnnnnnnnnnnnnnnnnnnnnnnnnnnnnnnnnnnnnnnnnnnnnnnnnnnnnnnnnnnnnnnnnnnnnnnnnnnnnnnnnnnnnnnnnnnnnnnnnnnnnnnnnnnnnnnnnnnnnnnnnnnnnnnnnnnnnnccagcaattatggaaataatctctgattccctgatntaatatgcaaagtctaggttggtagagtttaaccctgaacatttgatggtgttcatcaacagtgagagactccatagtttgggcttgtaccacttttgcaaataagtgtattttgaagttgtttgacagcaaggtttaagttattaagggataagactcactactatctgtgtgtagaagttctagtgttttcagttttaaacatatccaactttgaattcctaaaattatggaaacagatgaaaagcccctattttgatatgggtagtattttttacattttacatactgtatacataagccaaaactgagcataagtcctctagtgaatgtaggctggctttcagagtagcctattcctgagagctgcatgcgtccgcccctgatggaggactccaagcagcagacacatgccagggccatgttagacacagattggccagagaccttcctgctgaacctcacagaaagcaatgagactggggccaccacatttgctccatcctcctaggattggctgtgaactgatcatgtttatgagaaactggcaaagcagaatgtgatatcctaggaggtaatgaccatgaaagacttctctacccatcttaaaaacaacgaaagaaggcatggacttctggatgcccatctgctgggtg

SEQ ID NO: 19495 - DNA, 344 bp, Macaca Mulatta
  misc_feature (1)...(344): n = A,T,C or G
ggcttggccatcacgtttgtatcagatgagaatgataccagcatcctcagtatgggcagatccccttgaggtcagtgttaggagctgtctgatgagacaggcatctcctcnnnnttgaacagacacggtagaagactcgcccattctggaatgtgaccgtctgtccttcaggagaggacaccagggtgggggtgaaggagacactactgcccccacccctgacagcccccaccccatggcttccatcttttgcatcaccaccactcctgaacccccatttctgatttgtcagaattttttttaacaaaactaaaaatgaaacacatgtgtctgtggtatctata

SEQ ID NO: 19496 - DNA, 999 bp, Macaca Mulatta
  misc_feature (1)...(999): n = A,T,C or G
cgattaagttgggtagcgattaggttggtcacgcnnnnnnnnnntaatcgtnnnnnnnnnnnnnnnnnnaatacactcaatactaactaagggcnattgggaccnnnatnnnnnnnnnnnnnngtttttgtgaatttaatacaacttaattttattaggacaaggctggtgggcactggagtggcaccttccggggccaggagaggcactggggaggggtcacaggatgccacatgggcacctagaagccacagctgccctccacagtgcggcactgcaccatgcgcaggaatgtctcgaccatatccatgtccttcctgaagcagtggagcagcccgtagttcttgagcagtgagtcatcgttctgtgagtgtgcgtcaaacttgctgtaggtctgcttgaagatgtgcccagtccgggggatgccatcttccagcctccacatcaacgtttcgatgccttcctctaggtcctttaggaggtcatggacgtcgctgtccgaggtgtgatgcaacaggttgttggcaaacacactactgaggaactgcacgggctccagccacgactggatgagcagcagggagatgcggagcagctctaggttggatttctgctgcgtttcctccaagttggagggtgtgggaatagagtctgcgaagcagaaggaggcctgggggttctccatgagcgaatgcttcttttcctttgggatataggcttcttcaaactcctggtaggtgtcaaaggccagttggtgcaggcgatgggcttggatcatagcatggtcaaaaagtctggataagggtacgcttgggaccctaccagcctcttgaagccaaggcaggcagaggagggcaaaaaccttcgctagtctccgcatggcccgtgccaacgcccggctcttcggcatacgggcaaaaagagccaaggaagccgcagaacaggaatgttgaaaagaaaaaatannagcctactcgggagcttgtaatccagtcaaaa

SEQ ID NO: 19497 - DNA, 190 bp, Macaca Mulatta
  misc_feature (1)...(190): n = A,T,C or G
agtttaaaggcaggacangttaacttgtatattccatcattcacatttgacatacatgtgtaggaaaagttaaagtgttgattatgtaatcaaagctacctgtggtgatgttgccaccgggttaaaatgtacactggatatgttgttaaacacgtgtctataatggaaacatttacaataaatattctgc

SEQ ID NO: 19498 - DNA, 253 bp, Macaca Mulatta
  misc_feature (1)...(253): n = A,T,C or G
tatgggcccaaggttgacatctggtccctgggcatcatggccatcgaaatgattgaaggggagcctccatacctcaatgaaaaccctctgagannnnnnnnnnnnnnnnnnnnnnnnnnnnnnnnnnnnnnnnnnnnnnnnnnnnnnnnnnnnnnnnnnnnnnnnnnnnnnnnnnnnnnnnnnnnnnnnnnnnnnnnnnnnnnnnnnnnnnnnnnnnnnnnnnnnnnnagcatcaattcctgaagattgccaa

SEQ ID NO: 19499 - DNA, 322 bp, Macaca Mulatta
ggccttggtgcctcttgtatccctaatgctccatagtttggcatttgcatggtttcgaagtcattaaactggttggatgtgtctcaaccttttcccctttttggtttgcctcttcagtttcaacatgggagttactgtgtacctactgtccttggcgctgtgttggtctgtgtggtactctcagctttggcctgctggcctcggtgtggggctttgagcatatatcagtggttgtaagctgggctcccgcagactggctggatccagactgcagatccaggtgtgattgcacctcccaatgtggctgttcaattgaattact

SEQ ID NO: 19500 - DNA, 193 bp, Macaca Mulatta
  misc_feature (1)...(193): n = A,T,C or G
acatagctccacttgtgaaaaccgagccccagaggccagtaaaggaggaagagcccaagattccaggggacctggaccaggaaccgngagcctgctctatgcggatctggaccatctagccctcagcaggccccgccggctgtccacagtggaccctgctgatgcctccaccatctatgcggttgtagtttga

SEQ ID NO: 19501 - DNA, 971 bp, Macaca Mulatta
ggcacgagggtggggtgccgagattcgggagagacgctctgaactgactgcaccgcattaccggagcgccccagctgcgaggcgtgttaacaggaacatcgataagtagtgtaagaaacttgcacaatgaaatccgaagccaaggatggagaggaggagagtctacagactgctttcaagaaattaagagtggatgcatcagggtccatagcatctctgtctgttggagaaggcacaggtgtcagagcaccagtcagaacagcaacagatgataccaaacctaaaaccacatgtgcatctaaagacagttggcacgggtctacaaggaagtcttcacgaggagcagtgagaactcagcgtcgtcgacgttctaagtctcctgtccttcatcctccaaagtttatacattgcagtacaatagcatcttcttccaacagtcaactgaagcacaaaagccagactgactcacctgatggcagcagtaggctgggaatttcaaccccgaaagagttcagtgcaggagaaagctctacttctctcgatgctaatcacacaggggcagtcgttgagcctttgagaacttctgttccaaggctcccatcagagagtaagaaggaagactcctctgacgctacccaagtctcccaagcaagtctcaaagccagtgatctctctgactttcaatctgtttccaagctaaaccagggcaagccatgcacatgcataggcaaggaatgccagtgtaagagatggcatgatatggaagtgtattccttttcaggcctgcagagtgtccctcctttggctccagaacgaagatccacacttgaggactactctcagtcgctgcatgccagaactctgtctggctctccccgatcctgttctgagcaagctcgagtctttgtggatgatgtgaccatagaggacctatcaggctacatggagtattacttgtatattccccagaa

SEQ ID NO: 19502 - DNA, 524 bp, Macaca Mulatta
tccagaggcccgtcccaagaggcaagtgaggctgtgcgccgtgcctgggctcacccaggcggcatccgtcggtctgtggacctggttgaggcaaggacgcccatctggacatggggccgacacaggtagtcagggggccggcgggacgcttaccaacagctgtcttttccccacctcagaatagcattcctttcgaacaccacggcaagtagctgctcgtctcccatcggaaggcagcactgggtgagtgtgcgcgcggcgggcgccaggcagcagtgccaagtgggtgggagccaccatgccccgcccgtgggagcttgcaggtgggctgggcttgcatgccaggtgctggaggtagagtgaggcttcttctgctctgttcttcttgtggggtgcagagcggcggtagtccgctgcccagtcttggggggaggctgtccacagagagccttggaacagagtgagcccaggaaaccatcctgttggcctgtggcctccccgtgactgcgttctgtgtgccgttg

SEQ ID NO: 19503 - DNA, 3369 bp, Macaca Mulatta
  misc_feature (1)...(3369): n = A,T,C or G
tagtgtccttgacctaaatgcatttgagcgacaaaacaaagctgaaggtcttgggatggtgacagaggaaggatcaggnnnnnnnnnnnnnnnnnnnnnnnnnnnnnnnnnnnnnnnnnnnnnnnnnnnnnnnnnnnnnnnnnnnnnnnnnnnnnnnnnnnnnnnnnnnnnnnnnnnnnnnnnnnnnnnnnnnnnnnnnnnnnnnnnnnnnnnnnnnnnnnnnnnnnnnnnnnnnnnnnnnnnnnnnnnnnnnnnnnnnnnnnnnnnnnnnnnnnnnnnnnnnnnnnnnnnnnnnnnnnnnnnnnnnnnnnnnnnnnnnnnnnnnnnnnnnnnnnnnnnnnnnnnnnnnnnnnnnnnnnnnnnnnnnnnnnnnnnnnnnnnnnnnnnnnnnnnnnnnnnnnnnnnnnnnnnnnnnnnnnnnnnnnnnnnnnnnnnnnnnnnnnnnnnnnnnnnnnnnnnnnnnnnnnnnnnnnnnnnncaggattccagtcagattgagcttttaaaagaattaatggatctgcagaaggatatggtggtcatgttgctgtccatgctagaaggtannnnnnnnnnnnnnnnnnnnnnnnnnnnnnnnnnnnnnnnnnnnnnnnnnnnnnnnnnnnnnnnnnnnnnnnnnnnnnnnnnnnnnnnnnnnnnnnnnnnnnnnnnnnnnnnnnnnnnnnnnnnnnnnnnnnnnnnnnnnnnnnnnnnnnnnnnnnnnnnnnnnnnnnnnnnnnnnnnnnnnnnnnnnnnnnnnnnnnnnnnnnnnnnnnnnnnnnnnnnnnnnnnnnnnnnnnnnnnnnnnnnnnnnnnnnnnnnnnnnnnnnnnnnnnnnnnnnnnnnnnnnnnnnnnnnnnnnnnnnnnnnnnnnnnnnnnnnnnnnnnnnnnnnnnnnnnnnnnnnnnnnnnnnnnnnnnnnnnnnnnnnnnnnnnnnnnnnnnnnnnnnnnnnnnnnnnnnnnnnnnnnnnnnnnnnnnnnnnnnnnnnnnnnnnnnnnnnnnnnnnnnnnnnnnnnnnnnnnnnnnnnnnnnnnnnnnnnnnnnnnnnnnnnnnnnnnnnnnnnnnnnnnnnnnnnnnnnnnnnnnnnnnnnnnnnnnnnnnnnnnnnnnnnnnnnnnnnnnnnnnnnnnnnnnnnnnnnnnnnnnnnnnnnnnnnnnnnnnnnnnnnnnnnnnnnnnnnnnnnnnnnnnnnnnnnnnnnnnnnnnnnnnnnnnnnnnnnnnnnnnnnnnnnnnnnnnnnnnnnnnnnnnnnnnnnnnnnnnnnnnnnnnnnnnnnnnnnnnnnnnnnnnnnnnnnnnnnnnnnnnnnnnnnnnnnnnnnnnnnnnnnnnnnnnnnnnnnnnnnnnnnnnnnnnnnnnnnnnnnnnnnnnatgctcagtctgaagagcctgaagaagcagatgnnnnnnnnnnnnnngatgaccgtgaaggacatggtcacggccttcttttcatcctactggagtatttttatgaccctcttgcacttcgtggccagcgttttcagaggctttttccgcatcatttgcagcctgctgcttgggggaagcctcgtcgaaggtgctaaaaagatcaaagttgcagaactcttagccaaccatgccagaccccactcaggatgaggttagaggagatggggaggagggagagaggaaaaccctggaagccgccctgccctctgaggatctgaccgacttaaaggagctgacagaagagagtgaccttctttcggacatcttcggcctggatctgaagagagaaggaggacagtacaaactaatccctcataatccaaatgctgggctcagtgacctcatgagcaacccagtccccatgcctgaggtgcaagaaaaannnnnnnnnnnnnnnnnnnnnnnnnnnnnnnnnnnnnnnnnnnnnnnnnnnnnnnnnnnnnnnnnnnnnnnnnnnnnnnnnnnnnnnnnnnnnnnnnnnnnnnnnnnnnnnnnnnnnnnnnnnnnnnnnnnnnnnnnnnnnnnnnnnnnnnnnnnnnnnnnnnnnnnnnnnnnnnnnnnnnnnnnnnnnnnnnnnnnnnnnnnnnnnnnnnnnnnnnnnnnnnnnnnnnnnnnnnnnnnnnnnnnnnnnnnnnnnnnnnnnnnnnnnnnnnnnnnnnnnnnnnnnnnnnnnnnnnnnnnnnnnnnnnnnnnnnnnnnnnnnnnnnnnnnnnnnnnnnnnnnnnnnnnnnnnnnnnnnnnnnnnnnnnnnnnnnnnnnnnnnnnnnnnnnnnnnnnnnnnnnnnnnnnnnnnnnnnnnnnnnnnnnnnnnnnnnnnnnnnnnnnnnnnnnnnnnnnnnnnnnnnnnnnnnnnnnnnnnnnnnnnnnnnnnnnnnnnnnnnnnnnnnnnnnnnnnnnnnnnnnnnnnnnnnnnnnnnnnnnnnnnnnnnnnnnnnnnnnnnnnnnnnnnnnnnnnnnnnnnnnnnnnnnnnnnnnnnnnnnnnnnnnnnnnnnnnnnnnnnnnnnnnnnnnnnnnnnnnnnnnnnnnnnnnnnnnnnnnnnnnnnnnnnnnnnnnnnnnnnnnnnnnnnnnnnnnnnnnnnnnnnnnnnnnnnnnnnnnnnnnnnnnnnnnnnnnnnnnnnnnnnnnnnnnnnnnnnnnnnnnnnnnnnnnnnnnnnnnnnnnnnnnnnnnnnnnnnnnnnnnnnnnnnnnnnnnnnnnnnnnnnnnnnnnnnnnnnnnnnnnnnnnnnnnnnnnnnnnnnnnnnnnnnnnnnnnnnnnnnnnnnnnnnnnnnnnnnnnnnnnnnnnnnnnnnnnnnnnnnnnnnnnnnnnnnnnnnnnnnnnnnnnnnnnnnnnnnnnnnnnnnnnnnnnnnnnnnnnnnnnnnnnnnnnnnnnnnnnnnnnnnnnnnnnnnnnnnnnnnnnnnnnnnnnnnnnnnnnnnnnnnnnnnnnnnnnnnnnnnnnnnnnnnnnnnnnnnnnnnnnnnnnnnnnnnnnnnnnnnnnnnnnnnnnnnnnnnnnnnnnnnnnnnnnnnnnnnnntgctatatgttccacatgtatgttggagttcgtgctggaggagggatcggggatgaaatcgaagacccagcaggagatgaatatgagatctatcgaatcatctttgacatcactttcttcttctttgttattgtcattctcttggccataatacaaggtnnnnnnnnnnnnnnnnnnnnnnnnnnnnnnnnnnnnnnnnnnnnnnnnnnnnnnnnnnnnnnnnnnnnnnnnnnnnnnnnnnnnnnnnnnnnnnnnnnnnnnnnnnnnnnnnnnnnnnnnnnnnnnnnnnnnnnnnnnnnnnnnnnnnnnnnnnnnnnnnnnnngttttttctgatgtatcttataaacaaagacgaaacagaacacacaggacagg

SEQ ID NO: 19504 - DNA, 449 bp, Macaca Mulatta
  misc_feature (1)...(449): n = A,T,C or G
ggccgcaagacaggcagagccgagggaagaagcaggggaaagtggccagataggatgggcagctcttcatcctgtggaagcagcagcacctgtgtctcagagcctctctaatttgtcattgggatggggggttctggtggagaggggtggcctcgtggcctctgctgctcctccaccctgacctccctatcgccgccccccagcccatgcaggtgctgttttccggtgaggccacccaccgcaagtactattccactacccacggtgctctgctctctggccagcgcgaggctgcccgcctcatcgagatgtaccgagacctcttccagcangggacctgagggctgtcctcgctgccgagaagagcactaacttgtgacctccagcccgccccttgctgccatgtgctcctgccttcctgatcctctgtagaaaggatttttatcttc

SEQ ID NO: 19505 - DNA, 916 bp, Macaca Mulatta
  misc_feature (1)...(916): n = A,T,C or G
gggctctctgggctcggacctagttcgcgacgacatggccaaacgtaccaagaaagtcgggatcgtcggtaaatacgggacgcgctatggggcctccctccggaaaatggtgaagaaaattgaaatcagccagcacgccaagtacacttgctctttctgtggcaaaaccaagatgaagagacgagctgtggggatctggcactgtggttcctgcatgaagacagtggccggcggtgcctggacatacaataccacttccgctgtcacggtaaagtccgccatcagaagactgaaggagttgaaagaccagtagacgctcttctactctttgagacatcactggcctataataaatgggttaatttatgtaacggaagtctaaattttatatgctcggttaagatatccctccataatcctacaaaattatctgaaattagtaatttcatatctcgaggcttcttcatgaatttttcgactctttatttttggacgcaaatactttttttttgggcggcgccagggttccttccaaaaaaattttttgattaaaaaatattttttttgtcggcaccctcgggaggcacctttgtgnggggaaggatttaaaagtgggggcgtatatcaccttttttcccacaagaggaacaacctgtgggctaaataaacaaaatgctcggtggatctctcctcccgcaaaaaaaaaaacaccctcccgcgggggagaaccgccatatgactcttctcaaaaaatattataaaaagtgggacgttctagagaagttataataatgggggtgttctaaaaagtggggggcccccacggtgatgagctcccacattatactatttaattgcgctcccgctcgatgggtcgtttattattcagacgatttttgtgcattctccacattcg

SEQ ID NO: 19506 - DNA, 233 bp, Macaca Mulatta
  misc_feature (1)...(233): n = A,T,C or G
acccacactcaggctctggccgcagtgtcctgtcatttgagtcaggtnaggttctgggggctggtttgactggatgatgcctactcttctcttatggctggtaaatggtgtgattgtcctgagcgtctttgtgaagctgctggtccatggggagccagtgatccggccacactcccgctcctcggtcaccttctggaggcaccggaaacaggcagacctggatctcgccagag

SEQ ID NO: 19507 - DNA, 514 bp, Macaca Mulatta
  misc_feature (1)...(514): n = A,T,C or G
gctaatttttgtattttcagtagaaacggggtctctccatgttggccaggctagtcttgaactcgtgacctcaaacgatctgcccaccccagcctcccaaagtgctagaattacaagtgcgagccaccacacccagcctaatgtaactgttttcttttcttgggattctttttggtctttatctcattgttatatgtgattataatgttgtcatttatgcagttnnnnnnnnnnnnnnnnnnnnnnnnnnnnnnnnnnnnnnnnnnnnnnnnnnnnnnnnnnnnnnnnnnnnnnnnnnnnnnnnnnnnnnnnnnnnnnnnnnnnnnnnnnnnnnnagatcatccagcgcatcacatgggtgagcccacctgccatcactctggaatggaagaggaaggtggcccaggaagccattgagagcctcagcgcctccaaattggccaagagcatttgcagccaattccggactcggctcaatagttcccacgaggcttttgcagcctctttgcggcag

SEQ ID NO: 19508 - DNA, 489 bp, Macaca Mulatta
tgtgctctcctgcttacgtggggacactgtgtggggagcatggaggctctgaggttcctttgttcttggggactgaccactctgtggaaaaaggcaagacccaagaggtgctggtggaggtgggggtgggggtgctggcggaaatgtgtggggagccacgccagccaggttcacgcctcctccgagctactgaccttccatggtcctctttcttctttccaactttgttgtcctgggtgtctgggggtctcttcgcttggacgtgggtcctcacccatcccctggttccactccagctccaacagacggaagcagagctcaggaaggtggatgaggccatcgccctattccagaatatgctgtgatccaccacctagcttccccgctcacccccagcagctcaccatggggatggcagcaatagaatattttcccacaaaatcctcttgtcatctgtggtgagggcagagaggggagcataggggctgg

SEQ ID NO: 19509 - DNA, 812 bp, Macaca Mulatta
gggtctgttttctcaaagctgaagtgggctagctttgcaaagctgcgggctgagcactcagggaggcaatcatctctcagaaactgcggcggcactgcactgcagcctcccaaggctccatgccagacaaagcatgcgtgtcacacttgctacaatagcctggatggtttcttttgtctccagttattcacacacagcaaatattttgccagatattgaaaatgaagatttcatcaaagactgcgttcgaatccataacaagttccgatcagaggtgaaaccaacagccggtgatatgctatacatgacttgggacccagcactagcccaaattgcaaaagcatgggccaaaaattgccagttttcacataatacacggctgaagccaccctacaagctgcacccaaacttcacttcactgggagaaaacatctggactgggtctgtgtccctcttttctgtgtcttccgccatcacaaactggtatgatgaaatccaggactatgacttcaagaatcggatatgcaaaaaagtctgtggccactacactcaggttgtttgggcggatagttacaaagttggctgcgcagttcaattttgctctaaagtttctggctttgatgctctttccaatggagcacattttatatgcaactacggaccaggaggcaattacccaacttggccaataataagagaaaaggaagcccacccctggcggggtgcctgccccaataatgacaagtgtttggaccatctcttatgttaacaacagcgagaacaagtcaaacgttactactctgttgtgtatc

SEQ ID NO: 19510 - DNA, 100 bp, Macaca Mulatta
gctctgctgaaaatgaagagaagtcagaagttcaagcaatcattgaatctactcctgagctggatatggacaaagatctcagtggatataaaggttcaag

SEQ ID NO: 19511 - DNA, 1131 bp, Macaca Mulatta
  misc_feature (1)...(1131): n = A,T,C or G
gggattggtgacgtctccatgctgtattgtcacaagcacatatggctggacagcaaacatggagagaatcatgaaagctcaagccctaagagacaactcaacaatgggttacatggcagcaaagaaacacctggagataaaccctgaccattccattattgagacccttaaggcaaaaggcagaggctgataagaacgacaagtctgtgaaggatctggtcatcttgctttacgaaactgcactcctgtcttctggcttcagtctggaagatccccagacacatgccaacaggatctacaggatgatcaaacttggtctgggtatcgatgaagatgatcctactgctgatgataccagtgcagctgtaactgaagaaatgccgcccctcgaaggagatgacgacacatcacgcatggaagaagtagactaacctccggctgagggatgacttacctgttcaatactctacaattcttctgataatatattttccaggatgtttttctttatttttgttaatattaaaaagtctgtatggcatgacaacaactactttaaggggaagataagatttctgtctatttctaagtgatgctgtggtaccttaggcactaaagcagagctagtaatgcttttttagtttcacattggtttattttaacagactggggtaacgtgtgttgtaagatgtatgtaacatgatgttaactttgtggtctacagtgtttagctatcaagccggatttctaagtagaccaaatcttgttattgaagtgttctcgagctatatatacctggatgtttagaaaagtatttgttacatctttgtaggatctacttttttgaacttttcatcccctgtagttgccaattttgcatgtactagtcctctagaaataggttaaactgaagcaacttgatagaaggaactctccacaggggcttgtttttcaaagaaaagtattgttttggaagaagcaaagttataaagcctacctaaagcatatcataaaagctgttcaaaaaataaactcaaagtctttgtgggatgggaaatgtagttgcctggaagtcacaattctggctttaaagttgttaacccaattaccgaatggagtttaanaagaaaa

SEQ ID NO: 19512 - DNA, 566 bp, Macaca Mulatta
cttaaattaaacaatttattttattttagcagttctgcaaatagaaaacaggaaaaaaaaacttttataaattaaatatatgtatgtaaaaaatgtgttatgtgccatatgtagcaattttttacagtatttcaaaacgagaaagatatcaatggtgcctttatgttatgttatgtcgagagcaagttttgtacagttacagtgattgcttttccacagtatttcagcaaaacctctcatagattcagtttttgctggcttcttgtgcattgcattatgatgttgactggatgtatgatttgcaagacttgcaactgtccctctgtttgcttgtagtagcacccgatcagtatgtcttgggcacatccatccagatacgcctcacttgtgtatgaagttttctttgctttcagaatatgaaatgagttgtgtctactctgccagccaaaggtttgcctcattgggctctgagataatagtagatccaacagcatgctactattaaatacagcaagaaaccgcattaagtaatgttaaatattaggaagaaagtaatactgtgatta

SEQ ID NO: 19513 - DNA, 5259 bp, Macaca Mulatta
  misc_feature (1)...(5259): n = A,T,C or G
agcatgatggaagtggttcattgcatgatattcaactatcattgccgtccagtccggaaccagaagatggtgataaagtatataagnnnnnnnnnnnnnnnnnnnnnnnnnnnnnnnnnnnnnnnnnnnnnnnnnnnnnnnnnnnnnnnnnnnnnnnnnnnnnnnnnnnnnnnnnnnnnnnnnnnnnnnnnnnnnnnnnnnnnnnnnnnnnnnnnnnnnnnnnnnnnnnnnnnnnnnnnnnnnnnnnnnnnnnnnnnnnnnnnnnnnnnnnnnnnnnnnnnnnnnnnnnnnnnnnnnnnnnnnnnnnnnnnnnnnnnnnnnnnnnnnnnnnnnnnnnnnnnnnnnnnnnnnnnnnnnnnnnnnnnnnnnnnnnnnnnnnnnnnnnnnnnnnnnnnnnnnnnnnnnnnnnnnnnnnnnnnnnnnnnnnnnnnnnnnnnnnnnnnnnnnnnnnnnnnnnnnnnnnnnnnnnnnnnnnnnnnnnnnnnnnnnnnnnnnnnnnnnnnnnnnnnnnnnnnnnnnnnnnnnnnnnnnnnnnnnnnnnnnnnnnnnnnnnnnnnnnnnnnnnnnnnnnnnnnnnnnnnnnnnnnnnnnnnnnnnnnnnnnnnnnnnnnnnnnnnnnnnnnnnnnnnnnnnnnnnnnnnnnnnnnnnnnnnnnnnnnnnnnnnnnnnnnnnnnnnnnnnnnnnnnnnnnnnnnnnnnnnnnnnnnnnnnnnnnnnnnnnnnnnnnnnnnnnnnnnnnnnnnnnnnnnnnnnnnnnnnnnnnnnnnnnnnnnnnnnnnnnnnnnnnnnnnnnnnnnnnnnnnnnnnnnnnnnnnnnnnnnnnnnnnnnnnnnnnnnnnnnnnnnnnnnnnnnnnnnnnnnnnnnnnnnnnnnnnnnnnnnnnnnnnnnnnnnnnnnnnnnnnnnnnnnnnnnnnnnnnnnnnnnnnnnnnnnnnnnnnnnnnnnnnnnnnnnnnnnnnnnnnnnnnnnnnnnnnnnnnnnnnnnnnnnnnnnnnnnnnnnnnnnnnnnnnnnnnnnnnnnnnnnnnnnnnnnnnnnnnnnnnnnnnnnnnnnnnnnnnnnnnnnnnnnnnnnnnnnnnnnnnnnnnnnnnnnnnnnnnnnnnnnnnnnnnnnnnnnnnnnnnnnnnnnnnnnnnnnnnnnnnnnnnnnnnnnnnnnnnnnnnnnnnnnnnnnnnnnnnnnnnnnnnnnnnnnnnnnnnnnnnnnnnnnnnnnnnnnnnnnnnnnnnnnnnnnnnnnnnnnnnnnnnnnnnnnnnnnnnnnnnnnnnnnnnnnnnnnnnnnnnnnnnnnnnnnnnnnnnnnnnnnnnnnnnnnnnnnnnnnnnnnnnnnnnnnnnnnnnnnnnnnnnnnnnnnnnnnnnnnnnnnnnnnnnnnnnnnnnnnnnnnnnnnnnnnnnnnnnnnnnnnnnnnnnnnnnnnnnnnnnnnnnnnnnnnnnnnnnnnnnnnnnnnnnnnnnnnnnnnnnnnnnnnnnnnnnnnnnnnnnnnnnnnnnnnnnnnnnnnnnnnnnnnnnnnnnnnnnnnnnnnnnnnnnnnnnnnnnnnnnnnnnnnnnnnnnnnnnnnnnnnnnnnnnnnnnnnnnnnnnnnnnnnnnnnnnnnnnnnnnnnnnnnnnnnnnnnnnnnnnnnnnnnnnnnnnnnnnnnnnnnnnnnnnnnnnnnnnnnnnnnnnnnnnnnnnnnnnnnnnnnnnnnnnnnnnnnnnnnnnnnnnnnnnnnnnnnnnnnnnnnnnnnnnnnnnnnnnnnnnnnnnnnnnnnnnnnnnnnnnnnnnnnnnnnnnnnnnnnnnnnnnnnnnnnnnnnnnnnnnnnnnnnnnnnnnnnnnnnnnnnnnnnnnnnnnnnnnnnnnnnnnnnnnnnnnnnnnnnnnnnnnnnnnnnnnnnnnnnnnnnnnnnnnnnnnnnnnnnnnnnnnnnnnnnnnnnnnnnnnnnnnnnnnnnnnnnnnnnnnnnnnnnnnnnnnnnnnnnnnnnnnnnnnnnnnnnnnnnnnnnnnnnnnnnnnnnnnnnnnnnnnnnnnnnnnnnnnnnnnnnnnnnnnnnnnnnnnnnnnnnnnnnnnnnnnnnnnnnnnnnnnnnnnnnnnnnnnnnnnnnnnnnnnnnnnnnnnnnnnnnnnnnnnnnnnnnnnnnnnnnnnnnnnnnnnnnnnnnnnnnnnnnnnnnnnnnnnnnnnnnnnnnnnnnnnnnnnnnnnnnnnnnnnnnnnnnnnnnnnnnnnnnnnnnnnnnnnnnnnnnnnnnnnnnnnnnnnnnnnnnnnnnnnnnnnnnnnnnnnnnnnnnnnnnnnnnnnnnnnnnnnnnnnnnnnnnnnnnnnnnnnnnnnnnnnnnnnnnnnnnnnnnnnnnnnnnnnnnnnnnnnnnnnnnnnnnnnnnnnnnnnnnnnnnnnnnnnnnnnnnnnnnnnnnnnnnnnnnnnnnnnnnnnnnnnnnnnnnnnnnnnnnnnnnnnnnnnnnnnnnnnnnnnnnnnnnnnnnnnnnnnnnnnnnnnnnnnnnnnnnnnnnnnnnnnnnnnnnnnnnnnnnnnnnnnnnnnnnnnnnnnnnnnnnnnnnnnnnnnnnnnnnnnnnnnnnnnnnnnnnnnnnnnnnnnnnnnnnnnnnnnnnnnnnnnnnnnnnnnnnnnnnnnnnnnnnnnnnnnnnnnnnnnnnnnnnnnnnnnnnnnnnnnnnnnnnnnnnnnnnnnnnnnnnnnnnnnnnnnnnnnnnnnnnnnnnnnnnnnnnnnnnnnnnnnnnnnnnnnnnnnnnnnnngaaggtaggtgtggaacctccacgttaccatgtgcacgaacctaattatgctttcggccacttgtcagttcagtaagtctgccttcctcttctcccaaatcatgtcatctttaggttgttgacttgcagctgctttaaatgaattagtatctttcagatagataaccttacaaggagaatgttttgagcagctgaccaaaaatgtatcaaacaggattatggccaaaaagtcgctcaaatttctagaggttcctttaaaagatgtatgttgatgaaattgcccctttctaagaaaaacaacagcaagtcttttagtagaaatttgaaagaagtgtttgctaccattttgacccattattcccttacctatcagatgaatttgccattcactggatggaaaccattcttggatttggtaagaggtgagcaacacaaatccagtatcttattcttatgtaccagcacttctgatggagaagcagtgaagttcagaacattcttcacgtagtccagatactgttagagtcaggcaaatcagcaaagcacttatttgtttatggagttgacccatgatggctgcagttgtaagtgggcatacgtagtctatcattttgaaggagaaagaaaaccattctcacatgttgcaaatatgtgaatcatactgtatttccctaaagtaaaacataccgtgacttagtggtttttggtttatttagaagttggtttagacccttatgaaacattatttacgagctggccttatccttaanggaaaagttctaaatttttaaatttatttttaaatccctagtctgagggaaatgtctttatcgtccattacataaaaatgttgactccactcatttatttttctcnnnnnnnnnnnnnnnnnnnnnnnnnnnnnnnnnnnnnnnnnnnnnnnnnnnnnnnnnnnnnnnnnnnnnnnnnnnnnnnnnnnnnnnnnnnnnnnnnnnnnnnnnnnnnnnnnnnnnnnnnnnnnnnnnnnnnnnnnnnnnnnnnnnnnnnnnnnnnnnnnnnnnnnnnnnnnnnnnnnnnnnnnnnnnnnnnnnnnnnnnnnnnnnnnnnnnnnnnnnnnnnnnnnnnnnnnnnnnnnnnnnnnnnnnnnnnnnnnnnnnnnnnnnnnnnnnnnnnnnnnnnnnnnnnnnnnnnnnnnnnnnnnnnnnnnnnnnnnnnnnnnnnnnnnnnnnnnnnnnnnnnnnnnnnnnnnnnnnnnnnnnnnnnnnnnnnnnnnnnnnnnnnnnnnnnnnnnnnnnnnnnnnnnnnnnnnnnnnnnnnnnnnnnnnnnnnnnnnnnnnnnnnnnnnnnnnnnnnnnnnnnnnnnnnnnnnnnnnnnnnnnnnnnnnnnnnnnnnnnnnnnnnnnnnnnnnnnnnnnnnnnnnnnnnnnnnnnnnnnnnnnnnnnnnnnnnnnnnnnnnnnnnnnnnnnnnnnnnnnnnnnnnnnnnnnnnnnnnnnnnnnnnnnnnnnnnnnnnnnnnnnnnnnnnnnnnnnnnnnnnnnnnnnnnnnnnnnnnnnnnnnnnnnnnnnnnnnnnnnnnnnnnnnnnnnnnnnnnnnnnnnnnnnnnnnnnnnnnnnnnnnnnnnnnnnnnnnnnnnnnnnnnnatttatatatatattagaatttactaagtactttaacaagtaaaaatctgaatatgaaagaaaatatcagatttgcactttaaatgagcttaattgcttggagttgtgcctgaaatatcgaaatgcctcctgttgggtatggctttgttgaaataaatttgtaattgttgctgtttgaagatatcagtacagctgttcacagaactatattcccagcatgtcacttttcccattaaagcactaagttttctttgaatgttccattgtcctgataagtattttacttttttctcagtacatcaaagagcgcgtgatgcccctacagctgtcacttccaaatgttcctatagcataaatggtgttacagacatgggggtgcattcttggtttctgagcagagttgtcatactggtttcctggtctctagggtactggggatgtactttgaaatcaccgaacaggcttgcaattaagatcaataagactgcagcaccatttcaatttactttccatcttacacagtagtttttgtgtttttaaattcgtttgggtggttatgtttgcatgcttatgcacacatttgaaaattaattatagctgtactacctgatgtttttccttggggatgacggccttgttactttttaaattctcatgcttgaattatgttttctaatgatctttcacatctccctttaagttttttgctgcagcaatttgagagaatacttttgattaaatgattctgatggtgggcaccaatctacaactgtgtcattaactgaagatacatgttttaatcttgttgggaataagctcacccactttctccttggtaaagcatgtacttaacaaaataataccctgagaatgtaaggtctcaaagtcattactaacaaagagca

SEQ ID NO: 19514 - DNA, 1094 bp, Macaca Mulatta
  misc_feature (1)...(1094): n = A,T,C or G
aaatggaaccctgaacaaacactctggcattgacttcaaacagcttaacttcctgacgaagctcaacgagaatcactctggagagnagctatggaagggccgctggcagggcaatgacattgtcgtgaaggtgctgaaggttcgagactggagtacaaggaagagcagggacttcaatgaagagtgtccccggctcaggncaggattttctcgcatccaaatgtgctcccagtgctaggtgcctgtcagtctccacctgctcctcatcctactctcatcacacactggatgccatatggatccctctacaatgtactacatgaaggcaccannnnnnnnnnnnnnnnnnnnnnnnnnnnnnnnnnnnnnnnnnnnnnnnnnnnnnnnnnnnnnnnnnnnnnnnnnnnnnnnnnnnnnnnnnnnnnnnnnnnnnnnnnnnnnnnnnnnnnnnnnnnnnnnnnnnnnnnnnnnnnnnnnnnnnnnnnnnnnnnnnnnnnnnnnnnnnnnnnnnnnnnnnnnnnnnnnnnnnnnnnnnnnnnnnnnnnnnnnnnnnnnnnnnnnnnnnnnnnnnnnnnnnnnnnnnnnnnnnnnnnnnnnnnnnnnnnnnnnnnnnnnnnnnnnnnnnnnnnnnnnnnnnnnnnnnnnnnnnnnnnnnnnnnnnnnnnnnnnnnnnnnnnnnnnnaggtggcattggaaggccttcggcctaccatcccaccaggtatttcccctcatgtgtgtaagctcatgaagatctgcatgaacgaagaccctgcaaagcgacccaaatttgacatgattgtgcctatcctggagaagatgcaggacaagtaggaccggaaggcccttgcctgaactccagaggtgtcaggacatggttgggggaatgtacctccccaaagcagcagacctctggttgcctcccctgcctccagtcatggtactaccccagccatggggtccatccccttcccccatccctaccactgtggccccaaaaggggcgggctcagagctttgtcacttgccacatggtgtctcccaacatgggagggatcagccccgcctgtcacaataaagtttattatgaaaac

SEQ ID NO: 19515 - DNA, 1126 bp, Macaca Mulatta
  misc_feature (1)...(1126): n = A,T,C or G
tttccgattcgcctattggtaaaaaggcctgattacccnnnnnnnnnnnnnnnnnnnnnnnnnnnnnnnnnnnnnnnnnnnnnnnnnnnnnnnnnnnnnnnnnnnnnnnnnnnnnnnnnnnnnntgtgggaggcatcgtgcggctcttgcatacgccactgcaaagggggatttctacaaggcgattaattgggtaacgccacgcttgtcccagtcacgacgtcaaggtcagactgagtcagttgaagttagacgactcactatagggcgaatttgggtacgcctgtccccgtccgagcacgaggttttttttttatgatgcaacttaattttattaggacaaggctgttggacactggagtggcaccttccatggccaggagtggcaattgggaggggtcacaagggatgccacccaggcatctagaagccacagctgccctccacagcgcggcaccgcacggtgcgcaggaatgtctcgaccttgttcatgtccttcctgaagcagtagagcagcctgtagttcttgagcagtgtgtcatcgttgtgcgagtttgtgtcaaacttgctgtaggtctgcttgaagatctgcccagtccgggggctgccgtcttccagcctccccatcagcgtttggatgccttcctctaggttctttaggtagagatagatgtcgaagttcgagttggtatgcaccaggtggttggcaaacacactcctgaggaactgcacgggctccagccacgactggatgagcagcagggagatgtggagcagctctaggttggatttctgctgtgtttcctccttgttggagggtgtcggaatagactctgagaagcagagggaggtctgggggttgcgcaggaatgaatacttctgttcctttgggatataggcttcttcaaacttcgggtacgtgtcaaatgccagcttgtgcaggtgatgggcgcggaacacagcggtgttaaaaagccaggataagggaatggttgggaaggcactgccctcttgaagccaaggtaggcagagcagggcaatagccagaattaggcatgtccaggagcctgcagccattgcagctaggtgagctgtccacaggaccctgagtggttcggggagttgg

SEQ ID NO: 19516 - DNA, 913 bp, Macaca Mulatta
  misc_feature (1)...(913): n = A,T,C or G
tgccacggctcttctantccttaanggttaggtatactccctcttgagaattttttggtttaaccggttgtctagctacacgtcctgtttctattgattgtttgcaaccagcttttcctgcaactgttactgctgattaatatcttgctaatcataggatatagatagactgtgtttctgttttacagctgtgttagaaattgctgatgcccacactatgttgtaagttcttatctctgtatactgtacttctgcatagcgatgttatgttaaagaattacttcatccccatgtgaccatctcacctcataatcaaacgaccctaactccctcactaacctacccctgccctcactaaacttaataataaatgctggtatatccagtgtattggtgacatcacaggaccagaaggcaatgaccccactggacccagctttcnnnnnnnnnnnnnnnnnnnngtgccgaatcggcacgaggtgtaaaaaaagcaaaaacgacaacagaaaaacaatcttattccgagcattccagtaacttttttgtgtatgtacttagctgtactataagtagttggtttgtatgagatggttaaaaaggccaaagataaaagnnnnnnnnnnnnnnnnnnnnngtctatgaagttgctgtttattttttttggcctgtttgatgtatgtgtgaaacaatgttgtccaacaataaacaggaattttattttgctgagttgtnnnnnnnnnnnnnnnnnnnnnnnnnnnnnnnnnnnnnnnnnnnnnnnnnnnnnnnnnnnnnnnnnnnnnnnnnnnnnnnnnnnnnnnnnnnnnnnnnnnnnnnnnnnnnnnnannnnnnnnnnnnnnnnnnnnnnnnnnnnnnnnnnnnnnnnnnnnnnnngcgttacccaatttaatcgcc

SEQ ID NO: 19517 - DNA, 636 bp, Macaca Mulatta
  misc_feature (1)...(636): n = A,T,C or G
gggggcttctggttcaagggactatactcttaaattatttgattattccaaaccatcagcaaaaagagccttcaaatacattcaggaagctgaaatgttacgctccatctcttttcatccttctggagactttatacttgtcggaactcagcatcctactcttcgcctttatgatatcaacacctttcaatgttttgtgtcttgcaatcctcaagatcaacacaccgatgctatatgttccgttaattacaattctagtgccaatacctatgtaactggaagcaaggacggctgcatcaaattgtgggatggtgtttcaaatcgatgcatcacaacttttgagaaagcacacgacggtgctgaagtttgttctgccattttttccaaaaattctaaatacattctctcaagtggaaaagactctgtagctaaactttgggaaatatcaacaggacgaacactggtcagatacacgggtgcgggtttaagtggacgccaggtgcaccgaacgcaggctgtgtttaccacactgaggactatgtgttgctgcccgacgagaggacgatcagtctttgctgctgggactctagaacagctgagcggagaaacctgctctcactggggcacacaacatgn

SEQ ID NO: 19518 - DNA, 336 bp, Macaca Mulatta
tctttcggccaggctgaggccctgacgtggatgggcaaacgacaggcctgcgaaggcagcaagccgggtcgtccgtgttccactttccacgcacccccacctaccgtcggttcgcaaactgcaaatcctcccttgtgcatgacgccctgctctctggggagcgtctggcgcgacctctgcccgcttactcgggaaatttgcttttgccaaacccgcttattcggggatcccgcgcccccctcctcacgtgcgctgctctcggagcccgagccggctctgactgcttcggcggtttggatatttattgacctcgtcctccgactcgctgacaggctg

SEQ ID NO: 19519 - DNA, 366 bp, Macaca Mulatta
agcccagtctaataaagagaactccagcacacacactgatgtcttggctggcggggaaatgggtgcaggctgaacacgggtgaggcccagggagggaggggacctccctgcacaccaactcacttctgtcttcaccacacacattacatccaagccttgttcaaagaacaaggcccttgagaggtaggtggccaccaaagccactcccaccagctgtgctgagggcagggacgacattttcccacacccgacacctgtcaccagccctcgggctgccactgctgcaccctgcctccaggaggcaactgtgttgagtgcaaacttgagcaattatttacaagagcacaacgtaatcgaaaagagaaa

SEQ ID NO: 19520 - DNA, 295 bp, Macaca Mulatta
  misc_feature (1)...(295): n = A,T,C or G
ggcctccccggacgagcagggtccaaaggcgagaagggagaaagggtatgtggctgcagccgctttctctctgnnnnnnnnnnnnnnnnnnnnnnnnnnnnnnnnnnnnnnnnnnnnnnnnnnnnnnnnnngcaggtgtaggcaggcactcatagctttcctttctctgcagggcagagctggggagctgggtgaggctggcccctcaggagagccaggcgtccctgnggagatgctggcatgcctggggagcgtggtgaggctggccaccggggctcagcggtgagtgcaggga

SEQ ID NO: 19521 - DNA, 1074 bp, Macaca Mulatta
  misc_feature (1)...(1074): n = A,T,C or G
tggctgattggcagatccagaggttcccttggcannnnnnnnnnnnnnntcaccatggatccgttccctgaatcagttacagaaaactttgagtacgatgattcagctgaagcctgttatattggggacatcgtggcctttgggactgtgttcctgtccatattctactccgttgtctttgccattggcctggtgggaaataagttggtagtgtttgccctcaccaatagcaagaagcccaagagtgtcaccgacatttacctcctgaacctggccttgtctgatctgctgtttgtagccaccttgcccttctggactcactatgtgataaatgaagagggcctccagaacgccatgtgcaaattcactaccgccttcttcttcatcggcttttttggaagcatattcttcatcaccatcatcagcaaagataggtacctggccatcgtcctggccgccaactccatgaacaaccggactgtgcagcatggcgtcacttacaggctaggcgtctgggcagcagccattttggtggcaccttaacggttcatgttcacaaagcagaaagaaaacgaatgccttggtgactaccctgaggtcctccaggaaatctggcccgtgctccgcaatgtggaagcaaattttcttggcttcctacttcccctgctcattatgagttactgctacttcagaatcatccagacgctgttttcctgcaagaaccacaaaaaagccaaagccatcaagctgatccttctggtggtcgtcgtgtttttcctcttctggacaccctacaacgttatgattttcctggagacgcttaagctctatgacttctttcccagttgtgacatgaggagggatctgaggctggccctcagtgtgaccgagacagttgcatttagccattgttgcctgaatcctctcatctatgcatttgctggggagaagttcagaagatacctttaccacctgtatgggaaatgcctggctgtcctgtgtgggcgctcagtccatgttgatttctccccatctgaatcacaaaggagcaggcagggaagtgttctgagtagc

SEQ ID NO: 19522 - DNA, 539 bp, Macaca Mulatta
  misc_feature (1)...(539): n = A,T,C or G
ccctccaangctgtgccagcgccctggcatcaacaagagctttgaccagagggacctggcacaggatgaagctatatggctggagcgtggtcccgtggagcccagtgagccagctgtagtgacagcagcccgggtgggcattggctatgcaggggagtgggcccggaaacccctccgcttctatgtccggggcagcccctgggtcagtgtggtcgacagagtggctgagcaggacacacaggtctaagcaaagggcctgcccagacaatattttttaattgtttaaaaaacaaataaatgttttatttcnnnnnnnnnnnnnnnnnnnnnnnnnnnnnnnnnnnnnnnnnnnnnnnnnnnnnnnnnnnnnnnnnnnnnnnnnnnnnnnnnnnnnnnnnnnnnnnnnnnnnnnnnnnnnnngnnnnnnnnnnnnnnnnnnnnnnnnnnnnnnnnnnnnnnnnnnnnnnnnnnnnnnnnnnnnnnnnnnnnnnnnnnnnnnnnnnnnnnnnnnnnnnnnnnnnnnnnnnnnnnnnnnnnnn

SEQ ID NO: 19523 - DNA, 111 bp, Macaca Mulatta
agggccaaacacaggagcttcagtgtttcctgagcatggatggcttttgagttttattaacaaaaatactctggtcccagaacaacagactggtgtggcctgcactagtgg

SEQ ID NO: 19524 - DNA, 166 bp, Macaca Mulatta
accacataaatgtaacgagtgtgggaaaagcttcattcagagcgcacatcttattcacatcaaagaatacacactggggagaaaccattcaggtgtgaggaatgtgggaaagctacaacaacgcgtgcactaactcagcatcagcgcgtcacacaggtgagaagcc

SEQ ID NO: 19525 - DNA, 1368 bp, Macaca Mulatta
  misc_feature (1)...(1368): n = A,T,C or G
ggttggatttaaaggcttccaaattgcagctgaaaaacaaagggatattgtctccattcattatgaaggaagtgaatataagctgtctcatggatcagtggtcattgctgcagttatcagttgtaccaataattgcaatccatctgtcatgcttgccgcaggtnnnnnnnnnnnnnnnnnnnnnnnnnnnnnnnnnnnnnnnnnnnnnnnnnnnnnnnnnnnnnnnnnnnnnnnnnnnnnnnnnnnnnnnnnnnnnnnnnnnnnnnnnnnnnnnnnnnnnnnnnnnnnnnnnnnnnnnnnnnnnnnnnnnnnnnnnnnnnnnnnnnnnnnnnnnnnnnnnnnnnnnnnnnnnnnnnnnnnnnnnnnnnnnnnnnnnnnnnnnnnnnnnnnnnnnnnnnnnnnnnnnnnnnnnnnnnnnnnnnnnnnnnnnnnnnnnnnnnnnnnnnnnnnnnnnnnnnnnnnnnnnnnnnnnnnnnnnnnnnnnnnnnnnnnnnnnnnnnnnnnnnnnnnnnnnnnnnnnnnnnnnnnnnnnnnnnnnnnnnnnnnnnnnnnnnnnnnnnnnnnnnnnnnnnnnnnnnnnnnnnnnnnnnnnnnnnnnnnnnnnnnnnnnnnnnnnnnnnnnnnnnnnnnnnnnnnnnnnnnnnnnnnnnnnnnnnnnnnnnnnnnnnnnnnnnnnnnnnnnnnnnnnnnnnnnnnnnnnnnnnnnnnnnnnnnnnnnnnnnnnnnnnnnnnnnnnnnnnnnnnnnnnnnnnnnnnnnnnnnnnnnnnnnnnnnnnnnnnnnnnnnnnnnnnnnnnnnnnnnnnnnnnnnnnnnnnnnnnnnnnnnnnnnnnnnnnnnnnnnnnnnnnnnnnnnnnnnnnnnnnnnnnnnnnnnnnnnnnnnnnnnnnnnnnnnnnnnnnnnnnnnnnnnnnnnnnnnnnnnnnnnnnnnnnnnnnnnnnnnnnnnnnnnnnnnnnnnnnnnnnnnnnnnnnnnnnnnnnnnnnnnnnnnnnnnnnnnnnnnnnnnnnnnnnnnnnnnnnnnnnnnnnnnnnnnnnnnnnnnnnnnnnnnnnnnnnnnnnnnnnnnnnnnnnnnnnnnnnnnnnnnnnnnnnnnnnnnnnnnnnnnnnnnnnnnnnnnnnnnnnnnnnnnnnnnnnnnnnnnnnnnnnnnnnnnnnnnnnnnnnnnnnnnnnnnnnntacagggtgtgaaagctgttttggccgaaagttatgaaaaaatacacaaagatcatttgattggaattggcatagctccacttcagttccttccaggagaaaatgcagattccttgggcctctccggtagagaaacattttctttaacatttcctgaagaactgtctcctggaattacattgaatatacag

SEQ ID NO: 19526 - DNA, 169 bp, Macaca Mulatta
agctggtggccgtggtcatggacgtcttcaaagaaccagacctgcttttggacttgatggatgctgccatgcgccgctgggtacctgtctacctgcttctggaccgccagcagctgcctgccttcctggagctggcccagcagctgggggtgaacccctgggccacgga

SEQ ID NO: 19527 - DNA, 645 bp, Macaca Mulatta
  misc_feature (1)...(645): n = A,T,C or G
gggcattggctgatcttaagaaagcacaggagatagcaccagaagataaagctatccaggcagaactgctgaaagtcaaacaaaagataaaggcacagaaagataaagagaaggcagtatatgcaaaaatgtttgcttagaaaggattcagttttgcttattgtgtgttgattgtgtaaatgcaataagaaaatgtaaaggtttttgtctattaatatgatccctaatgtgtttcttttgacaccttagttcctcattgtttacagtttaggagtactgataggggttcatgcttaataaacgtgtcacaatacagtcaataaagtggttttgtttgtttncttgagatgnnnnnnnnnnnnnnnnnnnnnnnnnnnnnnnnnnnnnncnnnnnnnnnnnnnnnnntcctctgcctcccgggttccagtgaattctctgcctcaactnnnnnnnnnnnnnnnnnnnnnacttttgccacccaccccgccaattttgtatttttagaaaaaacgggttccccaaattgggcccgtcccctggtctgaatccctaacccgagatgcccccgcctgggcccccaaaggcgggataccgggtgaaccctgtgcccaccaaaaaagtttttaaaaggttcccgttttcca

SEQ ID NO: 19528 - DNA, 656 bp, Macaca Mulatta
  misc_feature (1)...(656): n = A,T,C or G
tagttctgacatgttatattgcttcagtagagccacaatatgtatctttgctgtaaagcataaggaatttttaaattctggaacactgagttagatggtaaatattgtcttaagaaagttgaattgggtgaggtgtggcagctcatgcttataatcccatcagnnnnnnnnnnnnnnnnnngcagatcacctgaggtcagcagtttgagagcagccaggcaaacatgacgaaactnnnnnnnnnnnnnnnnnnnnnnnnnnnnnnnnnccaggcgtggtagtgcgcannnnnnnnnnnnnnnnnnnnnnnnnnnnnnnnnnnnnnnnttgnnnnnnnnnnnnnnncnnnnnnnnnnnnnnnnnnnnnnnacannnnnnnnnnnnnnnnnnnnnnnnnnnnnnnnnnnnnnnnnnnnnnnnnnnnnnttgtgttgcctcatacaaaatgtatttggttttgttggagagtgtcagactgacctggaagtgaaacacagtttatatacagggaaaggattttattatccttaggagtgtcatccaagacatagagcttgaatgtgacattatttaaaaataacaacaaagaaggcagagccaggatataactagaaaaaggatgtcttttttattactccccctctaaacactgctgc

SEQ ID NO: 19529 - DNA, 3300 bp, Macaca Mulatta
  misc_feature (1)...(3300): n = A,T,C or G
agctgtgagcctgattgatttagaatcaaaggcaagtnaatgaactggagaattttcctttaaacacaatccagcactgccaagctgtgatgcattcatgcagctatgattcagtgcttgccctggtgtgcaaagagccaacccagaacaagccagatcttcatcttttccagtgtgatgaggttaaggnnnnnnnnnnnnnnnnnnnnnnnnnnnnnnnnnnnnnnnnnnnnnnnnnnnnnnnnnnnnnnnnnnnnnnnnnnnnnnnnnnnnnnnnnnnnnnnnnnnnnnnnnnnnnnnnnnnnnnnnnnnnnnnnnnnnnnnnnnnnnnnnnnnnnnnnnnnnnnnnnnnnnnnnnnnnnnnnnnnnnnnnnnnnnnnnnnnnnnnnnnnnnnnnnnnnnnnnnnntgagaaaccaaggcagtatcatgagcaggaagaaacgcctgagatgatggcagcccgcattgacagagatgtgnnnnnnnnnnnnnnnnnnnnnnnnnnnnnnnnnnnnnnnnnnnnnnnnnnnnnnnnnnnnnnnnnnnnnnnnnnnnnnnnnnnnnnnnnnnnnnnnnnnnnnnnnnnnnnnnnnnnnnnnnnnnnnnnnnnnnnnnnnnnnnnnnnnnnnnnnnnnnnnnnnnnnnnnnnnnnnnnnnnnnnnnnnnnnnnnnnnnnnnnnnnnnnnnnnnnnnnnnnnnnnnnnnnnnnnnnnnnnnnnnnnnnnnnnnnnnnnnnnnnnnnnnnnnnnnnnnnnnnnnnnnnnnnnnnnnnnnnnnnnnnnnnnnnnnnnnnnnnnnnnnnnnnnnnnnnnnnnnnnnnnnnnnnnnnnnnnnnnnnnnnnnnnnnnnnnnnnnnnnnnnnnnnnnnnnnnnnnnnnnnnnnnnnnnnnnnnnnnnnnnnnnnnnnnnnnnnnnnnnnnnnnnnnnnnnnnnnnnnnnnnnnnnnnnnnnnnnnnnnnnnnnnnnnnnnnnnnnnnnnnnnnnnnnnnnnnnnnnnnnnnnnnnnnnnnnnnnnnnnnnnnnnnnnnnnnnnnnnnnnnnnnnnnnnnnnnnnnnnnnnnnnnnnnnnnnnnnnnnnnnnnnnnnnnnnnnnnnnnnnnnnnnnnnnnnnnnnnnnnnnnnnnnnnnnnnnnnnnnnnnnnnnnnnnnnnnnnnnnnnnnnnnnnnnnnnnnnnnnnnnnnnnnnnnnnnnnnnnnnnnnnnnnnnnnnnnnnnnnnnnnnnnnnnnnnnnnnnnnnnnnnnnnnnnnnnnnnnnnnnnnnnnnnnnnnnnnnnnnnnnnnnnnnnnnnnnnnnnnnnnnnnnnnnnnnnnnnnnnnnnnnnnnnnnnnnnnnnnnnnnnnnnnnnnnnnnnnnnnnnnnnnnnnnnnnnnnnnnnnnnnnnnnnnnnnnnnnnnnnnnnnnnnnnnnnnnnnnnnnnnnnnnnnnnnnnnnnnnnnnnnnnnnnnnnnnnnnnnnnnnnnnnnnnnnnnnnnnnnnnnnnnnnnnnngaaacaaaggatggagtatggcccaagagcagctgatactccccctgctccatcacctcctccaacaccagctcctgttcctgtcccccttcccccttccactccagcacctgttcctgtgtcaaaggtcccagcaaatgtaacgcgtcaaaacagcagctccagtgacagtggtgtcaatatcatgcgagacagccagagacacaaacaacttccggtggaccgnnnnnnnnnnnnnnnnnnnnnnnnnnnnnnnnnnnnnnnnnnnnnnnnnnnnnnnnnnnnnnnnnnnnnnnnnnnnnnnnnnnnnnnnnnnnnnnnnnnnnnnnnnnnnnnnnnnnnnnnnnnnnnnnnnnnnnnnnnnnnnnnnnnnnnnnnnnnnnnnnnnnnnnnnnnnnnnnnnnngactgtcaatagtcttggagtattaaatggtgcacaacttttctccctcaataaggatgaactgaggacagtctgccctgaaggggcgagagtctatagccaaatcactgtacaaaaagctgcattagagnnaggatagcagtggcagctccgagttacaagaaattatgagaannnnnnnnnnnnnnnnnnnnnnnnnnnnnnnnnnnnnnnnnnnnnnnnnnnnnnnnnnnnnnnnnnnnnnnnnnnnnnnnnnnnnnnnnnnnnnnnnnnnnnnnnnnnnnnnnnnnnnnnnnnnnnnnnnnnnnnnnnnnnnnnnnnnnnnnnnnnnnnnnnnnnnnnnnnnnnnnnnnnnnnnnnnnnnnnnnnnnnnnnnnnnnnnnnnnnnnnnnnnnnnnnnnnnnnnnnnnnnnnnnnnnnnnnnnnnnnnnnnnnnnnnnnnnnnnnnnnnnnnnnnnnnnnnnnnnnnnnnnnnnnnnnnnnnnnnnnnnnnnnnnnnnnnnnnnnnnnnnnnnnnnnnnnnnnnnnnnnnnnnnnnnnnnnnnnnnnnnnnnnnnnnnnnnnnnnnnnnnnnnnnnnnnnnnnnnnnnnnnnnnnnnnnnnnnnnnnnnnnnnnnnnnnnnnnnnnnnnnnnnnnnnnnnnnnnnnnnnnnnnnnnnnnnnnnnnnnnnnnnnnnnnnnnnnnnnnnnnnnnnnnnnnnnnnnnnnnnnnnnnnnnnnnnnnnnnnnnnnnnnnnnnnnnnnnnnnnnnnnnnnnnnnnnnnnnnnnnnnnnnnnnnnnnnnnnnnnnnnnnnnnnnnnnnnnnnnnnnnnnnnnnnnnnnnnnnnnnnnnnnnnnnnnnnnnnnnnnnnnnnnnnnnnnnnnnnnnnnnnnnnnnnnnnnnnnnnnnnnnnnnnnnnnnnnnnnnnnnnnnnnnnnnnnnnnnnnnnnnnnnnnnnnnnnnnnnnnnnnnnnnnnnnnnnnnnnnnnnnnnnnnnnnnnnnnnnnnnnnnnnnnnnnnnnnnnnnnnnnnnnnnnnnnnnnnnnnnnnnnnnnnnnnnnnnnnnnnnnnnnnnnnnnnnnnnnnnnnnnnnnnnnnnnnnnnnnnnnnnnnnnnnnnnnnnnnnnnnnnnnnnnnnnnnnnnnnnnnnnnnnnnnnnnnnnnnnnnntaatcccgtgaaagagtccacatagagaaaagaaagatacctaaccttcaacaaatgttatttttggaaacacaatttttgtcattaaatgttatattatttcacatatataaaacagatgttatgtaagaatgttgtatattttaacataaatcatttagagaaattatctagattcattaattttcatagtgcctttttcacatgagtcagctggaaagtctgcaataaacagtatttgctgtctgttaata

SEQ ID NO: 19530 - DNA, 960 bp, Macaca Mulatta
  misc_feature (1)...(960): n = A,T,C or G
gtacttcctcctgtgctggttccaagacacagcgaatatatcctcagcacagnnnnnnnnnnnnnnnnnnnnnnnnnnnnnnnnnnnnnnnnnnnnnnnnnnnnnnnnnnnnnnnnnnnnnnnnnnnnnnnnnnnnnnnnnnnnnnnnnnnnnnnnnnnnnnncaatagcagttacccaaactctctgggagcagcagcagcacctaccctcactctcccaccagctcagacccaggaagtcctttccagatgccangctgatacgcccccacctgcttacctgcctcctgaagaccccatgacccaggatggctcccagccaatggacacaaacatgatggcgcctcccctgccctcagaaatcaacagaggagnnnnnnnnnnnnnnnnnnnnnnnnnnnnnnnnnnnnnnnnnnnnnnnnnnnnnnnnnnnnnnnnnnnnnnnnnnnnnnnnnnnnnnnnnnnnnnnnnnnnnnnnnnnnnnnnnnnnnnnnnnnnnnnnnnnnnnnnnnnnnnnnnnnnnnnnnnnnnnnnnnnnnnnnnnnnnnnnnnnnnnnnnnnnnnnnnnnnnnnnnnnnnnnnnnnnnnnnnnnnggagttcatctttattatgttggaggggaggtatatgccgaannnnnnnnnnnnnnnnnnnnnnnnnnnnnnnnnnnnnnnnnnnnnnnnnnnnnnnnnnnnnnnnnnnnnnnnnnnnnnnnnnnnnnnnnnnnnnnnnnnnnnnnnnnnnnnnnnnnnnnnnnnnnnnnnnnnnnnnnnnnnnnnnnnnnnnnnnnnnnnnnnnnnnnnnnnnnnnnnnnnnnnnnnnnnnnnnnnnnnnnnnnnnnnnnnnnnngggctggggagcagaataccaccgccaggatgttactagcaccccctgctggattgagatacatctgcacggccccctccagtggctggataaagttcttactcaaatg

SEQ ID NO: 19531 - DNA, 378 bp, Macaca Mulatta
  misc_feature (1)...(378): n = A,T,C or G
gggtttgttgcatcggaccagtgtccctaatgaagtagttgattatatcatatttggcacagttattcaggaagtgaaaacaagcaatgtggctagagagnnggctgcccttggagctggcttctctgacaagactcctgctcacactgtcaccatggcttgtatctctgccaaccaagccatgaccacaggtttggcttgattgcttctggccagtgtgatgtgatcgtggcaggtggtgttgagttgatgtccgatatccctattcgtcactcaaggaaaatgagaaaactgatgcttgatctcaataaggccaaatctatgggccagcgactgtctttaatctctaaattccgattgaatttcctagcacctgag

SEQ ID NO: 19532 - DNA, 614 bp, Macaca Mulatta
  misc_feature (1)...(614): n = A,T,C or G
acccaccatgtaaaacagataccagagatttagaagtgattcctacttacagaaggaggtggattcaaatacttcaaaagtcccttcctctgctcagtgtttatagttcaatgaataatttcagtatttgtatgtgttcttgtcattctattttttctgaacatcttccaaaaatttgaaaataaaatgaacagctttttcttcttnnnnnnnnnnnnnnnnnnnnnnnnnnnnnnnnnnnnnnnnnnnnnnngnnnnnnnnnnnnnnnnnnnnnnnnnnngttcactggccgtacgttttacaagnnnnnnnnnnnnnnnnnnnnnngtnnnnnnnnnnnnnnnnnnnnnnnnnnnnnnnnnnnnnnnnnnnnnnnnnnnnnnnnnnnnnnnnnnnnnnnnnnnnnnnnnnnnnnnnnnnnnnnnnnnnnnnnnnnnnnnnnnnnnnnnnnnnnnnnnnnnnnnnnnnnnnnnnnnnnnnnnnnnnnnnnnnnnnnnnnnnnnnnnnnnnnnnnnnnnnnnnnnnnnnnnnnnnnnnnnnnnnnnnnnnnnnnnnnnnnnnnnnnnnnnnnnnnnnnnnnnnnnnnnnnnnnnnnnnnnnnnnnnnnnnnnnn

SEQ ID NO: 19533 - DNA, 752 bp, Macaca Mulatta
  misc_feature (1)...(752): n = A,T,C or G
gcatactgctcttctaagtcaactgttggtgcatctctatatcgtccaagtgttacgcccgtgatatgaacaatgaccacttccaaatgtcagtgaacagtggctccgtgagtgtcatcatggtacctctccccattgcacacgagtcaacaaactgctctagaaaattaagttctcccaggcccagagtaaacatatactcgatattcttccatactttattataccgtaagaagcaaacttctgaaggagatacaactaaagataccataggtgtcctagtttgtcnnnnnnnnnnnnnnnnnnnnnnnnnnnnnnnnnnnnnnnnnnnnnnnnnnnnnnnnnnnnnnnnnnnnnnnnnnnnnnnnnnnnnnnnnnnnnnnnnnnnnnnnnnnnnnnnnnnnnnnnnnnnnnnnnnnnnnnnnnnnnnnnnnnnnnnnnnnnnnnnnnnnnnnnnnnnnnnnnnnnnnnnnnnnnnnnnnnnnnnnnnnnnnnnnnnnnnnnnnnnnnnnnnnnnnnnnnnnnnnnnnnnnnnnnnnnnnnnnnnnnnnnnnnnnnnnnnnnnnnnnnnnnnnnnnnnnnnnnnnnnnnnnnnnnnnnnnnnnnnnnnnnnnnnnnnnnnnnnnnnnnnnnnnnnnnnnnnnnnnnnnnnnnnnnnnnnnnnnnnnnnnnnnnnnnnnnnnnnnnnnnnnnnnnnnnnnnnnnnnnnnnnnttcgtgtacatcacctattcagtttctgggtcgagtgcg

SEQ ID NO: 19534 - DNA, 2023 bp, Macaca Mulatta
  misc_feature (1)...(2023): n = A,T,C or G
ggtgctgctcctacgtgggtcgccgcggcgggggcccccaggccatctccatcggcaagaactgtgacaagttcggcatcgtggtccacgagctgggccacgtcgtcggcttctggcacgaacacactcggccagaccgggaccgccacgtttccatcgttcgtgagaacatccagccagnnnnnnnnnnnnnnnnnnnnnnnnnnnnnnnnnnnnnnnnnnnnnnnnnnnnnnnnnnnnnnnnnnnnnnnnnnnnnnnnnnnnnnnnnnnnnnnnnnnnnnnnnnnnnnnnnnnnnnnnnnnnnnnnnnnnnnnnnnnnnnnnnnnnnnnnnnnnnnnnnnnnnnnnnnnnnnnnnnnnnnnnnnnnnnnnnnnnnnnnnnnnnnnnnnnnnnnnnnnnnnnnnnnnnnnnnnnnnnnnnnnnnnnnnnnnnnnnnnnnnnnnnnnnnnnnnnnnnnnnnnnnnnnnnnnnnnnnnnnnnnnnnnnnnnnnnnnnnnnnnnnnnnnnnnnnnnnnnnnnnnnnnnnnnnnnnnnnnnnnnnnnnnnnnnnnnnnnnnnnnnnnnnnnnnnnnnnnnnnnnnnnnnnnnnnnnnnnnnnnnnnnnnnnnnnnnnnnnnnnnnnnnnnnnnnnnnnnnnnnnnnnnnnnnnnnnnnnnnnnnnnnnnnnnnnnnnnnnnnnnnnnnnnnnnnnnnnnnnnnnnnnnnnnnnnnnnnnnnnnnnnnnnnnnnnnnnnnnnnnnnnnnagccatctgcgggggtgatgtgaaaaaggactatggccacattcaatcacccaactacccagatgattaccggcccagcaaagtctgcatctggcggatccaggtgtctgagggtttccacgtgggcctcacattccagtcctttgannnnnnnnnnnnnnnnnnnnnnnnnnnnnnnnnnnnnnnnnnnnnnnnnnnnnnnnnnnnnnnnnnnnnnnnnnnnnnnnnnnnnnnnnnnnnnnnnnnnnnnnnnnnnnnnnnnnnnnnnnnnnnnnnnnnnnnnnnnnnnnnnnnnnnnnnnnnnnnnnnnnnnnnnnnnnnnnnnnnnnnnnnnnnnnnnnnnnnnnnnnnnnnnnnnnnnnnnnnnnnnnnnnnnnnnnnnnnnnnnnnnnnnnnnnnnnnnnnnnnnnnnnnnnnnnnnnnnnnnnnnnnnnnnnnnnnnnnnnnnnnnnnnnnnnnnnnnnnnnnnnnnnnnnnnnnnnnnnnnnnnnnnnnnnnnnnnnnnnnnnnnnnnnnnnnnnnnnnnnnnnnnnnnnnnnnnnnnnnnnnnnnnnnnnnnnnnnnnnnnnnnnnnnnnnnnnnnnnnnnnnnnnnnnnnnnnnnnnnnnnnnnnnnnnnnnnnnnnnnnnnnnnnnnnnnnnnnnnnnnnnnnnnnnnnnnnnnnnnnnnnnnnnnnnnnnnnnnnnnnnnnnnnnnnnnnnnnnnnnnnnnnnnnnnnnnnnnnnnnnnnnnnnnnnnnnnnnnnnnnnnnnnnnnnnnnnnnnnnnnnnnnnnnnnnnnnnnnnnnnnnnnnnnnnnnnnnnnnnnnnnnnnnnnnnnnnnnnnnnnnnnnnnnnnnnnnnnnnnnnnnnnnnnnnnnnnnnnnnnnnnnnnnnnnnnnnnnnnnnnnnnnnnnnnnnnnnnnnnnnnnnnnnnnnnnnnnnnnnnnnnnnnnnnnnnnnnnnnnnnnnnnnnnnnnnnnnnnnnnnnnnnnnnnnnnnnnnnnnnnnnnnnnnnnnnnnnnnnnnnnnnnnnnnnnnnnnnnnnnnnnnnnnnnnnnnnnnnnnnnnnnnnnnnnnnnnnnnaccttcatggagatggacatcgagtcccaacctgagtgtgcctacgaccacctggaggtgttcgacgggcgagacgccaaggcccccgtcctcggccgcttctgtgggagcaagaagcctgagcccgtcctggccacaggcagccgcatgttcctgcgcttctactcagataactccgtccagcgaaagggcttccaggcttcccacggcacag

SEQ ID NO: 19535 - DNA, 1348 bp, Macaca Mulatta
  misc_feature (1)...(1348): n = A,T,C or G
cctactattggtttaacgtggaaacagtagatgtaagaacatttgtttcacagtatgggatgttggtggtcaagatagaattaggcctctctggaagcattacttccagaatacccagggacttatttttgtggtagacagcaatgatcgtgaaagaattcaggaagtagcagatgagctgcagaaaatgcttctggtagatgagttgagagatgcagtgctactgctttttgcaaacaaacaagatttgccaaatgctatggccatcagtgaaatgacagataaactagggcttcagtctcttcgtaacagaacatggtatgttcaagccacttgtgcaacacaagggactggtctgtatgaaggacttgactggctgtcaaatgagctttcaaaacgttaaatgaaactggatatctaaccaaggacatgtttgataaaattggcctaggcttgttacaacaaaattagtttgtatcttggttattaaacagtatctgggactcggttgggcagaatattattttgttgccaattattgtttaccaagtataatgttgctatttagcaattgtgcttggttttaaagaaattctccttgggaaaaaagtatcctttttaaattttacttcccagaaagtgtaaatgcctggacatagctattgtgaaacctttaaaataaattgggtttgagtgcctttttaagcccccagataaattaatggttttaaaaggttatcccccctttgctactttaactggatacccttttatcatttccctgaaaagtcgtcctgcctaaattttaaaaaaatggaagccattccccccttgggaatttannnnnnnnnnnnnnnnnnnnnnnnnnnnnnnnnnnnnnnnaaaaaccgggcttggggnnnnnnnnnnnnnnnnnnnnnnnnnnaaaaaaacccttactctccgcttctttttttgcaccgtggnnnnnnnnnnnnnnnnnnnnnnnnnnnaaatattggagccctccgggggccccaaatattcagccctaaaaacttttaataccccttgggggggggggcgtttcgggattttttccataaccccacaatatatactccctgcggggggccgcccggccccccaaagaacaaatgtcgcaagtttttcgaacggggcggttcatataaaaaacctcccaccagagaaagaggggcccgcgcccgcttagataaataaggaggggcgtcctctctcactaagggcgccaagagcacgccccctctctcgtgcacctaacccctcgcccgttagcttctcttctccgccctgcccctctcgtgcccgagaatacggcccgccgccc

SEQ ID NO: 19536 - DNA, 880 bp, Macaca Mulatta
  misc_feature (1)...(880): n = A,T,C or G
tgcgtgagaacgccggcggtgaccgtggccacagcggtgacccagtgagaggaaggcggcggcggcgggaagtcactgctgctgtgggttcgggttggctactgaaggcggtaccggcctctcggagcagaccgggggagggctcaggtgnnnnnnnnnnnnnnnnnnnnnnnnnnnnnnnnnnnnnnnnnnnnnnnnnnnnnnnnnnnnnnnnnnnnnnnnnnnnnnnnnnnnnnnnnnnnnnnnnnnnnnnnnnnnnnnnnnnnnnnnnnnnnnnnnnnnnnnnnnnnnnnnnnnnnnnnnnnnnnnnnnnnnnnnnnnnnnnnnnnnnnnnnnnnnnnnnnnnnnnnnnnnnnnnnnnnnnnnnnnnnnnnnnnnnnnnnnnnnnnnnnnnnnnnnnnnnnnnnnnnnnnnnnnnnnnnnnnnnnnnnnnnnnnnnnnnnnnnnnnnnnnnnnnnnnnnnnnnnnnnnnnnnnnnntttgtattatctactgtcagagaccctttatccattcccagagcagattcagagaaaaagtgggtctctcttcttccgagcagatgttctggaatgcaatgttaaagaaagggtgnnnnnnnnnnnnnnnnnnnnnnnnnnnnnnnnnnnnnnnnnnnnnnnnnnnnnnnnnnnnnnnnnnnnnnnnnnnnnnnnnnnnnnnnnnnnnnnnnnnnnnnnnnnnnnnnnnnnnnnnnnnnnnnnnnnnnnnnnnnnnnnnnnnnnnnnnnnnnnnnnnnnnnnnnnnnnnnnnnnnnnnnnnnnnnnnnnnnnnnnnnngtatgagttgccttttcttaggcatgattggatcataaaccgttgcgggacagaagttagatatgtgattgaggattatgatg

SEQ ID NO: 19537 - DNA, 420 bp, Macaca Mulatta
  misc_feature (1)...(420): n = A,T,C or G
ggttataccaaaagattacaagacgatggctgctttagcaaaagccattgagaagaatgtgctgttttcacatcttgatgataatgagagaagnagtgatatttttgatgccatgttttcggtctcctttatcgcaggagaaactgtgattcagcaaggtnnnnnnnnnnnnnnnnnnnnnnnnnnnnnnnnnnnnnnnnnnnnnnnnnnnnnnnnnnnnnnnnnnnnnnnnnnnnnnnnnnnnnnnnnnnnnnnnnnnnnnnnnnnnnnnnnnnnnnnnnnnnnnnnnnnnnnnnnnnnnnnnnnnnnnnnnnnnnnnnnnnnnnnnnnnnnnnnnnnnnnnnnnnnnnnnnnnnnnnnnnngggaagcacactgagaaagcggaagatgtatgaggaattcctcagtaaagtctctat

SEQ ID NO: 19538 - DNA, 3370 bp, Macaca Mulatta
  misc_feature (1)...(3370): n = A,T,C or G
gacattcggaaattctttggagtaataccaagtggaaagaaacttgtaactgaaacagtaaagcagaatgagaaaacaaagtctgatgaagaaactttaaaagcaaagaaaggaataaaggaaatcaaggtnnnnnnnnnnnnnnnnnnnnnnnnnnnnnnnnnnnnnnnnnnnnnnnnnnnnnnnnnnnnnnnnnnnnnnnnnnnnnnnnnnnnnnnnnnnnnnnnnnnnnnnnnnnnnnnnnnnnnnnnnnnnnnnnnnnnnnnnnnnnnnnnnnnnnnnnnnnnnnnnnnnnnnnnnnnnnnnnnnnnnnnnnnnnnnnnnnnnnnnnnnnnnnnnnnnnnnnnnnnnnnnnnnnnnnnnnnnnnnnnnnnnnnnnnnnnnnnnnnnnnnnnnnnnnnnnnnnnnnnnnnnnnnnnnnnnnnnnnnnnnnnnnnnnnnnnnnnnnnnnnnnnnnnnnnnnnnnnnnnnnnnnnnnnnnnnnnnnnnnnnnnnnnnnnnnnnnnnnnnnnnnnnnnnnnnnnnnnnnnnnnnnnnnnnnnnnnnnnnnnnnnnnnnnnnnnnnnnnnnnnnnnnnnnnnnnnnnnnnnnnnnnnnnnnnnnnnnnnnnnnnnnnnnnnnnnnnnnnnnnnnnnnnnnnnnnnnnnnnnnnnnnnnnnnnnnnnnnnnnnnnnnnnnnnnnnnnnnnnnnnnnnnnnnnnnnnnnnnnnnnnnnnnnnnnnnnnnnnnnnnnnnnnnnnnnnnnnnnnnnnnnnnnnnnnnnnnnnnnnnnnnnnnnnnnnnnnnnnnnnnnnnnnnnnnnnnnnnnnnnnnnnnnnnnnnnnnnnnnnnnnnnnnnnnnnnnnnnnnnnnnnnnnnnnnnnnnnnnnnnnnnnnnnnnnnnnnnnnnnnnnnnnnnnnnnnnnnnnnnnnnnnnnnnnnnnnnnnnnnnnnnnnnnnnnnnnnnnnnnnnnnnnnnnnnnnnnnnnnnnnnnnnnnnnnnnnnnnnnnnnnnnnnnnnnnnnnnnnnnnnnnnnnnnnnnnnnnnnnnnnnnnnnnnnnnnnnnnnnnnnnnnnnnnnnnnnnnnnnnnnnnnnnnnnnnnnnnnnnnnnnnnnnnnnnnnnnnnnnnnnnnnnnnnnnnnnnnnnnnnnnnnnnnnnnnnnnnnnnnnnnnnnnnnnnnnnnnnnnnnnnnnnnnnnnnnnnnnnnnnnnnnnnnnnnnnnnnnnnnnnnnnnnnnnnnnnnnnnnnnnnnnnnnnnnnnnnnnnnnnnnnnnnnnnnnnnnnnnnnnnnnnnnnnnnnnnnnnnnnnnnnnnnnnnnnnnnnnnnnnnnnnnnnnnnnnnnnnnnnnnnnnnnnnnnnnnnnnnnnnnnnnnnnnnnnnnnnnnnnnnnnnnnnnnnnnnnnnnnnnnnnnnnnnnnnnnnnnnnnnnnnnnnnnnnnnnnnnnnnnnnnnnnnnnnnnnnnnnnnnnnnnnnnnnnnnnnnnnnnnnnnnnnnnnnnnagatgaagaaagagtccaaactggagagaacaccccaaaaaaatgttcaaggcaaaagaaaaattagtccatctaaaaaggaatcggaatctaaaaagagcaagccgacttccaaaagggacagtttggcaaagacaataaaaaaggaaacagatgtgttttggagaggcctggatttcaaggagcaggtggccgaggaaacaagtggtgacagcaaggctaggaatttggctgatgacagcagtgaaaacaaagtggaaaatttgctctgggtggataaatataagccaacctcactcaagaccataatggacagcnnnnagcaaggtgaccagagctgtgccaaccatttctacgctggctccgaaactggcacaagagttcttccgtaaataaaaaacacgnnnnnnnnnnnnnnnnnnnnnnnnnnnnnnnnnnnnnnnnnnnnnnnnnnnnnnnnnnnnnnnnnnnnnnnnnnnnnnnnnnnnnnnnnnnnnnnnnnnnnnnnnnnnnnnnnnnnnnnnnnnnnnnnnnnnnnnnnnnnnnnnnnnnnnnnnnnnnnnnnnnnnnnnnnnnnnnnnnnnnnnnnnnnnnnnnnnnnnnnnnnnnnnnnnnnnnnnnnnnnnnnnnnnnnnnnnnnnnnnnnnnnnnnnnnnnnnnnnnnnnnnnnnnnnnnnnnnnnnnnnnnnnnnnnnnnnnnnnnnnnnnnnnnnnnnnnnnnnnnnnnnnnnnnnnnnnnnnnnnnnnnnnnnnnnnnnnnnnnnnnnnnnnnnnnnnnnnnnnnnnnnnnnnnnnnnnnnnnnnnnnnnnnnnnattgttttcatcttcgttttcaagacctcgggttgaacagattaaggnagggtgctatgatgtctattgcatttaaagaaggtttaaagattccccctccagcaatgaatgaaataattttgggagccaatcaagatatcagacaggtnaggttttacataatctgagtatgtggtgtgcacgaagtaaagcattaacctatgaccaggccaaagctgattctcacagagccaaaaaggatatcaaaatggnnnnnnnnnnnnnnnnnnnnnnnnnnnnnnnnnnnnnnnnnnnnnnnnnnnnnnnnnnnnnnnnnnnnnnnnnnnnnnnnnnnnnnnnnnnnnnnnnnnnnnnnnnnnnnnnnnnnnnnnnnnnnnnnnnnnnnnnnnnnnnnnnnnnnnnnnnnnnnnnnnnnnnnnnnnnnnnnnnnnnnnnnnnnnnnnnnnnnnnnnnnnnnnnnnnnnnnnnnnnnnnnnnnnnnnnnnnnnnnnnnnnnnnnnnnnnnnnnnnnnnnnnnnnnnnnnnnnnnnnnnnnnnnnnnnnnnnnnnnnnnnnnnnnnnnnnnnnnnnnnnnnnnnnnnnnnnnntcccgagctggctggggaagcactcgtctacaggcaaacacgatcgtattgttcaggacctggccttgcatatgagtctcannnnnnnnnnnnnnnnnnnnnnnnnnnnnnnnnnnnnnnnnnnnnnnnnnnnnnnnnnnnnnnnnnnnnnnnnnnnnnnnnnnnnnnnnnnnnnnnnnnnnnnnnnnnnnnnnnnnnnnnnnnnnnnnnnnnnnnnnnnnnnnnnnnnnnnnnnnnnnnnnnnnnnnnnnnnnnnnnnnnnnnnnnnnnnnnnnnnnnnnnnnnnnnnnnnnaggtgaaagcagccttcacaagagcttacaataaggaagcccaccttactccatattcacttcaagctataaaggcatctagacacagcacaagcccatccctggattcggaatacaatgaagagttaaatgaagatgactctcaatctgatgagaaagaccaagatgctatagaaactgatgccatgatcaa

SEQ ID NO: 19539 - DNA, 1512 bp, Macaca Mulatta
  misc_feature (1)...(1512): n = A,T,C or G
naatcctggaacaaggctacagcgtcgaagatccccagcgctgcgggcccggagagcagccctaacggcgcctcgtacgctagtgccctcccttttcagtccgtgtccctccctgggccgggctggcactcttgctttccccgtccctcatggcgctgctccgacgcccgacggtnnnnnnnnnnnnnnnnnnnnnnnnnnnnnnnnnnnnnnnnnnnnnnnnnnnnnnnnnnnnnnnnnnnnnnnnnnnnnnnnnnnnnnnnnnnnnnnnnnnnnnnnnnnnnnnnnnnnnnnnnnnnnnnnnnnnnnnnnnnnnnnnnnnnnnnnnnnnnnnnnnnnnnnnnnnnnnnnnnnnnnnnnnnnnnnnnnnnnnnnnnnnnnnnnnnnnnnnnnnnnnnnnnnnnnnnnnnnnnagggtccttctcccacacctgaggatgtctccatgaaggaagagaatctctgccaagctttttctgatgccttgctctgcaaaatcgaggacattgataatgaagannnnnnnnnnnnnnnnnnnnnnnnnnnnnnnnnnnnnnnnnnnnnnnnnnnnnnnnnnnnnnnnnnnnnnnnnnnnnnnnnnnnnnnnnnnnnnnnnnnnnnnnnnnnnnnnnnnnnnnnnnnnnnnnnnnnnnnnnnnnnnnnnnnnnnnnnnnnnnnnnnnnnnnnnnnnnnnnnnnnnnnnnnnnnnnnnnnnnnnnnnnnnnnnnnnnnnnnnnnnnnnnnnnnnnnnnnnnnnnnnnnnnnnnnnnnnnnnnnnnnnnnnnnnnnnnnnnnnnnnnnnnnnnnnnnnnnnnnnnnnnnnnnnnnnnnnnnnnnnnnnnnnnnnnnnnnnnnnnnnnnnnnnnnnnnnnnnnnnnnnnnnnnnnnnnnnnnnnnnnnnnnnnnnnnnnnnnnnnnnnnnnnnnnnnnnnnnnnnnnnnnnnnnnnnnnnnnnnnnnnnnnnnnnnnnnnnnnnnnnnnnnnnnnnnnnnnnnnnnnnnnnnnnnnnnnnnnnnnnnnnnnnnnnnnnnnnnnnnnnnnnnnnnnnnnnnnnnnnnnnnnnnnnnnnnnnnnnnnnnnnnnnnnnnnnnnnnnnnnnnnnnnnnnnnnnnnnnnnnnnnnnnnnnnnnnnnnnnnnnnnnnnnnnnnnnnnnnnnnnnnnnnnnnnnnnnnnnnnnnnnnnnnnnnnnnnnnnnnnnnnnnnnnnnnnnnnnnnnnnnnnnnnnnnnnnnngccatcaagaataagtatgcaagcagcaaactcctgaagatcagcacgatccctcagctgaactcaaaagccgtcaaagatcttgcctccccactgatgggaaggtcctaggctgccatcgcccctggggatgtgtgcttcgttgtaccctttttcttactggtttagaactcttgattttgtacatagtcctctggtctatctcatgaaacctcttctcagaccaattttctaaatatatattgaggaaaaataaagtgattggtttttcttaaggta

SEQ ID NO: 19540 - DNA, 2702 bp, Macaca Mulatta
  misc_feature (1)...(2702): n = A,T,C or G
agttgtgaagtgtttaccagtgaaaccaccagagaatggaaaaattatgagtggtgcaatggaaccggatcgggaatactattttggacaagtagtacggtttgcatgtaactcaggctacaagattgaaggagataacgaaatgcattgttcagaagatggtgtttggagtaaagagaaaccaaagtgtgtgnnnnnnnnnnnnnnnnnnnnnnnnnnnnnnnnnnnnnnnnnnnnnnnnnnnnnnnnnnnnnnnnnnnnnnnnnnnnnnnnnnnnnnnnnnnnnnnnnnnnnnnnnnnnnnnnnnnnnnnnnnnnnnnnnnnnnnnnnnnnnnnnnnnnnnnnnnnnnnnnnnnnnnnnnnnnnnnnnnnnnnnnnnnnnnnnnnnnnnnnnnnnnnnnnnnnnnnnnnnnnnnnnnnnnnnnnnnnnnnnnnnnnnnnnnnnnnnnnnnnnnnnnnnnnnnnnnnnnnnnnnnnnnnnnnnnnnnnnnnnnnnnnnnnnnnnnnnnnnnnnnnnnnnnnnnnnnnnnnnnnnnnnnnnnnnnnnnnnnnnnnnnnnnnnnnnnnnnnnnnnnnnnnnnnnnnnnnnnnnnnnnnnnnnnnnnnnnnnnnnnnnnnnnnnnnnnnnnnnnnnnnnnnnnnnnnnnnnnnnnnnnnnnnnnnnnnnnnnnnnnnnnnnnnnnnnnnnnnnnnnnnnnnnnnnnnnnnnnnnnnnnnnnnnnnnnnnnnnnnnaaaatgttattttcattatttggcaaatggatataatgaaaataatggaagaaagtttgtacagggtaacactgtagaagtttcctgccatcctggctacagtcttccaaaagagcagaccacagttacatgtacagagaatggctggtctcctactcccagatgcatccgtgtcannnnnnnnnnnnnnnnnnnnnnnnnnnnnnnnnnnnnnnnnnnnnnnnnnnnnnnnnnncatatgccttaaataaacaagcgaaatatcagtgcaaactaggatacataacagcagatggtgaaacatcaggatcaattacctgtcggaaaaatggatggtcagctcaacccacgtgcattannnnnnnnnnnnnnnnnnnnnnnnnnnnnnnnnnnnnnnnnnnnnnnnnnnnnnnnnnnnnnnnnnnnnnnnnnnnnnnnnnnnnnnnnnnnnnnnnnnnnnnnnnnnnnnnnnnnnnnnnnnnnnnnnnnnnnnnnnnnnnnnnnnnnnnnnnnnnnnnnnnnnnnnnnnnnnnnnnnnnnnnnnnnnnnnnnnnnnnnnnnnnnnnnnnnnnnnnnnnnnnnnnnnnnnnnnnnnnnnnnnnnnnnnnnnnnnnnnnnnnnnnnnnnnnnnnnnnnnnnnnnnnnnnnnnnnnnnnnnnnnnnnnnnnnnnnnnnnnnnnnnnnnnnnnnnnnnnnnnnnnnnnnnnnnnagagcaagtacagtcgtgtggtccacctcctgaactcctcaatgggaatgttaaggaaaaaacgaaagaagaatatagacacagtgaagtggtggaatattattgcaatcctaaatttctactgaagggacctaataaaattcaatgtgttgatggagcgtggacaactttgccagtgtgtannnggaggagagtacctgtggagagatacctgaacttgaacacggctattccgagctttcttcccctccttattactatggagattcggtggggttcaattgctcagaatcatttacaatgattgggcacagatcaattacgtgtattcatggagtatggacccaacttcctcagtgtgtgnnnnnnnnnnnnnnnnnnnnnnnnnnnnnnnnnnnnnnnnnnnnnnnnnnnnnnnnnnnnnnnnnnnnnnnnnnnnnnnnnnnnnnnnnnnnnnnnnnnnnnnnnnnnnnnnnnnnnnnnnnnnnnnnnnnnnnnnnnnnnnnnnnnnnnnnnnnnnnnnnnnnnnnnnnnnnnnnnnnnnnnnnnnnnnnnnnnnnnnnnnnnnnnnnnnnnnnnnnnnnnnnnnnnnnnnnnnnnnnnnnnnnnnnnnnnnnnnnnnnnnnnnnnnnnnnnnnnnnnnnnnnnnnnnnnnnnnnnnnnnnnnnnnnnnnnnnnnnnnnnnnnnnnnnnnnnnnnnnnnnnnnnnnnnnnnnnnnnnnnnnnnnnnnnnnnnnnnnnnnnnnnnnnnnnnnnnnnnnnnnnnnnnnnnnnnnnnnnnnnnnnnnnnnnnnnnnnnnnnnnnnnnnnnnnnnnnnnnnnnnnnnnnnnnnnnnnnnnnnnnnnnnnnnnnnnnnnnnnnnnnnnnnnnnnnnnnnnnnnnnnnnnnnnnnnnnnnnnnnnnnnnnnnnnnnnnnnnnnnnnnnnnnnnnnnnnnnnnnnnnnnnnnnnnnnnnnnnnnnnnnnnnnnnnnnnnnnnnnnnnnnnnnnnnnnnnnnnnnnnnnnnnnnnnnnnnnnnnnnnnnnnnnnnnnnnnnnnnnnnnnnnnnnnnnnnnnnnnnnnnnnnnnnnnnnnnnnnnnnnnnnnnnnnnnnnnnnnnnnnnnnnnnnnnnnnnnnnnnnnnnnnnnnnnnnnnnnnnnnnnnnnnnnnnnnnnnnnnnnnnnnnngacttacagttgtgcaacatattacaaaatggatggacccagtactgtaacatgcattaatagcagatggacaggaaggccaacatgcaga

SEQ ID NO: 19541 - DNA, 765 bp, Macaca Mulatta
  misc_feature (1)...(765): n = A,T,C or G
gggtgttctgagctggatgccgggatccagaatcgctgcacagttccaacaggacagcgccctcccccatgtgctgggaggggaccctccatttctccccctcacccatgctgagtgtagagctggggcctgggtagtgggtgggggccgggtgggaggcggcagtagtcttagcctgtgcactctcttccttgggtgtttcgtgctggctcctgggaactacaaatcccagagtgcggtgcgcccggcctcatttctgatagatcccgcttgggggaggtggtgcgtggttactgagctgtgcatcttgggacatgtagtagcccaggtcggcttgtcactcgctgtgagatggggagattttgtcttttgatttatccctggagggctggcagggttgtagatgaaggaggaatgatctgagcattggttcccctgacacatcttgctagccccagggttagagtgggcagggcagagctgtgcagcacctgggagaggttcctttcccatgggcagcctggggtcccaggaacaagccagggcgagtagcatgtccgcctgagcagagtgtggccccagaaagctgaagagtgtgggtggcagagagctttgagggcaaagccacccgcangggcgtgtgtgtggcagggcttggcatgtgatggcagctccaggcatggctgctgcttgtatggcttttcttgggcctctgaccctgctgccccgttcttttcaacatcacaagatggagccggcctctcc

SEQ ID NO: 19542 - DNA, 242 bp, Macaca Mulatta
  misc_feature (1)...(242): n = A,T,C or G
cccctgagaggacctgtcgggcaactttaatcaatgagtctccggtgctaagctacatggaccttgtgggcttcagctaccaggtggccaatggcatggagttcctggcctccaagaacntgcgtgcaccgagacctggcggccaggaacgtgctcatctgcgagggcaagctggtcaagatctgtgactttggcctggctcgagacatcatgcgggattcgaattacatctccaaaggcag

SEQ ID NO: 19543 - DNA, 1617 bp, Macaca Mulatta
  misc_feature (1)...(1617): n = A,T,C or G
gagccctggagaaggagcccgtgccctccgccctgcccccgtccctcatccccccctccaagagaaagaaggctgtgttccctggcgccgtccctgtcctgcccgccagccccccgccaaaagacagcctccgctccacgccgtcccacggcagcgtcagcagcctcaacagcacagggagcctgtcccccaagnnnnnnnnnnnnnnnnnnnnnnnnnnnnnnnnnnnnnnnnnnnnnnnnnnnnnnnnnnnnnnnnnnnnnnnnnnnnnnnnnnnnnnnnnnnnnnnnnnnnnnnnnnnnnnnnnnnnnnnnnnnnnnnnnnnnnnnnnnnnnnnnnnnnnnnnnnnnnnnnnnnnnnnnnnnnnnnnnnnnnnnnnnnnnnnnnnnnnnnnnnnnnnnnnnnnnnnnnnnnnnnnnnnnnnnnnnnnnnnnnnnnnnnnnnnnnnnnnnnnnnnnnnnnnnnnnnnnnnnnnnnnnnnnnnnnnnnnnnnnnnnnnnnnnnnnnnnnnnnnnnnnnnnnnnnnnnnnnnnnnnnnnnnnnnnnnnnnnnnnnnnnnnnnnnnnnnnnnnnnnnnnnnnnnnnnnnnnnnnnnnnnnnnnnnnnnnnnnnnnnnnnnnnnnnnnnnnnnnnnnnnnnnnnnnnnnnnnnnnnnnnnnnnnnnnnnnnnnnnnnnnnnnnnnnnnggaattacaaaatgacctagaccgggaaacaagcagtttgcaggagcttgaggctcagaaacaggatgctcaagaccgcctggacgagatggaccannnnnnnnnnnnnnnnnnnnnnnnnnnnnnnnnnnnnnnnnnnnnnnnnnnnnnnnnnnnnnnnnnnnnnnnnnnnnnnnnnnnnnnnnnnnnnnnnnnnnnnnnnnnnnnnnnnnnnnnnnnnnnnnnnnnnnnnnnnnnnnnnnnnnnnnnnnnnnnnnnnnnnnnnnnnnnnnnnnnnnnnnnnnnnnnnnnnnnnnnnnnnnnnnnnnnnnnnnnnnnnnnnnnnnnnnnnnnnnnnnnnnnnnnnnnnnnnnnnnnncaggcaaggagcaaactttcccagctgcacgaaagccgccaggaggcccacaggagcctggagcagtatgaccaggtgctcgatggagcccatggcgccagcctgaccgacctggccgacctgagcgaaggcgtctccctggcagagaggggcggttttggagccatggnnnnnnnnnnnnnnnnnnnnnnnnnnnnnnnnnnnnnnnnnnnnnnnnnnnnnnnnnnnnnnnnnnnnnnnnnnnnnnnnnnnnnnnnnnnnnnnnnnnnnnnnnnnnnnnnnnnnnnnnnnnnnnnnnnnnnnnnnnnnnnnnnnnnnnnnnnnnnnnnnnnnnnnnnnnnnnnnnnnnnnnnnnnnnnnnnnnnnnnnnnnnnnnnnnnnnnnnnnnnnnnnnnnnnnnnnnnnnnnnnnnnnnnnnnnnnnnnnnnnnnnnnnnnnnnnnnnnnnnnnnnnnnnnnnnnnnnnnnnnnnnnnnnnnnnnnnnnnnnnnnnnnnnnnnnnnnnnnnnnnnnnnnnnnnnnnnnnnnnnnnnnnnnnncagatccctttggaaccttagatcccttcggaagt

SEQ ID NO: 19544 - DNA, 241 bp, Macaca Mulatta
gttgctgatctgatctgaagcagatcgaggggatgagtgaagactgttcacctgttctgtactcctgtttggaagtatttaggtccagcttctatttaatggggtttatatggactctcttctcataaacggcctcctgtctccttccgaagaggatatggggattctgctcttttcttatttacatgtaaataatacattgttctaagtctttttcattaaaaatttaaaacttttccca

SEQ ID NO: 19545 - DNA, 2368 bp, Macaca Mulatta
  misc_feature (1)...(2368): n = A,T,C or G
ggcggaggcgcgcgggcacgctgggggcgggccggacgcgccgacttttccagaagacccggatagttcctcctggccacgccgcgccggctctgggttctcagcctcgtttccttatcctccgctggagcagcgatggcggcggtgaaaacccnnnnnnnnnnnnnnnnnnnnnnnnnnnnnnnnnnnnnnnnnnnnnnnnnnnnnnnnnnnnnnnnnnnnnnnnnnnnnnnnnnnnnnnnnnnnnnnnnnnnnnnnnnnnnnnnnnnnnnnnnnnnnnnnnnnnnnnnnnnnnnnnnnnnnnnnnnnnnnnnnnnnnnnnnnnnnnnnnnnnnnnnnnnnnnnnnnnnnnnnnnnnnnnnnnnnnnnnnnnnnnnnnnnnnnnnnnnnnnnnnnnnnnnnnnnnnnnnnnnnnnnnnnnnnnnnnnnnnnnnnnnnnnnnnnnnnnnnnnnnnnnnnnnnnnnnnnnnnnnnnnnnnnnnnnnnnnnnnnnnnnnnnnnnnnnnnnnnnnnnnnnnnnnnnnnnnnnnnnnnnnnnnnnnnnnnnnnnnnnnnnnnnnnnnnnnnnnnnnnnnnnnnnnnnnnnnnnnnnnnnnnnnnnnnnnnnnnnnnnnnnnnnnnnnnnnnnnnnnnnnnnnnnnnnnnnnnnnnnnnnnnnnnnnnnnnnnnnnnnnnnnnnnnnnnnnnnnnnnnnnnnnnnnnnnnnnnnnnnnnnnnnnnnnnnnnnnnnnnnnnnnnnnnnnnnnnnnnnnnnnnnnnnnnnnnnnnnnnnnnnnnnnnnnnnnnnnnnnnnnnnnnnnnnnnnnnnnnnnnnnnnnnnnnnnnnnnnnnnnnnnnnnnnnnnnnnnnnnnnnnnnnnnnnnnnnnnnnnnnnnnnnnnnnacaaaagtgcagaagagagagaaaaactcgtaaaagctgaaagaaaattcattgaagataaagttaaaaaaataatagaactgaaaaggaaagtctgtggtgattcggataaaggatttgttgttattaatcaaaagnnnnnnnnnnnnnnnnnnnnnnnnnnnnnnnnnnnnnnnnnnnnnnnnnnnnnnnnnnnnnnnnnnnnnnnnnnnnnnnnnnnnnnnnnnnnnnnnnnnnnnnnnnnnnnnnnnnnnnnnnnnnnnnnnnnnnnnnnnnnnnnnnnnnnnnnnnnnnnnnnnnnnnnnnnnnnnnnnnnnnnnnnnnnnnnnnnnnnnnnnnnnnnnnnnnnnnnnnnnnnnnnnnnnnnnnnnnnnnnnnnnnnnnnnnnnnnnnnnnnnnnnnnnnnnnnnnnnnnnnnnnnnnnnnnnnnnnnnnnnnnnnnnnnnnnnnnnnnnnnnnnnnnnnnnnnnnnnnnnnnnnnnnnnnnnnnnnnnnnnnnnnnnnnnnnnnnnnnnnnnnnnnnnnnnnnnnnnnnnnnnnnnnnnnnnnnnnnnnnnnnnnnnnnnnnnnnnnnnnnnnnnnnnnnnnnnnnnnnnnnnnnnnnnnnnnnnnnnnnnnnnnnnnnnnnnnnnnnnnnnnnnnnnnnnnnnnnnnnnnnnnnnnnnnnnnnnnnnnnnnnnnnnnnnnnnnnnnnnnnnnaggtgagccaatggtagcagcagaagtaggtgtgtgggataactattgtgtaaagaaacagcttcttcactcctnnnngtgattgccaccaacattctcttggttnnnnnnnnnnnnnnnnnnnnnnnnnnctctgaaaggttgcattgaagcttcctctgtatctgagtcttgaagactctgcaaagtgatcctgagagaatacagctgtggaatttttgtccaagcttcaaatgatttccaaaggaattttcccatatgaaaaaaggagagaacactggcatctgttgaaatttggaagttctgaaattacagtatttttaaaaattgcactgaagcgtatacacataaagcagctcttttacccagtaaacaggatgttttgctttagcagcagtgacataaaattccatgttagataagcatatgttacttgttattaaatattccttgaaaagcaaattttaatggcttaattttatgtagacgtatgttaaattatccaacagtaccctattgttaaacatttggttttaaaatttttatgctaatataaacaagtaatttaaaattttgaaagcatccttgttagtataaatttctgagtaaatgcattgggtcagttggactttgaatgcttttaaaatggctttgctaaaatgctnnnnnnnnnagttgtaggaaatgggaagaggagtaagctagaggcgagggagttgagagagctgcaagtgtaaagaggcaaaaacaggcagaggtaaaaagatgatacaaggcgtggtgacta

SEQ ID NO: 19546 - DNA, 527 bp, Macaca Mulatta
gacaagatgtgaaatggagaagtatctgacacctcagcttcctccagttcctataattccagagcataaaaagtatagacgagacagtgcctcagtcgtagaccagttcttcactgacactgaagggttaccttacagtatcaacatgaacgtcttcctccctgacatcactcacctgagaactggcctctacaaatcccagagaccgtgcgtaacacacatcaagacagaacctgttgccattttcagccaccagagtgaaacgactgcccctcctccggccccgacccaggccctccctgagttcaccagtatattcagctcacaccagaccgcagctccagaggtgaacaatattttcatcaaacaagaacttcctacaccagatcttcatctttctgtccctccccagcagggccacctgtaccagctactgaatacaccggatctagatatgcccagttctacaaaccagacagcagcaatggacactcttaatgtttctatgtcagctgccatggcaggcc

SEQ ID NO: 19547 - DNA, 682 bp, Macaca Mulatta
  misc_feature (1)...(682): n = A,T,C or G
agagtactttttttggtttttaattctctgagaaaatggaatctgaatcacaagttcacaatgtggtaaaatgaaattaagaaacaatgatttcagtaatgctatgccatcactagtgtttagctctgacttcttcttgtaaatcagatcctgatatacagtctagagcatctaggttattattctacagcatattaaacacagaaaaggannnnnnnnnnnnnnnnnnnnnntcaatgtacaaacatgaatttaaaaattgcttttaaaaaatcacctttttacataatgtatatgcaaaactgctttaaatacatgattttggaagaattatttacaaaatgtatcagtctgtggaacaattcacagacaaagcatacatagttgctttacttagttgttgcatctcaactttgggagatataaattcattcggcagtatagcaaacataaaaactgtgacaaagtatcttaagggcaaccaaaaatttgatcctcaaaacagtttaaatactaggactgccaaagtttctaaacaaggacatactttaatgatccagatgcccatttatagttctatactgtttgacggactgagacagactccctttaacacaggcaaggctgcaggatgcaacctcctgtaaaaaggacagctgagagctattgtcatccaaagagt

SEQ ID NO: 19548 - DNA, 2147 bp, Macaca Mulatta
  misc_feature (1)...(2147): n = A,T,C or G
ctgaggatttaatggtgcctaatgagcatataatgaatgttattgccatttacgaggtactgcggaactttggcactgttttgagattatctcctnttcgctttgaggacttttgtgcagctctggtgagccaagagcagtgcacactcatggcagagatgcacgttgtgcttttgaaagcagttctgcgtgaagaagacacttccaatactacctttggacctgctgatctgaaagatagcgttaattccacgctgtatttcatagatgggatgacgtggccagaggtgctgcgggtgtactgtgagagtgataaggagtaccatcacgttcttccttaccaagaggcagaggactacccatatggaccagtagagaacaagatcaaagttctacagtttttagtcgatcagtttcttacaacaaatattgctcgagaggaattgatgtctgaaggggtgatacaatatgatgaccattgtagggtttgtcacaaacttggggatttgctttgctgtgagacatgttcagcagtataccatttggaatgtgtgaagccacctcttgaggaggtgccagaggacgagtggcagtgtgaagtctgtgtagcacacaaggtgcctggtgtgactgactgtgttgctgaaatcnnnnnnnnnnnnnnnnnnnnnnnnnnnnnnnnnnnnnnnnnnnnnnnnnnnnnnnnnnnnnnnnnnnnnnnnnnnnnnnnnnnnnnnnnnnnnnnnnnnnnnnnnnnnnnnnnnnnnnnnnnnnnnnnnnnnnnnnnnnnnnnnnnnnnnnnnnnnnnnnnnnnnnnnnnnnnnnnnnnnnnnnnnnnnnnnnnnnnnnnnnnnnnnnnnnnnnnnnnnnnnnnnnnnnnnnnnnnnnnnnnnnnnnnnnnnnnnnnnnnnnnnnnnnnnnnnnnnnnnnnnnnnnnnnnnnnnnnnnnnnnnnnnnnnnnnnnnnnnnnnnnnnnnnnnnnnnnnnnnnnnnnnnnnnnnnnnnnnnnnnnnnnnnnnnnnnnnnnnnnnnnnnnnnnnnnnnnnnnnnnnnnnnnnnnnnnnnnnnnnnnnnnnnnnnnnnnnnnnnnnnnnnnnnnnnnnnnnnnnnnnnnnnnnnnnnnnnnnnnnnnnnnnnnnnnnnnnnnnnnnnnnnnnnnnnnnnnnnnnnnnnnnnnnnnnnnnnnnnnnnnnnnnnnnnnnnnnnnnnnnnnnnnnnnnnnnnnnnnnnnnnnnnnnnnnnnnnnnnnnnnnnnnnnnnnnnnnnnnnnnnnnnnnnnnnnnnnnnnnnnnnnnnnnnnnnnnnnnnnnnnnnnnnnnnnnnnnnnnnnnnnnnnnnnnnnnnnnnnnnnnnnnnnnnnnnnnnnnnnnnnnnnnnnnnnnnnnnnnnnnnnnnnnnnnnnnnnnnnnnnnnnnnnnnnnnnnnnnnnnnnnnnnnnnnnnnnnnnnnnnnnnnnnnnnnnnnnnnnnnnnnnnnnnnnnnnnnnnnnnnnnnnnnnnnnnnnnnnnnnnnnnnnnnnnnnnnnnnnnnnnnnnnnnnnnnnnnnnnnnnnnnnnnnnnnnnnnnnnnnnnnnnnnnnnnnnnnnnnnnnnnnnnnnnnnnnnnnnnnnnnnnnnnnnnnnnnnnnnnnnnnnnnnnnnnnnnnnnnnnnnnnnnnnnnnnnnnnnnnnnnnnnnnnnnnnnnnnnnnnnnnnnnnnnnnnnnnnnnnnnnnnnnnnnnnnnnnnnnnnnnnggtactggtagttaactctcaaggggaaatttcacggttgagcaccaaaaaggaagtggtcatgaaaggaaatatcaacaattattttaaattgggtcaagaagggaagtatcgcgtctaccacaatcaatactccaccaattcatttgctttgaataagnnnnnnnnnnnnnnnnnnnnnnnnnnnnnnnnnnnnnnnnnnnnnnnnnnnnnnnnnnnnnnnnnnnnnnnnnnnnnnnnnnnnnnnnnnnnnnnnnnnnnnnnnnnnnnnnnnnnnnnnnnnnnnnnnnnnnnnnnnnnnnnnnnnnnnnnnnnnnnnnnnnnnnnnnnnnnnnnnnnnnnnnnnnnnnnnnggcaaattggatcaaggcagttcagatgtgtagcaaacccagagaatttgcattggtttta

SEQ ID NO: 19549 - DNA, 144 bp, Macaca Mulatta
aggttaccagagaccacggtggtctaccctgcagacgtggttctgtttgagggcataatggtgttctacagccaggagatccgcgacatgttccacctgcgcctctttgtggacaccgactccgacgtcaggctgtctcgaaga

SEQ ID NO: 19550 - DNA, 887 bp, Macaca Mulatta
ggtcaaccaaaacgaattgaaaatgctaaaattcttattgcaaatactggtatggatacagacaaaataaagatatttggttcccgggtaagagttgattctacagcaaaggttgcagaaatagaacatgcggaaaaggaaaaaatgaaggagaaagttgaacgtattcttaagcatggaataaattgctttattaacaggcaattaatttataattatcctgaacagctctttggtgctgctggtgtcatggctattgagcatgcagattttgcaggtgtggaacgcctagctcttgtcacaggtggtgaaattgcctctacctttgatcacccagaactggtgaagcttggaagttgcaaacttatcgaggaagtcatgattggagaagacaaactcattcacttttctggggttgcccttggtgaggcttgtaccattgttttgcgtggtgccactcaacaaattttagatgaagcagaaagatctttgcatgacgctctttgtgttcttgcgcaaactgtaaaggactctagaacagtttatggaggaggctgttctgagatgttgatggctcatgctgtgacacagcttgccaatagaacaccaggcaaatgaagctgttgcaatggaagtcttacgctaaagcactgagaaatgtttgccaacccattcataacctgaacaatgtcaaggcttatgacaagttgcataaacctgggttggcctgcagcttcaagggcttgcttcacaagtggaaaggcaaaataacacacttgccttgggaactgtggaataattgaaaggggaaaaggccaaccccttttggggcgcgaattaaggggcttattcccgcgggagggaaaataaacaacaaaacaaaagtc

SEQ ID NO: 19551 - DNA, 980 bp, Macaca Mulatta
tcaacacctgtcacgcccccaccactctctccagcctttggaggcaccagtaaaatagaccagtattctcgaattctctttccagttgcatttgcaggattcaaccttgtatactggatagtttatctttccaaagatacaatggaaatgagtagcagtgctgaataggttgcagccaggacaacctgaattctctaagttcttgtttcctgtttcctatattttcttaaaaaatagtattgagacttgtgtagatgcttttcagaacacgaaatcaaattggaaatctgtaacgcagcttcagtaagcatgtgtgggcaaaaaagcaataatcctactcctcgaaatagaaagttgaaggttgctgaaaaatatgacttttctgtatgtcagaaaaaaattttatgaggataaaatgggttcaggatgaatctgtcagcctttgtctttcattgttcaatatttttaattgtcactgtgaataacatttaccacaaggcagataagataagaaatgctgacacttccaaaggttgccttagaatatgtttattttggcttagttctcaagagagcaaaatataaatacagtctaaatatttatcagtaggttaataccagcatgttggaggcctttatgctagtaaaatggctttcagtggcattgtaaagcctatgttgagcttggccatttgtttttaacctcgctgtgctcttttacctcaataaaatgtggtgtttgtatacatataaattatacataactcatacattatgtatgcatatgtacatagctgtagttggactaaaattcagtgtattttatcctaccaaattctccttttaaaataatacacttactataattctatgaggttgtagaaaaaagtagtcattataaggaagccttatatattatgactatggttatctcttgtgttttccatatttctaattataacactaaataaaacaacaat

SEQ ID NO: 19552 - DNA, 665 bp, Macaca Mulatta
  misc_feature (1)...(665): n = A,T,C or G
ccaggaccgagtggcacacattcttctggctgtggggcccgatctttatctcttggaccatgcagcctgctctgcagtgngacgccccctggcctggccccaggagtaagcagcttcctacagatggctgtctccttcacctaccgacacctggcactcttcacagacacaggctacatctggatgggaacagcatcactcaaggnaggagaagctatgtgagttcaactgcaacatccgggcacctccaaagcagatggtctggtgnnnggtgcagccgtcctcgtagcaaggagagagccgtggtggtggcctgggagaggcggctgatggtggtgggcgatgcacccgagagcatccagnnnnnnnnnnnnnnnnnnnnnnnnnnnnnnnnnnnnnnnnnnnnnnnnnnnnnnnnnnnnnnnnnnnnnnnnnnnnnnnnnnnnnnnnnnnnnnnnnnnnnnnnnnnnnnnnnnnnnnnnnnnnnnnnnnnnnnnnnnnnnnnnnnnnnnnnnnnnnnnnnnnnnnnnnagaaagagagccagaaggcggacgagtacctgcgggagatccaggagctgggccagctgacccaggctgtgcagcagtgcattgaggccgcaggacatgagcaccagccagacatgcagaagagtctgctcagg

SEQ ID NO: 19553 - DNA, 797 bp, Macaca Mulatta
ggatttggaataataatattcctcctaaacaaaacacattgagttgaactctctgactcttgcctttccacctgctttctcctgggtccactttgcctgttttaaggaccagtgctgttctggaactgctgttccaacagacagggcctggctttcatttggcacacagactgcagccagaagcccatgggtcagggatgtcacgtcccgaaaagcctattagaagttttacaaatttaattttgcagattattttagtctgtcatctagaaaatgtgtgagcacccatagtgccaagaaagcaagccaatttggaaactcaggttagtgacaaaattggccagagagtgggggtgacgaggaccaagaattacaagtagcatggcagctggaatttgaggaaggacaggaatcagtggataagcctgggtggaggaggatccaaacagaaaagtgcagagttattccctatcttccaagggttggattctggaggaaaaagacacattcctagttccccgtgaacttcctttgacttattgtccccccactaaaacaaaaccaaaaacgtttaataccttccactttaattagattttcttgcagttttttaatgggtattattaaaaaaatggccttaaggtgttgaaaaaagagtttggcaaatgccaccaaaatattttatttacccgggtggttaaaaacttgggtttagccccaaatttaatatttttccccttcccttggccttttccttatttgccaatgacaagaaacagggattggaggccactttt

SEQ ID NO: 19554 - DNA, 710 bp, Macaca Mulatta
acctggtgcagagagccacacaggtggtgcacactgaagaaatactaggaccccccgccgacccagccctacccatgcctgcctcaagctgtggagagccctccctctcgccagcactaccttccctttctcttgcacttggtaataaaatgagaaacaagggttctatttctctgcaccggaatggatagtataactcctgcctggtgataacaggctctccactccaggttactgtcaaggttcacgtccctcgaatgtgaatggacatttgcccctccttagcgtggcccgaggccgctgtgtttggctgggaatgggctggtaggcttgccttacttcgagtctgttgcttcccccagtcatgcctctgctgctgctgttaccagtccaaaagtctgatgacctcggtccccatgaacggaacaagcatccagtggaagaaccacgaacaaaacaaccacaacacagaccggagcagccacaaggacagcatgaactgaccaccctgcgaagcactcctgggtactcccataatcctctgggagaaaaaaatcacaaggcaactgtgactccggaaatgtcttctctgatccttcttccttaactcactcccacacccaagaagaaatgctttccaaaaccgcaagggtagaccggtttagccacccacgacatctaccaatcgtacttctttaattaatctgatt

SEQ ID NO: 19555 - DNA, 4010 bp, Macaca Mulatta
  misc_feature (1)...(4010): n = A,T,C or G
cccggccggcggccaccacctcggctacgacccgacggccgctgccgcgctcagcctgcctctgggagccgcagctgccgcgggcagccaggtcgccgcgctggagggccacccgtacgggctgccgctggccaagagggcggccccgctggccttcccgcctctcggcctcacgccctctcctaccgcgtccagcctgctgggcgagagtcccagcctgccgtcaccgcccaacaggagctcgtcgtccggcgagggcacgtgtgcagtgtgcggggacaatgccgcctgccagcactacggcgtgcgcacctgcgagggctgcaagggcttcttcaannnnnnnnnnnnnnnnnnnnnnnnnnnnnnnnnnnnnnnnnnnnnnnnnnnnnnnnnnnnnnnnnnnnnnnnnnnnnnnnnnnnnnnnnnnnnnnnnnnnnnnnnnnnnnnnnnnnnnnnnnnnnnnnnnnnnnnnnnnnnnnnnnnnnnnnnnnnnnnnnnnnnnnnnnnnnnnnnnnnnnnnnnnnnnnnnnnnnnnnnnnnnnnnnnnnnnnnnnnnnnnnnnnnnnnnnnnnnnnnnnnnnnnnnnnnnnnnnnnnnnnnnnnnnnnnnnnnnnnnnnnnnnnnnnnnnnnnnnnnnnnnnnnnnnnnnnnnnnnnnnnnnnnnnnnnnnnnnnnnnnnnnnnnnnnnnnnnnnnnnnnnnnnnnnnnnnnnnnnnnnnnnnnnnnnnnnnnnnnnnnnnnnnnnnnnnnnnnnnnnnnnnnnnnnnnnnnnnnnnnnnnnnnnnnnnnnnnnnnnnnnnnnnnnnnnnnnnnnnnnnnnnnnnnnnnnnnnnnnnnnnnnnnnnnnnnnnnnnnnnnnnnnnnnnnnnnnnnnnnnnnnnnnnnnnnnnnnnnnnnnnnnnnnnnnnnnnnnnnnnnnnnnnnnnnnnnnnnnnnnnnnnnnnnnnnnnnnnnnnnnnnnnnnnnnnnnnnnnnnnnnnnnnnnnnnnnnnnnnnnnnnnnnnnnnnnnnnnnnnnnnnnnnnnnnnnnnnnnnnnnnnnnnnnnnnnnnnnnnnnnnnnnnnnnnnnnnnnnnnnnnnnnnnnnnnnnnnnnnnnnnnnnnnnnnnnnnnnnnnnnnnnnnnnnnnnnnnnnnnnnnnnnnnnnnnnnnnnnnnnnnnnnnnnnnnnnnnnnnnnnnnnnnnnnnnnnnnnnnnnnnnnnnnnnnnnnnnnnnnnnnnnnnnnnnnnnnnnnnnnnnnnnnnnnnnnnnnnnnnnnnnnnnnnnnnnnnnnnnnnnnnnnnnnnnnnnnnnnnnnnnnnnnnnnnnnnnnnnnnnnnnnnnnnnnnnnnnnnnnnnnnnnnnnnnnnnnnnnnnnnnnnnnnnnnnnnnnnnnnnnnnnnnnnnnnnnnnnnnnnnnnnnnnnnnnnnnnnnnnnnnnnnnnnnnnnnnnnnnnnnnnnnnnnnnnnnnnnnnnnnnnnnnnnnnnnnnnnnnnnnnnnnnnnnnnnnnnnnnnnnnnnnnnnnnnnnnnnnnnnnnnnnnnnnnnnnnnnnnnnnnnnnnnnnnnnnnnnnnnnnnnnnnnnnnnnnnnnnnnnnnnnnnnnnnnnnnnnnnnnnnnnnnnnnnnnnnnnnnnnnnnnnnnnnnnnnnnnnnnnnnnnnnnnnnnnnnnnnnnnnnnnnnnnnnnnnnnnnnnnnnnnnnnnnnnnnnnnnnnnnnnnnnnnnnnnnnnnnnnnnnnnnnnnnnnnnnnnnnnnnnnnnnnnnnnnnnnnnnnnnnnnnnnnnnnnnnnnnnnnnnnnnnnnnnnnnnnnnnnnnnnnnnnnnnnnnnnnnnnnnnnnnnnnnnnnnnnnnnnnnnnnnnnnnnnnnnnnnnnnnnnnnnnnnnnnnnnnnnnnnnnnnnnnnnnnnnnnnnnnnnnnnnnnnnnnnnnnnnnnnnnnnnnnnnnnnnnnnnnnnnnnnnnnnnnnnnnnnnnnnnnnnnnnnnnnnnnnnnnnnnnnnnnnnnnnnnnnnnnnnnnnnnnnnnnnnnnnnnnnnnnnnnnnnnnnnnnnnnnnnnnnnnnnnnnnnnnnnnnnnnnnnnnnnnnnnnnnnnnnnnnnnnnnnnnnnnnnnnnnnnnnnnnnnnnnnnnnnnnnnnnnnnnnnnnnnnnnnnnnnnnnnnnnnnnnnnnnnnnnnnnnnnnnnnnnnnnnnnnnnnnnnnnnnnnnnnnnnnnnnnnnnnnnnnnnnnnnnnnnnnnnnnnnnnnnnnnnnnnnnnnnnnnnnnnnnnnnnnnnnnnnnnnnnnnnnnnnnnnnnnnnnnnnnnnnnnnnnnnnnnnnnnnnnnnnnnnnnnnnnnnnnnnnnnnnnnnnnnnnnnnnnnnnnnnnnnnnnnnnnnnnnnnnnnnnnnnnnnnnnnnnnnnnnnnnnnnnnnnnnnnnnnnnnnnnnnnnnnnnnnnnnnnnnnnnnnnnnnnnnnnnnnnnnnnnnnnnnnnnnnnnnnnnnnnnnnnnnnnnnnnnnnnnnnnnnnnnnnnnnnnnnnnnnnnnnnnnnnnnnnnnnnnnnnnnnnnnnnnnnnnnnnnnnnnnnnnnnnnnnnnnnnnnnnnnnnnnnnnnnnnnnnnnnnnnnnnnnnnnnnnnnnnnnnnnnnnnnnnnnnnnnnnnnnnnnnnnnnnnnnnnnnnnnnnnnnnnnnnnnnnnnnnnnnnnnnnnnnnnnnnnnnnnnnnnnnnnnnnnnnnnnnnnnnnnnnnnnnnnnnnnnnnnnnnnnnnnnnnnnnnnnnnnnnnnnnnnnnnnnnnnnnnnnnnnnnnnnnnnnnnnnnnnnnnnnnnnnnnnnnnnnnnnnnnnnnnnnnnnnnnnnnnnnnnnnnnnnnnnnnnnnnnnnnnnnnnnnnnnnnnnnnnnnnnnnnnnnnnnnnnnnnnnnnnnnnnnnnnnnnnnnnnnnnnnnnnnnnnnnnnnnnnnnnnnnnnnnnnnnnnnnnnnnnnnnnnnnnnnnnnnnnnnnnnnnnnnnnnnnnnnnnnnnnnnnnnnnnnnnnnnnnnnnnnnnnnnnnnnnnnnnnnnnnnnnnnnnnnnnnnnnnnnnnnnnnnnnnnnnnnnnnnnnnnnnnnnnnnnnnnnnnnnnnnnnnnnnnnnnnnnnnnnnnnnnnnnnnnnnnnnnnnnnnnnnnnnnnnnnnnnnnnnnnnnnnnnnnnnnnnnnnnnnnnnnnnnnnnnnnnnnnnnnnnnnnnnnnnnnnnnnnnnnnnnnnnnnnnnnnnnnnnnnnnnnnnnnnnnnnnnnnnnnnnnnnnnnnnnnnnnnnnnnnnnnnnnnnnnnnnnnnggggcctggcctgtcaactagtccaacccctaaaattcatagaggagcaaactggggcccattgaagggtgaagagttaatcaaagtcaaacagctagtaacagaatcaagactaagacctaatttacctttccatagtctttttttttctcaacttactccatctatataaaatcaggcttttaaacataaccactaatatttaccagaagataaccatgagtaaagtatacttttgcattaattttttgagcttatatgcaaacataataaatattattaagtatcaggaaagctaacatttcatacaagatagcttcagaccaaattcaaattgaatttgaataaattacaaatactgtgcatacataaccttcttgtgcaccatgaatatttggaaagttaatccttgtttttgtcatgtctataaaggaagnnnnnnnnnnnnnnnnnnnnagccctagagaaatgccattactttttatttttacacccatcagatttaaggaaaagactttttagccattataatctagtggttggaaggaatgaagaagcttttttagtactaggtccagatatgagtgctaaaaataaagatgatagcatgttcttctgtcttccatagttattacaactatgagagcctcccaagtcatctatcaactcaactcccnnnnnnnntctgaatgttgcacataagtttatacagagtggatgacca

SEQ ID NO: 19556 - DNA, 2368 bp, Macaca Mulatta
  misc_feature (1)...(2368): n = A,T,C or G
tgtcgcggcggcggcacagcgacgagaacgacggtgnnnnnnnnnnnnnnnnnnnnnnnnnnnnnnnnnnnnnnnnnnnnnnnnnnnnnnnnnnnnnnnnnnnnnnnnnnnnnnnnnnnnnnnnnnnnnnnnnnnnnnnnnnnnnnnnnnnnnnnnnnnnnnnnnnnnnnnnnnnnnnnnnnnnnnnnnnnnnnnnnnnnnnnnnnnnnnnnnnnnnnnnnnnnnnnnnnnnnnnnnnnnnnnnnnnnnnnnnnnnnnnnnnnnnnnnnnnnnnnnnnnnnnnnnnnnnnnnnnnnnnnnnnnnnnnnnnnnnnnnnnnnnnnnnnnnnnnnnnnnnnnnnnnnnnnnnnnnnnnnnnnnnnnnnnnnnnnnnnnnnnnnnnnnnnnnnnnnnnnnnnnnnnnnnnnnnnnnnnnnnnnnnnnnnnnnnnnnnnnnnnnnnnnnnnnnnnnnnnnnnnnnnnnnnnnnnnnnnnnnnnnnnnnnnnggtgcggcgagattggtatgtgtatgcatttctgtcatctttgccctgggttggaaaggagttgtacgaaaagaaagatgcagagatggaccgcatctttgccaacactgaaagctatcttaaaagacgccaaaagactcatgtacccatgttacaggtgtggactgcggataaaccacatccacaagnnnnnnnnnnnnnnnnnnnnnnnnnnnnnnnnnnnnnnnnnnnnnnnnnnnnnnnnnnnnnnnnnnnnnnnnnnnnnnnnnnnnnnnnnnnnnnnnnnnnnnnnnnnnnnnnnnnnnnnnnnnnnnnnnnnnnnnnnnnnnnnnnnnnnnnnnnnnnnnnnnnnnnnnnnnnnnnnnnnnnnnnnnnnnnnnnnnnnnnnnnnnnnnnnnnnnnnnnnnnnnnnnnnnnnnnnnnnnnnnnnnnnnnnnnnnnnnnnnnnnnnnnnnnnnnnnnnnnnnnnnnnnnnnnnnnnnnnnnnnnnnnnnnnnnnnnnnnnnnnnnnnnnnnnnnnnnnnnnnnnnnnnnnnnnnnnnnnnnnnnnnnnnnnnnnnnnnnnnnnnnnnnnnnnnnnnnnnnnnnnnnnnnnnnnnnnnnnnnnnnnnnnnnnnnnnnnnnnnnnnnnnnnnnnnnnnnnnnnnnnnnnnnnnnnnnnnnnnnnnnnnnnnnnnnnnncttgcacaggcaactgaaatgctatacatgcgtttggacacaatgaacactacctgtgtagacaggnnnnnnnnnnnnnnnnnnnnnnnnnnnnnnnnnnnnnnnnnnnnnnnnnnnnnnnnnnnnnnnnnnnnnnnnnnnnnnnnnnnnnnnnnnnnnnnnnnnnnnnnnnnnnnnnnnnnnnnnnnnnnnnnnnnnnnnnnnnnnnnnnnnnnnnnnnnnnnnnnnnnnnnnnnnnnnnnnnnnnnnnnnnnnnnnnnnnnnnnnnnnnnnnnnnnnnnnnnnnnnnnnnnnnnnnnnnnnnnnnnnnnnnnnnnnnnnnnnnnnnnnnnnnnnnnnnnnnnnnnnnnnnnnnnnnnnnnnnnnnnnnnnnnnnnnnnnnnnnnnnnnnnnnnnnnnnnnnnnnnnnnnnnnnnnnnnnnnnnnnnnnnnnnnnnnnnnnnnnnnnnnnnnnnnnnnnnnnnnnnnnnnnnnnnnnnnnnnnnnnnnnnnnnnnnnnnnnnnnnnnnnnnnnnnnnnnnnnnnnnnnnnnnnnnnnnnnnnnnnnnnnnnnnnnnnnnnnnnnnnnnnnnnnnnnnnnnnnnnnnnnnnnnnnnnnnnnnnnnnnnnnnnnnnnnnnnnnnnnnnnnnnnnnnnnnnnnnnnnnnnnnnnnnnnnnnnnnnnnnnnnnnnnnnnnnnnnnnnnnnnnnnnnnnnnnnnnnnnnnnnnnnnnnnnnnnnnnnnnnnnnnnnnnnnnnnnnnnnnnnnnnnnnnnnnnnnnnnnnnnnnnnnnnnnnnnnnnnnnnnnnnnnnnnnnnnnnnnnnnnnnnnnnnnnnnnnnnnnnnnnnnnnnnnnnnnnnnnnnnnnnnnnnnnnnnnnnnnnnnnnnnnnnnnnnnnnnnnnnnnnnnnnnnnnnnnnnnnnnnnnnnnnnnnnnnnnnnnnnnnnnnnnnnnnnnnnnnnnnnnnnnnnnnnnnnnnnnnnnnnnnnnnnnnnnnnnnnnnnnnnnnnnnnnnnnnnnnnnnnnnnnnnnnnnnnnnnnnnnnnnnnnnnnnnnnnnnnnnnnnnnnnnnnnnnnnnnnnnnnnnnnnnnnnnnnnnnnnnacagcatcaccagataatccagcagtacatggtgaccctggagaacctcctcttcactgctgaattagaccctcatatcttggccgtgttccagcagttctgtgccctgcaggccta

SEQ ID NO: 19557 - DNA, 810 bp, Macaca Mulatta
gggtccagtgccatgcctgcattggaggcaccaatgttggggaggacatcaggaagctggattatggacagcatgttgtcgcgggcactccagggcgtgtttttgatatgattcgtcgcagaagcttaaggacacgtgctatcaaaatgttggttttggatgaagctgatgaaatgttgaataaaggtttcaaagagcagatctatgacgtgtacaggtacctgcctccagccacacaggtggtgctcatcagtgccacgctgccacacgagattctggagatgaccaacaagttcatgaccgacccaatccgcatcttggtgaaacgtgatgaattgactctggaaggcatcaagcaattttttgtggcagtggagagggaagagtggaaatttgacactctgtgtgacctctacgacacactgaccatcactcaggcggtcatcttctgcaacaccaaaagaaaggtggactggctgacagaaaaaatgagagaagccaacttcactgtgtcctcaatgcacggagacatgccccagaaagagcgggagtccatcatgaaagagttccggtcgggcgccagccgagtgcttatttctacagacgtctgggcccaggggttggatgtccctcaggtgtccctcatcatcaactatgatctccccaataacagagaattgtacatacaccgaatcggggagatcagggtccattcgggccggaagggggtcgccatttacttttgtgaagaaagaatgacatcccgcattcctcagaaaaatccgagcaatactatttccccttccgatc

SEQ ID NO: 19558 - DNA, 120 bp, Macaca Mulatta
aattggacagaagtttctcaatgattaaggagggtgattataaccccctcttcattccagtggcagtcatggttactgcattctctgggttggcatttatcatttggctggcaaggagat

SEQ ID NO: 19559 - DNA, 1034 bp, Macaca Mulatta
  misc_feature (1)...(1034): n = A,T,C or G
ccgcgcgtcctcggccgcctgtcgggcatgaaaaccaagttctgcaccgggggcgaggcggagccctcgccgctcgggctgctgctgagctgcggcagcgcggccccggcgcccggcgtggggcagcagcgcgacgccgccagcgacctcgagtccaagcagctgggcggccaacagccgccactcgcgcnnnnnnnnnnnnnnnnnnnnnnnnnnnnnnnnnnnnnnnnnnnnnnnnnnnnnnnnnnnnnnnngcagacgagcagcccgagccccggacgcggcgcagggcctatctgtggtgcaaggagttcctgcccggcgcctggcggggcctccgcgaggacgagttccacatcagtgtcatcannnnnnnnnnnnnnnnnnnnnnnnnnnnnnnnnnnnnnnnnnnnnnnnnnnnnnnnnnnnnnnnnnnnnnnnnnnnnnnnnnnnnnnnnnnnnnnnnnnnnnnnnnnnnnnnnnnnnnnnnnnnnnnnnnnnnnnnnnnnnnnnnnnnnnnnnnnnnnnnnnnnnnnnnnnnnnnnnnnnnnnnnnnnnnnnnnnnnnnnnnnnnnnnnnnnnnnnnnnnnnnnnnnnnnnnnnnnnnnnnnnnnnnnnnnnnnnnnnnnnnnnnnnnnnnnnnnnnnngagccggcggttagatactgaagaattaagtttgccagatatttctgcagaaatcgctgagaaaatggctacgtttcatggtatgaaaatgccattcaataaggaaccaaaatggctttttggcacaatggaaaagtnnnnnnnnnnnnnnnnnnnnnnnnnnnnnnnnnnnnnnnnnnnnnnnnnnnnnnnnnnnnnnnnnnnnnnnnnnnnnnnnnnnnnnnnnnnnnnnnnnnnnnnnnnnnnnnnnnnnnnnnnnnnnnnnnnnnnnnnnnnnnnnnnnnnnnnnnnnnnnnaggtaatatcttgttgctggaaggccaagagaattctgaaaaacagaaactgatgctcattgacttcgaatacagcagttacaattacag

SEQ ID NO: 19560 - DNA, 132 bp, Macaca Mulatta
tttcctcactgactataaacgaatagagaaggaagggcttcagtgaccggctgctcggctaaaggcagcagtcagactctgacaggatcatggctatgatgaaggccccaggggggacccagcccggggcag

SEQ ID NO: 19561 - DNA, 1180 bp, Macaca Mulatta
  misc_feature (1)...(1180): n = A,T,C or G
ccaagtgcttggagggcatgaaggtggctgcaaatgctgttgatcccaagaacgngactcccaagtccttatagagctgcacaagtcaggttttgcccgcccgggcgacgtggaattcgaggacttcagccagcccatgaaccgtgtttcctcggacagcagtctgggcaccccctcggaaggacgtccggagctccgaggcccaggccgcatccgcaccaagcgctggccctttggcaagaagaacaagnnnnnnnnnnnnnnnnnnnnnnnnnnnnnnnnnnnnnnnnnnnnnnnnnnnnnnnnnnnnnnnnnnnnnnnnnnnnnnnnnnnnnnnnnnnnnnnnnnnnnnnnnnnngggaagccctaaagaaaatgaaggatgtctatgagaagacaccccagatgggagaccctgccagcttggagccccagatcgctgaaaccctgagcaacatcgaacggctgaaactggacgtgcagaagtatgaggnaggcgtggctggcagaagctgaaagtcgagtccttagcaaccggggagacagcctgagccggcacgcccggcctcccgacccccctgctagcgccccaccagacagcagcagcaacagcggatcacannnnnnnnnnnnnnnnnnnnnnnnnnnnnnnnnnnnnnnnnnnnnnnnnnnnnnnnnnnnnnnnnnnnnnnnnnnnnnnnnnnnnnnnnnnnnnnnnnnnnnnnnnnnnnnnnnnnnnnnnnnnnnnnnnnnnnnagggtccagcgagggcaccatctctatggccgagggtgaagacctcagtcttatggaagaagacaaaggggacggctggacccgggtcaggcggaaagagggaggcgagggctacgtgcccacctcctacctgcgagtcacactcaattgaaccctgccagaggcgggaagacgggggggctgtcggttgctgcttctgggccacggggggccccaggacctatgcactttatttctgaccccgtggcttcggctgagacctgtgtaacctgctgccccctccatccccaacccaattccacctgtcactccggacggacccgctgtgccttctaccatcgttccaccattgatgtacatactcatgttttacatcttttcttcctgccgctcggctccggccattttgttttatacgaaaatg

SEQ ID NO: 19562 - DNA, 429 bp, Macaca Mulatta
  misc_feature (1)...(429): n = A,T,C or G
gttaacattagcagaataccatgaacaagaagaaatcttcaaactcagattaggtcatcttaaaaagnnnnnnnnnnnnnnnnnnnnnnnnnnnnnnnnnnnnnnnnnnnnnnnnnnnnnnnnnnnnnnnnnnnnnnnnnnnnnnnnnnnnnnnnnnnnnnnnnnnnnnnnnnnnnnnnnnnnnnnnnnnnnnnnnnnnnnnnnnnnnnnnnnnnnnnnnnnnnnnnnnnnnnnnnnnnnnnnnnnnnnnnnnnnnnnnnnnnnnnnnnnnnnnnnnnnnnnnnnnnnnnnnnnnnnnnnnnnnnnnnnnnnnnnnnnnnnnnnnnnnnnnnnnnnnncatgcatgtagggaataccggattcataaagaactggatcatcccagaatagttaagctgtatgattacttttcactggatactgactcgt

SEQ ID NO: 19563 - DNA, 3624 bp, Macaca Mulatta
  misc_feature (1)...(3624): n = A,T,C or G
naaacaagacactggccaggttcttctggatatgacgtacaaccacctgggtgtgactgaaaaggaatattttggtttacagcatgatgacgactccgtggactctccnnnnnnnnnnnnnnnnnnnnnnnnnnnnnnnnnnnnnnnnnnnnnnnnnnnnnnnnnnnnnnnnnnnnnnnnnnnnnnnnnnnnnnnnnnnnnnnnnnnnnnnnnnnnnnnnnnnnnnnnnnnnnnnnnnnnnnnnnnnnnnnnnnnnnnnnnnnnnnnnnnnnnnnnnnnnnnnnnnnnnnnnnnnnnnnnnnnnnnnnnnnnnnnnnnnnnnnnnnnnnnnnnnnnnnnnnnnnnnnnnnnnnnnnnnnnnnnnnnnnnnnnnnnnnnnnnnnnnnnnnnnnnnnnnnnnnnnnnnnnnnnnnnnnnnnnnnnnnnnnnnnnnnnnnnnnnnnnnnnnnnnnnnnnnnnnnnnnnnnnnnnnnnnnnnnnnnnnnnnnnnnnnnnnnnnnnnnnnnnnnnnnnnnnnnnnnnnnnnnnnnnnnnnnnnnnnnnnnnnnnnnnnnnnnnnnnnnnnnnnnnnnnnnnnnnnnnnnnnnnnnnnnnnnnnnnnnnnnnnnnnnnnnnnnnnnnnnnnnnnnnnnnnnnnnnnnnnnnnnnnnnnnnnnnnnnnnnnnnnnnnnnnnnnnnnnnnnnnnncaggctgaatccagggaacatattgtggccttcaacatgctgaattaccgatcttgcaaaaacttgtggaaatcctgtgttgagcaccatacgttctttcaggcaaagaagctactacctcaggaaaagaatgttctgtctcagtactggactatgggctctcggaacaccaaaaagnnnnnnnnnnnnnnnnnnnnnnnnnnnnnnnnnnnnnnnnnnnnnnnnnnnnnnnnnnnnnnnnnnnnnnnnnnnnnnnnnnnnnnnnnnnnnnnnnnnnnnnnnnnnnnnnnnnnnnnnnnnnnnnnnnnnggcgaagtcctcggctccggcacgaaattcgaaagccacgccactcttctgcagataaccttgcaaatgaaatgacctacatcacggaaacggaagatgtgttttacacgtacaagggctctctggccccccaagacagcgattctgaagtttctcagaaccgaagcctgcaccaagagnnnnnnnnnnnnnnnnnnnnnnnnnnnnnnnnnnnnnnnnnnnnnnnnnnnnnnnnnnnnnnnnnnnnnnnnnnnnnnnnnnnnnnnnnnnnnnnnnnnnnnnnnnnnnnnnnnnnnnnnnnnnnnnnnnnnnnnnnnnnnnnnnnnnnnnnnnnnnnnnnnnnnnnnnnnnnnnnnnnnnnnnnnnnnnnnnnnnnnnnnnnnnnnnnnnnnnnnnnnnnnnnnnnnnnnnnnnnnnnnnnnnnnnnnnnnnnnnnnnnnnnnnnnnnnnnnnnnnnnnnnnnnnnnnnnnnnnnnnnnnnnnnnnnnnnnnnnnnnnnnnnnnnnnnnnnnnnnnnnnnnnnnnnnnnnnnnnnnnnnnnnnnnnnnnnnnnnnnnnnnnnnnnnnnnnnnnnnnnnnnnnnnnnnnnnnnnnnnnnnnnnnnnnnnnnnnnnnnnnnnnnnnnnnnnnnnnnnnnnnnnnnnnnnnnnnnnnnagctgtccgctcattcgctgacttcaagtctgaagatgaactgaaccagcttttccccgaggccattttccccatgtgtccagagggtggggacactttggaggggtccatggcacaactaaagaagggcctcgaaagcgggacggtgctgatccagtttgannnnnnnnnnnnnnnnnnnnnnnnnnnnnnnnnnnnnnnnnnnnnnnnnnnnnnnnnnnnnnnnnnnnnnnnnnnnnnnnnnnnnnnnnnnnnnnnnnnnnnnnnnnnnnnnnnnnnnnnnnnnnnnnnnnnnnnnnnnnnnnnnnnnnnnnnnnnnnnnnnnnnnnnnnnnnnnnnnnnnnnnnnnnnnnnnnnnnnnnnnnnnnnnnnnnnnnnnnnnnnnnnnnnnnnnnnnnnnnnnnnnnnnnnnnnnnnnnnnnnnnnnnnnnnnnnnnnnnnnnnnnnnnnnnnnnnnnnnnnnnnnnnnnnnnnnnnnnnnnnnnnnnnnnnnnnnnnnnnnnnnnnnnnnnnnnnnnnnnnnnnnnnnnnnnnnnnnnnnnnnnnnnnnnnnnnnnnnnnnnnnnnnnnnnnnnnnnnnnnnnnnnnnnnnnnnnnnnnnnnnnnnnnnnnnnnnnnnnnnnnnnnnnnnnnnnnnnnnnnnnnnnnnnnnnnnnnnnnnnnnnnnnnnnnnnnnnnnnnnnnnnnnnnnnnnnnnnnnnnnnnnnnnnnnnnnnnnnnnnnnnnnnnnnnnnnnnnnnnnnnnnnnnnnnnnnnnnnnnnnnnnnnnnnnnnnnnnnnnnnnnnnnnnnnnnnnnnnnnnnnnnnnnnnnnnnnnnnnnnnnnnnnnnnnnnnnnnnnnnnnnnnnnnnnnnnnnnnnnnnnnnnnnnnnnnnnnnnnnnnnnnnnnnnnnnnnnnnnnnnnnnnnnnnnnnnnnnnnnnnnnnnnnnnnnnnnnnnnnnnnnnnnnnnnnnnnnnnnnnnnnnnnnnnnnnnnnnnnnnnnnnnnnnnnnnnnnnnnnnnnnnnnnnnnnnnnnnnnnnnnnnnnnnnnnnnnnnnnnnnnnnnnnnnnnnnnnnnnnnnnnnnnnnnnnnnnnnnnnnnnnnnnnnnnnnnnnnnnnnnnnnnnnnnnnnnnnnnnnnnnnnnnnnnnnnnnnnnnnnnnnnnnnnnnnnnnnnnnnnnnnnnnnnnnnnnnnnnnnnnnnnnnnnnnnnnnnnnnnnnnnnnnnnnnnnnnnnnnnnnnnnnnnnnnnnnnnnnnnnnnnnnnnnnnnnnnnnnnnnnnnnnnnnnnnnnnnnnnnnnnnnnnnnnnnnnnnnnnnnnnnnnnnnnnnnnnnnnnnnnnnnnnnnnnnnnnnnnnnnnnnnnnnnnnnnnnnnnnnnnnnnnnnnnnnnnnnnnnnnnnnnnnnnnnnnnnnnnnnnnnnnnnnnnnnnnnnnnnnnnnnnnnnnnnnnnnnnnnnnnnnnnnnnnnnnnnnnnnnnnnnnnnnnnnnnnnnnnnnnnnnnnnnnnnnnnnnnnnnnnnnnnnnnnnnnnnnnnnnccatctcccagaaacttccaatattcatgtttctgagaatcgtgtccctcttcaggttccctcttggtgtctgacctggattagtaatgtgcattcaggtgaattttcagctgaggctctgagaactgggactctcagtgtgttctggtcatcttgtggcttagttgtagaagcaggtgtgtctcttgcctctgctaagcctcctactgcacactcagcacccacgactggaatcaccgactactgaatctcctacatgtattgctgctacttcaagctcctccacttgaaaccttatgattttcccaaggggagatgggacagtgtcatctaaatattccgaatgtttggccttctgagaaaagagcttctagtaattgaaccatgggaaacgcagcttctggagggttggccacgcgggtgtatacgtgtgtgtgcccaggggtgagtgt

SEQ ID NO: 19564 - DNA, 353 bp, Macaca Mulatta
cttttaatttaaggtcaatgtagggaaataatttctttcatttcttctgaaatataaggcaaattggatcaaggcagttcagatgtgtagcaaacccagagaatttgcattggttttagccattttagagtgtgccgttaaaccagttgtgatgctaccagtatggcagaaatctttaggacataccaggtaagtgaattctgagccttgtaaatgaggaatattggactcccttttgaaatattagcatattaataatgaaagctaatgtatttaagaggccatattaaagactttacttttggcctcattttcttcttagataagttgtaaaacatgaatgaatattatta

SEQ ID NO: 19565 - DNA, 512 bp, Macaca Mulatta
  misc_feature (1)...(512): n = A,T,C or G
cgaaacaaagctaaatgtaattttatgtactgttttaacagtataaacctatgggataaaggccccctaatcatcagaaggactactgaaaagaaaaagcaaacgtagatgtcaaattgtctaattattcttaagtaccactgattttttttttctgaactgttatacaaagatgtctgtaaaaagtataccagtggcttttatgcatatacatgattagatgatgaaatatatgggatttcatgagccagaggaggcatttggatccattgngccacatgtgactataagcacattgtgtatacaataaaattgtagccactcatgtattagaactgtttggtaaagctgtataaaagaatatcttttgcttgagctacttaggcactttttttcagggcacagaacggaggctacttttcctagctgggttgccatgtttttaattcatcttaaactgagccatttttggcaattcttttaaaatcattataaactttattggaaatgtg

SEQ ID NO: 19566 - DNA, 336 bp, Macaca Mulatta
ccatgttgtctgaacaaaatagggcttctcctctccccagtgggctcctcacccctccacagagcagtaagaagcagagcagcgagccagaaatggcgtgaccaccccatccttctccaccaaagacagtcacacggaagcgcctgctccacgttctcttctgtctgttgcagcggaggcgtgcgtttgcttttacagatatctaaaatggaagagtgtttcttccacaacagaagtatttctgtggatggcatcgaacagggcaaagtgttttttattgaatgcttatagattttttttaaataagtgggtcaagtacaccagccacctccagac

SEQ ID NO: 19567 - DNA, 150 bp, Macaca Mulatta
ggaaatggctagtgatgagctgaaagagatgcggaaaaacttgaccaaagaagccatcagagagcatcagatggccaagactggtgggacccagactgacttgttcacatgtggcaaatgtaaaaagaagaattgcacttacacacaggt

SEQ ID NO: 19568 - DNA, 673 bp, Macaca Mulatta
  misc_feature (1)...(673): n = A,T,C or G
ggacgaggccaggctgtacacactgcagaaaagccctatcgctgtgctgaatgcaggagactttcagcgataacagtcacctgntgcaacaccagaaaatgcacactgtcaaaaccccngtatgaatgccaggagtgcggagaacgcttcatctgcagctcaacgctgaagtgccaccagagtgtcacacaagagaaaaacaaggatttgttgtgagtgggaagatcttggatcagaacccacaacagaaagagaagtgctttaagtgtaaccaatgtgagaaaacctttagctgcggcaaatacctaactcagcatgagaggattcacaccagcggggtgaagccctttgagtgtgaccagtgtgggagagcctttggccaaagtactcagctcattcaccatcaaagaatccactctagagtgaggctgtataaatggggtgagcaagggaaagccatcagcagtgcctcccttctcaaacttcagtcctcccacacaaaggagcacccttttaaatgtaacgaatgcggaaagaccttcagccaaagtgcacacctctcaaaacatcagttaattcatgctggagggaatccctttaaatgtagtaagtgtgacagagtcttcacccagcgaaactaccttgttcagcatgagcgaactcatgccagaaa

SEQ ID NO: 19569 - DNA, 912 bp, Macaca Mulatta
tgtgcattgcccttgtggcaaagctccctgcctattccacttttaggggattgctggcctggagcatggtcagaatgctggtcctattctccctccctccccttaccttggaacccaggccagttgcccatctccattcatgcatagtctgttttgagtctcagccatgggttccccagaatggctaagcaagtgggcagtggttggctatccctggatgggcccttactgccctgtgtgtattttctaggcattcctagctgagtgtgacgcagtggagcagaacatctgccaggagacagagcggctgcagtctacaaactttgccctgtccgagtgaggtgtggcagaaagaggctatgctgccctgaagaatggcaccaccagctctgccgtctctggagcagaatttacctgatttcttcagggctgctaggggcaactggccatttgccagttttcctactctcacccggttctcaatgaaaaacagtgtctttgtgattttgagtaaagctcctgtctgttttctccttctgtctctggttgtgctgcccagcaatccaccttttctggagagaggcacctctgcccacattttcccaggggtttgaacctttggatgctttctttgggctggtgaaagctctaatttgccttgagctagtttcaggtttataagcggccccagtgcttcagatatatgaagggcttctttgcttctgtgaacacgttagtccatagctgtaaaaccagaacccccagggagttgcacctaatcaggaatgttggcaatgatctagaacaaggtgtttggccacttagtaaaccacgtatccctccttatgacctaattcccaaacatctgggtgtggtgttggtttctagactttgtccctcccctcccagtgg

SEQ ID NO: 19570 - DNA, 157 bp, Macaca Mulatta
ggccaaggcttcatgacaagggaatttctaaaaagccttcgaaagccttttggtgactttatggagcccaagtttgagtttgctgtgaagttcaatgcactggaattagatgacagcgacttggcaatatttattgctgtcattattctcagtggag

SEQ ID NO: 19571 - DNA, 687 bp, Macaca Mulatta
ccattagagaacatcctggcttttggagcccttggcaaacaatcgggttaactcccatggttctggggccctgcagcacgtcggttaatacccccctatggcagaggattgtggtcacaacttgatggctgggaagacctactatcagtttttctacttgataggaggatggcagaagtttggctgctttcctaacatccagagcttcgtcgtatttggcacacagcagaggcccagatattagaaaggctctattccagtaaactatgaggactgccttatggatgatttaagtgtctcactaaagcatgaaatgtgaatttttattgttgtacatatgatttaaggtatttaaagtattttcttctctgtgagaaggtttattgttaatacaaggtataataaaattatcgcaagccctctccttccagtataaccagctgaagttgcagatgttagatatttttcataaacaagttctagtcaaagttgaaaattcatagtaagattgatatctataaaacagatataaatttttaggagaaagagtttagtattatcaaagggataaagaaaaaaatactatttaagatgtgaaaattacgagtccaaaatgttattctttccaggctagtataaaatacatagtgaaaattgtttagtgatattacatttatttatccagaa

SEQ ID NO: 19572 - DNA, 623 bp, Macaca Mulatta
  misc_feature (1)...(623): n = A,T,C or G
gcagccagcagggtggccacgtggccctccaggttgtgggagcctctgcagccccgttacccctagggccagcctcctgcctccacctttcctgcctggggggtggcctctgccctaagcggagcaggtccgggtgtgactgacggcccggcgcgtcttacaggccccagaagagcgtgtggcatggctcggaccccagcgggcgcaggctgactgagagctactgcgagacgtggcggacagagtctccctcggtcacaggtcaggcctcctccctgctggggggcaggctcctagggcagaatgccgcaagctgccaccacgcctatatcgtcctctgcatcgagaacagcttcatgactgcctccaagtagccgccacctggatgcagatggccggagaggacgggcggctcggaggaagcacccactgtgggcagggagcggccggccagcccccggccccaggacctggcggccatactttcctgtatagttcacgtgtcatgtaatcctcaagaaataaaaggaagccaaagagtgtatttttttaaaagtttanaatggaagcctgctgctgacgttcatctgccccagctctcccgagctgtgagcccagctggc

SEQ ID NO: 19573 - DNA, 848 bp, Macaca Mulatta
caaatacagtgtgaagagaacctctacccagttataggaggctatccagttgagaaatttgtggctaccatgtatcattacttgcagttttgcctattataagttgaacgacctgaagaatgcagccccctgtgcagtcagctacctgctctttgatcagaatgacaaggtcatgcagcagaacctggtgtattaccagtaccacagggacacttggggcctctcggatgagcacttccagcccagacctgaagcggttcagttctttaacgtgaccacactccagaaggagctgtatgactttgctaaggaaaatataatggatgatgatgagggagaagttgtggaatacgtggatgacctcttagaactggaggagaccagctagcccacagcaaccagacttcctgttgacgttcaggaaacacagattcttcgtccttttcccaacagcccaggctgttgatacctcagagccttcgctttactctccgaagtgaacgggaagcccccatctctctcactacatgtcaccaggggtgaggctgccctttcccgtcttcacacctggccacctcgtggttcacacctatgctttcttacctgtcttttttgacgatgggagtctccgcgtgtgtcgccccacggctgggagtccctttgggcacgttgctccgggttcactgggaaccgttcctggcctccctgggggttcaaagcgggattcctcccgtgggcctcccagccgttccccaagggtaccctgggggaatgaacgcggggcatgtggagccgcccccaagggccactgggagcaaaaatgttaggcagatctttcgcaaagacag

SEQ ID NO: 19574 - DNA, 2270 bp, Macaca Mulatta
  misc_feature (1)...(2270): n = A,T,C or G
gggggcggtagccaataggagccgcgctggctggagagtaatgttacagagcggagagagtgaggaggctgcgtctggctcccgctctcacagccattgcagtacattgagctccatagagacagcgccggggcaagtgagagccggacgggcactgggcgactctgtgcctcgctgaggaaaaataactaaacatgggcaaaggagatcctaagaagccgagaggcaaaatgtcatcatatgcattttttgtgcaaacttgtcgggaggagcataagaagaagcacccagatgcttcagtcaacttctcagagttttctaagaagtgctcagagaggtggaagaccatgtctgctaaagagaaaggaaaatttgaagatatggcaaaggcggacaaggcccgttacgaaagagaaatgaaaacctatatccctcccaaaggggagacaaaaaagaagttcaaggatcccaatgcacccaagaggcctccttcggccttcttcctgttctgctctgagtatcgcccaaaaatcaaaggagaacatcctggcctgtccattggtgatgttgcgaagaaactgggagagatgtggaataacactgctgcagatgacaagcagccttatgaaaagaaggctgcgaaacttgaaggaaaaatacgaaaaggatattgctgcatatcgagctaaaggaaagcctgatgcagccaaaaaagggaagttgtcaaggcttgaaaaaagccttaggaaaaaagaagggaagagggaggaaaaattgaggaagatcgaacaggattgaagagggaggaagcaagatttagaaggatgaacgatcgagaagcagaatggtggatgaggaataaggtttggtctcttgcgccccagttttttttttcttgtctcccataaagcattttacccccccctgtacacaaactcaactcctttttaagagaaaaggccttggaaatgtaaggctgtgtaagatttgtttttaaactgtacagtgtctttttttgtatagttaacacactaccgaatgtgtctttagatagccctgtcctggtggtattttcaatagccactaaccttgcctggtacagtatgggggttgtaaattggcatggaaatttaaagcaggttcttgttggtgcacagcacaaattagttatatatggggatggtagttttttcatcttcagttgtctctgatgcagcttatacgaaataattgttgttctgttaactgaataccactctgtaannnnnnnnnnnnnnnnnnnnnnnngcagctgttttgttgacattctgaatgcttctaagtaaatacaatttttttttattagtattgttgtccttttcataggtctgaaatttttcttcttgaggggaagctagtcttttgcttttgcccattttgaatcacatgaattattacagtgtttatcctttcatatagttagctaataaaaagcttttgtctacacaccctgcataccataatgggggtaaagttaagttgagatagttttcatccataactgaacatcgaaaatcttgatcagttaagaaatttcacatagcccacttacatttacaaactgaagagtaatcagtctactcaaagcatgggattattagaatcaaacattttgaaagtctgtccttgaaggactaatagaaaagtatgttctaacctttacatgaggactctattctttaactcccattaccatgtaatggcagttatattttgcagttcccacattaaagaagacctgagaatgtatccccaaaagcgtgagcttaaaatacaagattgccatattaaattttttgttgacattagtctcagtgaagactatgaaaatgctggctatagatgtcttttcccatttatctcaatatggactgctcaggaaacgagactttccattacaagtatttttaattaattgggccagcttttaaaatgaagatgccacattcaaaatagggtgtatttttcctatattaagggtttgccccctttataaatcgaaagtagatgagagggaaagaagacactttaaacttttgcatcctcagtatgaattatttcaattgatttggaaagaatttttccttttacaaaaacaaaacccccttaagtcattattccgggccttacccatttttagggaaaaaaatttgggcaaaattttggggggttttttccaaagaattaacccgtttttccaaaaaggggccccagtttttttaaaaaaaggc

SEQ ID NO: 19575 - DNA, 443 bp, Macaca Mulatta
cccagagacctcatcagccttggtgtatccaaactccaggttcctgaaatatccgggagcatatgtcagtgatgactactctcaaatgctggcaaatccaggctagtgttctgtctgggctcagacatccacataaccctgtcacccacagaccgccgtctaactcaaagacttcctctggctccccaaggctgcaaagcaaaacagcctgtgttcaactgctggagggtctttttctagggtccctgaatgccgtggtgaggctggtgaggtcctggtccctatctgcctggaggcaaaggcctggacggcttgacttgtggggcaggagtctccgcagcccattcccaagggagactgtgaccgtccatcatgccctctctcaagagccctggccctgctccaactccttcatactccactccaagtgccccacctctccc

SEQ ID NO: 19576 - DNA, 2219 bp, Macaca Mulatta
  misc_feature (1)...(2219): n = A,T,C or G
atgcctgggcacttacaggaaggcttcggctgcgtggtcaccaaccgattcgaccagttatttgacgacgaatcggaccccttcgaggtgctgaaggcagcggagaacaagaaaaaagaagccggcgggggcggcgttgggggccccggggccaagagcgcagctcaggccgcggcccagaccaactccaacgcggcaggcaaacagctgcgcaaggagtcccagaaagaccgcaagaacccgctgccccccagcgttggcgtggttgacaagaaagaggagacgcagccgcccgtggcgcttaagaaagaagnnnnnnnnnnnnnnnnnnnnnnnnnnnnnnnnnnnnnnnnnnnnnnnnnnnnnnnnnnnnnnnnnnnnnnnnnnnnnnnnnnnnnnnnnnnnnnnnnnnnnnnnnnnnnnnnnnnnnnnnnnnnnnnnnnnnnnnnnnnnnnnnnnnnnnnnnnnnnnnnnnnnnnnnnnnnnnnnnnnnnnnnnnnnnnnnnnnnnnnnnnnnnnnnnnnnnnnnnnnnnnnnnnnnnnnnnnnnnnnnnnnnnnnnnnnnnnnnnnnnnnnnnnnnnnnnnnnnnnnnnnnnnnnnnnnnnnnnnnnnnnnnnnnnnnnnnnnnnnnnnnnnnnnnnnnnnnnnnnnnnnnnnnnnnnnnnnnnnnnnnnnnnnnnnnnnnnnnnnnnnnnnnnnnnnnnnnnnnnnnnnnnnnnnnnnnnnnnnnnnnnnnnnnnnnnnnnnnnnnnnnnnnnnnnnnnnnnnnnnnnnnnnnnnnnnnnnnnnnnnnnnnnnnnnnnnnnnnnnnnnnnnnnnnnnnnnnnnnnnnnnnnnnnnnnnnnnnnnnnnnnnnnnnnnnnnnnnnnnnnnnnnnnnnnnnnnnnnnnnnnnnnnnnnnnnnnnnnnnnnnnnnnnnnnnnnnnnnnnnnnnnnnnnnnnnnnnnnnnnnnnnnnnnnnnnnnnnnnnnnnnnnnnnnnnnnnnnnnnnnnnnnnnnnnnnnnnnnnnnnnnnnnnnnnnnnnnnnnnnnnnnnnnnnnnnnnnnnnnnnnnnnnnnnnnnnnnnnnnnnnnnnnnnnnnnnnnnnnnnnnnnnnnnnnnnnnnnnnnnnnnnnnnnnnnnnnnnnnnnnnnnnnnnnnnnnnnnnnnnnnnnnnnnnnnnnnnnnnnnnnnnnnnnnnnnnnnnnnnnnnnnnnnnnnnnnnnnnnnnnnnnnnnnnnnnnnnnnnnnnnnnnnnnnnnnnnnnnnnnnnnnnnnnnnnnnnnnnnnnnnnnnnnnnnnnnnnnnnnnnnnnnnnnnnnnnnnnnnnnnnnnnnnnnnnnnnnnnnnnnnnnnnnnnnnnnnnnnnnnnnnnnnnnnnnnnnnnnnnnnnnnnnnnnnnnnnnnnnnnnnnnnnnnnnnnnnnnnnnnnnnnnnnnnnnnnnnnnnnnnnnnnnnnnnnnnnnnnnnnnnnnnnnnnnnnnnnnnnnnnnnnnnnnnnnnnnnnnntgcttgcaaatatgcatttccaaacttgaaatataggtgtgaacagtgtgtaccagtttaaagctttcacttcatttgtgttttttaattaaggatttagaagttcccccaattacaaactggttttaaatattggacatattggttttaatacctgctttgcatattcacacatggtcaactgggacatgttaaactttgatttgtcaaattttatgctgtgtggaatactaactatatgtattttaacttagttttaatattttcatttttggggaaaaatcttttttcacttctcatgatagctgttatatatatatgctaaatctttatatacagaaatatcagtacttgaacaaattcaaagcacattggtttattaacccttgctccttgcatggttcattaggttcagattataactgatttacattttcaactatatttactttttaaatgtgtgactttcgcattttaaaatctaaactagacatcttaattggtgaaagttgtttaagctacttattgttggtagacacatcctgtcaagtgaagtagttttataggtatgggttttttctccccctcccccaggaaaggtggaataagttgatttggccaatgtgtaatatttaaactgttctgtaaaataagtgtctggccatttgatatgatttctgtgtgtgaaaggtcacaaaatcaaaatggtgcatccatgatcagcaacca

SEQ ID NO: 19577 - DNA, 530 bp, Macaca Mulatta
tcaaatactaaattttaatctttaactctgaacaccaaataaacaacttttttgttttatttcagataaacatagattttcaaaccaaaactctgattgcccagaatatacaagaagctacaagtggctgcttcacaactgcccagaaaagggtatacagcttgatggagaacaactcttatccccgtttcttggagtcagaattctaccaggacttgtgtaaaaagcctcaaatcaccacagagcctcatgctacatgaaatgtaaaagggagcccagaaatggaggacatttcattctttttcctaaggggaaagactgacctgccataaagactgaccttgaattcagcctgggtgttcaggaaacatcactcagaactattgattcaaagctgggtagtgaatcaggaagccagtaactgactaggagaagctggtatcagaacagcttccctcactgtgtacagaacgcaagaagggaataggtggtctgaacgtggtgtcgcaatcgaaaagcaggaatgtaag

SEQ ID NO: 19578 - DNA, 833 bp, Macaca Mulatta
  misc_feature (1)...(833): n = A,T,C or G
ggagtgttagacctttcagtgatgtggggtgaaaagttaatacctgtcaaggtttgtgttacccttctgtaaatggtgtacatagtgtattgttggtaattattttggtacttttattatgtatatttattaaacagannnnnnnnnnnnnnnnnnnnnnnnnnnnnnnnnnnnnnnnnnnnnnnnnnnnnnnnnnnnnnnnnnnnnnnnnnnnnnnnnnnnnnnnnnnnnnnnnnnnnnnnnnnnnnnnnnnnnnnnnnnnnnnnnnnnnnnnnnnnnnnnnnnnnnnnaccttccccccccatcccttaaaaaacctttcccaaaattgtgtaatggacccgggcccaaaaatttttcttaaaaaaccccgccccggatttcggggaaattcccccccaaaaaaaagccccgggnnnnnnnnnnnnnnnnnnnnnnngccccaatggatttttaaaaaaattccggaaggaatctcaggggtttctcgggaattaaaaaacgggttcccccccccctttaaaacaaaataccccccgggcggagtcaattaggaatttggcggaaaaggaaccccccattgggggccaaagaaacctaatccccccggggtaaaaaccccaaatcccccgggggaaaaaaactttccccccgcctgaaaaaagggtttaaaaaattgggcaaaaaaggggcccaaaaaaaattccaccactggggcacctcctccccggggaaatggtggtgaacccccaacccgggtttccgcgtaaaccccaataagggtattccgccaaaggctctttttagggaaaaaaacgcccatttttttccct

SEQ ID NO: 19579 - DNA, 192 bp, Macaca Mulatta
gcgagattatcgggaccggagatacgttgacgaatacaggaatgactactgtgaaggatatgtttccagacattatcacagagacattgaaagcggttatcgaatccactgcagtaaatcttcagtccgcagcaggagaagcagtcctaaaaggaagcgcaatagacactgttcaagtcatcagtcacgttc

SEQ ID NO: 19580 - DNA, 223 bp, Macaca Mulatta
  misc_feature (1)...(223): n = A,T,C or G
ngagctgacgcgagcagcgcgcgagcagaggtcacaggcggagcagctgcggcggcgcgagcacctgctggcccagtgggagctagaagtgttcgagcgcgagctgacgctgctgctgcagcaggtggaccgcgagcgaccgcacgtgcgccgccgccgcggcacattcaagcgcagcaagctccgggcgcgcgacggcggcgagcgcatcagcatgccactc

SEQ ID NO: 19581 - DNA, 283 bp, Macaca Mulatta
ctgtcttttacatgaagatttcagagaatgtggaattaaaaataccacttacaacaatcctaagacaactactggagagtcatgtttgttaaaattctcattaatgtttatgggtgttttctgttgttttgtttgtcagtgttattttgtcaatgttgaagtgaattaaggtacatgcaagtgtagtaacatatctcctgaagatacttgaatggattaaaaaaacacacaggtataattgctggataaagatttcgtggggaaaaaatcaattaatctctct

SEQ ID NO: 19582 - DNA, 1237 bp, Macaca Mulatta
  misc_feature (1)...(1237): n = A,T,C or G
cctatgtacttttctcgntagtgtaatgttcattacccactttntacgcttttctttttccattaaccctgaattgtcagacaataagccccaataagagcttactttgatacgagccttcaggaaacatccatctcactctagtcacatttcctctgtgttgtgtcatcctgctactacttcnnnnnnnnnnnnnnnnnnnnnatcctgctacttctaaggaacttggaatgtaacacgctgtctgctttagtttctcaataaagtgttctctcctttctttacaggtactggaaaactgggcttctcttttgtgagaatcacagctcttatggtgtcttgtaatcgtttgtgggtggggacaggaaatggtgtcattatctccatcccattgacagaaacaaataaaacctcaggtgtaccgggaaatcgtcctggaagtgtaatccgcgtatatggtgatgaaaacagtgataaagtgactccagggacatttataccctattgttcaatggcacatgctcagctttgcttccatgggcaccgggatgctgtgaaattctttgtggcagtcccaggtcaagtcatcagcccacaaagtagcagtagtggcacggatctgacaggtgacaaagcagggccatctgcacaagagcctggtagtcagacgcccttgaagtctatgcttgtcatcagtggaggagagggctacatcgacttccgaatgggtgatgaaggtggagaatcagaacttcttggagaggatcttccacttgaaccttctgtcaccaaagcagaaaggagtcacttgatagtgtggcaagtgatgtatggcagtgagtgagcccacaggaaacaggtggagatggggaagccgtgtcttctgcatggtttattttccctctatccttttatttaatgctcttttgtgagataagtttcgccacataatgtgtgagcattttttcctgttaactttatattacaaaatccgttctaccataacaatacagaggagctagctgtttactgcaccagtgttatagggaacttcagtgtattatgaacaaatcaaagaatgtttacttcttgcaaactggtgaattatagaaagcaatctagatgtggtttactctgccacagtctaatatcattcacttcattttgaaaggtcacttgttagctgtcactaataatggaaataatgggaaacaacttgataaatggaactgtgccc

SEQ ID NO: 19583 - DNA, 586 bp, Macaca Mulatta
tatgaactctctgtatttgctgaaatattttgatatgctgtcatgaagaattgaaattcacacatgtaatccaaataatttcttttagcttctttctagagctgccaacagatagtaaaatgaatccgtttttaatatatcatcctctcgatacccacctttagacaggcagcataactggcatcaaactgaccaaaagtttaggaatactgtatccttactagtccaaattttcatttttgtcactctgcagatttgctgtgatggcctgttgctgggccttagatccggaggagaggcccaagtttcagcagctggtacagtgcctaacagagtttcacgcagccctgggggcctacgtctgactcttctctcccaatcccgcagcatcaggaggaaggtgcctgtcgcggctctcttgaagcctgtcatggatgcttcctatctaacacaacgccaacagaagcacattcgtcttccagaacgccgtgccttaggaatgctttagaatctgaactttttaagacagacttaataatgtggcatattttctagataatcacttttattaggttgaactgaaagg

SEQ ID NO: 19584 - DNA, 158 bp, Macaca Mulatta
gtatggacctgtctgccaatcaggacgaggagaccgaccaggagaccttccagctggagattgaccgcgacaccaaaaagtgtgccttccgtacccacacgggcaagtactggacgctgacagctactgggggcgtgcagtccaccgcctccaccaag

SEQ ID NO: 19585 - DNA, 95 bp, Macaca Mulatta
aggtattgaatgctatgctaaaagaagtctgtaccgctttgttggaagcagatgttaatattaaactagtgaagcaactgagagaaaatgttaag

SEQ ID NO: 19586 - DNA, 1394 bp, Macaca Mulatta
  misc_feature (1)...(1394): n = A,T,C or G
tgctcccgccggcaccatggccaagaccgtggcctatttctacgaccccgacgtgggcaacttccactacggnggagctggacaccctatgaagccccatcgcttggcattgacccatagcctggtcctgcattacggtctctataagaagatgatcgtnnnnnnnnnnnnnnnnnnnnnnnnnnnnnnnnnnnnnnnnnnnnnnnnnnnnnnnnnnnnnnnnnnnnnnnnnnnnnnnnnnnnnnnnnnnnnnnnnnnnnnnnnnnnnnnnnnnnnnnnnnnnnnnnnnnnnnnnnnnnnnnnnnnnnnnnnnnnnnnnnnnnnnnnnnnnnnnnnnnnnnnnnnnnnnnnnnnnnnnnnnnnnnnnnnnnnnnnnnnnnnnnnnnnnnnnnnnnnnnnnnnnnnnnnnnnnnnnnnnnnnnnnnnnnnnnnnnnnnnnnnnnnnnnnnnnnnnnnnnnnnnnnnnnnnnnnnnnnnnnnnnnnnnnnnnnnnnnnnnnnnnnnnnnnnnnnnnnnnnnnnnnnnnnnnnnnnnnnnnnnnnnnnnnnnnnnnnnnnnnnnnnnnnnnnnnnnnnnnnnnnnnnnnnnnnnnnnnnnnnnnnnnnnngaaattacttctttcctgccactagtgacatgtatgaagtcggggcagagagtggccactactactgtctgaatgtgcccctgcgggatggcattgatgaccagagttacaaataccttttccagccagttatcaaccaggtaatggacttctaccaacccacatgcattgtgctccagtgtggagctgactctctgggctgtgatcgattgggctgctttaacctcagcatccgagggcatggggaatgtgtcgaatatgtcaagagcttcaatatccctctactggtgctgggtggtggtggttatactgtccgaaatgttgcccgctgctggacatatgagacatcgctgctggtagaagaggccattagtgaggagcttccctatagtgaatacttcgagtactttgccccagacttcacacttcatccagatgtcagcacccgcatcgagaatcagaactcacgccagtatctggaccagatccgccagacaatctttgaaaacctgaagatgctgaaccatgcacctagtgtccagattcatgacgtgcctgcagacctcctgacctatgacaggactgatgaggctaatgcggaggacaggggtcctgaggagaactatagcaggccagaggcacccaatgagttctgtgatggagaccataacaacgacaaggaaagcgatgtggagatttaagaatggcttgggatgctgtgtcccaaggaatttcttttcacctcttggttggactggaggggaaaggagtggctcctagagtcctg

SEQ ID NO: 19587 - DNA, 745 bp, Macaca Mulatta
gggactctaaagatgctgagaaaagtagagaagaatttgaagatcagtcccttgaaaaagacagtgacgacaaaacaccagacgatgaccctgagcaaggaaaatctgaggagccaacagaagttggggataaaggtaactctgtgtcagcaaatcttggcgacaacacaacaaatgcatcttcagaagagactagtccctctgaagggaggagccccgtggggtgtctctcagaaacccctgatagcagcaacatggcagagaagaaggtggcatctgagctcccccaggatgtgccagaagaacctaacaagatatgtgagagcagtaacactagtgctaccactacctccatccagcctaatctggaaaacagtaacagcagcagtgaactaaattcttcccagagtgaatctgctaaggcagctgatgatcttgaaaatggagaaagagaatctcatacacctgtctctattcaggaagagataggtgatttcaaattggagaagtccaatggggagctcagcgaatctcctggagctggaaaaggatcatctggctcaactcgaatcatcaccagattgcggaatccagatagcaaacttagtcagctgaagagccaacaggtgggcagccggctgcccatgaaagcaaataaattattttaagggaggggcaaaagaagggtacctgggtagttttaactcctcaaggggggaaatttttcacgggttttgaagcaccc

SEQ ID NO: 19588 - DNA, 1375 bp, Macaca Mulatta
  misc_feature (1)...(1375): n = A,T,C or G
ggcttatcaacactgcaagctgtgctggattctgctgctgaaaagaaatggcaagtgactgctatcaatgtgggaaacattaacaatgacaagaaagatgagatgtaccgatcactttttcaagatctggagttaaaaaaggaacggcgtgtcattctggactgtgaaagggataaagtaaacgacattgtagaccaggttnnnnnnnnnnnnnnnnnnnnnnnnnnnnnnnnnnnnnnnnnnnnnnnnnnnnnnnnnnnnnnnnnnnnnnnnnnnnnnnnnnnnnnnnnnnnnnnnnnnnnnnnnnnnnnnnnnnnnnnnnnnnnnnnnnnnnnnnnnnnnnnnnnnnnnnnnnnnnnnnnnnnnnnnnnnnnnnnnnnnnnnnnnnnnnnnnnnnnnnnnnnnnnnnnnnnnnnnnnnnnnnnnnnnnnnnnnnnnnnnnnnnnnnnnnnnnnnnnnnnnnnnnnnnnnnnnnnnnnnnnnnnnnnnnnnnnnnnnnnnnnnnnnnnnnnnnnnnnnnnnnnnnnnnnnnnnnnnnnnnnnnnnnnnnnnnnnnnnnnnnnnnnnnnnnnnnnnnnnnnnnnnnnnnnnnnnnnnnnnnnnnnnnnnnnnnnnnnnnnnnnnnnnnnnnnnnnnnnnnnnnnnnnnnnnnnnnnnnnnnnnnnnnnnnnnnnnnnnnnnnnnnnnnnnnnnnnnnnnnnnnnnnnnnnnnnnnnnnnnnnnnnnnnnnnnnnnnnnnnnnnnnnnnnnnnnnnnnnnnnnnnnnnnnnnnnnnnnnnnnnnnnnnnnnnnnnnnnnnnnnnnnnnnnnnnnnnnnnnnnnnnnnnnnnnnnnnnnnnnnnnnnnnnnnnnnnnnnnnnnnnnnnnnnnnnnnnnnnnnnnnnnnnnnnnnnnnnnnnnnnnnnnnnnnnnnnnnnnnnnnnnnnnnnnnnnnnnnnnnnnnnnnnnnnnnnnnnnnnnnnnnnnnnnnnnnnnnnnnnnnnnnnnnnnnnnnnnnnnnnnnnnnnnnnnnnnnnnnnnnnnnnnnnnnnnnnnnnnnnnnnnnnnnnnnnnnnnnnnnnnnnnnnnnnnnnnnnnnnnnnnnnnnnnnnnnnnnnnnnnnnnnnnnnnnnnnnnnnnnnnnnnnnnnnnnnnnnnnnnnnnnnnnnnnnnnnnnnnnnnnnnnnnnnnnnnnnnnnnnnnnnnnnnnnnncattggggtcagtgtagttttattcctggccagcagatttagcccctacgagtggcacactgaggagtttgaagatggaagagaaacacccagtagtgaatcaactaatgaatttgggatttttaatagtctctggtttttcttgagagcctttatgcagcaaggatgcgatatttcgccaag

SEQ ID NO: 19589 - DNA, 936 bp, Macaca Mulatta
tggggaagcagaacagtatgtgtgaagtttatgtactggcactataaaaatataaaaacaagaaatgctcaaaccattgtaaacttgccgactaggttgggtcacatttgaaaaacaggccagtacggactattggtggagggaaaactttaaaaataataaccacaatgctgctgaaacagactcacaacaactcttaatttaaacatgtgtggttgaatttatttccctgcatgcattgtgttttgtaactagttatgtggcatgcagcatttggaaaatttttcttatttaccggtgtttgatttgtgatttttaaaaattgatacctttaccattgcagaaaagaacttgtgctttcccagtggcgtatgtgtattgtttccattgtattattataattatgttttacattgcaagattcttgatgttaaaccaatccttgtaaagtgtagaaaggaaccctcctattgtggaatgaaagattaagtatattaacacttttcagaatgatagtttccgtatttgatgttgctcagaaatgtctgagtatttgagtaagttttacatgacagtgggtactaaaattaagtcattttgttcagcactttaatgctttcttatagaattgtctaaaactcctggatccttgagcaagtgattatggtctcctgactttcatgaggcttccattaggaacagaatgattgcatgttgtccccagaacactgccaccttgctatgcgaatgatgttctcagcagcacttaggacactcttaaacgttatttattgaaaaaaattttctatgcttttaatagtttaaagaattgacctaaggaaagcctatgattggacttattttccaaccagataacatttactcttagtacccagtttttataatttatatgaaatgagatttcaacacttactt

SEQ ID NO: 19590 - DNA, 1196 bp, Macaca Mulatta
  misc_feature (1)...(1196): n = A,T,C or G
gtgtgcgctcagcaggacgtgggagactccggcttcaannnnnnnnnnnnnnnnnnnnnnnnnnnnnnnnnnnnnnnnnnnnnnnnnnnnnnnnnnnnnnnnnnnnnnnnnnnnnnnnnnnnnnnnnnnnnnnnnnnnnnnnnnnnnnnnnnnnnnnnnnnnnnnnnnnnnnnnnnnnnnnnnnnnnnnnnnnnnnnnnnnnnnnnnngcgcagactacccagacctgcgcaagcacaacaactgcatggctgagtgcctcacccctgccatctatgccaagcttcgcaacaaggtgacgcccaacggctacaccctggaccagtgcatccagactggagtggacaaccctggccaccccttcataaagactgtgggcatggtggctggtgacgaggagtcctatgaggtnnnnnnnnnnnnnnnnnnnnnnnnnnnnnnnnnnnnnnnnnnnnnnnnnnnnnnnnnnnnnnnnnnnnnnnnnnnnnnnnnnnnnnnnnnnnnnnnnnnnnnnnnnnnnnnnnnnnnnnnnnnnnnnnnnnnnnnnnnnnnnnnnnnnnnnnnnnnnnnnnnnnnnnnnnnnnnnnnnnnnnnnnnnnnnnnnnnnnnnnnnnnnnnnnnnnnnncgtggccatcaccgccctggagggcctcaagggggacctggctggccgtttctaccagctgtccgagatgacggagcaggatcagcagcggctcatcgatgnnnnnnnnnnnnnnnnnnnnnnnnnnnnnnnnnnnnnnnnnnnnnnnnnnnnnnnnnnnnnnnnnnnnnnnnnnnnnnnnnnnnnnnnnnttatgataagacatttctcatctggataaatgaggaggatcacaccnnnnnnnnnnnnnnnnnnnnnnnnnnnnnnnnnnnnnnnnnnnnnnnnnnnnnnnnnnnnnnnnnnnnnnnnnnnnnnnnnnnnnnnnnnnnnnnnnnnnnnnnnnnnnnnnnnnnnnnnnnnnnnnnnnnnnnnnnnnnnnnnnnnnnnnnnnnnnnnnnnnnnnnnnnnnnnnnnnnnnnnnnnnnnnnnnnnnnnnnnnnnnnnnnnnnnnnnnnnnnnnnnnnnnnnnnnnnnnnnnnnnnnnnnnnnnnnnnnnnnnnnnnnnnnacactgccgcagtcgcagatgtgtacgacatttccaacatagatagaattggtcgatcagaggt

SEQ ID NO: 19591 - DNA, 1346 bp, Macaca Mulatta
  misc_feature (1)...(1346): n = A,T,C or G
tnnnnnnnnnnnnnnnnnnnnnncggcacnnnnnnnnnnnnnnnnnnnnnncatttcatgagcatttattcatctgaggtagatgagcaggctcagtctaggggaataattgccaacaaacacttttgggaagcctggggccatggctctgccaggaatctgcctctccagggcatcatttgagtcctgccttctcaaagtacttgtgacaggcagaagtgattgcagccacggacacgatgaactcgctgaagtccacctgagcgtctccattagcatccaggtccttgagcagtttatccacggcatccttgtcctttccactctgcaggaagccgggtagctccttctccatcagcaccttgagctcccccttggtcagggtctgcgtgctgccctcgctgcctgaatatcgggaaaagacgtctatgatcatgcccatggctgtctccagttccgtcatggtgctggattcagacaaaccctcgtgccgaattcggcacgaggctgaaatggagcatacctttgggacctattccagcaaggtgttttgtttatgaaattgagatcagagaagatgatactaccttggtgactaccacagttgaaaatgaaacgtacaccttgaaaataacaaatgaaacccgacagttatgctttgtagtaagaagcaaagtgaatatttattgctcagatgatggaatttggagtgagtggagtgataaacaatgttgggaagttgaagaactattgaagaaaactttgctacttttcttgttaccatttggtttcatattaatattagttatatttgtaaccggtctgcttttgtgtaagagagacagctacccgaaaatgaatttttctgtgatagatgaagactttccatatcaagagacatggtattgactcaccagcttccagtcatggccaaatgttcaatatgagtctcaataaactgaatttttcttgcaaatgttaaatacgtcttattttaaaatgttgttgtatttaaataggctttcgagtactcaaagcctcaactagtagtacattttctggattctattaacagtttcttttcttataaattcatagtgagagtgctgcatgtagagaaatcaaggtatgagtcaggttttatatttatgatgtattaataaaacaatgtgacttcacagnnnnnnnnnnnnnnnnnnnnnnnnnnnnnnnnnnnnnnnnnnnnnnnnnnnnnnnnnnnnnnnnnnnnnnnnnnnnnnnnnnnnnnnnnnnnnnnnnnnnnnnnnnnnnnnnnnnnnnnnnnnnnnnnnnnnnnnnnnnnnnnnnnnnnnnnnnnnnnnnnncca

SEQ ID NO: 19592 - DNA, 581 bp, Macaca Mulatta
ctagtcgcgagtttcctttgggtatttttgtaggttccacaatttggctttattttgcagtacagaaatcatttggagccattttgagacagaagtagaggctctgtcaagtcaatactgcattgcagcttggtccactgaagaagccacgcctgagatataaaagatgctctacactttacccgctttacgtttgcttcctctccccttttccctcatcaactttattaggttaaaacaccacatacaggctttctccaaatgactccctatgtctgcagtttggttagaattttatgcccacataaaccaaacttgtggctatgctatttgggccctgccataacatttgacataatacaaaatataaagtcatagggaaaacttctggatgccgtcccaaaccgtggattattcaattaagaatctcctgaacctcaagagggtagatggcacacaacctgtatggatccagctcttgagaagcagaagcacacagctacactgattaaaagatacaaatactgtctcaagttttctgtattggtatcccaatgtttgtttaaaactgatccttcact

SEQ ID NO: 19593 - DNA, 496 bp, Macaca Mulatta
  misc_feature (1)...(496): n = A,T,C or G
gcctttatcctcctcttctacctcgttttttatgggttcctcaccgccatgttcaccctcaccatgtgggtgatgctgcagactgtctccgaccatacccccaagtaccaggaccgactggctacaccggnnnnnnnnnnnnnnnnnnnnnnnnnnnnnnnnnnnnnnnnnnnnnnnnnnnnnnnnnnnnnnnnnnnnnnnnnnnnnnnnnnnnnnnnnnnnnnnnnnnnnnnnnnnnnnnnnnnnnnnnnnnnnnnnnnnnnnnnnnnnnnnnnnnnnnnnnnnnnnnnnnnnnnnnnnnnnnnnnnnnnnnnnnnnnnnnnnnnnnnnnnnnnnnnnnnnnnnnnnnnnnnnnnnnnnnnnnnnnnnnnnnnnnnnnnnnnnnnnnnnnnnnnnnnnnnnnnnnnnnnnnnnnnnnnnnnnnnnnnnnnnnnnnnnnggtcatcaacttctatgcaggagcaaaccagaccatgaatgttacctgtgctgggaa

SEQ ID NO: 19594 - DNA, 241 bp, Macaca Mulatta
  misc_feature (1)...(241): n = A,T,C or G
ncatagacagcataatccgggctggtttgattccaaaatttgtgtccttcttgggcagaactgattgtagtcccattcagtttgagtctgcttgggcactcactaacattgcttctgggacatcagaacagaccaaggctgtggtagatggaggtgccatcccagcattcatctctctgttggcatctccccatgctcacatcagtgaacaagccgtctgggctctaggaaacattgcagg

SEQ ID NO: 19595 - DNA, 844 bp, Macaca Mulatta
  misc_feature (1)...(844): n = A,T,C or G
ggtgacagagctggcacctctgggatcgttgttggaccggctacgtaagcaccagggccacttcctcctggggactctgagtcgctacgctgtgcaggtggctgagggcatgggctacctggagtccaagcgctttattcaccgtgacctggctgcccgcaatctactgttggctactcgcgacctggtcaagatcggggactttgggctgatgcgagcactacctcagaatgacgaccattacgtcatgcaggaacatcgcaaggtgcccttcgcctggtnnnnnnnnnnnnnnnnnnnnnnnnnnnnnnnnnnnnnnnnnnnnnnnnnnnnnnnnnnnnnnnnnnnnnnnnnnnnnnnnnnnnnnnnnnnnnnnnnnnnnnnnnnnnnnnnnnnnnnnnnnnnnnnnnnnnnnnnnnnnnnnnnnnnnnnnnnnnnnnnnnnnnnnnnnnnnnnnnnnnnnnnnnnnnnnnnnnnnnnnnnnnnnnnnnnnnnnnnnnnnnnnnnnnnnnnnnnnnnnnnnnnnnnnnnnnnnnnnnnnnnnnnnnnnnnnnnnnnnnnnnnnnnnnnnnnnnnnnnnnnnnnnnnnnnnnnnnnnnnnnnnnnnnnnnnnnnnnnnnnnnnnnnnnnnnnnnnnnnnnnnnnnnnnnnnnnnnnnnnnnnnnnnnnnnnnnnnnnnnnggacgctgtgtgtgggacccttccctcgcaacgtggtgatctctgtggccggcctgtcagcccaggacatcagccagcccctgcagaacagcttcatccacacggggcatggcgacagcgaccctcgccactgctggggcttcccagacaggattgacgagtg

SEQ ID NO: 19596 - DNA, 248 bp, Macaca Mulatta
aggagctgaagctaattttatgctgaaaattcatcctctgaagaaatatcctgtggatctttattatctggttgatgtctcagcatcaatgcacaataatatagaaaaattaaattctgttggcaacgatttatctagaaaaatggcatttttctctcgtgactttcgccttggatttggttcatatgttgataaaacagtttcaccatacattagcatccaccctgaaaagattcataatcaatgca

SEQ ID NO: 19597 - DNA, 1197 bp, Macaca Mulatta
  misc_feature (1)...(1197): n = A,T,C or G
ctccatttgccaacggtcccagtgacacaccagaggaaatcctaacccggatcggttgtgggaagtttaccctcagtgggggaaactggaacacagtttcagagacagccaannnnnnnnnnnnnnnnnnnnnnnnnnnnnnnnnnnnnnnnnnnnnnnnnnnnnnnnnnnnnnnnnnnnnnnnnnnnnnnnnnnnnnnnnnnnnnnnnnnnnnnnnnnnnnnnnnnnnnnnnnnnnnnnnnnnnnnnnnnnnnnnnnnnnnnnnnnnnnnnnnnnnnnnnnnnnnnnnnnnnnnnnnnnnnnnnnnnnnnnnnnnnnnnnnnnnnnnnnnnnnnnnnnnnnnnnnnnnnnnnnnnnnnnnnnnnnnnnnnnnnnnnnnnnnnnnnnnnnnnnnnnnnnnnnnnnnnnnnnnnnnnnnnnnnnnnnnnnnnnnnnnnnnnnnnnnnnnnnnnnnnnnnnnnnnnnnnnnnnnnnnnnnnnnnnnnnnnnnnnnnnnnnnnnnnnnnnnnnnnnnnnnnnnnnnnnnnnnnnnnnnnnnnnnnnnnnnnnnnnnnnnnnnnnnnnnnnnnnnnnnnnnnnnnnnnnnnnnnnnnnnnnnnnnnnnnnnnnnnnnnnnnnnnnnnnnnnnnnnnnnnnnnnnnnnnnnnnnnnnnnnnnnnnnnnnnnnnnnnnnnnnnnnnnnnnnnnnnnnnnnggaggggaactgagtcacactgaggctctctgagactcttttaccagctttgggatcccaccctggggacccccacgattggccatctgtagccatctgcacacacctccgagacagtccagtgtcacctctctcagagcctctggctggttattagaattcattctatccccagtcagctccttttccgttctgttctgctgggagttctagaaccacttcctgctacaggagtggtctcttgccctgctggcttccagcttcaggcaccagcatccacctcggccccaccagtggatcccctgtggtcaggctgggcagccccagagagaggatgtggaaagcactttttggctgacttcttttggggttggcaacaggacagagttcacgggaggccagtgggtgggccatgagggacaggggcttttttcactttcttcctctgctggttactcagggttcatctgtccatggcctttctaataaactgttgagttgaa

SEQ ID NO: 19598 - DNA, 394 bp, Macaca Mulatta
agcatgtgaccagctggctcttggcgtggctgctctctttggcccttcccatagctcctccgtcagtgctgtgcagtctatttgcaatgctctcgaagttccacacatacagacccgctggaaacacccctcggtggacaacaaagatttgttttacatcaacctttacccagattatgcagctatcagcagggcgattctggatctggtcctctattacaactggaaaacagtgaccgtggtgtatgaagacagcacaggtatgggactcacccaagacctcacctgaccgtgtctgctctgaacaaagagaacgaaagtatcaactagtcattaaactcatcaggtggagcacacaaaaatgctcttttatataaagctaactgaatattct

SEQ ID NO: 19599 - DNA, 803 bp, Macaca Mulatta
  misc_feature (1)...(803): n = A,T,C or G
aggttcagaaaagagaccctcgtgactggactgcacagttcatggaggctgcagatgaggccttggatgctctggatgctgctgcagctgaggccgaagcccgggctgaagcaagaacccgcatgggaattggagatgaggctgtgtcagaggccctggagctgggatgatattgagtttgagctgctgnnnnnnnnnnnnnnnnnnnnnnnnnnnnnnnnnnnnnnnnnnnnnnnnnnnnnnnnnnnnnnnnnnnnnnnnnnnnnnnnnnnnnnnnnnnnnnnnnnnnnnnnnnnnnnnnnnnnnnnnnnnnnnnnnnnnnnnnnnnnnnnnnnnnnnnnnnnnnnnnnnnnnnnnnnnnnnnnnnnnnnnnnnnnnnnnnnnnnnnnnnnnnnnnnnnnnnnnnnnnnnnnnnnnnnnnnnnnnnnnnnnnnnnnnnnnnnnnnnnnnnnnnnnnnnnnnnnnnnnnnnnnnnnnnnnnnnnnnnnnnnnnnnnnnnnnnnnnnnnnnnnnnnnnnnnnnnnnnnnnnnnnnnnnnnnnnnnnnnnnnnnnnnnnnnnnnnnnnnnnnnnnnnnnnnnnncttatgttcacagatattgctatcaatcgcaatagtctttcccctgtgtgaggctgaagcctcagattccttctaaacacagctatctagagagccacatcgtgttgactgaaagtggcatgcaagataaatttatttgctgttccttgtctactgctttttttccccttgtgtgctgtcaagttttggtatcagaaataaacattgaaattgcaaagtga

SEQ ID NO: 19600 - DNA, 794 bp, Macaca Mulatta
  misc_feature (1)...(794): n = A,T,C or G
ctttgctgtctgcatgccgacatgctgggctcactgggccccaaggaggccaagaaggccttcctggacttctatcacagcttcctggagaagacagcgnggttctgcgggtgccggtccctcccaatgtcgcctttgaacttgnnnnnnnnnnnnnnnnnnnnnnnnnnnnnnnnnnnnnnnnnnnnnnnnnnnnnnnnnnnnnnnnnnnnnnnnnnnnnnnnnnnnnnnnnnnnnnnnnnnnnnnnnnnnnnnnnnnnnnnnnnnnnnnnnnnnnnnnnnnnnnnnnnnnnnnnnnnnnnnnnnnnnnnnnnnnnnnnnnnnnnnnnnnnnnnnnnnnnnnnnnnnnnnnnnnnnnnnnnnnnnnnnnnnnnnnnnnnnnnnnnnnnnnnnnnnnnnnnnnnnnnnnnnnnnnnnnnnnnnnnnnnnnnnnnnnnnnnnnnnnnnnnnnnnnnnnnnnnnnnnnnnnnnnnnnnnnnnnnnnnnnnnnnnnnnnnnnnnnnnnnnnnnnnnnnnnnnnnnnnnnnnnnnnnnnnnnnnnnnnnnnnnnnnnnnnnnnnnnnnnnnnnnnnnnnnnnnnnnnnnnnnnnnnnnnnnnnnnnnnnnnnnnnnnnnnnnnnnnnnnnnnnnnnnnnnnnnnnnnnnnnnnnnnnnnngagaagccaggtgctacagaccggaagggaggcctggggatgccctctcgggaccggaatgttggggctcctgggcaggacacccctggagtctctctgcaccctctgtccctggacagcccagaccgggaaccaggt

SEQ ID NO: 19601 - DNA, 1178 bp, Macaca Mulatta
  misc_feature (1)...(1178): n = A,T,C or G
ggggggggctttccgcgctacctacagaagggtccatacggcgttgttctggattcccgtcgtaacttaaagggaaactttcacaatgtccggagcccttgatgtcctgcaaatgaaggaggaggatgtccttaagttccttgcagcaggaacccacttaggtggcaccaatcttgacttccagatggaacagtacatctataaaaggaaaagtgatggcatctacatcataaatctgaagaggacctgggagaagcttctgctggcggctcgtgccattgttgccattgaaaaccctgctgatgtcagtgttatatcctccaggaatactggccagagggccgtgctgaagtttgctgctgccactggagccactccaattgctggccgcttcactcctggaaccttcactaaccagatccaggcagccttccgggagccacggcttcttgtggttactgaccccagggctgaccaccagcctctcacggaggcatcttatgttaacctacctaccattgctctgtgtaacacagattctcctctgcgctatgtggacattgccatcccatgcaacaacaagggagctcactcagtgggtttgatgtggtggatgctggctcgggaagttctgcgcatgcgtggcaccatttcccgtgaacacccgtggggaggtcatgcctgatctctacttctacagagatcctgaaagagattgaaaaagaagagcaggctgctgctgaaaaggcagtgaccaaggaggaattttcagggtggaatggactgcttccagctcctggattactggtactcagcctgagttgcgactggcctgaggtgtgcggtcccctgtgctattcagggtccctatgaaatggatgtcactgcccggaatggtctgggccaggtccgccgatgggggacccgaggtcacggtgccggtccccggaagggcgaactttcaacaaacgggggtcgttgtccttccctccttcctcctccgtccctcgtcgtgcggcacagagaaaaagnnnnnnnnnnnnnnnnnnnnnnnnnnnnnnnnnnnnnnnnnagagaaagnnnnnnnnnnnnnnnnnnnnnnnnnnnnnnnnnnnnnnnnnnnnnnnnnnnnnnnnnnnnnnnnnnnnnnnnnnntacaacagacaaaaaaaaagaaa

SEQ ID NO: 19602 - DNA, 186 bp, Macaca Mulatta
agggctgtgaacatcctaccgaaccgagtggtgggcagtgtgggccagcaccctggggagcctgtggaggagctggccctttcccactgtggccgcttcctggccagtagcggccatgaccagcgcctcaagttttgggacatggcccagctgcgagctgtggtggtggatgactaccgtcggcgc

SEQ ID NO: 19603 - DNA, 1200 bp, Macaca Mulatta
  misc_feature (1)...(1200): n = A,T,C or G
gtgggccacaagccaggcaggaatgaccacttttactgccctcaaggctgccacccaattgatctgtatgtgtgtattagccctggctacccctttctaaaattgtcttacactatactagaatgtaagctttctgagagaggacctctggccatgtagtgtgatggccagaaaatggaaagaagcagataacagaatttcctctctgggcaaagaattgtcaggacctaagaaacatgtaaagattagaaaatccaagaataaatcgaggatgatttttatttttataagcttgaaagcaagagagaggaagtagaaaataagattccttagaatccaggtgcacactgttaaaattgtcaatgtggatgattctttaaaccataatttgggccaaaagctgagcatcacgccaagaaaatacctctgcttctagacatcaagagaggtggagataaaggaaaaagcttaatgccaaattgatagcagtgagaggcaacaaaccttaggacagggaattcttaacttgtggcagagcaaacagaaactcatgagacatgttatccagtaatagaaaataggacacatgagatttattccactggagagtactaggattctatatgtatatccatgggaattgaaataaagtctcggagtaatggaacagatacactgagagaagtaaccagaatgtggtcagaaaaaccagcgaattattgaaatccatgagaaaatcaagatattaggagaactgttagcttgataggtgaagaggatgaagaaaacaggaaatgaaaggtccgtccatgacaggtcaactatgagagcgaatatgggctacgtgctaatttttttattcttttctttctgtgtcctgtgtanaacaaaaaagacgacgatagcaagaagcagaaaagaaataaaaagaaaaaggaagagaagagacgaggcagagagagagaaagaagtgagaggagagcgaaggaagagaagagaagagaagagagaaaaggggagaggggnnnnnnnnnnnnnnnnnnnnnnnngacagagggggggacggagaagggaagcaagacggagcgagagaacgagagcgaagagaaaaggcaggagagcaacaagaagaagagaagacgagaaaaaagacgagaagnnnnnnnnnnnnnnnnnngagcagagagacgaggggggagg

SEQ ID NO: 19604 - DNA, 629 bp, Macaca Mulatta
taccagtgctggtttgctgtgaaacatacaagttctgtgagcgtgtgcagactgatgcctttgtctctaatgagctaggtaagtagggcaaaagagaagcctccagctacctgtgaagacttgagagtgagagaggggcagataaactagaaattcttttctaaaagaacgtaatgggtacaccttccattgcagatgaccctgatgatctgcagtgtaaacggggagaacatgtcgcactggctaactggcagaaccacgcgtccctacggttgttgaatctagtctatgatgtgactcccccagagcttgtggatctggtgatcacagagctggggatgatcccttgcagttctgtacctgttgttctacgagtcaagagcagtgaccagtgagggggaaaacacagggttaataaatgccatagtccctaccttcagcaactctgctgcctttgtttctcttttagcatctccacctcttaagttaggagtccagactccacaaccccttttatcacctgctactaacctcagacctttgtgaagacctgctcaggtaactagctccatgccagtgcattggggctaacctgaaggtccgtataaagaaccaaaactacccaaatc

SEQ ID NO: 19605 - DNA, 2302 bp, Macaca Mulatta
  misc_feature (1)...(2302): n = A,T,C or G
tgaagtattgataacaccaaggaaatctatcacgatttgaaaagataagcaaaagtttgatttccagacactacagaannnnnnnnnnnnnnnnnnnnnnnnnnnnnnnnnnnnnnnnnnnnnnnnnnnnnnnnnnnnnnnnnnnnnnnnnnnnnnnnnnnnnnnnnnnnnnnnnnnnnnnnnnnnnnnnnnnnnnnnnnnnnnnnnnnnnnnnnnnnnnnnnnnnnnnnnnnnnnnnnnnnnnnnnnnnnnnnnnnnnnnnnnnnnnnnnnnnnnnnnnnnnnnnnnnnnnnnnnnnnnnnnnnnnnnnnnnnnnnnnnnnnnnnnnnnnnnnnnnnnnnnnnnnnnnnnnnnnnnnnnnnnnnnnnnnnnnnnnnnnnnnnnnnnnnnnnnnnnnnnnnnnnnnnnnnnnnnnnnnnnnnnnnnnnnnnnnnnnnnnnnnnnnnnnnnnnnnnnnnnnnnnnnnnnnnnnnnnnnnnnnnnnnnnnnnnnnnnnnnnnnnnnnnnnnnnnnnnnnnnnnnnnnnnnnnnnnnnnnnnnnnnnnnnnnnnnnnnnnnnnnnnnnnnnnnnnnnnnnnnnnnnnnnnnnnnnnnnnnnnnnnnnnnnnnnnnnnnnnnnnnnnnnnnnnnnnnnnnnnnnnnnnnnnnnnnnnnnnnnnnnnnnnnnnnnnnnnnnnnnnnnnnnnnnnnnnnnnnnnnnnnnnnnnnnnnnnnnnnnnnnnnnnnnnnnnnnnnnnnnnnngagccaacggactgaagtcctgtgtcattgtgatccgggtcctgagggacctgtgcactcgcgtgcccacctggggtcccctccgaggctgctctcgagctcctgtgtgagaaatccattggcacagccaacagaccgatgggtgctgacgaggccctgcgaagagtgctggagtgcctggcgtcgggcatcgtgatgccagncagatggttctggcatttatgacccttgtgaaaaagaagccactgatgctattgggcatctagacagacagcaacgggaagatatcacacagnnnnnnnnnnnnnnnnnnnnnnnnnnnnnnnnnnnnnnnnnnnnnnnnnnnnnnnnnnnnnnnnnnnnnnnnnnnnnnnnnnnnnnnnnnnnnnnnnnnnnnnnnnnnnnnnnnnnnnnnnnnnnnnnnnnnnnnnnnnnnnnnnnnnnnnnnnnnnnnnnnnnnnnnnnnnnnnnnnnnnnnnnnnnnnnnnnnnnnnnnnnnnnnnnnnnnnnnnnnnnnnnnnnnnnnnnnnnnnnnnnnnnnnnnnnnnnnnnnnnnnnnnnnnnnnnnnnnnnnnnnnnnnnnnnnnnnnnnnnnnnnnnnnnnnnnnnnnnnnnnnnnnnnnnnnnnnnnnnnnnnnnnnnnnnnnnnnnnnnnnnnnnnnnnnnnnnnnnnnnnnnnnnnnnnnnnnnnnnnnnnnnnnnnnnnnnnnnnnnnnnnnnnnnnnnnnnnnnnnnnnnatgggcttgccgacgggtgccgaaggcagggactctagcaagggggaggactcggctgaggagactgaggcgaagccagctgtggtggcccccgccccagtggtagaagctgtctcaacccctagtgcggcctttccctcagatgccactgccgagnnnnnnnnnnnnnnnnnnnnnnnnnnnnnnnnnnnnnnnnnnnnnnnnnnnnnnnnnnnnnnnnnnnnnnnnnnnnnnnnnnnnnnnnnnnnnnnnnnnnnnnnnnnnnnnnnnnnnnnnnnnnnnnnnnnnnnnnnnnnnnnnnnnnnnnnnnnnnnnnnnnnnnnnnnnnnnnnnnnnnnnnnnnnnnnnnnnttgctgccctagaaaagcttttccctgacacccctctcgcccttgatgccaacaaaaagaagagagccccagtacccgtcagagggggaccgaaatttgctgctaagnagccacataaccctggcttcggcatgggaggccccatgcacaatgaagtgnnnnnnnnnnnnnnnnnnnnnnnnnnnnnnnnnnnnnnnnnnnnnnnnnnnnnnnnnnnnnnnnnnnnnnnnnnnnnnnnnnnnnnnnnnnnnnnnnnnnnnnnnnnnnnnnnnnnnnnnnnnnnnnnnnnnnnnnnnnnnnnnnnnnnnnnnnnnnnnnnnnnnnnnnnnnnnnnnnnnnnnnnnnnntccacgttgctgtgtcgtgaggtgcagcgggtcaccctgtggcccgtcctgtgacccatatttagccgtgtttgggactccgtgtcttcaatggtttgttagttgccattacaactttgtctgg

SEQ ID NO: 19606 - DNA, 1202 bp, Macaca Mulatta
  misc_feature (1)...(1202): n = A,T,C or G
ggaacccggacaacgacatccgcccgtggtgcttcgtgctgatcggcgacaggctaagctgggagtactgcgacgtggcacagtgccaggccccaacccaggcggcgcctccgacgccggtgtcccctgggcttcatgtcccactcataaccccgcagccggcaccgccgaagcttcagcccacgacccggaccccgcctcagnnnnnnnnnnnnnnnnnnnnnnnnnnnnnnnnnnnnnnnnnnnnnnnnnnnnnnnnnnnnnnnnnnnnnnnnnnnnnnnnnnnnnnnnnnnnnnnnnnnnnnnnnnnnnnnnnnnnnnnnnnnnnnnnnnnnnnnnnnnnnnnnnnnnnnnnnnnnnnnnnnnnnnnnnnnnnnnnnnnnnnnnnnnnnnnnnnnnnnnnnnnnnnnnnnnnnnnnnnnnnnnnnnnnnnnnnnnnnnnnnnnnnnnnnnnnnnnnnnnnnnnnnnnnnnnnnnnnnnnnnnnnnnnnnnnnnnnnnnnnnnnnnnnnnnnnnnnnnnnnnnnnnnnnnnnnnnnnnnnnnnnnnnnnnnnnnnnnnnnnnnnnnnnnnnnnnnnnnnnnnnnnnnnnnnnnnnnnnnnnnnnnnnnnnnnnnnnnnnnnnnnnnnnnnnnnnnnnnnnnnnnnnnnnnnnnnnnnnnnnnnnnnnnnnnnnnnnnnnnnnnnnnnnnnnnnnnnnnnnnnnnnnnnnnnnnnnnnnnnnnnnnnnnnnnnnnnnnnnnnnnnnnnnnnnnnnnnnnnnnnnnnnnnnnnnnnnnnnnnnnnnnnnnnnnnnnnnnnnnnnnnnnnnnnnnnnnnnnnnnnnnnnnnnnnnnnnnnnnnnnnnnnnnnnnnnnnnnnnnnnnnnnnnnnnnnnnnnccagggtgattccggaggcccgctggtgtgtgaggaccaagccgcagagcgccggctcaccctgcaaggcatcatcagctggggatcgggctgtggtgaccgcaacaagccaggcgtctacaccgatgtggcctactacctggcctggatccgggagcacaccgcttcctgattgctcagggactcatctttccctcctcggtgattccgcagtgggagactggctggggcatggaaggcaaaattgtgtcccattcccccaatgcggccagctccgcgccaggatggcgcaggaactcaataaagtgctttgaaaatgctga

SEQ ID NO: 19607 - DNA, 808 bp, Macaca Mulatta
  misc_feature (1)...(808): n = A,T,C or G
nnnnnnnnnnnnnnnnnnnnnnnnnnnnnnnnnnnnnnnnnngctttctccctctggtttcccctctggtcggtctgtccccgctatgggcctggagctgtacctggacctgctgtcccagccctgccgcgctgtttacatcttcgccaagaagaacggcatccccttcgagctgcgcatcgtggatctgattaaaggtcagcacttaagcgatgcttttgcccaggtgaaccctctgaagaaggtgccagccttgaaggacggggacttcaccttgacggagaggtgatgttccctgttttcctgggcgagccagtatctccccagacactggcagccaccctggcagagctggatgtgaacctgcagttgctcgaggacaagttcgtgcaaaacaaggccttccgtactgggcctcacatctccttagctgagctgggagccatcacggagctgatgcatccctgttgggggcgggcgggcccaagtgttgcaaaggcggagccaagctggggccattggcggcgagcgcgcggaagggggcaacagggggagagaagcacgtccaaggaaagcgcagagaaggacgcggcgcgaagagcccgaggaagctatgcaaaaggggcacaacgccgcgcgaagtgaagaggaacaagcgcaaccgcgccacagcgagagaaggggcgcaggaaaaaacagcgcagagaccgtaggagaaagaagacaaagacggcggcagacaggtgtggatgaaacncaaaggagaggaagcgagaaagcgggactacaaagaggtgtgaaccgggag

SEQ ID NO: 19608 - DNA, 1213 bp, Macaca Mulatta
  misc_feature (1)...(1213): n = A,T,C or G
ggggtcgtggaatgagaagccgtggcagaggtttccagtttgtttcctcatctcttccagacatctgttatcgctgtggtgagtctggtcatcttgccaaggattgtgatcttcaggaggatgcctgctataactgcggtagaggtggccacattgccaaggactgcaaggagcccaagagagagcgagagcaatgctgctacaactgtggcaaaccaggccatctggctcgtgactgcgaccatgcagatgagcagaagtgctattcttgtggagaattcggacacattcaaaaagactgcaccaaagtgaagtgctataggtgtggtgaaactggtcatgtagccatcaactgcagcaagacaagtgaagtcaactgttaccgctgtggcgagtcagggcaccttgcacgggaatgcacaattgaggctacagcctaattattttcctttgtcgcccctccttttttctgattgatggttgtattattttctctgaatcctcttcactggccaaaggttggcagatagaggcaactcccaggccagtgagctttacttgccgtgtaaaaggaggaaaggggtggaaaaaaccgactttctgcatttaactacaaaaaaaagtttatgtttagtttgggtagaggtgtttatgtataatggctttgttaaagaaacccccttttccgtgcccactggtgaatagggattgatgaatgggaagagttgagtcagaccagtaagcccgtcctgggtttgttgaacatgttcccatgtaggaggtaaaaccaattctggaagtgtctatgaacttccataaataactttaattttagtataatgatggccttggattgtctgacctcagtagctattaaataacatcaagtaaacatctggtatcaggcccctacataaaaaaatacagttcaaggggggggtttaacccacaagtgtaaaaccaccccgcgtttaatagagcgcgnnnnnnnnnnnnnnnnnnncacagaataaaacctcgcttctttaacaatttaactacagcccagtttcgaattgttttttgttttataaagaggaagatctatgctttattctccattaaatttctattatagatgctaattcattactcgctctgaaccgctcataattccatacaaatactttcataaagcataaacacattatatcaattcttcaaatcattattt

SEQ ID NO: 19609 - DNA, 178 bp, Macaca Mulatta
  misc_feature (1)...(178): n = A,T,C or G
ttgaagccgacttcaattgtgggtggcagaaatctttgaggggaggcaaagaattgagaaaggaggctgggggccactatccccaggcattggggacaaggttcggtccctaacattcactccactccccacaggccatgtgtaccaaggagcccgaaccgatcagaaccatcanggg

SEQ ID NO: 19610 - DNA, 688 bp, Macaca Mulatta
tcagtcacttcttcacgaacgatcctggatgcaaatgaagaatttaagtccatgtcagggaccatccagctgggccggaagcttatcacaaaatacaatcgccgggagctgacggacaagcttctcatcttccttgcgctggctctgtttcttgctacggtcctctatatcgtgaaaaagcggctctttccgtttttgtgagatcccaaaggtgccagttctggccctttcagctcctgtttcaggatcctggttcctgagctctaggctgccaagctgagccacacacccctccatttgtgccacttgcctgcaggttggatggaacatagtgccccacttttccgcaagtggctggcttgtaaagggtgaacagaaccatgggagggaggcctatcattgggatgccgccctggggacataggaactgcctccttccctcatcgtgcactatgggaggctgcggccactctgtggggcacttaaagtccagcctccaggacccgatgcctcacctgtctccctctcccaccgtgcccttaaatgccagatctggtggagtgaagagagaagaggtaggaagaaaggtgatgaaaactcctggtcattccttgaataaacttgattttatttaatagaataaaatgtattggattttgtaaggtagccctctgagaatgtgtgttcc

SEQ ID NO: 19611 - DNA, 129 bp, Macaca Mulatta
agcctgccacattctggagtgtcccgaagggcttgcccaggatgtcatcagcaccattggccaggcctttgagttgcgcttcaaacaatacctcaggaacccacccaaactggtcacccctcatgacag

SEQ ID NO: 19612 - DNA, 1542 bp, Macaca Mulatta
  misc_feature (1)...(1542): n = A,T,C or G
gcgggtgtgtgaagggagtcagtgtggaggccacagggtacnnnnnnnnnnnnnnnnnnnnnnnnnnnnnnnnnnnnnnnnnnnnnnnagatggctcggactcaaaagaacaaggccacagcacaccacctggggctgcttaaggctcgtcttgctaagcttcgtcgagaactcattactccaaaaggtggtggtggtgggggtccaggagaaggttnnnnnnnnnnnnnnnnnnnnnnnnnnnnnnnnnnnnnnnnnnnnnnnnnnnnnnnnnnnnnnnnnnnnnnnnnnnnnnnnnnnnnnnnnnnnnnnnnnnnnnnnnnnnnnnnnnnnnnnnnnnnnnnnnnnnnnnnnnnnnnnnnnnnnnnnnnnnnnnnnnnnnnnnnnnnnnnnnnnnnnnnnnnnnnnnnnnnnnnnnnnnnnnnnnnnnnnnnnnnnnnnnnnnnnnnnnnnnnnnnnnnnnnnnnnnnnnnnnnnnnnnnnnnnnnnnnnnnnnnnnnnnnnnnnnnnnnnnnnnnnnnnnnnnnnnnnnnnnnnnnnnnnnnnnnnnnnnnnnnnnnnnnnnnnnnnnnnnnnnnnnnnnnnnnnnnnnnnnnnnnnnnnnnnnnnnnnnnnnnnnnnnnnnnnnnnnnnnnnnnnnnnnnnnnnnnnnnnnnnnnnnnnnnnnnnnnnnnnnnnnnnnnnnnnnnnnnnnnnnnnnnnnnnnnnnnnnnnnnnnnnnnnnnnnnnnnnnnnnnnnnnnnnnnnnnnnnnnnnnnnnnnnnnnnnnnnnnnnnnnnnnnnnnnnnnnnnnnnnnnnnnnnnnnnnnnnnnnnnnnnnnnnnnnnnnnnnnnnnnnnnnnnnnnnnnnnnnnnnnnnnnnnnnnnnnnnnnnnnnnnnnnnnnnnnnnnnnnnnnnnnnnnnnnnnnnnnnnnnnnnnnnnnnnnnnnnnnnnnnnnnnnnnnnnnnnnnnnnnnnnnnnnnnnnnnnnnnnnnnnnnnnnnnnnnnnnnnnnnnnnnnnnnnnnnnnnnnnnnnnnnnnnnnnnnnnnnnnnnnnnnnnnnnnnnnnnnnnnnnnnnnnnnnnnnnnnnnnnnnnnnnnnnnnnnnnnnnnnnnnnnnnnnnnnnnnnnnnnnnnnnnnnnnnnnnnnnnnnnnnnnnnnnnnnnnnnnnnnnnnnnnnnnnnccatctgccgggcgatccacaacagccttccccatgatcaagcaccctaccccagttctttctggttttggcagtcactgaatcaagatccaggggagggagatggaggcacccaaactggaacttcatttgtcttaccttggtgtcaccttgtatgtcgaactgcataaaagacctggtaggctggtcagctacatacagctcatgtgtcattgtcagaatttgttttgggatgggctgaatgaggaagggtatatacggtgaagtagctacagaagggatccttggaaacttgatcttgagtgtgaaatggataaaaatatgacatgcagcatcttctttgatgtttacttatgggaaccccttccaaactaga

SEQ ID NO: 19613 - DNA, 771 bp, Macaca Mulatta
  misc_feature (1)...(771): n = A,T,C or G
ggaaatcatagatggagttattttaaacattatgctagaatatagattttttttaaaatgctaataagcacagttaattctaaaatgagaggattgttacaggagggagatgttacagttactccacaatcaacatgttgatggtagggaaaaaactgtgtaaaaactattgcattatgtatgataagaaagtaagtattccaaagggataatcttgcatattaagaaagctccaaataatctttaaattgccttgaaaaataaacctctgtgaccgctgagtggcagagtgcttacccttggttttcttgattttatatagttatttctaaggggagaaaaaggggtcagagtaatacattttcttaaaaacctctcttaagttgcacaaaattgaacaatcatcaataacttatttactggctactgttgaataaattagggtgccttcatctgggttttctttagtacctaagtctacaaacctttctctttttctattgtgttttgaactccacattgcaatactctgttgtcatggaatacaacctttagatgtttgctgctgaagtaggtcagaaattttattacttgatttgccccanacatccactgtaatgttacatgcacctttttttgaagcatgaactctgaaattacggtttttataaaatctgactagaccaaccctaggattcttggttttcacaaatagaattttatttttgtcctcctcaactctcccattttttaacagtggccttttttgaa

SEQ ID NO: 19614 - DNA, 718 bp, Macaca Mulatta
  misc_feature (1)...(718): n = A,T,C or G
cagacaggaaagggaaggccccacagacaaggtatctttggccagaggcnnnnnnnnnnnnnnnnnnnnnatgaggcgaggtctcctatgctgcccaggctgaccttgaactcctgggctcaagcagtcttnnnnnnnnnnnnnnnnntnnnnnnnnnnnnnnnnnnncnnnnnnnnnnnnnnnnntcagagggttgctcttctagactgaccctgatcagtctaagatgggtggggatgtcctgccacatggggcagtcacctgcccagatcccagagggacctcctgagtgatgactcaagtgtctcagtccacctgagctgccatccagggaccctgtctgtgggcgtgctgtgggcaggtgggagcttgattctcagcacttgggggatctgtcgtgtacgtggagagggatggggtgctgggagggatacaggggggctgcctggtccccagtggtgggtacagagaggtcaagcccaggaggactgccccgtgcagactggaagggatgctggtagagatggtggaggaggcaattgggatggcgctaggcatccaagtaggggttgtgggtgaccagttgcacttggcctctgggttgtgggaattaaggaagtgacttatcctcttgaagatgctgaaaaaggagagaaaggggatgtatccatgggggcagggcatgactttgttccagttctaaaggcctcttccttg

SEQ ID NO: 19615 - DNA, 255 bp, Macaca Mulatta
cagtcagctttgggttcttttttattagtgctttgccagaggctgatgtcaagcaccaaaccccaaccccagcatcttgagtccgaccctgacatccaaactaaaaggaagtcatccagtctattcacagaagtgttaacttttctaacagaaagcatgtattttgattgcttaccaacatacgtgttcctagtttttatacatgtgtaaacaattttatatactcatttctattaaatgaacaagtttttgtaa

SEQ ID NO: 19616 - DNA, 390 bp, Macaca Mulatta
tgtgctggagcaggtggagagaggctacaggatgccctgcccgcaggactgccccatctctctgcacgagctcatgatccactgctggaaaaaggaccctgaagaacgccctacttttgagtacttgcagagcttcctggaagactactttaccgccacagagccccagtaccaacctggtgaaaacctgtaaggcccgggtctgcggagagaggccttgtcccagaggctgccccacccctccccattagctttcaattccgtagccggctgctccccagcagcagaaccgcccaggatcagattgcatgtgactctgaagctgacgaacttccatggccctcattaatgacacttgtccccaaatccgaacctcctctgtgaaccatc

SEQ ID NO: 19617 - DNA, 782 bp, Macaca Mulatta
  misc_feature (1)...(782): n = A,T,C or G
gggctttttgaggaagacgcggtcgtaggacttgcggatctttggttcgcacgctcctgctcctgactcaccgctgttcgctctcgccgaggaacaagtcggtcaggaagccgcgcagcaggcatggcttttaaggatactggaaaaacacccgtggagccggaggtggcaattcaccgaattcgaatcaccctaacgagccgcaacgttaaatccctggaaaaggtgtgtgctgacttgatcagaggcgcgaaggaaaagaacctgaaagtgaaaggaccagttcgaatgcctaccaagactttgagaatcactacaagaaaaactccttgtggtgaaggttctaagacatgggatcgtttccagatgagaatccacaagcgactcattgacttgcacagtccttctgagattgttaagcagattacttccatcagtattgagccaggagttgaggtggaagtcaccattgcagatgcttaagtcaaactattttaataaattgattaccagttgttcnncaccacaaacacactaacaaataactttttccttacccactttacttgttaaagcaaaaacaactctagcccctaaagtgttattatagataataggggaaatggttgggccggttgggccctctaaaaagttttttctnnnnnnnnnnnnnnnnnnnnnnnnnnnnnngtgggggagagggaaacgggggcatttccgtgtttctcccaagaaaaattccggggttcagaaacagggcggttgggaattcccccccccaa

SEQ ID NO: 19618 - DNA, 767 bp, Macaca Mulatta
ctgtatcttgccggtcatctttacattattacagggcattcaagtggactgctgcttagcttgcaccttgtcatgtggagtgatctttcccaagagaaggggaagcagtcatgtgcaacagacaagtgactgtatctatgtagactatttgcttatttaataaagatgatttgtcagttattttatcttattgttgtatttgtttgtttcaagggcaagttgttctcacaatttgggcacattatgggctgagcatgatcagtcagtagactagagtctccacggcttggggttcacaatgggttccagaactgcagagaatctacaacttgccctcctcatgaaccctgcaaacgggatgcttatttctaccatctagacatttgatgtgtcctgacatacttaaggcaaaaaatcgagagggatcgtgacattgtagagcaggctctaggaaaaactgtgaagggaatcctgtactcatagcaaattgcctcatttgcacacctcattttacaggatgaggaaatcaaacttgtttttgatcttttccttttacttataaattccctcagtacaggtccctcctctgacctagcaagcaaacttcctcatatctaccctattcacacgttaaaatatacttttgtactcattttgtatctgcctgtgcctggaggtaaatgctcattggcaaatgaggattctaacattcgtttatcatccataactaatgtctctagcacaatgcctggtacatgataagagct

SEQ ID NO: 19619 - DNA, 809 bp, Macaca Mulatta
ggggagatgcgccacggcttcggtagcgacggcagctctgcgagggcctgacctgtgcaagcacctcccccaggagaccgttgcagtcggccagcccccttctccacggtaaccatgtgcgaccgaaaggccgtgatcaaaaatgcggacatgtcggaagagatgcaacaggactcggtggagtgcgctactcaggcgctggagaaatacaacatagagaaggacattgcggctcatatcaagaaggaatttgacaagaagtacaatcccacctggcattgcatcgtgggaaggaacttcggcagttacgtgacacatgaaaccaaacacttcatctacttctacctgggccaagtggccattcttctgttcaaatctggttaaaagcatggactgtgccacacacccagtgatccatccaaaaacaaggactgcagcctaaattccaaataccagagactgaaattttcagccttgctaagggaacacctcgatgtttgaacctttgttgtgttttggacagggcattctctgtactagtttgttgtggttataaaacaattagccgaatagcccacctttgaatttattttccattccatacttcttgcccctgtttgttttctccccagtccattccttttaaaaaataaatctgtttgcagatgcctataacccgtatatctacaataacataaactttggtcgtgccgccttgggccccttcgaaaaaagtttttctaaaaccatttcgtttgggcgcccccggggccccgttaggttaaagagaaaactgggtcctaagttgt

SEQ ID NO: 19620 - DNA, 679 bp, Macaca Mulatta
tctgttttatgattttcatagttaacattttgtgtgtaaatatcttactgtcaatgtatttaattttgattaattttttatgaagtatataaattgagatttgttaatataattacctgtagactgagtattgcatatcctgggttatctcaaacacttgtgtgacctcagataccacttgtgtatggaattattaccatcccctgtacagctgagtctattaaatatcagaatgcataattaacttaaatcacagtcagtaataccactttggaaatgtacatttagatattttgtttccaaatcccaatcactcccctctaccgcattctgccttttccttatttgctactaaatttatgatttcaaacatcactcagctggagtagaaatattagggtttcttctctttcttcaggcaagagctagtcttgagatttgaaatgtgctttatcaacagataacgtttcttggagacatcccacaaagggctctgtttttattataagactcattgaacacataccagaatatgcttgttcctgtgatgtggaggaaattttccgcaaggtaggactctagacgatgctattttcactctacttccctgaatgcttgactaattgcaattggaagcatagaaagcagatccagactttgttatcttccaataataccc

SEQ ID NO: 19621 - DNA, 428 bp, Macaca Mulatta
gtgtaacacagccagcctcaagggacttccctctgagttggaatgataatgaccgaatcccgggaagttatagacttagaccccccagctgagacttcccaggagcaggaagaccttctcatagtgaaggtggaagaagaagactgcacctggatgcaggagtacaaccctccaacgtttgagactttttaccagcgcttcaggcacttccagtaccatgaggcttcaggaccccgggaggctctcagccaactccgggtgctctgctgtgagtggctgaggcccgagctgcacacaaaggagcagatcctggagctgctggtgctggagcagttcctgaccatcctgcctgaagagttccagccctgggtgagagaacatcaccctgaaagtggagaagaggcagtggccgtgatagaaaatataca

SEQ ID NO: 19622 - DNA, 805 bp, Macaca Mulatta
ggtgccacagtgtccggatacgatataatgaaatctaaaagcaatcctgacttcttgaagaaagacagatcctgtgtcacccggcaactcagaaacatcaggtccaagtccgtaattgagcaggtctcgtgggatacctgaaatgcacccgcttcccggcccatgcaggagagtctgaaggaaggcctgacggtgcaagaacggttgaagctctttgaatccagggacttgaagaaagactagctgtgtcccatccaagttgagcacgcgccttccccagcttgcagcagcacaccccgagcgctgcttttcacctgtacctttgttttattattattattgctgttgttgtcatcgttaactgtgggcatggaatgtgtgaggctggcttctgggttgtccacaccactctgctgtgttgacttcctgttgtcttcatcaaagctcttttccgtggtattctaaaattaggccagcagtgggggctgggagggcatctgtgttagtcccttcttggctgtgacccgctgcactcactgtcagtattaaggcccagcagcctgttgataagctactctgtctcaccacccgctggtgtggaaacagggcccaaccagcacgccctcaaggtaaatgggaacccccactggtcagagaaaaaaccctgcggacactccagctttttggccctgggtcacagcaactgaactccctcacccgctaagtccgggctgtttaaaaggaaaaaagggccgcttcccttcccaccctggggtagggaaaaaagctctttttttaatccggt

SEQ ID NO: 19623 - DNA, 1364 bp, Macaca Mulatta
  misc_feature (1)...(1364): n = A,T,C or G
ntaacggcacagccaacaagatgaacggagctttggatcactcagaccaaccagacccagatgccattaagatgtttgtcggacagatcccccggtcgtggtcggaaaaggagctgaaagaactttttgagccttacggagccgtctaccagatcaacgtcaaccgggatcggagtcagaaccctccacagagnnnnnnnnnnnnnnnnnnnnnnnnnnnnnnnnnnnnnnnnnnnnnnnnnnnnnnnnnnnnnnnnnnnnnnnnnnnnnnnnnnnnnnnnnnnnnnnnnnnnnnnnnnnnnnnnnnnnnnnnnnnnnnnnnnnnnnnnnnnnnnnnnnnnnnnnnnnnnnnnnnnnnnnnnnnnnnnnnnnnnnnnnnnnnnnnnnnnnnnnnnnnnnnnnnnnnnnnnnnnnnnnnnnnnnnnnnnnnnnnnnnnnnnnnnnnnnnnnnnnnnnnnnnnnnnnnnnnnnnnnnnnnnnnnnnnnnnnnnnnnnnnnnnnnnnnnnnnnnnnnnnnnnnnnnnnnnnnnnnnnnnnnnnnnnnnnnnnnnnnnnnnnnnnnnnnnnnnnnnnnnnnnnnnnnnnnnnnnnnnnnnnnnnnnnnnnnnnnnnnnnnnnnnnnnnnnnnnnnnnnnnnnnnnnnnnnnnnnnnnnnnnnnnnnnnnnnnnnnnnnnnnnnnnnnnnnnnnnnnnnnnnnnnnnnnnnnnnnnnnnnnnnnnnnnnnnnnnnnnnnnnnnnnnnnnnnnnnnnnnnnnnnnnnnnnnnnnnnnnnnnnnnnnnnnnnnnnnnnnnnnnnnnnnnnnnnnnnnnnnnnnnnnnnnnnnnnnnnnnnnnnnnnnnnnnnnnnnnnnnnnnnnnnnnnnnnnnnnnnnnnnnnnnnnnnnnnnnnnnnnnnnnnnnnnnnnnnnnnnnnnnnnnnnnnnnnnnnnnnnnnnnnnnnnnnnnnnnnnnnnnnnnnnnnnnnnnnnnnnnnnnnnnnnnnnnnnnnnnnnnnnnnnnnnnnnnnnnnnnnnnnnnnnagttgctcaaatgctctcaggtatggcggctctgaatggaggacttggcgccacaggcttgacgaatggcacggctggcaccatggacgccctcacccaggcctactcaggaattcagcagtatgcagccgccgcgctgcccactctgtacagccagagcctgctgcagcagcagagcgctgcgggcagccagaaggaaggnnnnnnnnnnnnncctctttatttaccaccttccacatgcatttggagaccaggacattctgcagatgttcatgccttttggaaatgttatctctgctaaagtcttcattgacaaacagaccaatctgagcaagtgctttggt

SEQ ID NO: 19624 - DNA, 5318 bp, Macaca Mulatta
  misc_feature (1)...(5318): n = A,T,C or G
cactgtcactgctaaattcagagcagatagagcctgcgcaatggaataaagtcctcaaaattgaaatgtgacattgctctcaacatctcccatctctctggatttctttttgcttcattattcctgctaaccaattcattttcagactttgtacttcagaagcaatggganaaatcagcagtcttccaacccaattatttaagtgctgcttttgtgatttcttgaaggtnaggtgaagatgcacaccatgtcctcctcgcatctcttctacctggcactgtgcctgctcaccttcaccagctccgccacggctggaccggagacgctctgcggggctgagctggtggatgctcttcagttcgtgtgtggagacaggggcttttatttcannnnnnnnnnnnnnnnnnnnnnnnnnnnnnnnnnnnnnnnnnnnnnnnnnnnnnnnnnnnnnnnnnnnnnnnnnnnnnnnnnnnnnnnnnnnnnnnnnnnnnnnnnnnnnnnnnnnnnnnnnnnnnnnnnnnnnnnnnnnnnnnnnnnnnnnnnnnnnnnnnnnnnnnnnnnnnnnnnnnnnnnnnnnnnnnnnnnnnnnnnnnnnnnnnnnnnnnnnnnnnnnnnnnnnnnnnnnnnnnnnnnnnnnnnnnnnnnnnnnnnnnnnnnnnnnnnnnnnnnnnnnnnnnnnnnnnnnnnnnnnnnnnnnnnnnnnnnnnnnnnnnnnnnnnnnnnnnnnnnnnnnnnnnnnnnnnnnnnnnnnnnnnnnnnnnnnnnnnnnnnnnnnnnnnnnnnnnnnnnnnnnnnnnnnnnnnnnnnnnnnnnnnnnnnnnnnnnnnnnnnnnnnnnnnnnnnnnnnnnnnnnnnnnnnnnnnnnnnnnnnnnnnnnnnnnnnnnnnnnnnnnnnnnnnnnnnnnnnnnnnnnnnnnnnnnnnnnnnnnnnnnnnnnnnnnnnnnnnnnnnnnnnnnnnnnnnnnnnnnnnnnnnnnnnnnnnnnnnnnnnnnnnnnnnnnnnnnnnnnnnnnnnnnnnnnnnnnnnnnnnnnnnnnnnnnnnnnnnnnnnnnnnnnnnnnnnnnnnnnnnnnnnnnnnnnnnnnnnnnnnnnnnnnnnnnnnnnnnnnnnnnnnnnnnnnnnnnnnnnnnnnnnnnnnnnnnnnnnnnnnnnnnnnnnnnnnnnnnnnnnnnnnnnnnnnnnnnnnnnnnnnnnnnnnnnnnnnnnnnnnnnnnnnnnnnnnnnnnnnnnnnnnnnnnnnnnnnnnnnnnnnnnnnnnnnnnnnnnnnnnnnnnnnnnnnnnnnnnnnnnnnnnnnnnnnnnnnnnnnnnnnnnnnnnnnnnnnnnnnnnnnnnnnnnnnnnnnnnnnnnnnnnnnnnnnnnnnnnnnnnnnnnnnnnnnnnnnnnnnnnnnnnnnnnnnnnnnnnnnnnnnnnnnnnnnnnnnnnnnnnnnnnnnnnnnnnnnnnnnnnnnnnnnnnnnnnnnnnnnnnnnnnnnnnnnnnnnnnnnnnnnnnnnnnnnnnnnnnnnnnnnnnnnnnnnnnnnnnnnnnnnnnnnnnnnnnnnnnnnnnnnnnnnnnnnnnnnnnnnnnnnnnnnnnnnnnnnnnnnnnnnnnnnnnnnnnnnnnnnnnnnnnnnnnnnnnnnnnnnnnnnnnnnnnnnnnnnnnnnnnnnnnnnnnnnnnnnnnnnnnnnnnnnnnnnnnnnnnnnnnnnnnnnnnnnnnnnnnnnnnnnnnnnnnnnnnnnnnnnnnnnnnnnnnnnnnnnnnnnnnnnnnnnnnnnnnnnnnnnnnnnnnnnnnnnnnnnnnnnnnnnnnnnnnnnnnnnnnnnnnnnnnnnnnnnnnnnnnnnnnnnnnnnnnnnnnnnnnnnnnnnnnnnnnnnnnnnnnnnnnnnnnnnnnnnnnnnnnnnnnnnnnnnnnnnnnnnnnnnnnnnnnnnnnnnnnnnnnnnnnnnnnnnnnnnnnnnnnnnnnnnnnnnnnnnnnnnnnnnnnnnnnnnnnnnnnnnnnnnnnnnnnnnnnnnnnnnnnnnnnnnnnnnnnnnnnnnnnnnnnnnnnnnnnnnnnnnnnnnnnnnnnnnnnnnnnnnnnnnnnnnnnnnnnnnnnnnnnnnnnnnnnnnnnnnnnnnnnnnnnnnnnnnnnnnnnnnnnnnnnnnnnnnnnnnnnnnnnnnnnnnnnnnnnnnnnnnnnnnnnnnnnnnnnnnnnnnnnnnnnnnnnnnnnnnnnnnnnnnnnnnnnnnnnnnnnnnnnnnnnnnnnnnnnnnnnnnnnnnnnnnnnnnnnnnnnnnnnnnnnnnnnnnnnnnnnnnnnnnnnnnnnnnnnnnnnnnnnnnnnnnnnnnnnnnnnnnnnnnnnnnnnnnnnnnnnnnnnnnnnnnnnnnnnnnnnnnnnnnnnnnnnnnnnnnnnnnnnnnnnnnnnnnnnnnnnnnnnnnnnnnnnnnnnnnnnnnnnnnnnnnnnnnnnnnnnnnnnnnnnnnnnnnnnnnnnnnnnnnnnnnnnnnnnnnnnnnnnnnnnnnnnnnnnnnnnnnnnnnnnnnnnnnnnnnnnnnnnnnnnnnnnnnnnnnnnnnnnnnnnnnnnnnnnnnnnnnnnnnnnnnnnnnnnnnnnnnnnnnnnnnnnnnnnnnnnnnnnnnnnnnnnnnnnnnnnnnnnnnnnnnnnnnnnnnnnnnnnnnnnnnnnnnnnnnnnnnnnnnnnnnnnnnnnnnnnnnnnnnnnnnnnnnnnnnnnnnnnnnnnnnnnnnnnnnnnnnnnnnnnnnnnnnnnnnnnnnnnnnnnnnnnnnnnnnnnnnnnnnnnnnnnnnnnnnnnnnnnnnnnnnnnnnnnnnnnnnnnnnnnnnnnnnnnnnnnnnnnnnnnnnnnnnnnnnnnnnnnnnnnnnnnnnnnnnnnnnnnnnnnnnnnnnnnnnnnnnnnnnnnnnnnnnnnnnnnnnnnnnnnnnnnnnnnnnnnnnnnnnnnnnnnnnnnnnnnnnnnnnnnnnnnnnnnnnnnnnnnnnnnnnnnnnnnnnnnnnnnnnnnnnnnnnnnnnnnnnnnnnnnnnnnnnnnnnnnnnnnnnnnnnnnnnnnnnnnnnnnnnnnnnnnnnnnnnnnnnnnnnnnnnnnnnnnnnnnnnnnnnnnnnnnnnnnnnnnnnnnnnnnnnnnnnnnnnnnnnnnnnnnnnnnnnnnnnnnnnnnnnnnnnnnnnnnnnnnnnnnnnnnnnnnnnnnnnnnnnnnnnnnnnnnnnnnnnnnnnnnnnnnnnnnnnnnnnnnnnnnnnnnnnnnnnnnnnnnnnnnnnnnnnnnnnnnnnnnnnnnnnnnnnnnnnnnnnnnnnnnnnnnnnnnnnnnnnnnnnnnnnnnnnnnnnnnnnnnnnnnnnnnnnnnnnnnnnnnnnnnnnnnnnnnnnnnnnnnnnnnnnnnnnnnnnnnnnnnnnnnnnnnnnnnnnnnnnnnnnnnnnnnnnnnnnnnnnnnnnnnnnnnnnnnnnnnnnnnnnnnnnnnnnnnnnnnnnnnnnnnnnnnnnnnnnnnnnnnnnnnnnnnnnnnnnnnnnnnnnnnnnnnnnnnnnnnnnnnnnnnnnnnnnnnnnnnnnnnnnnnnnnnnnnnnnnnnnnnnnnnnnnnnnnnnnnnnnnnnnnnnnnnnnnnnnnnnnnnnnnnnnnnnnnnnnnnnnnnnnnnnnnnnnnnnnnnnnnnnnnnnnnnnnnnnnnnnnnnnnnnnnnnnnnnnnnnnnnnnnnnnnnnnnnnnnnnnnnnnnnnnnnnnnnnnnnnnnnnnnnnnnnnnnnnnnnnnnnnnnnnnnnnnnnnnnnnnnnnnnnnnnnnnnnnnnnnnnnnnnnnnnnnnnnnnnnnnnnnnnnnnnnnnnnnnnnnnnnnnnnnnnnnnnnnnnnnnnnnnnnnnnnnnnnnnnnnnnnnnnnnnnnnnnnnnnnnnnnnnnnnnnnnnnnnnnnnnnnnnnnnnnnnnnnnnnnnnnnnnnnnnnnnnnnnnnnnnnnnnnnnnnnnnnnnnnnnnnnnnnnnnnnnnnnnnnnnnnnnnnnnnnnnnnnnnnnnnnnnnnnnnnnnnnnnnnnnnnnnnnnnnnnnnnnnnnnnnnnnnnnnnnnnnnnnnnnnnnnnnnnnnnnnnnnnnnnnnnnnnnnnnnnnnnnnnnnnnnnnnnnnnnnnnnnnnnnnnnnnnnnnnnnnnnnnnnnnnnnnnnnnnnnnnnnnnnnnnnnnnnnnnnnnnnnnnnnnnnnnnnnnnnnnnnnnnnnnnnnnnnnnnnnnnnnnnnnnnnnnnnnnnnnnnnnnnnnnnnnnnnnnnnnnnnnnnnnnnnnnnnnnnnnnnnnnnnnnnnnnnnnnnnnnnnnnnnnnnnnnnnnnnnnnnnnnnnnnnnnnnnnnnnnnnnnnnnnnnnnnnnnnnnnnnnnnnnnnnnnnnnnnnnnnnnnnnnnnnnnnnnnnnnnnnnnnnnnnnnnnnnnnnnnnnnnnnnnnnnnnnnnnnnnnnnnnnnnnnnnnnnnnnnnnnnnnnnnnnnnnnnnnnnnnnnnnnnnnnnnnnnnnnnnnnnnnnnnnnnnnnnnnnnnnnnnnnnnnnnnnnnnnnnnnnnnnnnnnnnnnnnnnnnnnnnnnnnnnnnnnnnnnnnnnnnnnnnnnnnnnnnnnnnnnnnnnnnnnnnnnnnnnnnnnnnnnnnnnnnnnnnnnnnnnnnnnnnnnnnnnnnnnnnnnnnnnnnnnnnnnnnnnnnnnnnnnnnnnnnnnnnnnnnnnnnnnnnnnnnnnnnnnnnnnnnnnnnnnnnnnnnnnnnnnnnnnnnnnnnnnnnnnnnnnnnnnnnnnnnnnnnnnnnnnnnnnnnnnnnnnnnnnnnnnnnnnnnnnnnnnnnnnnnnnngtattttttggcatttactggtttatagaagatattctcccttcacccagacatctcaaagagcagtagctctcatgaaaagcagtcactgatctcatttgggaaatgttggaaagtatttccttatgagatgggggttatctactgataaagaaagaatttatgagaaatcgttgaaagagatggctaacaatctgtgaagnnnnnnnnnnnnnnnnnnnnnnnnnnnnnnnnnnnnnnnnnatacagtctttatgaatttcttaatactcaaaatgacttgnnnnnnnnnnnnnnnnnnnnnnnngaatgaggaataataagttaaacccacatagactctttaaaactataggctagatagaaatgtatgtttgacttgttgaagctgtaatcagactatttaaaatgttttactatttttaatcttaaaagattgtgctaatttattagagcagaacctgtttgactctcctcataagaaagaatctttccattcagatcac

SEQ ID NO: 19625 - DNA, 1187 bp, Macaca Mulatta
  misc_feature (1)...(1187): n = A,T,C or G
ggggccaaacgttcttcgccgagagttttcggggtttcctgcttcaacagtgcttggacggaacccggcgctcgtcccccatcccggccggccgcccatagccagccttccgtctcctcttcaccgcgtcctcggactgccccaagggccccgccgccgctccagcgccgcgcagccaccgccgccgccgcctgtccttagcctccgccatgacgaccgcgtccacctcgcaggtgcgccaaaactaccaccaggactcagaggccgccatcaaccgccagatcgatctggagctctactcttcctaaagtaacccgtccatgtcttaatttcattcaccgcccatgaatgtggctatagaaaaaactttgacaaacaatcttcctaaaccaaatctgcatgagagaaaagggaaacaagcccacaaaacaactgaatgtaacgcttgacaaaaacccaacagaaagattgggacccaaaacccttatcataataacaaggaaattatttataacaataaacccacagaaacataaattgacatacgaaacctgggtcagaaaagaatagccaaagtggggcgacgcaagaagtattggctcaaaaagttgtagaacaactctttatggngagggccccttctctcttaatatcaaatatcgaatggaacgagtgagaacaacaataaaaaatacaattagtacgtgttcgtggcaaaaatatctccataagtagtttcggggaaaattttttactgttttggatagaaaaaaatactttttgtcctctcaggattatgaaccttctgggggggcggtaattcgcaaccgtntggtgtaacatgcaggcaaggcgaagggggaaatccctgatcccccataaacacggaataaaatgctgcggtgaaaaaaccttatggctctcgttatgttcggagaagtacgacgcacataatgacaaaccccctcagtccaagcagatcataagcccccccgagggtgagtgagaacgcgtgcacatcttgtcctgccgnaatgtaaacaacattagatgtacgaattgaacattcatctctctgactgtttttgcccactacatcatcttgaccccttctctcgaaaaaatgtagagagaatagctaaccaacacacaaaatcgatcacaaaggccctagtgagtgttactca

SEQ ID NO: 19626 - DNA, 97 bp, Macaca Mulatta
ccacttcctaacacatgctgccatttctggcttatggtttggcagcagaagaccaaagccgttgtcatgctgaaccgcattgtggagaaagagtcgg

SEQ ID NO: 19627 - DNA, 543 bp, Macaca Mulatta
atcattggctgacacttttgaacacgtgatagaagagctgttggatgaggaccagaaagttcggcccaatgaagaaaacaataaggacgcagacttgtacacgtccagggtgatgctcagtagtcaagtgcctttggagcctcctcttctctttctgctggaggaatacaaaaattacctggatgctgcaaacatgtccatgagggtccggcgccactctgaccctgcccgccgaggggagctgagcgtgtgtgacagtattagcgagtgggtaacggcggcagacaaaaagactgcagtggacatgtcgggcgggacggtcacagtccttgaaaaggtccctgtatcgaaaggccaactgaagcaatacttctacgagaccaagtgcaatcccatgggttacacaaaagaaggctgcaggggcatagacaaaaggcattggaactcccagtgccgaactacccagtcgtatgtgcgaagcccttacccatggatagcaaaaagagaattggctgccgaaacagaaggatagacacttcttgt

SEQ ID NO: 19628 - DNA, 177 bp, Macaca Mulatta
  misc_feature (1)...(177): n = A,T,C or G
nnnnnnnnnnnnnnnnnnnnnnnnnnnnnnnnnnnnnnnnctttttctatttatttgtaactcacatcattctggaaagcatttgaagccttattccaaacagaattagaggtgaacacagacatagtcaagatttacgatacgcttatatgtttttaattttagctatagatcccc

SEQ ID NO: 19629 - DNA, 570 bp, Macaca Mulatta
attgcctcttacttaggctgcggtctcactgactgactgggagttccttcctccacccctgttcttcccctggtcttgtggttttccttgttgctcttttggaaaggctttgctgatgaatttggctcagtagtgagctggggcctcatctctcaccctggagagaacagggcagggatcctgagggaacaccacccacccctttaaggatgctttgctagttgcaagatgtggttggcatccacctatccagtcccttgtactctcccctcactactttccttggcagcctccaaatacttttgtctcccactttctggcctcttccaggcattgcagatgggtggggccaggagtgagggacagagctcaggtttagatcttttcatctcctcaaccaaattacctgctacatagctttcagctgctgagctcaccacataggacaccccagcaagaacagaatttcggacaaggcacttctttaatcagccgctgctatgatgggaagtgagagtgctgcagatcccaggtaaggagcaagtttcactgtataaaataaatcctcta

SEQ ID NO: 19630 - DNA, 261 bp, Macaca Mulatta
ttgtgcccacttaggcactattatcaacaaggtcctgctcagtgtctggcccccaaagagttcagaaatgcgtctgtcaatcagcagcaggattctgcagctccttttatgccaatcccatgcccaccaggcaggctctagataaaatcatcacagccttccctcatctgcagggagagaaggtgctgtcaggtgaatgtgagcagtctagcctggatgatgtatttctcattttgaataaaaagcactggctgtgtgatt

SEQ ID NO: 19631 - DNA, 668 bp, Macaca Mulatta
  misc_feature (1)...(668): n = A,T,C or G
cagatgatcccantcactcctctctaaggcagaagactagaggccagggcagcgagggactgctcatcatttccaccccagctaagactgccatgtaaggttgtgcagggtatgcactgcacaaagacattgtatgcagggagcactgttcacatcatagataaagctgatttgtgtatttattatgacaatttctggcatatgtaggtaaagaggaaaaggatccttttcctaattcacacaaagattcctcgtggactggccgtgcccctgatgcagcctgtggcttggagtggccaaataggagggagactgtggtaggggccgggaggcaacactgctgtccacatgacctccatttcccagagtcctctgctccagcaactgcccttccaggtgggtgtgggacacccgggagaaggtctccaagggagggtgcagccctcttgcccgcacccctccctgcttgcacacttccccatcttcgatccttccaaaacctgcttccttcagtttgtaaagtcggtgattatatttttgggggctttnnnnnnnnnnnnnnnnnnnaaaatttatttatattccgtatttacagttgtcaacaaaataaccacaaaacaaaacaaatgaatctgcaaaaacacacacaaacacccagggggggccgg

SEQ ID NO: 19632 - DNA, 4702 bp, Macaca Mulatta
  misc_feature (1)...(4702): n = A,T,C or G
atataaatctgaaactgaccactcaacccaagaagcagaaacacttgaagtattacctggtccgtaacgcacaagggactctcaccaaaggacctttaatctgttggaaaggctcannnnnnnnnnnnnnnnnnnnnnnnnnnnnnnnnnnnnnnnnnnnnnnnnnnnnnnnnnnnnnnnnnnnnnnnnnnnnnnnnnnnnnnnnnnnnnnnnnnnnnnnnnnnnnnnnnnnnnnnnnnnnnnnnnnnnnnnnnnnnnnnnnnnnnnnnnnnnnnnnnnnnnnnnnnnnnnnnnnnnnnnnnnnnnnnnnnnnnnnnnnnnnnnnnnnnnnnnnnnnnnnnnnnnnnnnnnnnnnnnnnnnnnnnnnnnnnnnnnnnnnnnnnnnnnnnnnnnnnnnnnnnnnnnnnnnnnnnnnnnnnnnnnnnnnnnnnnnnnnnnnnnnnnnnnnnnnnnnnnnnnnnnnnnnnnnnnnnnnnnnnnnnnnnnnnnnnnnnnnnnnnnnnnnnnnnnnnnnnnnnnnnnnnnnnnnnnnnnnnnnnnnnnnnnnnnnnnnnnnnnnnnnnnnnnnnnnnnnnnnnnnnnnnnnnnnnnnnnnnnnnnnnnnnnnnnnnnnnnnnnnnnnnnnnnnnnnnnnnnnnnnnnnnnnnnnnnnnnnnnnnnnnnnnnnnnnnnnnnnnnnnnnnnnnnnnnnnnnnnnnnnnnnnnnnnnnnnnnnnnnnnnnnnnnnnnnnnnnnnnnnnnnnnnnnnnnnnnnnnnnnnnnnnnnnnnnnnnnnnnnnnnnnnnnnnnnnnnnnnnnnnnnnnnnnnnnnnnnnnnnnnnnnnnnnnnnnnnnnnnnnnnnnnnnnnnnnnnnnnnnnnnnnnnnnnnnnnnnnnnnnnnnnnnnnnnnnnnnnnnnnnnnnnnnnnnnnnnnnnnnnnnnnnnnnnnnnnnnnnnnnnnnnnnnnnnnnnnnnnnnnnnnnnnnnnnnnnnnnnnnnnnnnnnnnnnnnnnnnnnnnnnnnnnnnnnnnnnnnnnnnnnnnnnnnnnnnnnnnnnnnnnnnnnnnnnnnnnnnnnnnnnnnnnnnnnnnnnnnnnnnnnnnnnnnnnnnnnnnnnnnnnnnnnnnnnnnnnnnnnnnnnnnnnnnnnnnnnnnnnnnnnnnnnnnnnnnnnnnnnnnnnnnnnnnnnnnnnnnnnnnnnnnnnnnnnnnnnnnnnnnnnnnnnnnnnnnnnnnnnnnnnnnnnnnnnnnnnnnnnnnnnnnnnnnnnnnnnnnnnnnnnnnnnnnnnnnnnnnnnnnnnnnnnnnnnnnnnnnnnnnnnnnnnnnnnnnnnnnnnnnnnnnnnnnnnnnnnnnnnnnnnnnnnnnnnnnnnnnnnnnnnnnnnnnnnnnnnnnnnnnnnnnnnnnnnnnnnnnnnnnnnnnnnnnnnnnnnnnnnnnnnnnnnnnnnnnnnnnnnnnnnnnnnnnnnnnnnnnnnnnnnnnnnnnnnnnnnnnnnnnnnnnnnnnnnnnnnnnnnnnnnnnnnnnnnnnnnnnnnnnnnnnnnnnnnnnnnnnnnnnnnnnnnnnnnnnnnnnnnnnnnnnnnnnnnnnnnnnnnnnnnnnnnnnnnnnnnnnnnnnnnnnnnnnnnnnnnnnnnnnnnnnnnnnnnnnnnnnnnnnnnnnnnnnnnnnnnnnnnnnnnnnnnnnnnnnnnnnnnnnnnnnnnnnnnnnnnnnnnnnnnnnnnnnnnnnnnnnnnnnnnnnnnnnnnnnnnnnnnnnnnnnnnnnnnnnnnnnnnnnnnnnnnnnnnnnnnnnnnnnnnnnnnnnnnnnnnnnnnnnnnnnnnnnnnnnnnnnnnnnnnnnnnnnnnnnnnnnnnnnnnnnnnnnnnnnnnnnnnnnnnnnnnnnnnnnnnnnnnnnnnnnnnnnnnnnnnnnnnnnnnnnnnnnnnnnnnnnnnnnnnnnnnnnnnnnnnnnnnnnnnnnnnnnnnnnnnnnnnnnnnnnnnnnnnnnnnnnnnnnnnnnnnnnnnnnnnnnnnnnnnnnnnnnnnnnnnnnnnnnnnnnnnnnnnnnnnnnnnnnnnnnnnnnnnnnnnnnnnnnnnnnnnnnnnnnnnnnnnnnnnnnnnnnnnnnnnnnnnnnnnnnnnnnnnnnnnnnnnnnnnnnnnnnnnnnnnnnnnnnnnnnnnnnnnnnnnnnnnnnnnnnnnnnnnnnnnnnnnnnnnnnnnnnnnnnnnnnnnnnnnnnnnnnnnnnnnnnnnnnnnnnnnnnnnnnnnnnnnnnnnnnnnnnnnnnnnnnnnnnnnnnnnnnnnnnnnnnnnnnnnnnnnnnnnnnnnnnnnnnnnnnnnnnnnnnnnnnnnnnnnnnnnnnnnnnnnnnnnnnnnnnnnnnnnnnnnnnnnnnnnnnnnnnnnnnnnnnnnnnnnnnnnnnnnnnnnnnnnnnnnnnnnnnnnnnnnnnnnnnnnnnnnnnnnnnnnnnnnnnnnnnnnnnnnnnnnnnnnnnnnnnnnnnnnnnnnnnnnnnnnnnnnnnnnnnnnnnnnnnnnnnnnnnnnnnnnnnnnnnnnnnnnnnnnnnnnnnnnnnnnnnnnnnnnnnnnnnnnnnnnnnnnnnnnnnnnnnnnnnnnnnnnnnnnnnnnnnnnnnnnnnnnnnnnnnnnnnnnnnnnnnnnnnnnnnnnnnnnnnnnnnnnnnnnnnnnnnnnnnnnnnnnnnnnnnnnnnnnnnnnnnnnnnnnnnnnnnnnnnnnnnnnnnnnnnnnnnnnnnnnnnnnnnnnnnnnnnnnnnnnnnnnnnnnnnnnnnnnnnnnnnnnnnnnnnnnnnnnnnnnnnnnnnnnnnnnnnnnnnnnnnnnnnnnnnnnnnnnnnnnnnnnnnnnnnnnnnnnnnnnnnnnnnnnnnnnnnnnnnnnnnnnnnnnnnnnnnnnnnnnnnnnnnnnnnnnnnnnnnnnnnnnnnnnnnnnnnnnnnnnnnnnnnnnnnnnnnnnnnnnnnnnnnnnnnnnnnnnnnnnnnnnnnnnnnnnnnnnnnnnnnnnnnnnnnnnnnnnnnnnnnnnnnnnnnnnnnnnnnnnnnnnnnnnnnnnnnnnnnnnnnnnnnnnnnnnnnnnnnnnnnnnnnnnnnnnnnnnnnnnnnnnnnnnnnnnnnnnnnnnnnnnnnnnnnnnnnnnnnnnnnnnnnnnnnnnnnnnnnnnnnnnnnnnnnnnnnnnnnnnnnnnnnnnnnnnnnnnnnnnnnnnnnnnnnnnnnnnnnnnnnnnnnnnnnnnnnnnnnnnnnnnnnnnnnnnnnnnnnnnnnnnnnnnnnnnnnnnnnnnnnnnnnnnnnnnnnnnnnnnnnnnnnnnnnnnnnnnnnnnnnnnnnnnnnnnnnnnnnnnnnnnnnnnnnnnnnnnnnnnnnnnnnnnnnnnnnnnnnnnnnnnnnnnnnnnnnnnnnnnnnnnnnnnnnnnnnnnnnnnnnnnnnnnnnnnnnnnnnnnnnnnnnnnnnnnnnnnnnnnnnnnnnnnnnnnnnnnnnnnnnnnnnnnnnnnnnnnnnnnnnnnnnnnnnnnnnnnnnnnnnnnnnnnnnnnnnnnnnnnnnnnnnnnnnnnnnnnnnnnnnnnnnnnnnnnnnnnnnnnnnnnnnnnnnnnnnnnnnnnnnnnnnnnnnnnnnnnnnnnnnnnnnnnnnnnnnnnnnnnnnnnnnnnnnnnnnnnnnnnnnnnnnnnnnnnnnnnnnnnnnnnnnnnnnnnnnnnnnnnnnnnnnnnnnnnnnnnnnnnnnnnnnnnnnnnnnnnnnnnnnnnnnnnnnnnnnnnnnnnnnnnnnnnnnnnnnnnnnnnnnnnnnnnnnnnnnnnnnnnnnnnnnnnnnnnnnnnnnnnnnnnnnnnnnnnnnnnnnnnnnnnnnnnnnnnnnnnnnnnnnnnnnnnnnnnnnnnnnnnnnnnnnnnnnnnnnnnnnnnnnnnnnnnnnnnnnnnnnnnnnnnnnnnnnnnnnnnnnnnnnnnnnnnnnnnnnnnnnnnnnnnnnnnnnnnnnnnnnnnnnnnnnnnnnnnnnnnnnnnnnnnnnnnnnnnnnnnnnnnnnnnnnnnnnnnnnnnnnnnnnnnnnnnnnnnnnnnnnnnnnnnnnnnnnnnnnnnnnnnnnnnnnnnnnnnnnnnnnnnnnnnnnnnnnnnnnnnnnnnnnnnnnnnnnnnnnnnnnnnnnnnnnnnnnnnnnnnnnnnnnnnnnnnnnnnnnnnnnnnnnnnnnnnnnnnnnnnnnnnnnnnnnnnnnnnnnnnnnnnnnnnnnnnnnnnnnnnnnnnnnnnnnnnnnnnnnnnnnnnnnnnnnnnnnnnnnnnnnnnnnnnnnnnnnnnnnnnnnnnnnnnnnnnnnnnnnnnnnnnnnnnnnnnnnnnnnnnnnnnnnnnnnnnnnnnnnnnnnnnnnnnnnnnnnnnnnnnnnnnnnnnnnnnnnnnnnnnnnnnnnnnnnnnnnnnnnnnnnnnnnnnnnnnnnnnnnnnnnnnnnnnnnnnnnnnnnnnnnnnnnnnnnnnnnnnnnnnnnnnnnnnnnnnnnnnnnnnagcagggagttctcctggtcggaaaggaacgtgtctttgaagcacatcatgcagcacattgaggctgcccccaacatcacacactacgccctgctgggcctgcggaagtggtccagcaagacccgggccagcgaggtgcgagagcccttctcccgctgccacgtgcacaacttcatcatcctgaacgtggacctgacccagaacgtgcagtacaaccagaaccgg

SEQ ID NO: 19633 - DNA, 298 bp, Macaca Mulatta
ggagccctgcgagtaggtagtgtcgggcccatgcaggacgcagagaacgtggcggtgcccgaggcggccgaagagcgtgccgagcccggccagcagcaaccggccgccgagccgccgccagacgaggggctgctgcggcccgcacggcccggcgctccggaggcggcagggacagaggcctctagtgaggaggtggcggtcgcggaggccgggccggagccggaggtgaggaccgagccggcggccgaggcagaggcggcctccggcccgtccgagtcgctctcgcctccggcagccg

SEQ ID NO: 19634 - DNA, 76 bp, Macaca Mulatta
acctggaacctggaaccatggacagtgtccgctcaggggcctttggacatcttttcaggcctgacaatttcatctt

SEQ ID NO: 19635 - DNA, 207 bp, Macaca Mulatta
aggtgacctgagccccctcctggtcctcccctgggggcagaacggtacagtctcactcctcggtctccccagcttcagcctgagtgggggtctccaacataaaggctggtggctggcttgagccagcctccaggaggctccgatggtggtctcgtgtgaggggaagagaaggaaacacaaagctgtgccccccgggggctagggctg

SEQ ID NO: 19636 - DNA, 548 bp, Macaca Mulatta
  misc_feature (1)...(548): n = A,T,C or G
agtctgatgtcgatttctgggacaagttgcaggcagagttggaggagatggcaaaacgggatgctgaggctcacccctggctttctgactatgatgacctcacgtcagctacctatgataaggnnnnnnnnnnnnnnnnnnnnnnnnnnnnnnnnnnnnnnnnnnnnnnnnntgaagaagggctgcggcgccctcaggagggggacctgccaaatgctgtgctgcttttgaggcagctgtgcagcaggatcctaagcacatggaagngcttggcagtatctgggtaccacccaggcagagaatgagcaagaactattagccatcagtgcgttgcggaggtgnaggtgtctggagctaaagccagataaccagacagcactgatggctctggccgtgagcttcaccaatgagtccctgcagcgacaggcctgtgaaaccctacgagactggctgcggtacacaccagcctatgcccatctggtgacacctgcagaagaaggggctggtggggcaggactgggccccagcaagcgtatcctggggtctct

SEQ ID NO: 19637 - DNA, 310 bp, Macaca Mulatta
ggcccttctggtggagatgtcctgggacaaaggtgagaggactgagcttcttgagaaggcagagctacctgagggtgcccctgagctggccctggatacacagctgtccttggaggatggagacaggtgcaaggccaaggtcctgaggcccagtgggccagacggtcaggggtgcaaccctgcccgggggtgaggggctagatgtccatccctcctggaagatcagggcctggaggcttgaaggagaaacgggaacatccactttgtcttacagaccggaagagcgactatctcaatcacaacggctggt

SEQ ID NO: 19638 - DNA, 804 bp, Macaca Mulatta
  misc_feature (1)...(804): n = A,T,C or G
ggggtctcttgctgcagcaacgcgagtgggagcaccaggatcccgggctcggaacccgactacacggatgggtttaagaaaatggcagacaaaccagacatgggggaaatcgccagcttcgagaaggccaagctgaagaaaacggagacgcaggagaagaacaccctgccgaccaaagagaccattgagcaggagaagcggagtgaaatttcctaaaatcctggaggatttcctacccccgtcatcttcgagaccccagtcgtgatgtggaggaagagccacctgcaagatggacacgagccacaaggtgcactgtgaacctgggcactccgcgccgatgccaccggcctgtgggtctctggagggacccccccaaatcggactgccgaattctccggtttgccctggaatattatagaaaattatttgtatgaataatgaaaataaaacacacttcgtggcttacaaattcttttaactttaagaatagggaaagacgagtaaaactacaaactttgtcccattaatccgataatcgcagcattttcgcagaacattagacgaataaacccaatagtccccctttttgttttcacgaatacctaccaatgcggagaatactcctcatcgttgccgactctccaatttatacgtaaaagaaaaagaatcagaataaaattatttgatttttttagagacatgtgggcaccaccggtgtgataggtaaaacaagagaggtgaaacaatattttctgnnnnnnnnnnnnnnnnnnnnnngcgggacaatgaccgatttcggttgaa

SEQ ID NO: 19639 - DNA, 236 bp, Macaca Mulatta
atcataaaggaaagatttaccaattgaatagggtcaaattctacaacttttcctaagccacacacaataaatgacaagtgagacaaagagcactagtataaagattatataaagacctgtaaatcattaagacaactgagttcttaaaaatggacaaaatcaatgaataatttgtaaagtagaaatgtgaccaaaaacatctaaaagatgtttataatgcaaggaactataaatta

SEQ ID NO: 19640 - DNA, 783 bp, Macaca Mulatta
  misc_feature (1)...(783): n = A,T,C or G
ggtgagacattaatccctcactattctggtcgtgtgattgacatcctgggaggtgattttgacccccatgcctttgccagtgccatcttcttcatgtgcctcttctcctttggcagnnnnnnnnnnnnnnnnnnnnnnnnnnnnnnnnnnnnnnnnnnnnnnnnnnnnnnnnnnnnnnnnnnnnnnnnnnnnnnnnnnnnnnnnnnnnnnnnnnnnnnnnnnnnnnnnnnnnnnnnnnnnnnnnnnnnnnnnnnnnnnnnnnnnnnnnnnnnnnnnnnnnnnnnnnnnnnnnnnnnnnnnnnnnnnnnnnnnnnnnnnnnnnnnnnnnnnnnnnnnnnnnnnnnnnnnnnnnnnnnnnnnnnnnnnnnnnnnnnnnnnnnnnnnnnnnnnnnnnnnnnnnnnnnnnnnnnnnnnnnnnnnnnnnnnnnnnnnnnnnnnnnnnnnnnnnnncaggcagtgcttcgggagatccaggatgcagtggccagggcagggcaggtggtgcgggaggccgttggagggttgcagaccgttcgcagttttggggctgaggagcatgaagtctgtcgctataaagaggcccttgaacaatgccggcagctgtattggcggagagacctggaacgcgccttgtacctgctcataaggagggtnggtgctgcacttgggggtgcaggtgctgatgctgagctgtgggctgcagcagatgcaggatgggcagctcacccagggcagcctgctttcctttatgatctaccaggagagcgtggggagctatgtgca

SEQ ID NO: 19641 - DNA, 785 bp, Macaca Mulatta
gatgtggtcaagggaattgtatcactgtctgacatcctgcaggccctggtgctcacaggtggagagaagaagccctgagctgggggaaggggtcaggcagcaccaggggatatgcccaactcactgcctgctggaagctctgtgggaatcagatgaaacttgggggaattgtgactctgttccctgctcagggccccctgcccttctatctgggagctagggaaggtatagggggaggaaggagaatggatttatagctacccttaccctcacacatacacttgaaaaaaactttcagcctagccaattctagcccctgtcttcttagacatagccccctttctgggtgaactataggctctgtgcctctcagacaaatcctgatctctaagagatccccagacctcacttgcctctgcctccatctcagccctgattcaaccctaagataacagcacaacaaaattcttcataaagatatttttattcacctgttccatgctatatggaggaggctaagtccatttagtgacatttcttcccataatgtgagtggggaggattgtggggaggaggggctttgggttcctgtgtttgtgcatatgaagggagatgggggttaggtggaggaggagggcagcgtgattagctaaggttattgctttttgtggcaaatctaattaaatgacagctatctcttcatggtattgcagtgtttgatttttacagttgatggatactactgtcctactttatatggcttcttcaattggtcattaataata

SEQ ID NO: 19642 - DNA, 3059 bp, Macaca Mulatta
  misc_feature (1)...(3059): n = A,T,C or G
ggtcaaacaccattcaaagtagtagtcaaatctctttcacccaaagagttggtccggatacatgtccctaaacctttggacaggaacgatggaacatttttgatgagatatcggatgtatgaaactgtcaatgaagggctgaagatagaggttctttatggtgatgaacatgtggctcagtctccctatattttgaaaggnnnnnnnnnnnnnnnnnnnnnnnnnnnnnnnnnnnnnnnnnnnnnnnnnnnnnnnnnnnnnnnnnnnnnnnnnnnnnnnnnnnnnnnnnnnnnnnnnnnnnnnnnnnnnnnnnnnnnnnnnnnnnnnnnnnnnnnnnnnnnnnnnnnnnnnnnnnnnnnnnnnnnnnnnnnnnnnnnnnnnnnnnnnnnnnnnnnnnnnnnnnnnnnnnnnnnnnnnnnnnnnnnnnnnnnnnnnnnnnnnnnnnnnnnnnnnnnnnnnnnnnnnnnnnnnnnnnnnnnnnaggtccttctcccagatttagaattttatgttaatcttggagattggcccttggagcatcgaaaagtcaatggaacccccagccccatacctatcatttcatggtgtggctctctggattcaagagatgttgtcctcccaacctatgacatcacccactccacgcttgaagccatgcggggtgttacaaatgatctcctctctattcagggaaatacagnnnnnnnnnnnnnnnnnnnnnnnnnnnnnnnnnnnnnnnnnnnnnnnnnnnnnnnnnnnnnnnnnnnnnnnnnnnnnnnnnnnnnnnnnnnnnnnnnnnnnnnnnnnnnnnnnnnnnnnnnnnnnnnnnnnnnnnnnnnnnnnnnnnnnnnnnnnnnnnnnnnnnnnnnnnnnnnnnnnnnnnnnnnnnnnnnnnnnnnnnnnnnnnnnnnnnnnnnnnnnnnnnnnnnnnnnnnnnnnnnnnnnnnnnnnnnnnnnnnnnnnnnnnnnnnnnnnnnnnnnnnnnnnnnnnnnnnnnnnnnnnnnnnnnnnnnnnnnnnnnnnnnnnnnnnnnnnnnnnnnnnnnnnnnnnnnnnnnnnnnnnnnnnnnnnnnnnnnnnnnnnnnnnnnnnnnnnnnnnnnnnnnnnnnnnnnnnnnnnnnnnnnnnnnnnnnnnnnnnnnnnnnnnnnnnnnnnnnnnnnnnnnnnnnnnnnnnnnnnnnnnnnnnnnnnnncagaaatatgccgagcgccagtccagcaaacctgaagtacgtgatggaatggaacttgttcctcagccagaagataacacagccatctgccagtgccacaggataaagccttcgagagaagnnnnnnnnnnnnnnnnnnnnnnnnnnnnnnnnnnnnnnnnnnnnnnnnnnnnnnnnnnnnnnnnnnnnnnnnnnnnnnnnnnnnnnnnnnnnnnnnnnnnnnnnnnnnnnnnnnnnnnnnnnnnnnnnnnnnnnnnnnnnnnnnnnnnnnnnnnnnnnnnnnnnnnnnnnnnnnnnnnnnnnnnnnnnnnnnnnnnnnnnnnnnnnnnnnnnnnnnnnnnnnnnnnnnnnnnnnnnnnnnnnnnnnnnnnnnnnnnnnnnnnnnnnnnnnnnnnnnnnnnnnnnnnnnnnnnnnnnnnnnnnnnnnnnnnnnnnnnnnnnnnnnnnnnnnnnnnnnnnnnnnnnnnnnnnnnnnnnnnnnnnnnnnnnnnnnnnnnnnnnnnnnnnnnnnnnnnnnnnnnnnnnnnnnnnnnnnnnnnnnnnnnnnnnnnnnnnnnnnnnnnnnnnnnnnnnnnnnnnnnnnnnnnnnnnnnnnnnnnnnnnnnnnnnnnnnnnnnnnnnnnnnnnnnnnnnnnnnnnnnnnnnnnnnnnnnnnnnnnnnnnnnnnnnnnnnnnnnnnnnnnnnnnnnnnnnnnnnnnnnnnnnnnnnnnnnnnnnnnnnnnnnnnnnnnnnnnnnnnnnnnnnnnnnnnnnnnnnnnnnnnnnnnnnnnnnnnnnnnnnnnnnnnnnnnnnnnnnnnnnnnnnnnnnnnnnnnnnnnnnnnnnnnnnnnnnnnnnnnnnnnnnnnnnnnnnnnnnnnnnnnnnnnnnnnnnnnnnnnnnnnnnnnnnnnnnnnnnnnnnnnnnnnnnnnnnnnnnnnnnnnnnnnnnnnnnnnnnnnnnnnnnnnnnnnnnnnnnnnnnnnnnnnnnnnnnnnnnnnnnnnnnnnnnnnnnnnnnnnnnnnnnnnnnnnnnnnnnnnnnnnnnnnnnnnnnnnnnnnnnnnnnnnnnnnnnnnnnnnnnnnnnnnnnnnnnnnnnnnnnnnnnnnnnnnnnnnnnnnnnnnnnnnnnnnnnnnnnnnntagtaattccaaatctatctgagttgtatacccatcaaagacaatagagttattaacatagatgaatgtatgctttaggcatcattcattatctctatatcgaataggtaaaagataactgtagtcaggtgaagggtgttcattattttcaagctgaaaaggggatccttgaaaacactgaaaacctctacaacaatcttcaggaagcctgctatcttgggattcactaataacaggccaagaacaaaggcaagcatccattcctcgctccaccacttttctatttcagtgggtgtcattgctaagataaagactttggaaattccctctttcttttaggacagggtcaggatttaggactcatagcctgaaagttcattacatactccttgtaaccatcagtccaaggttcagttcactaaagcacatgctctaaaacaagagttatcctcattcccaatttaaaaatatgtactnnnnnnnngttgcagtggctcatgcctgtaatcccagcactttgggagtcctaggtgggcggatcacctgaggtcgggaattgaagaccagcctggccaacatggtgaaatcccatctctactaaaaacataaaaattagttgggtgtggtggcacgtgcctgtagtcccacctactcgggaggctgaggcacgagaattgcttgaaccttggaggcggaggttgcagtgagccaaaattgtgtcactgtactccagcctgggagacaga

SEQ ID NO: 19643 - DNA, 728 bp, Macaca Mulatta
agaacaaggctgtccagttcaaattacatttcctacagatttatccaataatggtcaagtcaggccgcacacgtcttgctctcattatctgcaatgaagaatttgacactcttcctagaagaactggagctgaggttgacatcacaggcatgacaatgctgctacaaaatctggggtacagtgtagatgtgagaaaaaatctcatggcttcggtaagttctattatacaacagaaacaatggtcatgcccttcgtataactaaataatattagaaagcttggttataagaccaagaaatgtaatctcttgataatctaaaatacaaacttgccttgagagagtgctggatactacatggtcccttgtaacataaaagtcattcagcacaagcctggtataactgaattgggaaatattttattgactcagtaatgctactgtctctctacaagataactctctggatgacttcctataacactttccttcacctttcttgaaattaagactaaaattttttttggcaccccactgtttgtcatggaatcccttaagaaactgcttaagtatttatttattggctttccaaggtaccatgatagttaattacatagttgaaaatcagtgatatggtctctttcaggaaatgactacagagctggaggcatttgcacaccggccagagcaccagacatctgacagcaccttcctggtggtcatgtctcat

SEQ ID NO: 19644 - DNA, 982 bp, Macaca Mulatta
  misc_feature (1)...(982): n = A,T,C or G
cggagtgtgagaaactcatggcattctacgagcgcctggaggagctggatgctgacaaggcagagatgagggcctcgcggatcttacatggactgggattcacgcctgccatgcagcgcaagaagctaaaagacttcagtgggggctggaggatgagggttgcccttgccagnnnnnnnnnnnnnnnnnnnnnnnnnnnnnnnnnnnnnnnnnnnnnnnnnnnnnnnnnnnnnnnnnnnnnnnnnnnnnnnnnnnnnnnnnnnnnnnnttttaagcgcatcttggtcctcgtctcccattccacaggattttctgaatggtgtctgtaccaacatcattcacaagcgcaacaagaaactgaagtattacacgnnnnnnnnnnnnnnnnnnnnnnnnnnnnnnnnnnnnnnnnnnnnnnnnnnnnnnnnnnnnnnnnnnnnnnnnnnnnnnnnnnnnnnnnnnnnnnnnnnnnnnnnnnnnnnnnnnnnnnnnnnnnnnnnnnnnnnnnnnnnnnnnnnnnnnnnnnnnnnnnnnnnnnnnnnnnnnnnnnnnnnnnnnnnnnnnnnnnnnnnnnnnnnnnnnnnnnnnnnnnnnnnnnnnnnnnnnnnnnnnnnnnnnnnnnnnnnnnnnnnnnnnnnnnnnnnnnnnnnnnnnnnnnnnnnnnnnnnnnnnnnnnnnnnnnnnnnnnnnnnnnnnnnnnnnnnnnnnnnnnnnnnnnnnnnnnnnnnnnnnnnnnnnnnnnnnnnnnnnnnnnnnnnnnnnnnnnnnnnnnnnnnnnnnnnnnnnnnnnnnnnnnnnnnnnnnnnnnnnnnnnnnnnnnnnnnnnnnnnnnnnnnnnnnnnnnnnnnnnagcatttacaagagcagctggacttagatctctcgcctttggagtacatgatgaagtgctacccagagatcaaggagaaggaagaaatgaggaagatcattgggcgatacggtcttactgggaaacaacagg

SEQ ID NO: 19645 - DNA, 913 bp, Macaca Mulatta
  misc_feature (1)...(913): n = A,T,C or G
gggagagaacggctgtgactagctgtactctgggcaacagctcgctccatggagtgatgggaatcctgtcattcttacctgtccttgctactgagagtgactgggctgactgcaagtcctcccagccttggggccacatgcttctgtggacagctgtgctattcctggctcctgttgctgggacacctgcagctcccccgaaggctgtgctgaaactcgagcccccgtggatcaacgtgctccgggaggactctgtgactctgacgtgcgggggcgctcacagccctgacagcgactccactcagtggttccacaatgggaatctcatccccacccacacgcagcccagctacaggttcaaggccaacaacaatgatagcggggagtacaggtgccagactggccggaccagcctcagcgaccctgttcatctgactgtgctttctgagtggctggcgctccagacccctcacctggagttccgggagggagaaaccatcatgctgaggtgccacagctggaaggacaagcctctgatcaaggtcacattcttccagaatggaatatccaagaaattttcccatatgaatcccaacttctccatcccacaagcaaaccacagtcaccgtggtgattaccactgcacaggaaacataggctacacgccatactcatccaaacctgtgagcatcactgtccaagtgcccagcatgggcagctcttcaccgatagggatcattgtggctgtggtcactgggattgctgtcgcggccactgttgtgctgtagaggcctgaactactgccngacaaaccggatttagcccctccagagaccgtantgtcgggcatggtaaacctcccttggaaacacccattccctaatctatagggggcaagctggcgtgacacaac

SEQ ID NO: 19646 - DNA, 932 bp, Macaca Mulatta
  misc_feature (1)...(932): n = A,T,C or G
gggcctttccgcgctacctacaagacgcgcggnnnngngccgttctggattcccgtcgtaacttaaagggaagctttcacgatgtccggagcccttgatgtcctgcaaatgaaggaggaggatgtccttaagttccttgcagcaggaacccacttaggtggcacgaatcttgacttccagatggaacagtacatctataaaaggaaaagtgatggcatctacatcataaatctgaagaggacctgggagaagcttctgctggcggctcgtgccattgttgccattgaaaaccctgctgatgtcagtgttatatcctccgggaatactggccagagggccgtgctgaagtttgatgctgccactggagccactccaattgctggccgcttcactcctggagccttcactaaacagatccaggcagccttccgggagccacggcttcttgtggttactgaccccagggctgaccaccagcctctcacggaggcatcttatgttaaactacctaccattgctctgtgtaacacagaattctactctgcgctatgtggaaattggccttacattgcaactacaaggggaggtcactccgtggggttttgatgtggtggaatgctgggttcggggaagtttgtgcgcatgcgtgggcaaccatttttcccgtggaaaaccccgtggggaaggtcatggcttgattctctaattttcttagagagaatccttgaaaaagattgataaaaaaaaaagctaggctgcttgcttaaaaaggcagttgacccatggcacggaaatttccaggggtgaaatgggacttgctccccagcttccttaaatttaattggctttcttcaataccggaaggtttgccagaacacgggtctctaagaggtgctgcgacaaggaccccactctatggaacatatatccaa

SEQ ID NO: 19647 - DNA, 242 bp, Macaca Mulatta
  misc_feature (1)...(242): n = A,T,C or G
gtggcctctgggttgggtttctcttcctgatcccaccccacgtctccctagctccccctgcnnnnnnnnnnnnnnnnnnnnnnnnnnnnnnnnnnnnnnnnnnnnnnnnnnnnnnnnnnnnnnnnnnnnnnnnnnnnnnnnnnnnnnnnnnnnnnnnnnnnnnnnnnnnnnnnnnnnnnntgaaagaattcttagccaaagccaaagaagattttcttaaaaaatgggaaagtcccgctcag

SEQ ID NO: 19648 - DNA, 668 bp, Macaca Mulatta
cctttcctcaggccccaccctgctggactatgagccaggtctagtccaagcacaggggcgggccccacgctggctcccacgcctgaccggggatggtccctcctttctgttggggtgggccgcccagagcctggccgggcaggaactcagtgcccacctgcctcctccctcaggaccagctgcgcttcccgcgcatgctcatgaagctggtgagcctgcgcacgctgagctccgtgcactcggagcaggtcttcgccctgcggctacaggacaagaagctaccgcctctgctgtcggagatctgggacgtccacgagtgaggggccggccacccagccccacagccttgcctgaccaccctccagcagatagacgccggcacccctttctcctcctcgggtggaaggggccctgggctgagcctgtagacctcccagccctcagcccttgggatgagccccagtccgggtccaggaggctccctccgtgcccaccaagtcttccagaaggggtgaaagggttacaggtcccgaccgctgacccttcccggctgccctccctccccagcttacacctcaagcccagcacgcagtgcaccttgaacagagggaggggaggacccatggctctccccataggcggggagaccaggggacttcctcttcctc

SEQ ID NO: 19649 - DNA, 602 bp, Macaca Mulatta
  misc_feature (1)...(602): n = A,T,C or G
tcctggctctgttgttactagatggatgatactggccaatttattaatagcttccctgagactcagttttcacatctgtaaaaagggtatagttttagggagtaaaggagataaatctatgtaaataatttaccatggtacctaggacttagtgcttaaattttagcttttagtttaatataaaaatactgatagagggctttcaaaatgtttacnnnnnnnnnnnnnnnnnnnnagccaaatgatttctcagtatcactaaaagcacaagggaaaaacaagcattttaaagtccaactaaaagagactgtctactgcattgggcagcgtaaattcagcaccatggaagaacttgtagaacattacaaaaaggcaccaatttttacaagtgaacaaggagaaaaattatatcttgtcaagcatttatcatgatactgctgaccagaagtgactgctgcatagctgtaatttgtcatgtaattgaagactgagaaaatgttgggtccatcgtgcttgattggaaatggctgtttctaaacctttatgagaattgacaataagtattttattataattcagcccatacatatatactatgtatg

SEQ ID NO: 19650 - DNA, 798 bp, Macaca Mulatta
gggcgttttgttcttgcctgttttgttcttccgtggtgttgatctgtgagttgtgttaggactgctaataggaagatgtcttcaggaaatgctaaaattgggcaccctgcccccaacttcaaagccacagccgttatgccagatggtcagtttaaagatatcagcctgtctgactacaaaggaaaatatgttgtgttcttcttttatcctcttgacttcacctttgtgtgccctacggagatcattgctttcagtgatagggcagaagaatttaagaaactcaactgccaagtgattggtgcttctgtggattctcacttctgtcatctagcatggatcaacacacctaagaaacaaggaggactgggacccatgaacattcctttggtatcagacccgaagcgcaccattgctcaggattatggggtcttaaaggctgatgaaggcatttcattcacgggcctctttatcattgatgataacggtattcctcgggagatcactgtaaatgacctccctggttggccgctctgtggaagacacttttaaaccatttcaggccttccaagttcactgcaaaccctgggggaaatcgggcccctcttggctgggaaaaccggtgacgggattacattgcgcccctgaggcccccaacagccccccacttttttcctccagcccgaacagtcgccctctgaacctgttttctcagccccaaaaattccggacggcagagcctctgtaacaaccgacagccactatcggggtaccccacgttctctcccccccatttcggtg

SEQ ID NO: 19651 - DNA, 296 bp, Macaca Mulatta
acagtgacaaatccaactgaccagaaggaaggaagaagctcattggtggctgctcctgaaggaggcgctgcccttatatgaacagaagagaaaagagagacacagctgcagaggccacctggattgagcctaatgtgtttgagcatcacttaggagaagtcttctatttatttatttattagtttgttttgaagattctatgttaatattttaggtataaaataattaagggtatgattaagtctacttgcacactctcccaaagtgcattctttttaaaatgtcaaccccaagtt

SEQ ID NO: 19652 - DNA, 1570 bp, Macaca Mulatta
  misc_feature (1)...(1570): n = A,T,C or G
agcttctagctctcagtctgcgcgagggtgtgggaaggaaagccacaggacctccggagcagagcacagcagctgcagagcaaaggccagcatgtcgcccaacttcaaacttcagtgtcacttcattctcatcttcctgacggctctaagaggggaaaagccggtacctagaggtgagnnnnnnnnnnnnnnnnnggtgcctggacatgctgagcctccagggccagttcaccttcaccgccgaccggccgcagctgcactgcgccgcctnnnnnnnnnnnnnnnnnnnnnnnnnnnnnnnnnnnnnnnnnnnnnnnnnnnnnnnnnnnnnnnnnnnnnnnnnnnnnnnnaaggtatttgatggttggattctcaaggggggagaagttcccccagttcccaggatcatcctctccccacagctgagcggtacatagatttctgtgagactggtcttagcaggaggagcatcagatcttcccagaatgtggccatgatcttcttccgagtccgtgaaccaggaaatggattcacattaaccataaagacagaccccaacctctttcnntgcaatgtcatttctcagactccaaatggaaagtttaccctggtcgttccacaccagcatcgaaactgcagcttctccatcatttatcctgtggtaatcaaaatatctgatctcaccctgggacacgtaaatggtcttcagttaaagnnnnnnnnnnnnnnnnnnnnnnnnnnnnnnnnnnnnnnnnnnnnnnnnnnnnnnnnnnnnnnnnnnnnnnnnnnnnnnnnnnnnnnnnnnnnnnnnnnnnnnnnnnnnnnnnnnnnngcccaaatgaaagttggctgtgacaacactgtggtgcgcatggtctccagtggaaaacacataaatcgtgtgacttttgagtatcgtcagctggaaccatatgagctggaaaacccaaatggaaacagtatcggggaattctgtttgtctgatctttgaataaccaacccaatgatttacatgctgatagctaagtgagtttttaatggccattgtgtatgattttgatgcacaactagttaaaagcctttcataccagtctgtattcccagccttgagcgcnnnnnnnnnnnnnnnnnnnnnnnnnnnnnnnngcattaatttttgtactttgcttcttttatgtttgtaatctgtaaatgaacacatggcagaaaataagcacctgattagtaggatcattgttctaaatggaaatgtttgtaattctttgatgtgctacgaacctgaaactggtaagacaagcacaaagcaacgtgcaataaaaatattgtatctcaagggaaaatactcaaagaaagaaaagcggcagcacttttattagttttataacaggaaaaagtcttgtatataacaaagtagttgcatctgtttattttctatttattattctgttacaatagctatagcagttatttattgatttgtagcaacttgtttttaacaaaactttgtagcatggaaaaaatttttcatccacaaatacaaacatgaataaatgtattcagaatgtgggca

SEQ ID NO: 19653 - DNA, 632 bp, Macaca Mulatta
  misc_feature (1)...(632): n = A,T,C or G
tgaccagccccaccgcgcctatctggtcatgttactgcatttctggccggcctcccctggatcatgtcgttcaattccagtcacctcttctgcaatcatgacctcttgatgtctccatggtgacctcctggggggtcattgaccctgcttggtgggatcccccttgtaacaataaaatctatttaaannnnnnnnnnnnnnnnnnnnnnnnnnnnnnnnnnnnnnnnnnnnnnnnnnnnnnnnnnnnnnnnnnnnnnnnnnnnnnnnnnnnnnnnnnnnnnnnnnnnnnnnnnnnnnnnnnnnnnnnnnnnnnnnnnnnnnnnnnnnnnnnnnnnnnnnnnnnnnnnnnnnnnnnnnnnnnnnnnnnnnnnnnnnnnnnnnnnnnnnnnnnnnnnnnnnnnnnnnnnnnnnnnnnnnnnnnnnnnnnnnnnnnnnnnnnnnnnnnnnnnnnnnnnnnnnnnnnnnnnnnnnnnnnnnnnnnnnnnnnnnnnnnnnnnnnnnnnnnnnnnnnnnnnnnnnnnnnnnnnnnnnnnnnnnnnnnnnnnnnnnnnnnnnnnnnnnnnnnnnnnnnnnnnnnnnnnnnnnnnnnnnnnnnnnnnnnnnnnnnnnnnnnnnnnnnnnnnnnnnnnnnn

SEQ ID NO: 19654 - DNA, 159 bp, Macaca Mulatta
tgggtaggagccaaacagcatgaattacaagtgaactcaatgcagctgctgtactaccaggctccgatgtcatctgtcatgttgctggtcgctgtgcccttctttgagccggtgtttggagaaggaggaatatttggtccctggtcagtttctgctttg

SEQ ID NO: 19655 - DNA, 2833 bp, Macaca Mulatta
  misc_feature (1)...(2833): n = A,T,C or G
ccaggtggtaaaggctatcggcctccgggaagtgtggtactttggcctccagtatgtggataataaaggatttcctacctggctgaagctggataagaaggtaagtnnnnnnnnnnnnnnnnnnnnnnnnnnnnnnnnnnnnnnnnnnnnnnnnnnnnnnnnnnnnnnnnnnnnnnnnnnnnnnnnnnnnnnnnnnnnnnnnnnnnnnnnnnnnnnnnnnnnnnnnnnnnnnnnnnnnnnnnnnnnnnnnnnnnnnnnnnnnnnnnnnnnnnnnnnnnnnnnnnnnnnnnnnnnnnnnnnnnnnnnnnnnnnnnnnnnnnnnnnnnnnnnnnnnnnnnnnnnnnnnnnnnnnnnnnnnnnnnnnnnnnnnnnnnnnnnnnnnnnnnnnnnnnnnnnnnnnnnnnnnnnnnnnnnnnnnnnnnnnnnnnnnnnnnnnnnnnnnnnnnnnnnnnnnnnnnnnnnnnnnnnnnnnnnnnnnnnnnnnnnnnnnnnnnnnnnnnnnnnnnnnnnnnnnnnnnnnnnnnnnnnnnnnnnnnnnnnnnnnnnnnnnnnnnnnnnnnnnnnnnnnnnnnnnnnnnnnnnnnnnnnnnnnnnnnnnnnnnnnnnnnnnnnnnnnnnnnnnnnnnnnnnnnnnnnnnnnnnnnnnnnnnnnnnnnnnnnnnnnnnnnnnnnnnnnnnnnnnnnnnnnnnnnnnnnnnnnnnnnnnnnnnnnnnnnnnnnnnnnnnnnnnnnnnnnnnnnnnnnnnnnnnnnnnnnnnnnnnnnnnnnnnnnnnnnnnnnnnnnnnnnnnnnnnnnnnnnnnnnnnnnnnnnnnnnnnnnnnnnnnnnnnnnnnnnnnnnnnnnnnnnnnnnnnnnnnnnnnnnnnnnnnnnnnnnnnnnnnnnnnnnnnnnnnnnnnnnnnnnnnnnnnnnnnnnnnnnnnnnnnnnnnnnnnnnnnnnnnnnnnnnnnnnnnnnnnnnnnnnnnnnnnnnnnnnnnnnnnnnnnnnnnnnnnnnnnnnnnnnnnnnnnnnnnnnnnnnnnnnnnnnnnnnnnnnnnnnnnnnnnnnnnnnnnnnnnnnnnnnnnnnnnnnnnnnnnnnnnnnnnnnnnnnnnnnnnnnnnnnnnnnnnnnnnnnnnnnnnnnnnnnnnnnnnnnnnnnnnnnnnnnnnnnnnnnnnnnnnnnnnnnnnnnnnnnnnnnnnnnnnnnnnnnnnnnnnnnnnnnnnnnnnnnnnnnnnnnnnnnnnnnnnnnnnnnnnnnnnnnnnnnnnnnnnngccaaagaagcccaggatgacctggtgaagaccaaggaggagctgcacctggtgatgacnnnnnnnnnnnnnnnnnnnnnnnnnntgtacgagccactgagctaccatgtccaggagagcttgcaggatgagggtgcggagcccacgggctacagtgcagagctgtctagtgagggcatccgggatgaccgcaatgaggagaagcgtatcactgaggcggagaagaatgagcgtgtgcagcggcagctgctgngacgctgagcagcgagctgtcccaggcccgagatgagaataagaggacccacaatgacatcatccacaacgagaacatgaggcaaggccgggacaagtacaagacgctgcggcagatccggcagggcaacaccaagcagcgcatcgacgagttcgnnnnnnnnnnnnnnnnnnnnnnnnnnnnnnnnnnnnnnnnnnnnnnnnnnnnnnnnnnnnnnnnnnnnnnnnnnnnnnnnnnnnnnnnnnnnnnnnnnnnnnnnnnnnnnnnnnnnnnnnnnnnnnnnnnnnnnnnnnnnnnnnnnnnnnnnnnnnnnnnnnnnnnnnnnnnnnnnnnnnnnnnnnnnnnnnnnnnnnnnnnnnnnnnnnnnnnnnnnnnnnnnnnnnnnnnnnnnnnnnnnnnnnnnnnnnnnnnnnnnnnnnnnnnnnnnnnnnnnnnnnnnnnnnnnnnnnnnnnnnnnnnnnnnnnnnnnnnnnnnnnnnnnnnnnnnnnnnnnnnnnnnnnnnnnnnnnnnnnnnnnnnnnnnnnnnnnnnnnnnnnnnnnnnnnnnnnnnnnnnnnnnnnnnnnnnnnnnnnnnnnnnnnnnnnnnnnnnnnnnnnnnnnnnnnnnnnnnnnnnnnnnnnnnnnnnnnnnnnnnnnnnnnnnnnnnnnnnnnnnnnnnnnnnnnnnnnnnnnnnnnnnnnnnnnnnnnnnnnnnnnnnnnnnnnnnnnnnnnnnnnnnnnnnnnnnnnnnnnnnnnnnnnnnnnnnnnnnnnnnnnnnnnnnnnnnnnnnnnnnnnnnnnnnnnnnnnnnnnnnnnnnnnnnnnnnnnnnnnnnnnnnnnnnnnnnnnnnnnnnnnnnnnnnnnnnnnnnnnnnnnnnnnnnnnnnnnnnnnnnnnnnnnnnnnnnnnnnnnnnnnnnnnnnnnnnnnnnnnnnnnnnnnnnnnnnnnnnnnnnnnnnnnnnnnnnnnnnnnnnnnnnnnnnnnnnnnnnnnnnnnnnnnnnnnnnnnnnnnnnnnnnnnnnnnnnnnnnnnnnnnnnnnnnnnnnnnnnnnnnnnnnnnnnnnnnnnnnnnngcatataatggactatgcacatttttaattttgtcaaatacacacatgccactatgacctttcagactccagccatggagagactgtttgcttgtgtttgtttgtagtctctgccatggccttggcaggctgctggaaggcagcttgtggaggccattggttctgcccactcgttccttctcgtgcactgcttactccttcgcagctaagatgccatgtgcaggtggattccatgctgcagacatgaaataaaagctttgcaaaggcacga

SEQ ID NO: 19656 - DNA, 189 bp, Macaca Mulatta
aggttcagaaaagagaccctcgtgactggactgcacagttcatggaggctgcagatgaggccttggatgctctggatgctgctgcagctgaggccgaagcccgggctgaagcaagaacccgcatgggaattggagatgaggctgtgtcagaggccctggagctgggatgatattgagtttgagctgctg

SEQ ID NO: 19657 - DNA, 134 bp, Macaca Mulatta
agggacacttagtcggtctggatgaaccagattcgggagctgggcaagaagctctgcttaaacaagagcaagcaaaaatcattcgattcgagagacaagcagaagaattcctcaatgcagtcttttatagaaaa

SEQ ID NO: 19658 - DNA, 309 bp, Macaca Mulatta
tagagagaaacatgtatcgtttccgatcacagctcttcacggggatttctgctgccgccaccgcccactcttacccccgccgtttctcgcctctgttgttagccgaagactcgcctctcagccgcccgccgcacagacgcacgagtaaaaagtgcagctccatcggctgatcctcgctaagctccgactctaggcggcaccgggcgtcccacgatgccgaagaacaagaagcggaacactccccaccgcggtggcagtgctggcggcggcggctcaggagcagctgcagcgacggcggcgacagcaggt

SEQ ID NO: 19659 - DNA, 633 bp, Macaca Mulatta
ccccccgagacccgcttggatggaagaagcgctgctgggcgcgctctcaccactcaggggggccggggttcattgatgagacaggagtcttggtccccactcagcccgaggctgcgcacagcccccctcacaaggtgagcccttgcagagcaggccgcgggtgtcccaggcttggctcggttcttggaggtcaggggcgcgggttggggttggtgggtggggaggtgaatgttttctagagattcacactgccccagcaatttctgtatacttttcacctctgagaattacaatgtgagaaccgcttggtgttgcatattctgcgcatgtcctgtgcctgcctggccatcaggcccgtgcctgcagtttctggttggcctggacttaaggcagccagtcggggggcagctcctcagggcagaggcccccagagttccaggaccatggctttggggtgggtgcctgtctccgtggctctggagccgtaaggctgtggagggcagagacggtgctggaggcagaggagcccaggacagcccgtgcacaggggagccaccgcagtgctgggcagcgcttggccctccgtaaagggtcaggtaactctcgctgtggctgagtggttctgtagttgga

SEQ ID NO: 19660 - DNA, 1672 bp, Macaca Mulatta
  misc_feature (1)...(1672): n = A,T,C or G
tcagaatatacctggaacacaaaaactggtcgggggcagttttcaggacgtacttacaatcctacagcaaaaaacctaaatattgtgaaccgtgcacagcccattccctcagtgcacgggaggacagactgggtggccaagtatggaggccaccggtaggagtctgtggtgtgaaaccccacagcattgctctgtagagtacgtgcaagttccttgaccctgggaaatgtctacagatgtctatttctactgagttctggaagaaatatgcaaaagtgggtacttggaagagcaaaaatcatcccctattttatttatttccaagaaatgcattttcttagaatcactgcccacagtgttgatatatgggtaggatgttacaaagtattgaataaactatttgccaaagtatgaagtatttgatctacannnnnnnnnnnnnnnnnnnnnnnnnnnnnnnnnnnnnnnnnnnnnnnnnnnnnnnnnnnnnnnnnnnnnnnnnnnnnnnnnnnnnnnnnnnnnnnnnnnnnnnnnnnnnnnnnnnnnnnnnnnnnnnnnnnnnnnnnnnnnnnnnnnnnnnnnnnnnnnnnnnnnnnnnnnnnnnnnnnnnnnnnnnnnnnnnnnnnnnnnnnnnnnnnnnnnnnnnnnnnnnnnnnnnnnnnnnnnnnnnnnnnnnnnnnnnnnnnnnnnnnnnnnnnnnnnnnnnnnnnnnnnnnnnnnnnnnnnnnnnnnnnnnnnnnnnnnnnnnnnnnnnnnnnnnnnnnnnnnnnnnnnnnnnnnnnnnnnnnnnnnnnnnnnnnnnnnnnnnnnnnnnnnnnnnnnnnnnnnnnntcctgggttcaagtgattttcctgcctcagcctcccgagtagctgggattagaggcatgaccaccacgcccagctaatttttgtagtattaggagagacagggtttcaccatgttggtcaggctcaggctggtctcaaactcctgacctcaggtgatccacctcgcctcagcctcccaaagtgnnnnnnnnnnnnnnnnnnnnnnnnnnnnnnnnnnnnnnnnnnnnnnnnnagaaataaatgtgtctttaacatagagagtatcaaagttatgccacctggttttagtagaccgcctgtattttgatcttgacagtacagctcctatgaattcaaggtgactgtcaaacccgatggcttgatgactttgatattaatcaagtcaaggttctcttggtttgacatcattaagaaagttttggaaactgtgtttgatgctggttcattggactcttcaaactgctttgtttctgtgtccctaccagactcaaaggtgaagcgtgccagctggttcccccaagccaactcatgctgctgaccgctgactcagctctgacgttcacatttgctctaaagcaagtgcgttcagctgctggggcagtgatatcacatagtacacatattattttcttagtttatttccaaactggtattttaaatagacacttcgaactttgggctactctgtttaaacttgccactttctgggctggaccttagtactgtaaattctttttaaagaataataatgttaactgctgagatttttaagtattttgtgactttgtaacaactgctattgtaataggtatcgtcttgtgggcattatccaaggcatatt

SEQ ID NO: 19661 - DNA, 563 bp, Macaca Mulatta
  misc_feature (1)...(563): n = A,T,C or G
acaggtaccagtcagtggcccagacctggagggcaagcaccttcatccccaagctatgaaaactcactccactccctgnnnnnnnnnnnnnnnnnnnnnnnnnnnnnnnnnnnnnnnnnnnnnnnnnnnnnnnnnnnnnnnnnnnnnnnnnnnnnnnnnnnnnnnnnnnnnnnnnnnnnnnnnnnnnnnnnnnnnnnnnnnnnnnnnnnnnnnnnnnnnnnnnnnnnnnnnnnnnnnnnnnnnnnnnnnnnnnnnnnnnnnnnnnnnnnnnnnnnnnnnnnnnnnnnnnnnnnnnnnnnnnnnnnnnnnnnnnnnnnnnnnnnnnnnnnnnnnnnnnnnnnnnnnnnnnnnnnnnnnnnnnnnnnnnnnnnnnnnnnnnnnnnnnnnnnnnnnnnnnnaggtggcttgcagagtcagtctggaactgttgttacaacagaaatcaagactgaaaacaaagaaaaggatgaaaaccttcatgaacctccttcatcagatgacatgaagtctgatgatgaatcctcccaaaaagacatcaaggtttcatctagaggcagaacaag

SEQ ID NO: 19662 - DNA, 1960 bp, Macaca Mulatta
  misc_feature (1)...(1960): n = A,T,C or G
aagaggcagctgcagtggagaatcatgttaagctcggctactgcggagagcccaaggtagcccaatgatggattttgatgagcgtggtccctgctcctctaacatgtatttgccaagttgtacttactacgtctcgggtccagatttctccagcctcccttcttttctgccccagaccccgtcttcgcgcccaatgacatactcgtaatcctccaacctgccccagnnnnnnnnnnnnnnnaagtgaccttcagagagtacgccattgagcccgccactaaatggcacccccgcggcaatctggcccactgctactccgcggaggagctcgtgcacagagactgcctgcaggcgcccagcgcggccggcgtgcctggcgacgtgctggccaagagctccgccaacgtctaccaccaccccacccccgcagtctataccaatttctatagcaccgtgggcaggaacggcgtacaagacacaggctttcgaccagtttttcgagacagcctacggcaccccggaaaacctcgcctcctccgactaccccggggacaagagcgccgagaaggggcccccggcggccacggcgacctcnnnnnnnnnnnnnnnnnnnnnnnnnnnnnnnnnnnnnnnnnnnnnnnnnnnnnnnnnnnnnnnnnnnnnnnnnnnnnnnnnnnnnnnnnnnnnnnnnnnnnnnnnnnnnnnnnnnnnnnnnnnnnnnnnnnnnnnnnnnnnnnnnnnnnnnnnnnnnnnnnnnnnnnnnnnnnnnnnnnnnnnnnnnnnnnnnnnnnnnnnnnnnnnnnnnnnnnnnnnnnnnnnnnnnnnnnnnnnnnnnnnnnnnnnnnnnnnnnnnnnnnnnnnnnnnnnnnnnnnnnnnnnnnnnnnnnnnnnnnnnnnnnnnnnnnnnnnnnnnnnnnnnnnnnnnnnnnnnnnnnnnnnnnnnnnnnnnnnnnnnnnnnnnnnnnnnnnnnnnnnnnnnnnnnnnnnnnnnnnnnnnnnnnnnnnnnnnnnnnnnnnnnnnnnnnnnnnnnnnnnnnnnnnnnnnnnnnnnnnnnnnnnnnnnnnnnnnnnnnnnnnnnnnnnnnnnnnnnnnnnnnnnnnnnnnnnnnnnnnnnnnnnnnnnnnnnnnnnnnnnnnnnnnnnnnnnnnnnnnnnnnnnnnnnnnnnnnnnnnnnnnnnnnnnnnnnnnnnnnnnnnnnnnnnnnnnnnnnnnnnnnnnnnnnnnnnnnnnnnnnnnnnnnnnnnnnnnnnnnnnnnnnnnnnnnnnnnnnnnnnnnnagctgcgggctgtgtgtggtctccactggggactgggccccctgccagaccccctggaggctaacccctccacatcctccctctactgggagcctacccacccccaggacccctgagtcaaaaagctgtgtgctctccaagaccagttcagcttggggacaggggcaggaggaaggggtaggattactaggtgcccagaatgaggctgctttccaaagccaatgtgaacggcggcggctggacttagaggtggctatgaggtggaagagggctgcaaatccttgtgggaaaagaaatctgtgattccaggtggcgtcagtgtctttccactcctcctagccacccactacacttatccagccctgagttcctagccaccgcctcctacagcccacctggcttttctttctaccaaatgagggtcttggtttcagcctaccactcaggcccaaagcctcgtcacagagtggactgttccctgaggtgggagatatggaaaagccaagaagctgcggccaggccactggcccctgagatctctgcaggaaatggctgtggagtgcggcagtttggcaaactctccaccacatgtaatgaagcttggatttgctcagtgtctggctgcagagcagcaggcctggccagcaggtctccagctttggctatgagggccttgagtccc

SEQ ID NO: 19663 - DNA, 626 bp, Macaca Mulatta
gcccccagaaggagccagtgtgggcatccagggcctagtgggtcattggccatccccgcctgcctatggctctgagcaggtcccagagctgctgttcctccactgcttgcccatagggctgcctggttgactctccttcccattgtttacagtgaaggtgtcattcacaaaaactcaaggactacaattctccttcctccccttagtttactcctggtttttaccccaccctcaaccctctccagcataaaacctagtgagctaaagactttatttgcagaaggagatcaagaggctgggggtaaggccaagaaggtaggaggaaaatggagacctgggctggagaagaaccttctctgtgtcccaggtgtgcctggcagtatggtttcctcttcctctgtgcctgtgcagcattcatcccagctggccatggggttcaggttccttcttccctccctcctgtgaagttacactgtaggacacaagctgtgagcaatctgcagtctactgtccctgtgtgttggcgttcttagcttttttgacaaactcttttttccaggcggtagtaggacaatgaaaattgttctgagcaaaggaaagaaaactgactttgttgcacttttagt

SEQ ID NO: 19664 - DNA, 2197 bp, Macaca Mulatta
  misc_feature (1)...(2197): n = A,T,C or G
gagtcgggcgcgcgccggcagggtctccattgcctgctgcgcacccggactagcggctgccctcggcctcctcgccttggacgcggaagactcccgggcccccaagggctccttgcggaagttcctggagcacttctccggggccggcaaggccatcggcgtgctgaccagcgggggacatgctcaaggnnnnnnnnnnnnnnnnnnnnnnnnnnnnnnnnnnnnnnnnnnnnnnnnnnnnnnnnnnnnnnnnnnnnnnnnnnnnnnnnnnnnnnnnnnnnnnnnnnnnnnnnnnnnnnnnnnnnnnnnnnnnnnnnnnnnnnnnnnnnnnnnnnnnnnnnnnnnnnnnnnnnnnnnnnnnnnnnnnnnnnnnnnnnnnnnnnnnnnnnnnnnnnnnnnnnnnnnnnnnnnnnnnnnnnnnnnnnnnnnnnnnnnnnnnnnnnnnnnnnnnnnnnnnnnnnnnnnnnnnnnnnnnnnnnnnnnnnnnnnnnnnnnnnnnnnnnnnnnnnnnnnnnnnnnnnnnnnnnnnnnnnnnnnnnnnnnnnnnnnnnnnnnnnnnnnnnnnnnnnnnnnnnnnnnnnnnnnnnnnnnnnnnnnnnnnnnnnnnnnnnnnnnnnnnnnnnnnnnnnnnnnnnnnnnnnnnnnnnnnnnnnnnnnnnnnnnnnnnnnnnnnnnnnnnnnnnnnnnnnnnnnnnnnnnnnnnnnnnnnnnnnnnnnnnnnnnnnnnnnnnnnnnnnnnnnnnnnnnnnnnnnnnnnnnnnnnnnnnnnnnnnnnnnnnnnnnnnnnnnnnnnnnnnnnnnnnnnnnnnnnnnnnnnnnnnnnnnnnnnnnnnnnnnnnnnnnnnnnnnnnnnnnnnnnnnnnnnnnnnnnnnnnnnnnnnnnnnnnnnnnnnnnnnnnnnnnnnnnnnnnnnnnnnnnnnnnnnnnnnnnnnnnnnnnnnnnnnnnnnnnnnnnnnnnnnnnnnnnnnnnnnnnnnnnnnnnnnnnnnnnnnnnnnnnnnnnnnnnnnnnnnnnnnnnnnnnnnnnnnnnnnnnnnnnnnnnnnnnnnnnnnnnnnnnnnnnnnnnnnnnnnnnnnnnnnnnnnnnnnnnnnnnnnnnnnnnnnnnnnnnnnnnnnnnnnnnnnnnnnnnnnnnnnnnnnnnnnnnnnnnnnnnnnnnnnnnnnnnnnnnnnnnnnnnnnnnnnnnnnnnnnnnnnnnnnnnnnnnnnnnnnnnnnnnnnnnnnnnnnnnnnnnnnnnnnnnnnnnnnnnnnnnnnnnnnnnnnnnnnnnnnnnnnnnnnnnnnnnnnnnnnnnnnnnnnnnnnnnnnnnnnnnnnnnnnnnnnnnnnnnnnnnnnnnnnnnnnnnnnnnnnnnnnnnnnnnnnnnnnnnnnnnnnnnnnnnnnnnnnnnnnnnnnnnnnnnnnnnnnnnnnnnnnnnnnnnnnnnnnnnnnnnnnnnnnnnnnnnnnnnnnnnnnnnnnnnnnnnnnnnnnnnnnnnnnnnnnnnnnnnnnnnnnnnnnnnnnnnnnnnnnnnnnnnnnnnnnnnnnnnnnnnnnnnnnnnnnnnnnnnnnnnnnnnnnnnnnnnnnnnnnnnnnnnnnnnnnnnnnnnnnnnnnnnnnnnnnnnnnnnnntgggactcctagagctgtccgccacccgggagaagaacaaggagttctgtgtgcccatggtcatggttcccgctactgtgtccagcaatgtgctgggttccaattttagcatcagggcagacacagccctcaacactatcaccgacnnnnnnnnnnnnnnnnnnnnnnnnnnngcggaaccaagcggcgcgtgttcatcatcgagaccatgggcggttactgtggctacctggccaacatgggggggctcgcggccggagccgatgccgcatacattttcgaagagcccttcgacatcacggatctgcagnnnnnnnnnnnnnnnnnnnnnnnnnnnnnnnnnnnnnnnnnnnnnnnnnnnnnnnnnnnnnnnnnnnnnnnnnnnnnnnnnnnnnnnnnnnnnnnnnnnnnnnnnnnnnnnnnnnnnnnnnnnnnnnnnnnnnnnnnnnnnnnnnnnnnnnnnnnnnnnnnnnnnnnnnnncagggtggggcaccttctccatttgatagaaactttggaaccaaaatctctgccagagctatggagtagatcactgcaaaactcgaggaggcccagggcagag

SEQ ID NO: 19665 - DNA, 1141 bp, Macaca Mulatta
  misc_feature (1)...(1141): n = A,T,C or G
ggcacagtaatgacgacgatgtgtacagggcgcctccaattgaccgttccatccttcccactgctccacgggctgctcgggaacccaatatcgaccggagccgtcttcccaaatcgccaccctacactgcttttctagggaacctaccctatgatgtgacagaagaatcaattaaggaattctttagaggattaaatnnnnnnnnnnnnnnnnnnnnnnnnnnnnnnnnnnnnnnnnnnnnnnnnnnnnnnnnnnnnnnnnnnnnnnnnnnnnnnnnnnnnnnnnnnnnnnnnnnnnnnnnnnnnnnnnnnnnnnnnnnnnnnnnnnnnnnnnnnnnnnnnnnnnnnnnnnnnnnnnnnnnnnnnnnnnnnnnnnnnnnnnnnnnnnnnnnnnnnnnnnnnnnnnnnnnnnnnnnnnnnnnnnnnnnnnnnnnnnnnnnnnnnnnnnnnnnnnnnnnnnnnnnnnnnnnnnnnnnnnnnnnnnnnnnnnnnnnnnnnnnnnnnnnnnnnnnnnnnnnnnnnnnnnnnnnnnnnnnnnnnnnnnnnnnnnnnnnnnnnnnnnnnnnnnnnnnnnnnnnnnnnnnnnnnnnnnnnnnnnnnnnnnnnnnnnnnnnnnnnnnnnnnnnnnnnnnnnnnnnnnnaggctatgattcccggataggcagtggcagaagagcatttggcagtgggtatcgcagggatgatgactacagaggaggcggggaccgctatgaagaccgatacgacagacgggatgatcggtcgtggagctccagagatgattactctcgggaagattataggcgcgatgacagaggnnnnnnnnnnnnnnnnnnnnnnnnnnnnnnnnnnnnnnnnnnnnnnnnnnnnnnnnnnnnnnnnnnnnnnnnnnnnnnnnnnnnnnnnnnnnnnnnnnnnnnnnnnnnnnnnnnnnnnnnnnnnnnnnnnnnnnnnnnnnnnnnnnnnnnnnnnnnnnnnnnnnnnnnnnnnnnnnnnnnnnnnnnnnnnnnnnnnnnnnnnnnnnnnnnnnnnnnnnnnnnnnnagacacccaagctggcgaagtgaagaaactcaggaacgggaacggtcgaggacaggaagtgagtcatcacagactgggacctccgccacatctggcaga

SEQ ID NO: 19666 - DNA, 871 bp, Macaca Mulatta
  misc_feature (1)...(871): n = A,T,C or G
tgaggctacctattgtagatattgcaccctatgacattggtggtcctgatcaagaatttggtgtggacgttggccctgtttgctttttataaaccaaactctatctgaaatcccaacaaaaaaaaattaactccatatgtgttcctcttgttctaatcttgtcaaccagtacaagtgaccaacaaaattccagttatttatttccaaaatgtttgggaagagtataatttgacaaagaaaactgannnnnnnnnnnnnnnnnnnnnnnnngttccaccaaatacaattcaaatgctttttgttttatttttttaccaattccaatttcaaaatgtctcaatggtgctataataaataaacttcaacactcttaacgataacaacactgtgttacattcctttgaatcctaccccatctgcagagcaatgactgtgcttcctagtaaaagataaccctttctttctgaaatagtccatatgaaattacaaaagcccccccctattttaactaccctcactgatccagaaaacccagattggaattctaatgagtccccgaaagaccaaacaaaaattttttttacgtcggatggaaacgccacaaaatttcacctgacttaattcccttgggcaacatcggccttcaacaagaaacaaactgtgcccgcccggaaattcttccgaaaatatttcttctccagccctgcattccttcccctcacgctggcatattcaaccgccttcttgcacccggcggcccacccccttgcttcctcggccaactcgctgcgtgtacggacatccttccatttgtcccggcaaacggttccctgatagcacctgtgtgtctatgcgggcccgcaccccctac

SEQ ID NO: 19667 - DNA, 821 bp, Macaca Mulatta
gggcttttcgaggaagacgcggtcgtaggacttgcggatctttggttcgcacgctcctgctcctgactcaccgctgttcgctctcgccgaggaacaagtcggtcaggaagccgcgcagcaggcatggcttttaaggatactggaaaaacacccgtggagccggaggtggcaattcaccgaattcgaatcaccctaacgagccgcaacgttaaatccttggaaaaggtgtgtgctgacttgatcagaggcgcgaaggaaaagaacctgaaagtgaaaggaccagttcgaatgcctaccaagactttgagaatcactacaagaaaaactccttgtggtgaaggttctaagacatgggatcgtttccagatgagaatccacaagcgactcattgacttgcacagtccttctgagattgttaagcagattacttccctcagtattgagccaggagttgaggtggaagtcacctttgcagatgcttaagtcaacctattttaataaattgatttacccgttggttaaacctgtctttatacatttttatttttaattcccttgtcgggccgccttcggccctcgaagaaacttttttaaaaccctttcgttttgggtccgcggggccccattagggtaaatggaaacatggtccttaacctgttttccctaggggaaatcccgggttcctggacatagtggcttgggattcctccccccaaataaaaaaagccccgggggggcaaacgagagagtttcctgaacaaaatccccaaagggagtcttcgtagaggccctttactggggattttttccaacacgagggg

SEQ ID NO: 19668 - DNA, 162 bp, Macaca Mulatta
  misc_feature (1)...(162): n = A,T,C or G
ggcacacaaaccaatggtctggactttcagaagcagcctgtgcctgtaggaggagcaatctcaacagcccaggcgcaggctttccttggacatctccatcaggtnnnaggtccaactcgctggaacaagtttacaggctgctgctcagtctttaaatgtaca

SEQ ID NO: 19669 - DNA, 627 bp, Macaca Mulatta
  misc_feature (1)...(627): n = A,T,C or G
tnnnnnnnnnnnnnnnnnnnnnnnnnngttnnnnnnnnnnnnnnnnnnnnnnntttcatcttttgaataagctctgtgaaagacatcctaagcactgtatgagacacaacagaatattttttcttccagtattaataatatttaaaagactttggcaaacattttaaagcaactcttctatataatcagtttgattatctgaattagaaaatacccctggataatcatgttattgatacacttttcttttttattgagatggagtctcgnnnnnnnnnnnnnnnnnnnnnacagtggcgcgatctcggctcagtgcaatctccgcttctggggttccagcnnnnnnnnnnnnnnnnnnnnnnnnnnnnnnnnnnnnnnnnnnnnatgccaccacgcaggactaatttttttatctttagtacagatgggtttcaccatgttggtcaggttggcttgacgcacatttcttataggtacgtttggaaattgcttcctaaacacaataaacactgtgtacaggtttttaaaatgtcctggatacacattaattttctgaaaccagtctgggcaaacttgcccagaatccattattgctagctccaataatcctgagagatctaactaaca

SEQ ID NO: 19670 - DNA, 2267 bp, Macaca Mulatta
  misc_feature (1)...(2267): n = A,T,C or G
tatatgagggtatcaaataaaattgctactacttacctaccacatgccaagcactgtgctcagggctaaacggacactgcctttggtgatcacagcagcttctacagtgtatggttctgtgccaatgtattgatatgagggcaaaaatgtacagtaaatagattatccagctggtaagtgatgcggcagattgagtccttccttctgtgattcggtagagactgtcagcccaagatgctttaagtgcacaacattatagggaatacctgagtgcctggccaaagggatatttggtctggtcatctctgggtgcctgattgccaagctaaggaccaggcaatgtgcctttgcatcagcaacaaccagcatcccttgaccaggcctgggccagagtattggcctcttctcagcccctgatcctgtgaagtaaggatgtgggggaagacctggcaaggacaacagatggaacacaaaaagtagtaattctcaggccatcatcagtggagccatgttaatgcaatccgatggcttctctagggtccacaggaagtgaagaatctgtttcccaacagtagcctcagaaaacccagctgggctcctaaccttactgtaaacccctttaatggcttcattagagcaggcattcagctcactgttctattcatnnnnnnnnnnnnnnnnnnnnnnnnnnnnnnnnnnnnnnnnnnnnnnnnnnnnnnnnnnnnnnnnnnnnnnnnnnnnnnnnnnnnnnnnnnnnnnnnnnnnnnnnnnnnnnnnnnnnnnnnnnnnnnnnnnnnnnnnnnnnnnnnnnnnnnnnnnnnnnnnnnnnnnnnnnnnnnnnnnnnnnnnnnnnnnnnnnnnnnnnnnnnnnnnnnnnnnnnnnnnnnnnnnnnnnnnnnnnnnnnnnnnnnnnnnnnnnnnnnnnnnnnnnnnnnnnnnnnnnnnnnnnnnnnnnnnnnnnnnnnnnnnnnnnnnnnnnnnnnnnnnnnnnnnnnnnnnnnnnnnnnnnnnnnnnnnnnnnnnnnnnnnnnnnnnnnnnnnnnnnnnnnnnnnnnnnnnnnnnnnnnnnnnnnnnnnnnnnnnnnnnnnnnnnnnnnnnnnnnnnnnnnnnnnnnnnnnnnnnnnnnnnnnnnnnnnnnnnnnnnnnnnnnnnnnnnnnnnnnnnnnnnnnnnnnnnnnnnnnnnnnnnnnnnnnnnnnnnnnnnnnnnnnnnnnnnnnnnnnnnnnnnnnnnnnnnnnnnnnnnnnnnnnnnnnnnnnnnnnnnnnnnnnnnnnnnnnnnnnnnnnnnnnnnnnnnnnnnnnnnnnnnnnnnnnnnnnnnnnnnnnnnnnnnnnnnnnnnnnnnnnnnnnnnnnnnnnnnnnnnnnnnnnnnnnnnnnnnnnnnnnnnnnnnnnnnnnnnnnnnnnnnnnnnnnnnnnnnnnnnnnnnnnnnnnnnnnnnnnnnnnnnnnnnnnnnnnnnnnnnnnnnnnnnnnnnnnnnnnnnnnnnnnnnnnnnnnnnnnnnnnnnnnnnnnnnnnnnnnnnnnnnnnnnnnnnnnnnnnnnnnnnnnnnnnnnnnnnnnnnnnnnnnnnnnnnnnnnnnnnnnnnnnnnnnnnnnnnnnnnnnnnnnnnnnnnnnnnnnnnnnnnnnnnnnnnnnnnnnnnnnnnnnnnnnnnnnnnnnnnnnnnnnnnnnnnnnnnnnnnnnnnnnnnnnnnnnnnnnnnnnnnnnnnnnnnnnnnnnnnnnnnnnnnnnnnnnnnnnnnnnnnnnnnnnnnnnnnnnnnnnnnnnnnnnnnnnnnnnnnnnnnnnnnnnnnnnnnnnnnnnnnnnnnnnnnnnnnnnnnnnnnnnnnnnnnntggccttctacttggctacacagggccggacaaggcgatcccatcttggttagaccaccacctcagagtatggagctcagagggggcaggcatgaagtttccttggctggtgcacctagaattggctgagctcatgagaagttgatatagaacagtgcttgccacagagtggggactcggtaagcacttaatgaatgaatgaattctaagtcaatccaagagcctgatgatttcttgaaaagggtgttagctaaaagatcttaaggcatgattgtggaatctgtagttgcaatagaacacagaaagaggaagctttctgcccccttaacactgagctgttgtgttttaaagcttgctcacatcttggcacagttaagagacagtcaccccaggactcaaaaatagggaaatagcagtaacacaggggaa

SEQ ID NO: 19671 - DNA, 216 bp, Macaca Mulatta
actgtagtttggtatttccctttactttggtggcctgcttccctcatgccctggaatacaactcagagctccaggcagcggaaccatctgttgttttgtttgccagaaagtgcaccctgtatggtctcctgtctaagttggaaatattatgcatgtgcaggactattcgagtattttataaacagtagcacacaataaattccatgcatgggccgc

SEQ ID NO: 19672 - DNA, 791 bp, Macaca Mulatta
  misc_feature (1)...(791): n = A,T,C or G
gggctttctttttgaggaagacgcggtcgtaggacttgcggatctttggttcgcacgctcctgctcctgactcaccgctgttcgctctcgccgaggaacaagtcggtcaggaagccgcgcagcaggcatggcttttaaggatactggaaaaacacccgtggagccggaggtggcaattcaccgaattcgaatcaccctaacgagccgcaacgttaaatccctggaaaaggtgtgtgctgacttgatcagaggcgcgaaggaaaagaacctgaaagtgaaaggaccagttcgaatgcctaccaagactttgagaatcactacaagaaaaactccttgtggtgaaggttctaagacatgggatcgtttccagatgagaatccacaagcgactcattgacttgcacggtccttctgagattgttaaggagattacttccatcagtattgagccaggagttgaggtggaagtcaccattgcagatgcttgagtcaactattttaatagattgattagcagttgctacncggagggaggagtgaagagaatgaggcgcatgtcggggcggccttccggccctcgaaaaacgttgctagaaccattcggtttttggcgcgccggggccccacttaagggtaaggggaaattgggggcgattacgtggttttcccaagggggagacccgggggacatggactaaggggctttggagatttctcgcggcaattaagaaaaacggcccgggggggggaaagacgcggagcgtttttcgttgacagcaaaggtcccgcaag

SEQ ID NO: 19673 - DNA, 742 bp, Macaca Mulatta
  misc_feature (1)...(742): n = A,T,C or G
ggaccaaggctttaacgtgtctgtgcagggtattatcatctaccgagccgcctacttcggtatctatgacactgcaaagggaatgcttccggatcccaaaaacactcacatcgtcatcagctggatgatcgcacagactgtcactgctgttgctgggttgacttcctatccatttgatactgttcgccgccgcatgatgatgcagtcagggcgcaaaggaactgacatcatgtacacaggcacgcttgactgctggaggaagatagctcgtgatgaaggaggcaaagcttttttcaagggtgcatggtccaatgttctcaggggcatgggtggtgcttttgtgcttgtcttgtatgatgaaatcaagaagtacacataagttatttcctaggatttttccccctgtgaacaggcatgttgtattatataacatatcttgaacattcttgacagactcctggctgtcagtttctcagtggcaactatttactggttgaaaatgggaagcaataatattcatctgaccagttttctcttaaagccatttccatgatgatgatgggactcaattgtattttttatttcagtcactcctgataaataacaaatttggagaaataaaaatatctnnnnannnnnnnnnnnnnnnnnnnnnncatgtcggccnnnnnnnnnnnnnnnnnnnnnnnnnnnnnnnnnnnnnnnnnnnnnnnnnnnnnnnnnnnnnnnnnnnnnnnnnnng

SEQ ID NO: 19674 - DNA, 619 bp, Macaca Mulatta
  misc_feature (1)...(619): n = A,T,C or G
tcagatgctgcccggagagtgacggatgaggagagctatgacacagagtcagagttcacggagttcacggaggatgaggtgagtctgtgaactccttgggctctctaactaatgagggaccattcccttcaccctcccgggcccctagaactgctccttatcagaggggtatctacataatgagtctctcaaatttctgtgcataaccagtatcccaataatgtnnnnnnnnnnnnnnnnnnnnnnncttacccnnnnnnnnnnnnnngnnnnnnnnnnnnnnnnnnnnnnntgggagttaaaggcaaactccctcagcctgtaaagttcattgtatttgggctatggagaatggagtccaagggttatttccagtagcggcctccccatcccagtggcttggcagagcttcggaagtttaatgtgtcttctttccccttgttttcagctgccctatgacgactgtgtgtttggaggccagcgtctgacattatgagcgcaaaggggctgaaagaacatggacttgtatatttgtacaaaaaaaagtttattattctaaaaaaagaaaacacgaaaacaaattacagggtgtacttatagccacactgaacactgcctg

SEQ ID NO: 19675 - DNA, 178 bp, Macaca Mulatta
  misc_feature (1)...(178): n = A,T,C or G
nagaaggaactgaaaggctttaaaactatcatgctgaattgcatgtccttgaggagtgcccaggctgtattcccagctattgctcaggagatttgtcaggaagaggtatccaagccagctgggaaggacatgatgaggaaattagaaaaacatatgactgcagacaagggccccatga

SEQ ID NO: 19676 - DNA, 329 bp, Macaca Mulatta
  misc_feature (1)...(329): n = A,T,C or G
aaatttgtgtcatgtttgggaccaccttaggtattcctgctcccctaaagaatgattacgnngtgttattgaagactgacaagagtcttntatttgggagccacgatgcagggaagtgttacttgtgctataattgcttttgtgctaaatatgaattgtctcaaaattagctatgtaaaatagccaggttccactggttcctgctgaggtccccttccttctgggctgtgaattcctgtacatatttctctactttttgtatcagggcttcaattccattatgttttaatgttgtctctngaagaatgaaacttgtgattttttttttt

SEQ ID NO: 19677 - DNA, 1758 bp, Macaca Mulatta
  misc_feature (1)...(1758): n = A,T,C or G
aagatgagaaaccccccataagagccttgtctccagagtttcacaaggaaagaggaacataagctgcagtgatcctgggggttcagcaggtggtccagcaaaaaagaaagtggccaaggtgactgttaaatctgaaaacctcaaggttataaaggatgaagccttcagcgatggggatgacttcaggncagggactttccaagtgacctcaagaagacacaccatctgaagaaaggggctaccatgaatgaagacagcaacgaagaagaggaagaaagtgaagatgactgggaagaggttgaagnnnnnnnnnnnnnnnnnnnnnnnnnnnnnnnnnnnnnnnnnnnnnnnnnnnnnnnnnnnnnnnnnnnnnnnnnnnnnnnnnnnnnnnnnnnnnnnnnnnnnnnnnnnnnnnnnnnnnnnnnnagtgaaaagataaaactggagtttgagacacatcttcggagggagagtgaaacgtttcaataaagaggtccacgaggacacacacaaggnnnnnnnnnnnnnnnnnnnnnnnnnnnnnnnnnnnnnnnnnnnnnnnnnnnnnnnnnnnnnnnnnnnnnnnnnnnnnnnnnnnnnnnnnnnnnnnnnnnnnnnnnnnnnnnnnnnnnnnnnnnnnnnnnnnnnnnnnnnnnnnnnnnnnnnnnnnnnnnnnnnnnnnnnnnnnnnnnnnnnnnnnnnnnnnnnnnnnnnnnnnnnnnnnnnnnnnnnnnnnnnnnnnnnnnnnnnnnnnnnnnnnnnnnnnnnnnnnnnnnnnnnnnnnnnnnnnnnnnnnnnnnnnnnnnnnnnnnnnnnnnnnnnnnnnnnnnnnnnnnnnnnnnnnnnnnnnnnnnnnnnnnnnnnnnnnnnnnnnnnnnnnnnnnnnnnnnnnnnnnnnnnnnnnnnnnnnnnnnnnnnnnnnnnnnnnnnnnnnnnnnnnncagccaagttctagaaaaccacagcaagccaaagactagcaaaggaaccaaacaagaggaaacctttgctaagggcacatgtaagccaagtgccaaagggaagaggaacaagggaggcagaaagaaacggaggaagccctcctccagcgaggaagaccagggcccaggagacaagcaggagaaggcaacccagcgacgtccgcatggccgggagcggcgggtggcctctagggtgtcttataaagaggatagtgggagtgatgaagctggcagtggctctgattttgagctctccagtggagaagcctctgatccctctgatgaggattccgaacctggccctccaaagcagaggaaggcccccgctcctcggaggacaaaggctgggtccaagagtgcctccaggacccaatgtgggagccatcgtaaggacccaagcttgccagtggcatcctcaagctcttcgagcagtaaaagaggcaagaaaatgtccagtgatggtgagaaggcagaagaaaggagcatagctggtgtagaccagtggctagaggtgttctgtgagcaggaggaaaagtggatatgtgtggactgtgtgcacggcgtggtgggccagcctctgacctgttacaggtacgccaccaagcccatgacctatgtggtgggcattgacagtgacggctgggtccgagatgtcacacagaggtacgacccagcctggatgacagtgacccgcaagtgccgagttgatgctgagtggtgggcagagaccttgagaccataccagagcccatttatggacagggagaagaaagaagac

SEQ ID NO: 19678 - DNA, 634 bp, Macaca Mulatta
  misc_feature (1)...(634): n = A,T,C or G
agcctttaacttcctttaggcaaaggaaaggtggctcaacttccagttccccttccagacgccgagggagtcgatcaaggtcacgctccagatcccctggtcgaccacctaaaagtgcccgccgatctgcttctgcttcccaccaggccaacattaaggaagcaaggagggaagtggaagttaaattgactccgctgattctnnnnnnnnnnnnnnnnnnnnnnnnnnnnnnnnnnnnnnnnnnnnnnnnnnnnnnnnnnnnnnnnnnnnnnnnnnnnnnnnnnnnnnnnnnnnnnnnnnnnnnnnnnnnnnnnnnnnnnnnnnnnnnnnnnnnnnnnnnnaagtgactctccctcgagaagcacattgaaaattataatattttataacctgnnnnnnnnnnnnnnagcctcaaatgttcatgaattgtttgcaggtgtgtttctcatcatgtttggcctgcctgtgttcctcttcctgttgctgttgatatgtaaacagaaagatcccagtcttctgaatttccctcctcctttgccagctttgtatgagttatgggaaaccagagtatttggggtctacctcctgtggtttttgattcaagtcctgttctacctactgccaattggaaagg

SEQ ID NO: 19679 - DNA, 548 bp, Macaca Mulatta
  misc_feature (1)...(548): n = A,T,C or G
gcaatggccaatttcttctcgggcagctgtgtcccgtgtgcggatgggacggacttcccccagctgtgtcaactgtgtccagggtgtggctgctccacccttaatcaatacttcagctactcaggagccttcaagtgnnnnnnnnnnnnnnnnnnnnnnnnnnnnnnnnnnnnnnnnnnnnnnnnnnnnnnnnnnnnnnnnnnnnnnnnnnnnnnnnnnnnnnnnnnnnnnnnnnnnnnnnnnnnnnnnnnnnnnnnnnnnnnnnnnnnnnnnnnnnnnnnnnnnnnnnnnnnnnnnnnnnnnnnnnnnnnnnnnnnnnnnnnnnnnnnnnnnnnnnnnnnnnnnnnnnnnnnnnnnnnnnnnnnnaggaacattttggtaaagacaaatcaaaagaattccaactattcagctctcctcatgggaaggacctgctgtttaaggactctgcccacggatttttaaaagtccccccaaggatggatgccaagatgtacctgggctatgagtatatcactgccatccggaatctacgggaaggcacatgn

SEQ ID NO: 19680 - DNA, 489 bp, Macaca Mulatta
agctgctagctgacaaatacaattctgaaggaatccaaatgtgactgaaaattgttagagaaaacaacattagaaaatggcgcaaaatcattctgccccgggagagaatgtgggggtgcaaaacccttttcctcccagcctatttttgtaaataaaatgtttaaacttgaaatacaaatcgatgtttatatttcctatcattttgtattttatggtatttggtacaactggctgatactaagcacgaatagatattgatgtcatggagtgctgtgatccagagtttttaattgtgaggcatgttctgatatgtttataggcaaacaaataaaacagcaaacttttttgccacatgtttgctagaaaatgattatactttattggagtgacatgaagtttgaacactaaacagtattgtatgagaattactacagatcttgtatgttttagtttttttgtttgaactttctggaactgttttatagaaga

SEQ ID NO: 19681 - DNA, 118 bp, Macaca Mulatta
tggatctggcttttctgcttcgtataattatcaggagccaccatcctctcatatacaacctgggctctgtggacttggaaacctgggaaacacctgcttcatgaactccgctttgcag

SEQ ID NO: 19682 - DNA, 495 bp, Macaca Mulatta
ctgaatctcttgctctattgtgtcccacagccctcctggaagcctgtgcattcctccagaagtaaaacccaagaagatggcccagcctccccaaggaagcctcagccattcactgcctccagcccttctccccgggtgtgctggggccttggcctccctggctgaaggtggggattgcccatccatctgctcacaattccctgctgtcgtcttagcaagaaataaaatgagaaatattgttgatattctctccttataaagtgtcactcatcttttctagaattttacactgaaatcacatgcctgacaaaatacctgtacagttggaccttcccttccaagtttttcaggtccagcccctcctctttcttgcagtcttgggtatgatgcccaagggtctggaatttaaggccaagccaagcactggttttcccaaggggatctggttggttattcacatagctgtctcagtgcacgtgcatgtgtgtgcctggg

SEQ ID NO: 19683 - DNA, 451 bp, Macaca Mulatta
aaagatggcttattcacatggaaatgtacaccagtttagccctgggccctccctttaccttcatatgtataaaagcttacacagtttacagaaaataaattgttttattttctctaaaataactagtaaaaaataaaacagatgtcagttgttgagtccagcagtaccttttttttcatccctccagatatggcattttggttcttagggaaacaagacagctgtaacatcagcccactggcatctgtttttggcactgaagagaagtgttcagtagagttaagattattgtttctcacgtcagcactgggaccctagggaagggcagtggtgttcctaatgttaacaatctagcagtactgttcttttcctcacctctccccacccactttctaaaacaactagaatttttacagaaatccaagttactgtgataagatttataactcca

SEQ ID NO: 19684 - DNA, 2959 bp, Macaca Mulatta
  misc_feature (1)...(2959): n = A,T,C or G
ccagttaagaagaacctgctcaccatgatggatgaggcctatattcagccacagcctctgggagtggtgctgataatcggagcttggaactacccctttgttctcatcattcagccactgataggagccatcgctgcagnnnnnnnnnnnnnnnnnnnnnnnnnnnnnnnnnnnnnnnnnnnnnnnnnnnnnnnnnnnnnnnnnnnnnnnnnnnnnnnnnnnggacctctatgttgttattaatggtggtgttgaggaaaccacggagctcctgaagcagcgatttgaccacattttctatacgggaaatactgcagttggcaaaattgtcatggaagcnnnnnnnnnnnnnnnnnnnnnnnnnnnnnnnnnnnnnnnnnnnnnnnnnnnnnnnnnnnnnnnnnnnnnnnnnnnnnnnnnnnnnnnnnnnnnnnnnnnnnnnnnnnnnnnnnnnnnnnnnnnnnnnnnnnnnnnnnnnnnnnnnnnnnnnnnnnnnnnnnnnnnnnnnnnnnnnnnnnnnnnnnnnnnnnnnnnnnnnnnnnnnnnnnnnnnnnnnnnnnnnnnnnnnnnnnnnnnnnnnnnnnnnnnnnnnnnnnnnnnnnnnnnnnnnnnnnnnnnnnnnnnnnnnnnnnnnnnnnnnnnnnnnnnnnnnnnnnnnnnnnnnnnnnnnnnnnnnnnnnnnnnnnnnnnnnnnnnnnnnnnnnnnnnnnnnnnnnnnnnnnnnnnnnnnnnnnnnnnnnnnnnnnnnnnnnnnnnnnnnnnnnnnnnnnnnnnnnnnnnnnnnnnnnnnnnnnnnnnnnnnnnnnnnnnnnnnnnnnnnnnnnnnnnnnnnnnnnnnnnnnnnnnnnnnnnnnnnnnnnnnnnnnnnnnnnnnnnnnnnnnnnnnnnnnnnnnnnnnnnnnnnnnnnnnnnnnnnnnnnnnnnnnnnnnnnnnnnnnnnnnnnnnnnnnnnnnnnnnnnnnnnnnnnnnnnnnnnnnnnnnnnnnnnnnnnnnnnnnnnnnnnnnnnnnnnnnnnnnnnnnnnnnnnnnnnnnnnnnnnnnnnnnnnnnnnnnnnnnnnnnnnnnnnnnnnnnnnnnnnnnnnnnnnnnnnnnnnnnnnnnnnnnnnnnnnnnnnnnnnnnnnnnnnnnnnnnnnnnnnnnnnnnnnnnnnnnnnnnnnnnnnnnnnnnnnnnnnnnnnnnnnnnnnnnnnnnnnnnnnatattactgaagaatgatcccgttcaacctcctagtgcctctactgaattattcctcttttaaatggttaatgaaccaataatttttaaatcctaccaaaaatagtaagaaaatatgcaaacacactgtgatcaaactcaaaagtcattgccattcatcattaataaaacttgccatttcaaccaaatcccaacattccctaataggatattcagggaacctgccttaaattgtgcttatctaaatcttggagctttgagctaggggaggagaatgtattagactaaatacaaactttaagggagtctcagaacctacaagtgaatccttccctccaggtaatggcactnnnnnnnnnnnnnnnnnnnnnnnnnnnnnnnnnnnnnnnnnnnnnnnnnnnnnnnnnnnnnnnnnnnnnnnnnnnnnnnnnnnnnnnnnnnnnnnnnnnnnnnnnnnnnnnnnnnnnnnnnnnnnnnnnnnnnnnnnnnnnnnnnnnnnnnnnnnnnnnnnnnnnnnnnnnnnnnnnnnnnnnnnnnnnnnnnnnnnnnnnnnnnnnnnnnnnnnnnnnnnnnnnnnnnnnnnnnnnnnnnnnnnnnnnnnnnnnnnnnnnnnnnnnnnnnnnnnnnnnnnnnnnnnnnnnnnnnnnnnnnnnnnnnnnnnnnnnnnnnnnnnnnnnnnnnnnnnnnnnnnnnnnnnnnnnnnnnnnnnnnnnnnnnnnnnnnnnnnnnnnnnnnnnnnnnnnnnnnnnnnnnnnnnnnnnnnnnnnnnnnnnnnnnnnnnnnnnnnnnnnnnnnnnnnnnnnnnnnnnnnnnnnnnnnnatgcctgtaatcccagcactttgggannnnnnnnnnnnnnnnnnnnnnnnnnnnnnnnnnnnnnnnnnnnnnnnnnnnnnnngtgagacctcatctctaccaaaaagccatataagctagatgtggtggcatgagcctgtgctcaggacgttgaagcatgaggatcgattgagcctgcaaggccaaggctgcggtgggctgtgattgcaccactgcccttcagcttgggcaacagagcaagaccctgtctcccaaacaaaaaatactgtcataaaagtacttacacgaatcctctctcaggacccgaaggttgcaggttagtaggtcttcaaggacaaatctgtaggtttcttatttctgtagcacagtgcaagtaaaatttcacttttttaaactatagagagatccctttctgaatagcctacagaactgaaagtgagggaaccattgcctctcgcagacaaagaggcgttggatattaggactttggggtttgagagctgcacggggcagacagttggtggatggtctggacacgaagcgagtaagccactgcaattggtcgtactgaaggggatggatggcaaaaggatcccctgagcaagtcagaagttactctcatcagtcgtccacggccacaacctgaggtactcagctgagtggacaaggctgaagaagaggcctgcggaacgcagtgttacctgctggacggggcagggcaggcagnnnnnnnnnnnnnnnnnnnnnnnnnnnnnnnnnnntccccacactcaaaaagactcagctcactcaatgacagaatgtaatttactttatagaatgtctaatcaacttcgttgaataatttgttctattaaggctgtctaaagtacgtgatgtcttcatcatagcatgaagtgtcgagaattcataactagcccagtttaggaaaaagctgctt

SEQ ID NO: 19685 - DNA, 267 bp, Macaca Mulatta
ttaatgcgttacgccagtatggatcgtcagctctgaatattactaatcctggtcagctgccggattccactatttttatatctattaatgcttgcttcccattatagacgttgtagcagtaattgcaagaagttcttgagctgaattcctgttgtgacaacttcctataattacttatagtagataactttttcttttgggttgtatataactctttctataaacttgtgattggacaagcagatatgctgcatccaaatcaaataa

SEQ ID NO: 19686 - DNA, 1336 bp, Macaca Mulatta
  misc_feature (1)...(1336): n = A,T,C or G
aaatataggttagaataagtccttgtgtagcaaatttcaagcataacaaataaaatctaatccttagggtattaatctgacttgaactctgttggtttaccatgttagtaaactgtgctttctgttatctatacataaaacctgagcagcaacttgtccttagaactattgccacattagtctttgcactgtatagcatctggctttatggaacctacgtttaccaaatacaaaaagaaacttctgctttannnnnnnnnnnnnnnnnnnnnttttaaatctgcatttcccccacagcagtgtaagtaggttctgatgtcccaccattttgaatggtttctcagatctttctgaatgaatatttcctgaacattgcactgatatcatcgattagaattttgatatttaatttcatccttatttcctggtagtgaatgcaggaaaagatgtcaggaacataacataaaacagattgggaatttcttgtttccaaagggcatggccttccttagcatcagtttgaagcttttgttatgacttagctgacttgtggcagcggggcaagcaaaaacagtaaaacactgcttgtaaatggcaccacttcttgttaacctccccgcaaaataacttctctgaaagtcatgcacatacctgtgggatttcacacgtccaccatccataaaatgcgattgtctctgtccatccataaaaaagctcaattaatccgtagtcttttaaggctaaacctccctagatcaaagaaaaaataccccttttttctcctggaagggaaaatttcctataaaattgggaatccttaaatccccctcctcccaatattttggtgaccacccgaatacaagagccagggtttttggacactctttattctaagagttatttctcccctatttttttttttgcgcagctccacactatatattttccttttatcggaaagagcccccacgttttccgaaaagaacccttgggaacccatggaaatcagggtggtattctatgggaccgaaaggtggctaaagatatggggcgatagtgcctaataccagttaaaaacactaaaacctttatgtccctacatatgcgttgtaagaacctcaatataacaaccgatcattttctttttgacagattgtgtgggcaactaaatcaaacaaaaaactttcctcacccaatatgtctgttcgataaaaacacatcgcctcattaatatatatatgttatcaaacccgcctttccaccttatttaaaaaggggtacctctttctatgcacaaaaaataggtcctcttttcgcaaagctcttctagatcttt

SEQ ID NO: 19687 - DNA, 361 bp, Macaca Mulatta
ggcatcccgggcccaaatcctagacaaagccacagagtatatccagtatatgcgaaggaaaaaccacacacaccagcaagatattgacgacctcaagcggcagaatgctcttctggagcagcaaggtgagcacccaagctcgtggggcagctggccctgctgtgctctggctgggtcaggctttggcacctaggcctgcagagtcagagccagtcatggagtgtgtgctcagaagcaggcttggtcctgcttcttggggcctgagtagctgagtgttagagccgtcctgaggaaggacctgagatgctagtgaggagacagtggaagctaggaagttggacatctggagacttgtatcttt

SEQ ID NO: 19688 - DNA, 475 bp, Macaca Mulatta
  misc_feature (1)...(475): n = A,T,C or G
ggctgctccattggcctgccttaccccttacctgctgattgcatatgaactcttctctctttctgtacatcgtngtcgtcggagtcgtcgagatcgtcgtggcgctcgtgtgatggccttcgtccgtttagagtagtgtagttagttaggggccaacgaagaagaaagaagacgcgattagtgcagagatgctggaggtggtcagttactaagctagagtaagatagtggagcgaaaagagccaaacctagccggggggcgcacggtcgcccaaaggaggtcgactcgccggcgcttcccatcgcaccgagctccctccgttcctctccctccgctgaggcgcgaggttgcggcgcacagcgcagcgcagcgcaccgactgccgcgggctccgctgggcgattgcagccgagtccgtttctcgtctagctgccgccgcggcgaccgctgcctcgtcttcctcccggacgctagtg

SEQ ID NO: 19689 - DNA, 258 bp, Macaca Mulatta
atgtaattcatgccagggactgacaaaagacttgagacaggatggttattcttgtcagctaaggtcacattgtgcctttttgaccttttcttcctggactattgaaatcaagcttattggattaagtgatatttctacagtgattgaaagggcaatagttaatgagcatgatgagagtttctgatgatcatgtattaaaactgatttttagctttacaaatatatcggtttgcagttacgcagaatccaaagtaaatg

SEQ ID NO: 19690 - DNA, 2050 bp, Macaca Mulatta
  misc_feature (1)...(2050): n = A,T,C or G
gacggggtggctgaacctcgcaggtggcagagaggctcccctggggctgtggggctctgcgtggatccaatggggccgctggtgacctgggtggtccccctcctcctcctcttcctgcgatccaggcaggnnnnnnnnnnnnnnnnnnnnnnnnnnnnnnnnnnnnnnnnnnnnnnnnnnnnnnnnnnnnnnnnnnnnnnnnnnnnnnnnnnnnnnnnnnnnnnnnnnnnnnnnnnnnnnnnnnnnnnnnnnnnnnnnnnnnnnnnnnnnnnnnnnnnnnnnnnnnnnnnnnnnnnnnnnnnnnnnccttagctctgggcgctgttgctacttcgccacaggctcagccaccaggctgcagttctccgaccaggccggggtgtctgtgctgcacaccgtcacgctctgggtggaatcctgggccaggaaccggacagagaaatctcctgaggtgaccctgcagctctacaagtcagnnnnnnnnnnnnnnnnnnnnnnnnnnnnnnnnnnnnnnnnnnnnnnnnnnnnnnnnnnnnnnnnnnnnnnnnnnnnnnnnnnnnnnnnnnnnnnnnnnnnnnnnnnnnnnnnnnnnnnnnnnnnnnnnnnnnnnnnnnnnnnnnnnnnnnnnnnnnnnnnnnnnnnnnnngagtcctgcctctgtcccctggagatgaatgtggcccaggaatttcagctccgacgacggcggctggggagccaggggagttcctggagcaagtggagcagccctgtgtgtgttcccnnnnnnnnnnnnnnnnnnnnnnnnnnnnnnnnnnnnnnnnnnnnnnnnnnnnnnnnnnnnnnnnnnnnnnnnnnnnnnnnnnncagccaacccagctggagcttccagaaggctgtcaagggccggcgcctggagcggaggtcacctaccaactgcagctccacatgctgtcctgcccgtgtaaggccaaggccaccaggaccctgcccctggagaaaatgccctatctctcgggtgctgcctacaatgtggctgtcatctcctcgaaccgatttggtcctggcccaaaccagacgtggcacattcctgctgacacccacacannnnnnnnnnnnnnnnnnnnnnnnnnnnnnnnnnnnnnnnnnnnnnnnnnnnnnnnnnnnnnnnnnnnnnnnnnnnnnnnnnnnnnnnnnnnnnnnnnnnnnnnnnnnnnnnnnnnnnnnnnnnnnnnnnnnnnnnnnnnnnnnnnnnnnnnnnnnnnnnnnnnnnnnnnnnnnnnnnnnnnnnnnnnnnnnnnnnnnnnnnnnnnnnnnnnnnnnnnnnnnnnnnnnnnnnnnnnnnnnnnnnnnnnnnnnnnnnnnnnnnnnnnnnnnnnnnnnnnnnnnnnnnnnnnnnnnnnnnnnnnnnnnnnnnnnnnnnnnnnnnnnnnnnnnnnnnnnnnnnnnnnnnnnnnnnnnnnnnnnnnnnnnnnnnnnnnnnnnnnnnnnnnnnnnnnnnnnnnnnnnnnnnnnnnnnnnnnnnnnnnnnnnnnnnnnnnnnnnnnnnnnnnnnnnnnnnnnnnnnnnnnnnnnnnnnnnnnnnnnnnnnnnnnnnnnnnnnnnnnnnnnnnnnnnnnnnnnnnnnnnnnnnnnnnnnnnnnnnnnnnnnnnnnnnnnnnnnnnnnnnnnnnnnnnnnnnnnnnnnnnnnnnnnnnnnnnnnnnnnnnnnnnnnnnnnnnnnnnnnnnnnnnnnnnnnnnnnnnnnnnnnnnnnnnnnnnnnnnnnnnnnnnnnnnnnnnnnnnnnnnnnnnnnnnnnnnnnnnnnnnnnnnnnnnnnnnnnnnnnnnnnnnnnnnnnnnnnnnnnnnnnnnnnnnnnnnnnnnnnnnnnnnnngacttggcagtggatcaacccagtggacttccaggaagaggcatccctgcaggaggccctggtggtggagatgtcctgggacaaaggcgagaggactgagcttcttgagaaggcagagctacctgagggtgcccctgagctggccctggatacacagctgtccttggaggatggagacaggtgcaaggccaaggtc

SEQ ID NO: 19691 - DNA, 324 bp, Macaca Mulatta
catttgcagcctacctgtgcaatcataggagatggcctaaaggaaggacttgagaaactacctgatatgatcatcaaaagaagaaaaatgttgcggcaacagaaaaagaaaagatgaatatcaatacctattatatctgtgtggagtaggttttctctggtctgattttgacaaatagaagagtgtctacaacctggtttgcctgtctgccctcctggatgctattaaagctttgttttgttgaacaatcagatgcccaactctgttgccttgtggaagatgagtaaatgcagtgcttcttaaagtggtgtcatctccctaccc

SEQ ID NO: 19692 - DNA, 370 bp, Macaca Mulatta
gattaagctcttcagtgccctggtaaatcaggcaggcatacttggaatttggacagatgccgccaattcaggggactatcaagcttgagtttacccctcagagcctgttgccttcttggcgcagggaccccgtccagacgaagagctctgcgcatggcaggcgcccatgccgatgcatggtgggcccgggcggtgtctgtagctcagattgggtctgttccatgtggccagagccccaggacatcgttccttagccagctgctcccttgttgcaatccttgtgtggtcacgggtgtgtcctgaaacggtgactttgcccctcctgccctaggagatttgggtgtattcacagagcagccagcccctgtct

SEQ ID NO: 19693 - DNA, 329 bp, Macaca Mulatta
caaagaaaatatatcactcccattgagaagttcttatcagaatgtgtcacaaaaaacagaagccagccttgcacataagacaattaacagcttactttaaaatcacagtagattaccgtgggtcaagtgattagaatcttagattattaatcatgcagtcattctacaaagaagattgaattctcggggttctttatgaaagcaggcatgttctgtgagttcactttcagtgttatgacagacagtataactactgtgcaactgcagtgcctccaaatagcatgaagtttactgagcagtgtaaacactgttcggatataaacatgaca

SEQ ID NO: 19694 - DNA, 170 bp, Macaca Mulatta
  misc_feature (1)...(170): n = A,T,C or G
gcttagagaaacctccaggagactgctatcatggcagagaaacccaagctccactacctcaatacacggggcagaatggagcccatccggtggctcctggctgcagctggagtagangtttgaagagaaatttctagaatctgcagaagatttggacaagttaagaaatg

SEQ ID NO: 19695 - DNA, 723 bp, Macaca Mulatta
  misc_feature (1)...(723): n = A,T,C or G
agatggactcganccccaacgatatggaggcatcaaagtgcacagcttccccacactcaagttctttcctgccagcgtcgacaggacggtcatcgattacaatggggaacgcacactggatggttttaagaagttcctggagagcggtggccaggatggggcaggggatgatgacgatctcgaggacctggaagaagcagaggagccagacatggaggaagatgatgatcagaaagctgtgaaagatgaactgtaagacggaaagccagacccgggcgctgccgagacctctcggggctgcacacccagcagcagcgcacgcctctgaagcctgcggccctcatctgaaggagggcgtcgccggaaacccagggaacctttctgaagtgacacctcgcccccacacaccgtccattcacccccgtctcttccttctgcttttcggtttttggaaagggatccatctccaggcagcccaccccggtggggcttgtttcttgaaaccgtgatgtacttatgggtctgtccagagtgctcgctggagtgttcagagtctcgctgcctccctcctgcgggaggtttctgctctctttgaaaattccatttgtgggatttttagacatttttcgacatcagggtatttgttccaccttggccaggcttctttggagaacttgtcccccggcggagatgagcgatgaccgcctcccctgtgtctgagtc

SEQ ID NO: 19696 - DNA, 759 bp, Macaca Mulatta
  misc_feature (1)...(759): n = A,T,C or G
ggggcgctgcagctctcccgggagcagggaatcaccctgcgcgggagcgctgaaatcgtggccgagttcttctcattcggcatcaacagcattttatatcagcgtggcatatatccatctgaaacttttactcgagtgcagaaatacggactcaccttgcttgtaactactgatcttgagctcataaaatacctaaataatgtggtggaacaactaaaagattggttatacaagtgttcagttcagaaactggttgtagttatctcaaatattgaaagtggtgaggtcctggaaagatggcagtttgatattgagtgtgacaagactgcaaaagatgacagtgcacccagagaaaagtctcagaaagctatccaggatgaaatccgttcagtgatcagacagataacagctacggtgacatttctgccactgttggaagtttcctgttcatttgatctgctgatttatacagacaaagatttggttgtacctganaaatgggaagagtcgggaccacagtttattaccaattctgaggaagtccgccttcgttcatttactactacaatccacaaagtaaatagcatggtggcctacaaaattcctgtcaatgactgaggatgacgtgaggaaaataatgtaattgtaattttgaaatttggttttcctgaaatcaaatcatctacagttaatatgttttatttcattgggtaattttttacatgggagaaaaccaaaatgatactttactgaaactgt

SEQ ID NO: 19697 - DNA, 237 bp, Macaca Mulatta
tcaaccttttactattaccaaagtacgaggtttcccaattttcagtggctaaatactgttgtcctcttggtttcaggaaaggaaataaaatgctcagcaaaaaaaggggcatgaagtggtctgaaacttgaaaaaagtatttgcccctacataaaaacccactaatcatagttctagtctggacccaaaattgcaagaaatagaatgtttatatctattagaagataatttcattca

SEQ ID NO: 19698 - DNA, 606 bp, Macaca Mulatta
gatccagaaacctggtcacaggcattcagcaacatggatgacatgctgcagaaagcgcatttggttatagaaggaacattcatctacctgagggacagcactgagtttttcattcgcgttagagatggctggaaaaaattacagctaggagaactgatccccattcctgccgacagccctccaccccctgcgctttccagcaacccacatcagcttctgcctccgccaaaccccatttcaagtaccaattacgagaagcctgctctgcatttggctgctctgaacatgccattttctggggacattcgagctgattttcagtgcttcaagcaggccagagctgcaggactgttgtccacctaccgagcattcttatcttcccatttgcaagatctgtccaccattgtgaggaaagcagagagatacagccttcccatagtgaacctcaagggccaagtactttttaataattgggactcaattattactggccatggaggtcagttcaatatgcatattccaatatactcctttgatggtcgagacgtattgacagatccttcatggccccagacggtcatatggcacggctccagcccccatggt

SEQ ID NO: 19699 - DNA, 927 bp, Macaca Mulatta
  misc_feature (1)...(927): n = A,T,C or G
agtgtcgcccttccaaaggcaggaagcgggacttctgctggagtgtggataagtacgggcagcctctcccaggctacaccaccaaggggaaggaggacgtgcactgctacagcatgcatagcaagtagacgcctgccgcnnnnnnnnnnnnnnnnnnnnnnnnnnnnnnnnnnnnnnnnnnnnnnnnnnnnnnnnnnnnnnnnnnnnnnnnnnnnnnnnnnnnnnnnnnnnnnnnnnnnnnnnnnnnnnnnnnnnnnnnnnnnnnnnnnnnnnnnnnnnnnnnnnnnnnnnnnnnnnnnnnnnnnnnnnnnnnnnnnnnnnnnnnnnnnnnnnnnnnnnnnnnnnnnnngcagtttgaattttcttgtcgcttcctatcaaaatactcagagactcgagcacagcacccagacttcatccccccgtggaatgctcaccacatgttggtcgaagcggccaaccactgacttcatgacttaggcggctgtgttgcctatgtagagaacacgcttcgcccccactccctgtacagtgtgcacaggctttattgagaatagggaaacccttacaccccggtcatccggacatcccgacgcatgctcctggagctcacagccttctgtggtgtcatttttgaaacaagggcttgggtccctcgaccaagaataatgtttatatcttcattggcctgtactgcttggggactattggagaaaataaggtggagtcctacttgtttaaaaaaaaatatatctaagaatgttctagggtaatctgggaacctataaaggcagatattacgggccctccttttcaggaaccttcctgaagacatggcctagttgaaggcccaggatggcttttgccatggccccatggggtaggagggacagagagacagggagagtcagcgtacccattcagagg

SEQ ID NO: 19700 - DNA, 286 bp, Macaca Mulatta
atgggcatctatggcagagtgtcatccagacacagggtcacagtgtttccattttggacctcacgatcagacacaggtcacgggtgacacactctcatcctgaacggcatggcactccctccagcacaaacacaaggtcaaggccacactggcacactacaccatacacaacagccacaacagcctcatttggtctgccaggcccctaccacacatcccagcccaacccaggtatgcacagacagattttcacataaatgcagcccatttctccagaacccatttt

SEQ ID NO: 19701 - DNA, 2545 bp, Macaca Mulatta
  misc_feature (1)...(2545): n = A,T,C or G
aggtgtaagccgtggtttcgccttcgtggagttttatcacttgcaagatgctaccagctggatggaagccaatcannnnnnnnnnnnnnnnnnnnnnnnnnnnnnnnnnnnnnnnnnnnnnnnnnnnnnnnnnnnnnnnnnnnnnnnnnnnnnnnnnnnnnnnnnnnnnnnnnnnnnnnnnnnnnnnnnnnnnnnnnnnnnnnnnnnnnnnnnnnnnnnnnnnnnnnnnnnnnnnnnnnnnnnnnnnnnnnnnnnnnnnnnnnnnnnnnnnnnnnnnnnnnnnnnnnnnnnnnnnnnnnnnnnnnnnnnnnnnnnnnnnnnnnnnnnnnnnnnnnnnnnnnnnnnnnnnnnnnnnnnnnnnnnnnnnnnnnnnnnnnnnnnnnnnnnnnnnnnnnnnnnnnnnnnnnnnnnnnnnnnnnnnnnnnnnnnnnnnnnnnnnnnnnnnnnnnnnnnnnnnnnnnnnnnnnnnnnnnnnnnnnnnnnnnnnnnnnnnnnnnnnnnnnnnnnnnnnnnnnnnnnnnnnnnnnnnnnnnnnnnnnnnnnnnnnnnnnnnnnnnnnnnnnnnnnnnnnnnnnnnnnnnnnnnnnnnnnnnnnnnnnnnnnnnnnnnnnnnnnnnnnnnnnnnnnnnnnnnnnnnnnnnnnnnnnnnnnnnnnnnnnnnnnnnnnnnnnnnnnnnnnnnnnnnnnnnnnnnnnnnnnnnnnnnnnnnnnnnnnnnnnnnnnnnnnnnnnnnnnnnnnnnnnnnnnnnnnnnnnnnnnnnnnnnnnnnnnnnnnnnnatcaggcacagcagtgaccaccacctcagcggctgtagtgtcccagagtcctcagctgtataatcaaacctccaatccacctggctctccgnnnnnnnnnnnnnnnnnnnnnnnnnnnnnnnnnnnnnnnnnnnnnnnnnnnnnnnnnnnnnnnnnnnnnnnnnnnnnnnnnnnnnnnnnnnnnnnnnnnnnnnnnnnnnnnnnnnnnnnnnnnnnnnnnnnnnnnnnnnnnnnnnnnnnnnnnnnnnnnnnnnnnnnnnnnnnnnnntactactataattccttaacccagcagtacctttactgggatggggagaaagagacctacgtgccagctgcagagtctagctcccaccagcagacgggcctgcctcctgcaaaagaggggaaagagaagaaggagaaacccaagagcaaaacagcccagcannnnnnnnnnnnnnnnnnnnnnnnnnnnnnnnnnnnnnnnnnnnnnnnnnnnnnnnnnnnnnnnnnnnnnnnnnnnnnnnnnnnnnnnnnnnnnnnnnnnnnnnnnnnnnnnnnnnnnnnnnnnnnnnnnnnnnnnnnnnnnnnnnnnnnnnnnnnnnnnnnnnnnnnnnnnnnnnnnnnnnnnnnnnnnnnnnnnnnnnnnnnnnnnnnnnnnnnnnnnnnnnnnnnnnnnnnnnnnnnnnnnnnnnnnnnnnnnnnnnnnnnnnnnnnnnnnnnnnnnnnnnnnnnnnnnnnnnnnnnnnnnnnnnnnnnnnnnnnnnnnnnnnnnnnnnnnnnnnnnnnnnnnnnnnnnnnnnnnnnnnnnnnnnnnnnnnnnnnnnnnnnnnnnnnnnnnnnnnnnnnnnnnnnnnnnnnnnnnnnnnnnnnnnnnnnnnnnnnnnnnnnnnnnnnnnnnnnnnnnnnnnnnnnnnnnnnngatgaaataccgagaccgagctgcagaaagacgggagaagtacggcattccagaacctccagagcccaagcgcaagaagcagtttgatgctggcactgtgngaattacgagcaacccaccaaagatggcattgaccacagtaacattggcaacaagatgctgcaggccatgggctggcgggaaggctctggcttgggacgaaagtgccaaggcattacagctcccattgaggnaggctcaagttcggctaaagggagctggcctaggagccaaaggcagcgcgtatggtttgtcgggtgccgattcctacaaagatgctgtccggaaagccatgtttgcccggttcactganatggagtnnnnnnnnnnnnnnnnnnnnntgacaaggagcacaagaagtggtccatctnnnnnnnnnnnnnnnnnnnnnnnnnnnnnnnnnnnnnnnnnnnnnnnnnnnnnnnnnnnnnnnnnnnnnnnnnnnnnnnnnnnnnnnnnnnnnnnnnnnnnnnnnnnnnnnnnnnnnnnnnnnnnnnnnnnnnnnnnnnnnnnnnnnnnnnnnnnnnnnnnnnnnnnnnnnnnnnnnnnnnnnnnnnnnnnnnnnnnnnnnnnnnnnnnnnnnnnnnnnnnnnnnnnnnnnnnnnnnnnnnnnnnnnnnnnnnnnnnnnnnnnnnnnnnnnnnnnnnnnnnnnnnnnnnnnnnnnnnnnnnnnnnnnnnnnnnnnnnnnnnnnnnnnnnnnnnnnnnnnntttcttggcaaaagccttgtgtatatttgtatattacacatttgtacagaattttggaagattttcagtctagttgccaaatctggctcctttacaaaagaaataccttgagaa

SEQ ID NO: 19702 - DNA, 2102 bp, Macaca Mulatta
  misc_feature (1)...(2102): n = A,T,C or G
agatccacgccatcatggacaagaaggccaatatccgcaacatgtctgtcatcgcccacgtggtccacggcaagtccacactgacagactccctggtgtgcaaggcgggcatcatcgcctcggccggggagacacgcttcactgacacccggaaggatgagcaggagcgttgcatcaccatcaagtcaactgccatctctctcttctacgagctctcggagaatgacttgaacttcatcaagcaaagcaaggacggcgccggcttcctcattaacctcatcaactcccccgggcacgtcgacttctcctcggaggtgacggctgccctccgagtcactgatggtgcattggttatggtggactgcgtgtcaggcgtgtgtgtgcagacggagacagtgctgcggcaggccattgcggagcgcatcgagcctgtgctgatgatgaacaaggtggaccgtgccctgctggagctgcagctggagcccgaggagctctaccagaccttccagcgcattgtggagaacgtgaacgtcatcatctccacctacggcgagggtgagagcggccccatgggcaacatcatnnnnnnnnnnnnnnnnnnnnnnnnnnnnnnnnnnnnnnnnnnnnnnnnnnnnnnnnnnnnnnnnnnnnnnnnnnnnnnnnnnnnnnnnnnnnnnnnnnnnnnnnnnnnnnnnnnnnnnnnnnnnnnnnnnnnnnnnnnnnnnnnnnnnnnnnnnnnnnnnnnnnnnnnnnnnnnnnnnnnnnnnnnnnnnnnnnnnnnnnnnnnnnnnnnnnnnnnnnnnnnnnnnnnnnnnnnnnnnnnnnnnnnnnnnnnnnnnnnnnnnnnnnnnnnnnnnnnnnnnnnnnnnnnnnnnnnnnnnnnnnnnnnnnnnnnnnnnnnnnnnnnnnnnnnnnnnnnnnnnnnnnnnnnnnnnnnnnnnnnnnnnnnnnnnnnnnnnnnnnnnnnnnnnnnnnnnnnnnnnnnnnnnnnnnnnnnnnnnnnnnnnnnnnnnnnnnnnnnnnnnnnnnnnnnnnnnnnnnnnnnnnnnnnnnnnnnnnnnnnnnnnnnnnnnnnnnnnnnnnnnnnnnnnnnnnnnnnnnnnnnnnnnnnnnnnnnnnnnnnnnnnnnnnnnnnnnnnnnnnnnnnnnnnnnnnnnnnnnnnnnnnnnnnnnnnnnnnnnnnnnnnnnnnnnnnnnnnnnnnnnnnnnnnnnnnnnnnnnnnnnnnnnnnnnnnnnnnnnnnnnnnnnnnnnnnnnnnnnnnnnnnnnnnnnnnnnnnnnnnnnnnnnnnnnnnnnnnnnnnnnnnnnnnnnnnnnnnnnnnnnnnnnnnnnnnnnnnnnnnnnnnnnnnnnnnnnnnnnnnnnnnnnnnnnnnnnnnnnnnnnnnnnnnnnnnnnnnnnnnnnnnnnnnnnnnnnnnnnnnnnnnnnnnnnnnnnnnnnnnnnnnnnnnnnnnnnnnnnnnnnnnnnnnnnnnnnnnnnnnnnnnnnnnnnnnnnnnnnnnnnnnnnnnnnnnnnnnnnnnnnnnnnnnnnnnnnnnnnnnnnnnnnnnnnnnnnnnnnnnnnnnnnnnnnnnnnnnnnnnnnnnnnnnnnnnnnnnnnnnnnnnnnnnnnnnnnnnnnnnnnnnnnnnnnnnnnnnnnnnnnnnnnnnnnnnnnnnnnnnnnnnnnnnnnnnnnnnnnnnnnnnnnnnnnnnnnnnnnnnnnnnnnnnnnnnnnnnnnnnnnnnnnnnnnnnnnnnnnnnnnnnnnnnnnnnnnnnnnnnnnnnnnnnnnnnnnnnnnnnnnnnnnnnnnnnnnnnnnnnnnnnnnnnnnnnnnnnnnnnnnnnnnnnnnnnnnnnnnnnnnnnnnnnnnnnnnnnnnnnnnnnnnnnnnnnnnnnnnnnnnnnnnnnnnnnnnnnnnnnnnnnnnnnnnnnnnnnnnnnnnnnnnnnnnnnnnnnnnnnnnnnnnnnnnnnnnnnnnnnnnncagtgtccagagcaagtggtcggtggcatctatggagttttgaacaggaagcggggccacgtgtttgaggagtcccaagtggccggcacccccatgtttgtcgtcaaggcctacttgcctgtcaacgagtcctttg

SEQ ID NO: 19703 - DNA, 114 bp, Macaca Mulatta
agtgacctagagtcccgcagggatgtgaaaagagaagaaggagaggcctttgctagggagcatggacttatattcatggaaacttcagccaaaacagcctgcaatgttgaagag

SEQ ID NO: 19704 - DNA, 616 bp, Macaca Mulatta
  misc_feature (1)...(616): n = A,T,C or G
agatcgggaaagtctgtgtggaaaactgccaggcgttcagtggcatcaatgtccagtacgagctgcattcctccggcgccaactgcagcacactaggggtggtcacctcggccgaggacacctcggggatcctgtttgtgaacgacaccaaggccctgcgacggcccaagtgtgctgagcttcactacatggtggtggccaccaaccatcagacctccaggcaggcccaggcccagctgcttgtcacggtggaggggnnnnnnnnnnnnnnnnnnnnnnnnnnnnnnnnnnnnnnnnnnnnnnnnnnnnnnnnnnnnnnnnnnnnnnnnnnnnnnnnnnnnnnnnnnnnnnnnnnnnnnnnnnnnnnnnnnnnnnnnnnnnnnnnnnnnnnnnnnnnnnnnnnnnnnnnnnnnnnnnnnnnnnnnnnnnnnnnnnnnnnnnnnnnnnnnnnnnnnnnnnnnnnnnnnnnnnnnnnnnnnnnnnnnnnnnnnnnnnnnggggcagcattgtcggcgggcatgagcccggggagccccgggggattaaagctggctatggtacctgcaactgcttccctgaggaggagaagtgcttctgtgagcgcgaaaacatccag

SEQ ID NO: 19705 - DNA, 643 bp, Macaca Mulatta
gggacaacagcatcatcagaagttttgtcctctgtagataaacccatagaagttgatgagcttctggatagcagcctagacccagaaccaacccaaagtaagcttgttcgcctggagccattgactgaagctgaagctagtgaagctaccctgttttatttatgtgaacttgctcctgcacctctggatagtgatatgccacttttagatagctaaatccccaagaagaggactttacatgtatatattcatcaaaatgatgaactatttattttgaagtatcatttggtactttttttgtaaattgctttgttttgtttaatcagatactgtggaataaaagcaccttttgcttttctcactaaccacacactcttgcaaagctttcagatgttactcagctgcatagttacacagatttaatgcacattattggcatatctttaagttggattcaaatggccatttttttccaattttggtaaattggatttctttttattacaatatgaccattaacctcagttaaatttttgtttgttttcctgtttgatgctgtctatttgcattgagtgtaagtcatttgaactaatggtataactcttaaagctttctctgctccagtttatttttattaatattt

SEQ ID NO: 19706 - DNA, 790 bp, Macaca Mulatta
gggtcacagaagactttaatccttcaaattcttgtataactttgaataaatggttaatgttcacttaaaagacagattttggagattgtattcatatctatttgcatttgatttctaggtcaattgatgtgattatttttgttaaatgttgtcttgtgcccttaactacgaactgaattgtattaaacactacaaagtcatcttgagtattttaaatcggtttgtgtagttaggtttcccaacacctgtggttacctaatgtttaatattatagaactgtcctcaaaaactttgtcaattttcaaggctataaggaacagaaggactcttttaattctgtatttatcatttactttctgtatatatagtttaataacctgcttgggtgtaatttgccaagcttgaattctttaatgcatttgcataaattctatactgtttagagcttaaagctacagaagcattgttaggaattgcttggacactgaattttaaactttttgacattgttaacaagcatgttcatcttttcttgtcactagtccaagagaaatatgcttaatgtatattactaaaggctttgtatatgttaaacctgttttaatgccaaaagtttgctttgtccacaatttccttaaagacttctttcagaaaaagatttggtttgcctttaacgaatattgttgggagaaaaacaccgtataatgagtgaaaaaggggcagaagcaagaaatttcctacatccttaaccgactcccaaaaaaaattgagtatcccccatttaagatgg

SEQ ID NO: 19707 - DNA, 988 bp, Macaca Mulatta
  misc_feature (1)...(988): n = A,T,C or G
ggggcagcagtcctgcggtaaattggcctttgcagcggcggcagcagcaccaggctctgcagcggcacccccccccagcggcttaagccatggcgcttctcacggcattcagcagcagcgttgctgtaaccgacaaagacatcttcgaattaagcacattcctcgattccagcaaagcaccgcaacatgaccgaaatgagcttcctgagcagcgaggtgttggtgggggacttgatgtcccccttcgaccagtcgggtttgggggctgaagaaagcctaggtctcttagatgactacctggaggtggccaagcacttcaaacctcatgggttctccagcgacaaggctaaggcgggctcctccgaatggctggctgtggatgggttggtcagtccctccaacaacggcaaggaggatgccttctccgggacagattggatgttggagaaaatggatttgaaggagttcgactttgatgccctgttgggtatagatgacctggaaaccatgccagatgaccttttgaccacgttggatgacacgtgtgatctctttgcccccctagtccaggagactaacaaggagcccccacagacggtgaacccaattggccatctcccagaaagtttaacaaaacccgaccaggttgcccccttcaccttcttgcaacctctttccctttccccaggggtcctgtcctccactccagatcattcctttagtttagagctgggcagtgaagtggatatcactgaaggagataggaagccagatgccactgcttatgttgccatgatccctccgtgcataaaggaggaagacaacccctcagataatgatagtggcatctgtatgagcccggagtcctatctgggctctcctcagcatagcccgtctaccaggggctctccaaataggagcctcccatctccaggtgttcttctgtggatctgnccgccccaaagcttacgaacctcctggagagaag

SEQ ID NO: 19708 - DNA, 485 bp, Macaca Mulatta
  misc_feature (1)...(485): n = A,T,C or G
aatgatacaacttaattttattaggacaaggttggtgggcactggagtggcaccttccggggccaggacaggcactggggaggggtcacaggatgccacgcgggcacctagaagccacagctgccctccacagtgcggcactgcaccatgcgcaggaatgtctcgaccatatccatgtccttcctgaagcagtggagcagctcgtagttcttgagcagtgagtcatcgttctgtgagtctgtgtcaaacgtgctgtaggtctgcctcgtgccgaattcggcacgaggcccaatcggactgccaaattctccggtttgccctggaatattatagaaaattatttgtatgaataatgaaaataaaacacacttcgtggcatggnnnnnnnnnnnnnnnnnnnnnnnnnnnnnnnnnnnnnnnnnnnnnnnnnnnnnnnnnnnnnnnnnnnnnnnnnnnnnnnnnnnnnnnnnnnnnnnnnnnnnnnc

SEQ ID NO: 19709 - DNA, 781 bp, Macaca Mulatta
tatacacaggagcctttgatctcattaaagagatttgaaccagccacttgtggatttgggtggactaaagctcaactcactgcattgcacttgacctgactgggtttgaaggggacaggttatggccacttgaccccaccttccctgaggacagcagacaatcctgaggcctggactgacctaaggcctctgggtgaggcaaatctggcaaaagcaatagagttcaaaatgttttttccaatttatttagaaaaatagactctgaattcacattcaccccagggctatgtgggatgacagtaaggagacacctgagatgaaatgaggaaggtttgaattactggtatccaagggactgggggcagaagccagaagcctttgtccctctagagccagaatggtatgagtggcctggctcccctcctctccctcccttcagtagtcttcagccatggccagtaagacaaggctggtccagccgtggaaagggcggcagcccatgcctcgcccatctcggtcactatactgctcccagagaaagcctgtagcctggtactggcgccatacattgcctaccacattggcacggagctcactgtggagtttggcagcccgagcctggtgaggaccctccagatgcccatagtggtggagtgctcccaaagccaggtagttgacattgagccacacagcaccccgccagtagggaggatcatgctctgaattgcgctggccataaaaggagctaaggctgcaagggaggtaaaccaaaggggctcca

SEQ ID NO: 19710 - DNA, 776 bp, Macaca Mulatta
gggacactgaccgctcccagtccagatctccatcccgctccatgtcaaaggagcgggaacatgccaagtctgaatccagccagagggaaggtcgaggggagagtgagaatgctggcaccaatcaggagacccggtccaggtcgagatccaattccaaatcgaaaccaaaccttccatcagaatcacgctccagatcaaagtcagcttcaaaaacccgatctcggtccaagtctagatccaggtctgcttccagatcaccctcccgatctagatctaggtcccactcaaggtcctaactggctacggccacagctggaactacccgagaagtcttttgtacatgtttggtagccgtagcacaagtgattggagtagaacatgtcactgctgtacatttttaactcccctaatggtgtgtctataattgttaaatctaagtgcttcctctcagtaaagcctcctggcgccaggccttcctgctcgactgaaaaaaattttctctttgaaaatccccttttactcatggcccacagtagaatatccaaaacgccttggctttcaggcctggcctttcctacagggagctcagtaacctggacggctctaaggctggaatgaccacgtaggtaggtatggtgaggtcaacccatttttgctcttggatttatgccccttcgatgtatgccatttagtgaaaatgcaaagtcttaagttttcctaaccactttggttttcaaatttttgggaccttacaaagttgtggaatagcaccattc

SEQ ID NO: 19711 - DNA, 2504 bp, Macaca Mulatta
  misc_feature (1)...(2504): n = A,T,C or G
gtgttctccttctgcgtgggcgtggcgggccgcgcccgggtctccgtggaagtccgtttcgtgagcagcgctaagnnnnnnnnnnnnnnnnnnnnnnnnnnnnnnnnnnnnnnnnnnnnnnnnnnnnnnnnnnnnnnnnnnnnnnnnnnnnnnnnnnnnnnnnnnnnnnnnnnnnnnnnnnnnnnnnnnnnnnnnnnnnnnnnnnnnnnnnnnnnnnnnnnnnnnnnnnnnnnnnnnnnnnnnnnnnnnnnnnnnnnnnnnnnnnnnnnnnnnnnnnnnnnnnnnnnnnnnnnnnnnnnnnnnnnnnnnnnnnnnnnnnnnnnnnnnnnnnnnnnnnnnnnnnnnnnnnnnnnnnnnnnnnnnnnnnnnnnnnnnnnnnnnnnnnnnnnnnnnnnnnnnnnnnnnnnnnnnnnnnnnnnnnnnnnnnnnnnnnnnnnnnnnnnnnnnnnnnnnnnnnnnnnnnnnnnnnnnnnnnnnnnnnnnnnnnnnnnnnnnnnnnnnnnnnnnnnnnnnnnnnnnnnnnnnnnnnnnnnnnnnnnnnnnnnnnnnnnnnnnnnnnnnnnnnnnnnnnnnnnnnnnnnnnnnnnnnnnnnnnnnnnnnnnnnnnnnnnnnnnnnnnnnnnnnnnnnnnnnnnnnnnnnnnnnnnnnnnnnnnnnnnnnnnnnnnnnnnnnnnnnnnnnnnnnnnnnnnnnnnnnnnnnnnnnnnnnnnnnnnnnnnnnnnnnnnnnnnnnnnnnnnnnnnnnnnnnnnnnnnnnnnnnnnnnnnnnnnnnnnnnnnnnnnnnnnnnnnnnnnnnnnnnnnnnnnnnnnnnnnnnnnnnnnnnnnnnnnnnnnnnnnnnnnnnnnnnnnnnnnnnnnnnnnnnnnnnnnnnnnnnnnnnnnnnnnnnnnnnnnnnnnnnnnnnnnnnnnnnnnnnncaaccacagttgtgtgcccaatgcagagacctcctttccagaaaacaacttccttttgcatgtcactgctctggaggatattaagccaggagaggnnggaaatttgtatcagctacttggactgctgtcagcgggagcgcagccgccacagccgccacaagatcctcaggnnnnnnnnnnnnnnnnnnnnnnnnnnnnnnnnnnnnnnnnnnnnnnnnnnnnnnnnnnnnnnnnnnnnnnnnnnnnnnnnnnnnnnnnnnnnnnnnnnnnnnnnnnnnnnnnnnnnnnnnnnnnnnnnnnnnnnnnnnnnnnnnnnnnnnnnnnnnnnnnnnnnnnnnnnnnnnnnnnnnnnnnnnnnnnnnnnnnnnnnnnnnnnnnnnnnnnnnnnnnnnnnnnnnnnnnnnnnnnnnnnnnnnnnnnnnnnnnnnnnnnnnnnnnnnnnnnnnnnnnnnnnnnnnnnnnnnnnnnnnnnnnnnnnnnnnnnnnnnnnnnnnnnnnnnnnnnnnnnnnnnnnnnnnnnnnnnnnnnnnnnnnnnnnnnnnnnnnnnnnnnnnnnnnnnnnnnnnnnnnnnnnnnnnnnnnnnnnnnnnnnnnnnnnnnnnnnnnnnnnnnnnnnnnnnnnnnnnnnnnnnnnnnnnnnnnnnnnnnnnnnnnnnnnnnnnnnnnnnnnnnnnnnnnnnnnnnnnnnnnnnnnnnnnnnnnnnnnnnnnnnnnnnnnnnnnnnnnnnnnnnnnnnnnnnnnnnnnnnnnnnnnnnnnnnnnnnnnnnnnnnnnnnnnnnnnnnnnnnnnnnnnnnnnnnnnnnnnnnnnnnnnnnnnnnnnnnnnnnnnnnnnnnnnnnnnnnnnnnnnnnnnnnnnnnnnnnnnnnnnnnnnnnnnnnnnnnnnnnnnnnnnnnnnnnnnnnnnnnnnnnnnnnnnnnnnnnnnnnnnnnnnnnnnnnnnnnnnnnnnnnnnnnnnnnnnnnnnnnnnnnnnnnnnnnnnnnnnnnnnnnnnnnnnnnnnnnnnnnnnnnnnnnnnnnnnnnnnnnnnnnnnnnnnnnnnnnnnnnnnnnnnnnnnnnnnnnnnnnnnnnnnnnnnnnnnnnnnnnnnnnnnnnnnnnnnnnnnnnnnnnnnnnnnnnnnnnnnnnnnnnnnnnnnnnnnnnnnngattaggatgctctggtattcctggggccagttaaaatgggtcagtgaggggctctcctggcctcaatctccatctttagggtctccacagaggaacattgaagtcttccagaaaccttgaggagctgggctagatacttggagagtagccctgtcttgtcccctcctatccccagattagcaccacccctctctcttgggttggatgttatgggaattacaacctatcattcccaatgcctccctttcctggaggagcctgccacattcccctgctgagggatcccagagaggacaggtgcccaccccacaggcccttttctgcaccatggagccaggtggaacctgtctggccccttacccactgggttcttactccttcacaacagtcagcactccccctctgccccccactgttctcaataaaatgtaagtggtg

SEQ ID NO: 19712 - DNA, 850 bp, Macaca Mulatta
cctacacaaacttctcccatatattggaagttttgttctacaaacaccgtttacttattttccctcgccggagtcctcttttttaaattgcggtgggatgaaattctcaaagcccacttggtgtcacgggtcctggggatttttgcttatgggaaataccagtgtatatgagcatattgttatcaccttttgccctaaattggggcccccgggtctgtccaaaaaaggaattaagttctcagtgaaaaagtttattttttatggtgctggaggggttgtcctggaacaatggggtatttattgtagggaataattatgttgctaaggcgtgcgggggacgaatgaggcaatttattaatccagcatggtttgttctaatgcttcttgttggcagctgccacctgtccggcgattctgtccagatctctctgtccctgaggtgtcagtttgcggcccccatcttggtccttttccaccattttcagcccctccagggcttggaggacccgacgagccacactcttggagcctcggctgaagtggctgggcatgacgccgtttctctgacgtcccccatagatcttggtcatggagccaaccccagcgccaccccggaggtacaggtgccgcgctgtggaagcagctcgtgtgtagaaccagttctcatcgtagggagcaagctctttgtgcttggctagcttgacggtgtcgacccattcggggactttcagcttcccggactttttgaggaaggctgccagagctctgacgaactcctgctggttcacgtcttttacagtaactccaggcatcgtgcggcctccgcgctgccagccaggggaaagggccc

SEQ ID NO: 19713 - DNA, 4989 bp, Macaca Mulatta
  misc_feature (1)...(4989): n = A,T,C or G
aaatcgagctatagcagattatcttcgttcaaatggctatgaagaggcatattcagtttttaaaaaggaagctgaattagannnnnnnnnnnnnnnnnnnnnnnnnnnnnnnnnnnnnnnnnnnnnnnnnnnnnnnnnnnnnnnnnnnnnnnnnnnnnnnnnnnnnnnnnnnnnnnnnnnnnnnnnnnnnnnnnnnnnnnnnnnnnnnnnnnnnnnnnnnnnnnnnnnnnnnnnnnnnnnnnnnnnnnnnnnnnnnnnnnnnnnnnnnnnnnnnnnnnnnnnnnnnnnnnnnnnnnnnnnnnnnnnnnnnnnnnnnnnnnnnnnnnnnnnnnnnnnnnnnnnnnnnnnnnnnnnnnnnnnnnnnnnnnnnnnnnnnnnnnnnnnnnnnnnnnnnnnnnnnnnnnnnnnnnnnnnnnnnnnnnnnnnnnnnnnnnnnnnnnnnnnnnnnnnnnnnnnnnnnnnnnnnnnnnnnnnnnnnnnnnnnnnnnnnnnnnnnnnnnnnnnnnnnnnnnnnnnnnnnnnnnnnnnnnnnnnnnnnnnnnnnnnnnnnnnnnnnnnnnnnnnnnnnnnnnnnnnnnnnnnnnnnnnnnnnnnnnnnnnnnnnnnnnnnnnnnnnnnnnnnnnnnnnnnnnnnnnnnnnnnnnnnnnnnnnnnnnnnnnnnnnnnnnnnnnnnnnnnnnnnnnnnnnnnnnnnnnnnnnnnnnnnnnnnnnnnnnnnnnnnnnnnnnnnnnnnnnnnnnnnnnnnnnnnnnnnnnnnnnnnnnnnnnnnnnnnnnnnnnnnnnnnnnnnnnnnnnnnnnnnnnnnnnnnnnnnnnnnnnnnnnnnnnnnnnnnnnnnnnnnnnnnnnnnnnnnnnnnnnnnnnnnnnnnnnnnnnnnnnnnnnnnnnnnnnnnnnnnnnnnnnnnnnnnnnnnnnnnnnnnnnnnnnnnnnnnnnnnnnnnnnnnnnnnnnnnnnnnnnnnnnnnnnnnnnnnnnnnnnnnnnnnnnnnnnnnnnnnnnnnnnnnnnnnnnnnnnnnnnnnnnnnnnnnnnnnnnnnnnnnnnnnnnnnnnnnnnnnnnnnnnnnnnnnnnnnnnnnnnnnnnnnnnnnnnnnnnnnnnnnnnnnnnnnnnnnnnnnnnnnnnnnnnnnnnnnnnnnnnnnnnnnnnnnnnnnnnnnnnnnnnnnnnnnnnnnnnnnnnnnnnnnnnnnnnnnnnnnnnnnnnnnnnnnnnnnnnnnnnnnnnnnnnnnnnnnnnnnnnnnnnnnnnnnnnnnnnnnnnnnnnnnnnnnnnnnnnnnnnnnnnnnnnnnnnnnnnnnnnnnnnnnnnnnnnnnnnnnnnnnnnnnnnnnnnnnnnnnnnnnnnnnnnnnnnnnnnnnnnnnnnnnnnnnnnnnnnnnnnnnnnnnnnnnnnnnnnnnnnnnnnnnnnnnnnnnnnnnnnnnnnnnnnnnnnnnnnnnnnnnnnnnnnnnnnnnnnnnnnnnnnnnnnnnnnnnnnnnnnnnnnnnnnnnnnnnnnnnnnnnnnnnnnnnnnnnnnnnnnnnnnnnnnnnnnnnnnnnnnnnnnnnnnnnnnnnnnnnnnnnnnnnnnnnnnnnnnnnnnnnnnnnnnnnnnnnnnnnnnnnnnnnnnnnnnnnnnntctgaaatgtgtatctatgtaacatcacttaagtgtgcttaataaatctttaaggattttagataataaggcaacaattcagaatcttctgaaccatctatgtaatgaatggggattacacattggatttttctcatgacacatttgccaaatcagtaggatatatttgttttggcagcctatcaagcaaaggctagtggtatatttatgtaagaaaatgactgtaaatctcaagaaaaatctcagcagctaattgcaactcatttatttcatttcggtcttaatgctttgtaaacaggtcaaaaaatcctatcatactctaagcttctattttacacactagacatacttctagttgtattctccatactattagactgtagtgatgtgacttccaagtagaatgtaatcttcccattgagtgtgtcatggtacaaatcactatttgtttttggtgttttttagggatgtgcaatgtgcattacataatgacagaagtactgagaaggttctgtgtgcccatttgaaaggagagggaggaatacagcagttggtttttcaacatgaatctgataattgatttaaactgtgtttcacttacaggttttataaaatgacagggtttaatggagcgtgcataaaaatgtactgttttcaccttttgtttatatgtaaatgtttgtaagtatatgggcctatctgtaagtggataagtctatatgtgtgtatcatacacatcaacctccacgtccttannnnnnnnnnnnnnnnnnnnnnnnnnnnnnnnnnnnnnnnnnnnnnnnnnnnnnnnnnnnnnnnnnnnnnnnnnnnnnnnnnnnnnnnnnnnnnnnnnnnnnnnnnnnnnnnnnnnnnnnnnnnnnnnnnnnnnnnnnnnnnnnnnnnnnnnnnnnnnnnnnnnnnnnnnnnnnnnnnnnnnnnnnnnnnnnnnnnnnnnnnnnnnnnnnnnnnnnnnnnnnnnnnnnnnnnnnnnnnnnnnnnnnnnnnnnnnnnnnnnnnnnnnnnnnnnnnnnnnnnnnnnnnnnnnnnnnnnnnnnnnnnnnnnnnnnnnnnnnnnnnnnnnnnnnnnnnnnnnnnnnnnnnnnnnnnnnnnnnnnnnnnnnnnnnnnnnnnnnnnnnnnnnnnnnnnnnnnnnnnnnnnnnnnnnnnnnnnnnnnnnnnnnnnnnnnnnnnnnnnnnnnnnnnnnnnnnnnnnnnnnnnnnnnnnnnnnnnnnnnnnnnnnnnnnnnnnnnnnnnnnnnnnnnnnnnnnnnnnnnnnnnnnnnnnnnnnnnnnnnnnnnnnnnnnnnnnnnnnnnnnnnnnnnnnnnnnnnnnnnnnnnnnnnnnnnnnnnnnnnnnnnnnnnnnnnnnnnnnnnnnnnnnnnnnnnnnnnnnnnnnnnnnnnnnnnnnnnnnnnnnnnnnnnnnnnnnnnnnnnnnnnnnnnnnnnnnnnnnnnnnnnnnnnnnnnnnnnnnnnnnnnnnnnnnnnnnnnnnnnnnnnnnnnnnnnnnnnnnnnnnnnnnnnnnnnnnnnnnnnnnnnnnnnnnnnnnnnnnnnnnnnnnnnnnnnnnnnnnnnnnnnnnnnnnnnnnnnnnnnnnnnnnnnnnnnnnnnnnnnnnnnnnnnnnnnnnnnnnnnnnnnnnnnnnnnnnnnnnnnnnnnnnnnnnngtattttaattcatttttagtacgaattgtttaagggtaagccacaacatctagaaatcactcatagataattgaacaataaaggagaatggtaccgatgcaggaggaagcaagcgtgtcttcccctgcggcacacagcgacttgcgttgagaaggaggaggaaacgattactctaaacaaagttatccttacttgggagattgccacagcctgctgctgagttgagttaccagacatcctccatgtgagaagcagcgaacattgaatctcagggatggcccacaactgggtccacatgtaacgagccctgttaaataacgaaggggttggggagagcagtccgtctacaacctggaatcagatttgcaaaggtttcctgcactgctgtctgacactgtcctgttgatgccctttctgactgtgttctctgttttctctgtctgctgtctaaccctgtgccttgcctgggataaggacaatgatgaggttactggtttggattgtaagtagaggacttttattaattgggtttagaggttcactgctgctttgtcactttctcaatcaaattggccacttatttaagaaataaaaagctggtagaattgcatcctcagatgattattgacnnnnnnnnnnnnnnnnnnnnnnnnnnnnnnnnnnnnnnnnnnnnnnnnnnnnnnnnnnnnnnnnnnnnnnnnnnnnnnnnnnnnnnnnnnnnnnnnnnnnnnnnnnnnnnnnnnnnnnnnnnnnnnnnnnnnnnnnnnnnnnnnnnnnnnnnnnnnnnnnnnnnnnnnnnnnnnnnnnnnnnnnnnnnnnnnnnnnnnnnnnnnnnnnnnnnnnnnnnnnnnnnnnnnnnnnnnnnnnnnnnnnnnnnnnnnnnnnnnnnnnnnnnnnnnnnnnnnnnnnnnnnnnnnnnnnnnnnnnnnnnnnnnnnnnnnnnnnnnnnnnnnnnnnnnnnnnnnnnnnnnnnnnnnnnnnnnnnnnnnnnnnnnnnnnnnnnnnnnnnnnnnnnnnnnnnnnnnnnnnnnnnnnnnnnnnnnnnnnnnnnnnnnnnnnnnnnnnnnnnnnnnnnnnnnnnnnnnnnnnnnnnnnnnnnnnnnnnnnnnnnnnnnnnnnnnnnnnnnnnnnnnnnnnnnnnnnnnnnnnnnnnnnnnnnnnnnnnnnnnnnnnnnnnnnnnnnnnnnnnnnnnnnnnnnnnnnnnnnnnnnnnnnnnnnnnnnnnnnnnnnnnnnnnnnnnnnnnnnnnnnnnnnnnnnnnnnnnnnnnnnnnnnnnngggtggggggagggcaagctggatttacaggtcacggctggactgaatgggcctttttatcttcccaccgtatcatggaagtagctgcttgcttgtactgcctatccttcaggcatccctaaagctcactctgaagatggtagagacaaacacagactcctggagtcaaagttgatcctgacactgacacgaaggcaagccttgatttcatatgaacattgcagaggtggcgattgagaaaacagttccccagattgtaagagttcactgaagatattgacacaatttaaaaaaacaaatcagtaaaggaatgtatataatattgctctcgtgttttacagtaagatttgttgctctcagactgtgtaaaacaaaatttattcatgttttctgcatattaaaaaatcttattgtaccaattggtaaa

SEQ ID NO: 19714 - DNA, 330 bp, Macaca Mulatta
aggagagttggggcttgaggcagactttggccattcaatttggatgggggccagagaccccctctcagatctgagaatgctgtacttgctttccagcctcctttgtagcacaggccatgacaaagactctgttagatcaccttgggtgggaggggacagggtgtttcctctatctggcaggggggctgcaaggtcaaattcctgaccgaagcggtgctgtttcccgctgtggcgtgcagtggttatgtactgtagcgcttaacggcggcagaggtaccttcaaacacaccagcacactggtcaactttggggtcttactcctagaagccg

SEQ ID NO: 19715 - DNA, 601 bp, Macaca Mulatta
  misc_feature (1)...(601): n = A,T,C or G
ccccccaactaccgaaatatggacagtcagtcaactctggtaactaaggcaaccaaaggacaatttcttttctgttctgnnnnnnnnnnnnnnnnntannnnnnnnnnnnnnnnnnnnnnnnnnnnnnnannnnnnnnnnnnnnnnnnnnnnnnnnnntggattcnnnnnnnnnnnnnnnnnnnnnnnnnnnnnagagctgagattacaggcgaccacgactgtctaatttttgtattttaggacagacggggtttcacgatgttggtcaggatggtctcgaactcttggcctcaggtgatccgccccnnnnnnnnnnnnnnnnnnnnnnnnnnnnnnnnnnnnnnnnnnnnnnnncagccccaaaggacaatttcttgagacccccacacaccttcagcaccacacattctattcatgttaaaaacaacaaaaattaacaacctctaaagctaaggacaatgattctgtaaagtgcaagaatggttcattgtttctgcttttgtggatttcatgttaagaatactttaaaagaaatgggtggaccggcgcacccaacccaggacccccagtcatatatttgatcaagaaatgaccccgta

SEQ ID NO: 19716 - DNA, 777 bp, Macaca Mulatta
  misc_feature (1)...(777): n = A,T,C or G
ggaaactcagttactgtacctacaggtaagtctacatcctctctgacagccacagcactatatcaatccctgacgttaaggatacctcatgacattttcctgtttttatggaaactctgagaagctgaatgatacatgcgggggatattttttgagatgatttaaatgtaacccaaaagatggaagacagaaagataaacgcacccacacacagtctttgcagtatctgactgagaactcacaggaagttacttcaagcacttgccagtactatgatattcaagtaccttgcagcatttctgtgccattgctttcaatgaggccagaggcatcctggatattagacctattatactgtaagaatataagtataaagtgcattcatatacatgtgaggttttcttttgcttgagtggacagtagcacctgtatcattgaactcattttgtatcagagcaattttgcttgcagaaagctatgaaataaaacatgtcccttaactgcattgctatggaattaatttttttccccagggaaaattagtgtatttttttatgagcaatatcaaatttggagtgaccaaaagatacttaaaaatggggtttattttgatttctcatctgaaataatcatgttctggtattatatctatctatatttaataaatatatacattttaatttattatgtatacctccctactatagaaaagattttagtttgcattttaaaaaaaactaattcccttgcccnnaggaaagacggcgagataagggt

SEQ ID NO: 19717 - DNA, 112 bp, Macaca Mulatta
  misc_feature (1)...(112): n = A,T,C or G
agggccaagaaaaaagaaaagaaacttcaatgattccagcctatttgtatctgctgaagagnagtttggccatctattggatgaaaatatgggatccaagtttgataacatt

SEQ ID NO: 19718 - DNA, 978 bp, Macaca Mulatta
  misc_feature (1)...(978): n = A,T,C or G
ggatgctacgtgggggtagacttttggctcaactgaagaaatccctttgacgaagctggagatgttgcaatgggaaaccgtggggggattcagcagagcttggctggtgatcgcaggcaccagaatggctggcacatggcnnnnnnnnnnnnnnnnnnnnnnngtaggcatggcacacacacaccacacacacacactgtgcacgcaggcccctcttaaatacgttattattgcatttggtatcatgcttgtagatagaggagggaggattgtaggaaagtgggagaagcacgctgataattaagaaataagaaagagcatatctttttcctaaaaaacaaaaactggacagggtattcgaggaagtagcatgcaactctgagtttcgaccttagcatgacataggaccaatgaccgagggagttccactggggcccccactgtctacctcaaatggagggcaacatttcctttcagtccatgttgcatggcattttttttaatgtgggcccttgcatgatggtctggtgggtaaaggtcatcaaaaaaaacacacgtggcttccgaggaaaaacacggagactttagtgaaccagggggttggcaaaggggcctttgtggtaagggtggttaagggacaagggggaccattccacccctgggcccctccctggactttttggaagccccacgggcaacccccttctcggaaaagtagatataagaccctcacgactccagatccctatccagttcttcgaaaaacggaaaactaatatcctctgagaaaatatgatagaatggggtccccctcctttggggatcacactaggggtggagggccttcttgttttacccattcccgaaagggcgcattatggtgtgtctcacattgtgcagaactcctcttcaagtgtgtttaaagacccccccttgggaccgccccggaaacaccccaagggtattcgcccaacaaan

SEQ ID NO: 19719 - DNA, 420 bp, Macaca Mulatta
  misc_feature (1)...(420): n = A,T,C or G
gggacagcaagctgccacgccgacgccgaccccattctgcacgtcagcccgcccgcgcccaccatggccacagttcagcagctggaaggagagatggcgcctggtggatagcaaaggctttgatgaatacatgaaggagctaggagtgggaatagctttgcgaaaaatgggcgcaatggccaagccagactgtatcatcacttgtgatggcaaaaacctcaccataaaaactgagagcactttgaaaacaacacagttttcttgtaccctgggagagaaatttgaagaaaccacagctgatggcagaaaaactcagactgtctgcagctttacagatggtgcattggttcagcatcaggagtgggatgggaaggaaagcacnntnnnnnanannnnnnnnnnnnnnnnnnnnnnnntgtc

SEQ ID NO: 19720 - DNA, 814 bp, Macaca Mulatta
  misc_feature (1)...(814): n = A,T,C or G
ggatcccagctgctttatgctctcctggggggcattttcccgaggcacgatgtgcatgacctgagccacatggccctcatgtgccaggatgtcctcagtccatatatgcttagcacaacccctccatggtggaatagatccacctatcggaggagtctgaaccagagtgactccatcctgaataatggccaaataaaactaaacctgataggttacattcccaggaagttaggcactcttggttacaaagtgtttatggtggaagggatgagttaatgacaccaactaactaaataagacctcgaacttaaagagatgttctgatgccctgatatcttaagaagaaaaagcattcttagtttaaaaataagtttcaaggctgggcacggtggcttacacctcnnnnnnnnnnnnnnnnnnnnnccaaggtcggcagattgcttaagctcangagttccagaccagcctgggcaacgtggtgaaaccctcatctctacaaacaaattcagaaactggccaggtgtgatggcacatgcctatagtcctagttacttggcgggctgaggcaggaggatcaattgaccctggacggttgaagctgtancgagccatgtttatacccctgccnnnnnnnnnnnnnnnnnnaagtagatccctgtctcnnnnnnnnnnnnnnnnnnnnnnnnnnnnnnnnnnnnggccggccctcggcccctcgagaaagcttttccaaaaaccaatttctttttgggcgccccggggcccccgtttagggtaaagtggaaacatggggcccttagccctgtttttcccc

SEQ ID NO: 19721 - DNA, 932 bp, Macaca Mulatta
acccctccaggaatgatctcctcttctattggcttccatgatggttattttgttttcttttgacttgcatccaactccaggatagtgggcaccccactgcaatcctgtctttctgagcacactttagtggttgatgatttttgtcatcagccaccatcctattgcaaaggttcgaactgtatatattcccaatagcaaagtagctcctaccatgaacagaaaacattctgatttggaaaaagagagggaggtatgggctgggggccagagtcctttccaaggctcctccaattctgcccaaaaatatggttgatagtttacctgaataaatggtagtaatcacatttggccttcagaaccatccatagtagtatgatgatgcaacaagattagaagcggaaaacctaagtcctttatgtggaaaacagaacatcattagaacaaaggacagagtatgaacacctgggcttaagaaatctagtatttcatgctgggaatgagacataggccatgaaaaaaatgatccccaagtgtggacaaaagatgctcttctgtggaccactgcatgagcttttatactactgacctggtttttaaacagagtttgctattagagcgttgaattggagagaaggcctccctagccagaacttgtatatacgcatctataaattgtccgtgtttatacatttgaggggaaaacaccataaggtttcgtttctgtatacaaccctggcattatgtccacttgtgtatagaagtagattaagagccatataagtttgaaggaaatagtttataccattttttaaggaaacagtgtaaccacaaagcacagtctaaaaatctcctcttttagctgatgaacttattctatagattctgcggaacaagtctatcagcttcagaatggcattgtactcaatggattt

SEQ ID NO: 19722 - DNA, 281 bp, Macaca Mulatta
  misc_feature (1)...(281): n = A,T,C or G
gggacctgccactagcccctccagcctgctccttccccttaagcttcgtgcccctggatgcgctaacattcgctcttgtttgttcctggactggccatgaagtgaggagatggttatctaaagagaattccctatttatttgacaaaaaatccagttaatatattaatgtgaaataaaccctgtttgcaccttgatttgtttgctgaaaatgtgaaatagtaaaaataaataactggaccnnnnnnnnnnnnnnnnnnnnnnnnnnnnnnnnnnnnnnnnn

SEQ ID NO: 19723 - DNA, 952 bp, Macaca Mulatta
  misc_feature (1)...(952): n = A,T,C or G
tggttcttcaagggcatcagccggaaggacgcagagcgccaactcctggctcccggcaacatgctgggctccttcatgatccgggatagcgagaccactaaaggnnnnnnnnnnnnnnnnnnnnnnnnnnnnnnnnnnnnnnnnnnnnnnnnnnnnnnnnnnnnnnnnnnnnnnnnnnnnnnnnnnnnnnnnnnnnnnnnnnnnnnnnnnnnnnnnnnnnnnnnnnnnnnnnnnnnnnnnnnnnnnnnnnnnnggggagcgatgggctctgccagaaactgtcagtgccctgcgtgtcttccaagccccagaagccttgggagaaagatgcctgggagatccctcgggaatccctcaagctggagaagaagcttggagctgggcagtttggggaagtctggatgggccacctacaacaagcacaccaaggtggcggtgaagacaatgaagccagggagcatgtcggtggaggccttcctggcagaggccaacctgaagaaaactctacagcatgacaagctagtcaaacttcatgcagtggtcaccaagnnnnnnnnnnnnnnnnnnnnnnnnnnnnnnnnnnnnnnnnnnnnnnnnnnnnnnnnnnnnnnnnnnnnnnnnnnnnnnnnnnnnnnnnnnnnnnnnnnnnnnnnnnnnnncagattgcagaaggcatggccttcatcgagcagaggaactacatccaccgagacctccgagccgccaacatcttggtctctgcatccttggtgtgtaagattgctgactttggcctggcccggatcattgaggacaatgagtacacagctcgggaagnnggggccaagttccccatcaagtggacagctcctgaagccatcaactttggctccttcaccatcaagtcagatgtctggtcctttggtatcctgctgatggagattgtcacctacggccgcatcccttacccagg

SEQ ID NO: 19724 - DNA, 4143 bp, Macaca Mulatta
  misc_feature (1)...(4143): n = A,T,C or G
agacaattgagtttgatgagagtgcgggggcagtgctgaggatccagcctctgaggacaccgcgggatgaaaacgtgtacgagtgtgtggcccagaactcggttggggagattacagtccatgccaagctcactgtcctccgannnnnnnnnnnnnnnnnnnnnnnnnnnnnnnnnnnnnnnnnnnnnnnnnnnnnnnnnnnnnnnnnnnnnnnnnnnnnnnnnnnnnnnnnnnnnnnnnnnnnnnnnnnnnnnnnnnnnnnnnnnnnnnnnnnnnnnnnnnnnnnnnnnnnnnnnnnnnnnnnnnnnnnnnnnnnnnnnnnnnnnnnnnnnnnnnnnnnnnnnnnnnnnnnnnnnnnnnnnnnnnnnnnnnnnnnnnnnnnnnnnnnnnnnnnnnnnnnnnnnnnnnnnnnnnnnnnnnnnnnnnnnnnnnnnnnnnnnnnnnnnnnnnnnnnnnnnnnnnnnnnnnnnnnnnnnnnnnnnnnnnnnnnnnnnnnnnnnnnnnnnnnnnnnnnnnnnnnnnnnnnnnnnnnnnnnnnnnnnnnnnnnnnnnnnnnnnnnnnnnnnnnnnnnnnnnnnnnnnnnnnnnnnnnnnnnnnnnnnnnnnnnnnnnnnnnnnnnnnnnnnnnnnnnnnnnnnnnnnnnnnnnnnnnnnnnnnnnnnnnnnnnnnnnnnnnnnnnnnnnnnnnnnnnnnnnnnnnnnnnnnnnnnnnnnnnnnnnnnnnnnnnnnnnnnnnnnnnnnnnnnnnnnnnnnnnnnnnnnnnnnnnnnnnnnnnnnnnnnnnnnnnnnnnnnnnnnnnnnnnnnnnnnnnnnnnnnnnnnnnnnnnnnnnnnnnnnnnnnnnnnnnnnnnnnnnnnnnnnnnnnnnnnnnnnnnnnnnnnnnnnnnnnnnnnnnnnnnnnnnnnnnnnnnnnnnnnnnnnnnnnnnnnnnnnnnnnnnnnnnnnnnnnnnnnnnnnnnnnnnnnnnnnnnnnnnnnnnnnnnnnnnnnnnnnnnnnnnnnnnnnnnnnnnnnnnnnnnnnnnnnnnnnnnnnnnnnnnnnnnnnnnnnnnnnnnnnnnnnnnnnnnnnnnnnnnnnnnnnnnnnnnnnnnnnnnnnnnnnnnnnnnnnnnnnnnnnnnnnnnnnnnnnnnnnnnnnnnnnnnnnnnnnnnnnnnnnnnnnnnnnnnnnnnnnnnnnnnnnnnnnnnnnnnnnnnnnnnnnnnnnnnnnnnnnnnnnnnnnnnnnnnnnnnnnnnnnnnnnnnnnnnnnnnnnnnnnnnnnnnnnnnnnnnnnnnnnnnnnnnnnnnnnnnnnnnnnnnnnnnnnnnnnnnnnnnnnnnnnnnnnnnnnnnnnnnnnnnnnnnnnnnnnnnnnnnnnnnnnnnnnnnnnnnnnnnnnnnnnnnnnnnnnnnnnnnnnnnnnnnnnnnnnnnnnnnnnnnnnnnnnnnnnnnnnnnnnnnnnnnnnnnnnnnnnnnnnnnnnnnnnnnnnnnnnnnnnnnnnnnnnnnnnnnnnnnnnnnnnnnnnnnnnnnnnnnnnnnnnnnnnnnnnnnnnnnnnnnnnnnnnnnnnnnnnnnnnnnnnnnnnnnnnnnnnnnnnnnnnnnnnnnnnnnnnnnnnnnnnnnnnnnnnnnnnnnnnnnnnnnnnnnnnnnnnnnnnnnnnnnnnnnnnnnnnnnnnnnnnnnnnnnnnnnnnnnnnnnnnnnnnnnnnnnnnnnnnnnnnnnnnnnnnnnnnnnnnnnnnnnnnnnnnnnnnnnnnnnnnnnnnnnnnnnnnnnnnnnnnnnnnnnnnnnnnnnnnnnnnnnnnnnnnnnnnnnnnnnnnnnnnnnnnnnnnnnnnnnnnnnnnnnnnnnnnnnnnnnnnnnnnnnnnnnnnnnnnnnnnnnnnnnnnnnnnnnnnnnnnnnnnnnnnnnnnnnnnnnnnnnnnnnnnnnnnnnnnnnnnnnnnnnnnnnnnnnnnnnnnnnnnnnnnnnnnnnnnnnnnnnnnnnnnnnnnnnnnnnnnnnnnnnnnnnnnnnnnnnnnnnnnnnnnnnnnnnnnnnnnnnnnnnnnnnnnnnnnnnnnnnnnnnnnnnnnnnnnnnnnnnnnnnnnnnnnnnnnnnnnnnnnnnnnnnnnnnnnnnnnnnnnnnnnnnnnnnnnnnnnnnnnnnnnnnnnnnnnnnnnnnnnnnnnnnnnnnnnnnnnnnnnnnnnnnnnnnnnnnnnnnnnnnnnnnnnnnnnnnnnnnnnnnnnnnnnnnnnnnnnnnnnnnnnnnnnnnnnnnnnnnnnnnnnnnnnnnnnnnnnnnnnnnnnnnnnnnnnnnnnnnnnnnnnnnnnnnnnnnnnnnnnnnnnnnnnnnnnnnnnnnnnnnnnnnnnnnnnnnnnnnnnnnnnnnnnnnnnnnnnnnnnnnnnnnnnnnnnnnnnnnnnnnnnnnnnnnnnnnnnnnnnnnnnnnnnnnnnnnnnnnnnnnnnnnnnnnnnnnnnnnnnnnnnnnnnnnnnnnnnnnnnnnnnnnnnnnnnnnnnnnnnnnnnnnnnnnnnnnnnnnnnnnnnnnnnnnnnnnnnnnnnnnnnnnnnnnnnnnnnnnnnnnnnnnnnnnnnnnnnnnnnnnnnnnnnnnnnnnnnnnnnnnnnnnnnnnnnnnnnnnnnnnnnnnnnnnnnnnnnnnnnnnnnnnnnnnnnnnnnnnnnnnnnnnnnnnnnnnnnnnnnnnnnnnnnnnnnnnnnnnnnnnnnnnnnnnnnnnnnnnnnnnnnnnnnnnnnnnnnnnnnnnnnnnnnnnnnnnnnnnnnnnnnnnnnnnnnnnnnnnnnnnnnnnnnnnnnnnnnnnnnnnnnnnnnnnnnnnnnnnnnnnnnnnnnnnnnnnnnnnnnnnnnnnnnnnnnnnnnnnnnnnnnnnnnnnnnnnnnnnnnnnnnnnnnnnnnnnnnnnnnnnnnnnnnnnnnnnnnnnnnnnnnnnnnnnnnnnnnnnnnnnnnnnnnnnnnnnnnnnnnnnnnnnnnnnnnnnnnnnnnnnnnnnnnnnnnnnnnnnnnnnnnnnnnnnnnnnnnnnnnnnnnnnnnnnnnnnnnnnnnnnnnnnnnnnnnnnnnnnnnnnnnnnnnnnnnnnnnnnnnnnnnnnnnnnnnnnnnnnnnnnnnnnnnnnnnnnnnnnnnnnnnnnnnnnnnnnnnnnnnnnnnnnnnnnnnnnnnnnnnnnnnnnnnnnnnnnnnnnnnnnnnnnnnnnnnnnnnnnnnnnnnnnnnnnnnnnnnnnnnnnnnnnnnnnnnnnnnnnnnnnnnnnnnnnnnnnnnnnnnnnnnnnnnnnnnnnnnnnnnnnnnnnnnnnnnnnnnnnnnnnnnnnnnnnnnnnnnnnnnnnnnnnnnnnnnnnnnnnnnnnnnnnnnnnnnnnnnnnnnnnnnnnnnnnnnnnnnnnnnnnnnnnnnnnnnnnnnnnnnnnnnnnnnnnnnnnnnnnnnnnnnnnnnnnnnnnnnnnnnnnnnnnnnnnnnnnnnnnnnnnnnnnnnnnnnnnnnnnnnnnnnnnnnnnnnnnnnnnnnnnnnnnnnnnnnnnnnnnnnnnnnnnnnnnnnnnnnnnnnnnnnnnnnnnnnnnnnnnnnnnnnnnnnnnnnnnnnnnnnnnnnnnnnnnnnnnnnnnnnnnnnnnnnnnnnnnnnnnnnnnnnnnnnnnnnnnnnnnnnnnnnnnnnnnnnnnnnnnnnnnnnnnnnnnnnnnnnnnnnnnnnnnnnnnnnnnnnnnnnnnnnnnnnnnnnnnnnnnnnnnnnnnnnnnnnnnnnnnnnnnnnnnnnnnnnnnnnnnnnnnnnnnnnnnnnnnnnnnnnnnnnnnnnnnnnnnnnnnnnnnnnnnnnnnnnnnnnnnnnnnnnnnnnnnnnnnnnnnnnnnnnnnnnnnnnnnnnnnnnnnnnnnnnnnnnnnnnnnnnnnnnnnnnnnnnnnnnnnnnnnnnnnnnnnnnnnnnnnnnnnnnnnnnnnnnnnnnnnnnnnnnnnnnnnnnnnnnnnnnnnnnnnnnnnnnnnnnnnnnggcatcgtgggtagtgattacatcaatgccaactacgtggatggctaccggcgtcagaacgcgtacattgccacgcaggggccgctgcccgagacctttggggacttctggcgtatggtgtgggagcagcggtcggccaccatcgtcatgatgacgcggctggaggagaagtcacgg

SEQ ID NO: 19725 - DNA, 436 bp, Macaca Mulatta
  misc_feature (1)...(436): n = A,T,C or G
aggtcctagtcatgcccagcctcagaactcgccgtgaggaggcggagatggagctctcagctccaggaccatccccttggacccctgcagcccaggcccnnnnnnnnnnnnnnnnnnnnnnnnnnnnnnnnnnnnnnnnnnnnnnnnnnnnnnnnnnnnnnnnnnnnnnnnnnnnnnnnnnnnnnnnnnnnnnnnnnnnnnnnncagattgcaacaccaggactgaagacaaggagtttcttcacaaggaagacgttcatgaagatatggaatcacagacagaaatatcagaacactgtgctggtgatgtttcccaggtgcccgagcttggagatctgtgtgatgatgcatcagaaagagactggggagtctctgaaggcaggaggctgccacagtccctctcccaggagggggacttcacaccagcggccctggg

SEQ ID NO: 19726 - DNA, 264 bp, Macaca Mulatta
acattccagtttcattagcatcagcatcgcctgccttgtcagcagcacatgaaatcccaggtaccgtatattccacgaaatatagtggaatatgggaattccaggtgtgtgcctccctagaaaggtcctccccggcctggaggaggtaatggagtcctcccttgctagctctcccaggccctgcaggccctccacacctagtgcctccctaaggggcttgaattccagaggagaccgctggcattaagtgaaaagggaacaggg

SEQ ID NO: 19727 - DNA, 1868 bp, Macaca Mulatta
  misc_feature (1)...(1868): n = A,T,C or G
ggcacacaaaccaatggtctggactttcagaagcagcctgtgcctgtaggaggagcaatctcaacagcccaggcgcaggctttccttggacatctccatcaggtnnnaggtccaactcgctggaacaagtttacaggctgctgctcagtctttaaatgtacannnnnnnnnnnnnnnnnnnnnnnnnnnnnnnnnnnnnnnnnnnnnnnnnnnnnnnnnnnnnnnnnnnnnnnnnnnnnnnnnnnnnnnnnnnnnnnnnnnnnnnnnnnnnnnnnnnnnnngcttactttgacgctgccccagcaacagttactactccagcagcacagggcacaggcacagctgctggccgctgcagtgcagcagcactccgccagccagcagcacagtgctgctggggccaccatctccgcctctgctgccacgcccatgacgcagatccccctgtctcagcccatacagatcgcacagnnnnnnnnnnnnnnnnnnnnnnnnnnnnnnnnnnnnnnnnnnnnnnnnnnnnnnnnnnnnnnnnnnnnnnnnnnnnnnnnnnnnnnnnnnnnnnnnnnnnnnnnnnnnnnnnnnnnnnnnnnnnnnnnnnnnnnnnnnnnnnnnnnnnnnnnnnnnnnnnnnnnnnnnnnnnnnnnnnnnnnnnnnnnnnnnnnnnnnnnnnnnnnnnnnnnnnnnnnnnnnnnnnnnnnnnnnnnnnnnnnnnnnnnnnnnnnnnnnnnnnnnnnnnnnnnnnnnnnnnnnnnnnnnnnnnnnnnnnnnnnnnnnnnnnnnnnnnnnnnnnnnnnnnnnnnnnnnnnnnnnnnnnnnnnnnnnnnnnnnnnnnnnnnnnnnnnnnnnnnnnnnnnnnnnnnnnnnnnnnnnnnnnnnnnnnnnnnnnnnnnnnnnnnnnnnnnnnnnnnnnnnnnnnnnnnnnnnnnnnnnnnnnnnnnnnnnnnnnnnnnnnnnnnnnnnnnnnnnnnnnnnnnnnnnnnnnnnnnnnnnnnnnnnnnnnnnnnnnnnnnnnnnnnnnnnnnnnnnnnnnnnnnnnnnnnnnnnnnnnnnnnnnnnnnnnnnnnnnnnnnnnnnnnnnnnnnnnnnnnnnnnnnnnnnnnnnnnnnnnnnnnnnnnnnnnnnnnnnnnnnnnnnnnnnnnnnnnnnnnnnnnnnnnnnnnnnnnnnnnnnnnnnnnnnnnnnnnnnnnnnnnnnnnnnnnnnnnnnnnnnnnnnnnnnnnnnnnnnnnnnnnnnnnnnnnnnnnnnnnnnnnnnnnnnnnnnnnnnnnnnnnnnnnnnnnnnnnnnnnnnnnnnnnnnnnnnnnnnnnnnnnnnnnnnnnnnnnnnnnnnnnnnnnnnnnnnnnnnnnnnnnnnnnnnnnnnnnnnnnnnnnnnnnnnnnnnnnnnnnnnnnnnnnnnnnnnnnnnnnnnnnnnnnnnnnnnnnnnnnnnnnnnnnnnnnnnnnnnnnnnnnnnnnnnnnnnnnnnnnnnnnnnnnnnnnnnnnnnnnnnnnnnnnnnnnnnnnnnnnnnnnnnnnnnnnnnnnnnnnnnnnnnnnnnnnnnnnnnnnnnnnnnnnnnnnnnnnnnnnnnnnnnnnnnnnnnnnnnnnnnnnnnnnnnnnnnnnnnnnnnnnnnnnnnnnnnnnnnnnnnnnnnnnnnnnnnnnnnnnnnnnnnnnnnnnnnnnnnnnnnnnnnnnnnnnnnnnnnnnnnnnnnnnnnnnnnnnnnnnnnnnnnnnnnnnnnnnnnnnnnnnnnnnnnnnnnnnnnnnnnnnnnnnnnnnnnnnnnnnnnnnnnnngaggtgccttactcagtctgaatccagggaccctgagcggtgctctcagcccagctctaatgagcaacagtacactggcaactattcaa

SEQ ID NO: 19728 - DNA, 137 bp, Macaca Mulatta
gtaaacatacttgttttggccatttgtaattctttctgaaatatccatctttttgttatggactttacgacctttatatttttaaagatactgattttttgcccatgcttgtggcagaagttttccttacttgccat

SEQ ID NO: 19729 - DNA, 713 bp, Macaca Mulatta
  misc_feature (1)...(713): n = A,T,C or G
gggacagggctttttctgctgcttcctttacccctgtgttttgctcagatctctaaattgactcagcttcagctctagcaaaagccacctgctgtgtggtgaggactttcaggcagctttgtggggagctacatgtggcaaggaactgacaggccttcagccaaaggcacatgactgagtcatcttggaagtgaaccttccacctatgagatgactctagtcctggctgacatcttgactgcaacctgcaagcctttaggagggctccagaaaccagcagtaacccagaactaatgaggcgtcaagaagaactcagacgcttggaagaactctgaaaccaggagttgcaaaaacagaagcaaatacaactaagtggaagaaatcaccatatcttttaatcagtggactcagatttagcaggagtgttatgcaactaataagaacaagtttcagacatgaagaggagcatcggcggcgtgaggaagaaatgatctgacacagagaacagaaggaactgaggccacagcaagagggctttaagccaaactacatggaaaatagtttcgctcttgttgttcaggctggagtgcaataggacnnnnnnnnnnnnnnnnnnnnnnnnnnnnnnnnnnnnnnnnnnnnnnnnnnnnnnnannnnnnnnnnnnnnnnnnnnnnnnnnnnccctgccatcaatgcccttcatgccccagct

SEQ ID NO: 19730 - DNA, 451 bp, Macaca Mulatta
ggtgaagaagcatctgcaggacctgtccagcaggatctccagagctcggcacaacgaactctgaaggcgtcagggaacccggcccggcagggaagaggccagcgtgaaggacctgggctcttggccatggcatttccgtggacagcctgccgtgagggtagctggggccggcacaggtgtcgcagcaggaaggattgtttctggtgactgcagccgctgctgtcacgacataggacttggtggtggtcgcgtctgggtctgagatgggcccagctctgactcagggggttgtcttccactcagcgtcagcgtggcagtcaccaccccagtgaggacctcgatgtccagctgctgtcgggtctgacagtcttcttgttaaacaacacgatttacataaaaaaatcttacacatctgcccctggaaatactatgtacaaagtccttaaaaaat

SEQ ID NO: 19731 - DNA, 925 bp, Macaca Mulatta
  misc_feature (1)...(925): n = A,T,C or G
gggggcttgctgcctgccagatgttatatccacatctgaatctgctgagggcaagacagaggagcacaaaaagggacagggctcacattctcccccaaatatagtcagcataacagaggaagaggatgcagttgcagcagtttccaatcctgtcccagaaataagaaaactgaggattaaagaagcaaagcagtctgccttggcttttctcagcctagcccagcatcactatggtggacgctttcctgggcacctggaagctagtggacagcaagaatttcgatgactacatgaagtcaatcggagtgggttttgctaccaggcaggtggccaacatgaccaagcctaccacgatcatcgaaaagaatggggacattctcaccctaaaaacacacagcaccttcaagaacacagagatcaacttcaagctgggggtggagtttgatgagacaacagcagatgacaggaaggtcaagtccattgtgacactggatggagggaaactcattcacctgcagaaatgggatgggcaagagacgacacttgtgcgggagctaattgatggaaaactcatactgacactcacccacggcactgcagtttgcactcgcacttatgagaaagaggcatgacccgactgcactgttgctgactactctgccaatcggctacccctcgactcagcaccacattgcctcattttttcctctgcattttgtacaaatccacgaattcttctgaggtcaggtgccactggccgggatcaagttcccatgnngatgggtgtgtttttttttaacggcactcacagggtgctctgaggtcaataaaagcagagccaagatccctctggggatagttaaaaaggtaaaaaacccttgtcggccggccttcggcccttcgaaaaaactttcttaaaccctta

SEQ ID NO: 19732 - DNA, 485 bp, Macaca Mulatta
  misc_feature (1)...(485): n = A,T,C or G
gnnnnnnnnnnnnnnnnnnnnnnnnnnnnnnnnnnnnnnnnnnnnnnnnnnnnnnnnnnnnnnnnnnnnnnnnnnnnnnnnnnnnnnnnnnnnnnnnnnnnnnnccatgccacgaagtgtgttttattttcattattcatacaaataattttctataatattccagggcaaaccggagaatttggcagtccgattgggcctcgtgccgaattcggcacgaggcagacctacagcacgtttgacacagactcacagaacgatgactcactgctcaagaactacgagctgctccactgcttcaggaaggacatggatatggtcgagacattcctgcgcatggtgcagtgccgcactgtggagggcagctgtggcttctaggtgcccgcgtggcatcctgtgacccctccccagtgcctgtcctggccccggaaggtgccactccagtgcccaccaaccttgtcctaataaaattaagttgtatcatt

SEQ ID NO: 19733 - DNA, 303 bp, Macaca Mulatta
gggaattattcaattgatttgaatgatttttctttacaaaacaaactcattagtcattatctgcttagcagtttagggaacaatttggcaattttgtggtttttcgagattatcgttttcttaaagtgccagtattttaaaatagcgttcttgtaattttacacgcttttgtgatggagtgctgttttgttacataattttgacttggattctttccatttgcatttgtttatgtaatttcaggaggaatactgaacatctgagtcctggatgatactaataaactaataattgcagaggttt

SEQ ID NO: 19734 - DNA, 1147 bp, Macaca Mulatta
  misc_feature (1)...(1147): n = A,T,C or G
gatgcctgaggaaacgcagacccaggaccaaccgatggaggaggaggaggttgagacgttcgcctttcaggcagaaattgcccagttgatgtcattgattatcaatactttttattcgaacaaagagatctttctaagagagctaatttcaaattcatcagatgngcattggacaaaatccgctatgagagcttgacggatcccagtanattagactctggganagagctgcatattaacctgatacaaataaacaagatcgaaccctcactattgtggatactggaattggnnnnnnnnnnnnnnnnnnnnnnnnnnnnnnnnnnnnnnnnnnnnnnnnnnnnnnnnnnnnnnnnnnnnnnnnnnnnnnnnnnnnnnnnnnnnnnnnnnnnnnnnnnnnnnnnnnnnnnnnnnnnnnnnnnnnnnnnnnnnnnnnnnnnnnnnnnnnnnnnnnnnnnnnnnnnnnnnnnnnnnnnnnnnnnnnnnnnnnnnnnnnnnnnnnnnnnnnnnnnnnnnnnnnnnnnnnnnnnnnnnnnnnnnnnnnnnnnnnnnnnnnnnnnnnnnnnnnnnnnnnnnnnnnnnnnnnnnnnnnnnnnnnnnnnnnnnnnnnnnnnnnnnnnnnnnnnnnnnnnnnnnnnnnnnnnnnnnnnnnnnnnnnnnnnnnnnnnnnnnnnnnnnnnnnnnnnnnnnnnnnnnnnnnnnnnnnnnnnnnnnnnnnnnnnnnnnnnnnnnnnnnnnnnnnnnnnnnnnnnnnnnnngaagacaaacctgaaattgaagatgttggttctgatgannnnnnnnnnnnnnnnnnnnnnnnnnnnnnnnnnnnnnnnnnnnnnnnnnnnnnnnnnnnnnnnnnnnnnnnnnnnnnnnnnnnnnnnnnnnnnnnnnnnnnnnnnnnnnnnnnnnnnnnnnnnnnnnnnnnnnnnnnnnnnnnnnnnnnnnnnnnnnnnnnnnnnnnnnnnnnnnnnnnnnnnagcatttttcagttgaagggcagttggaattcagagcccttctatttgtcccacgacgtgctccttttgacctgtttgaaaacagaaagaaaaagaacaacatcaaattgtatgtacgcagagttttcatcatggataactgtgaggagctaatccctgaatatctg

SEQ ID NO: 19735 - DNA, 369 bp, Macaca Mulatta
acatcgataggatttcttatgcgtccgggttaatttttcactccagtgcgtcctgctgcaggggccttagctgatgggagctgcttcccccccatgcctcaccggtcccagatcagggctccagggacagatgatgaatctcaaacgagccagccagggggtcttttggttataaatggagcagttggccctgtctgagagctgatgatctcacctttgtatttcggagggtgaattcatgctgagaatttgcagatgcaagcttctttcctaggttttctgaacgtcttgaaacatcccaggtcccagatctggtgcagtttcccgagaggagcggggtggggtttgtcttctgcgtgcctgtgtcct

SEQ ID NO: 19736 - DNA, 2222 bp, Macaca Mulatta
  misc_feature (1)...(2222): n = A,T,C or G
cgggggtcacagctcttatggctgcagctagcgtgaccccccctggctccttggagttgctacagcctggcttctccaagaccctcctggggaccaagctggaagccaagtacctgtgctccgcctgcggaaacgtcctgcgcaggcccttccaggcgcagtgtggccaccggtactgctccttctgcctggccagcatcctcagnnnnnnnnnnnnnnnnnnnnnnnnnnnnnnnnnnnnnnnnnnnnnnnnnnnnnnnnnnnnnnnnnnnnnnnnnnnnnnnnnnnnnnnnnnnnnnnnnnnnnnnnnnnnnnnnnnnnnnnnnnnnnnnnnnnnnnnnnnnnnnnnnnnnnnnnnnnnnnnnnnnnnnnnnnnnnnnnnnnnnnnnnnnnnnnnnnnnnnnnnnnnnnnnnnnnnnnnnnnnnnnnnnnnnnnnnnnnnnnnnnnnnnnnnnnnnnnnnnnnnnnnnnnnnnnnnnnnnnnnnnnnnnnnnnnnnnnnnnnnnnnnnnnnnnnnnnnnnnnnnnnnnnnnnnnnnnnnnnnnnnnnnnnnnnnnnnnnnnnnnnnnnnnnnnnnnnnnnnnnnnnnnnnnnnnnnnnnnnnnnnnnnnnnnnnnnnnnnnnnnnnnnnnnnnnnnnnnnnnnnnnnnnnnnnnnnnnnnnnnnnnnnnnnnnnnnnnnnnnnnnnnnnnnnnnnnnnnnnnnnnnnnnnnnnnnnnnnnnnnnnnnnnnnnnnnnnnnnnnnnnnnnnnnnnnnnnnnnnnnnnnnnnnnnnnnnnnnnnnnnnnnnnnnnnnnnnnnnnnnnnnnnnnnnnnnnnnnnnnnnnnnnnnnnnnnnnnnnnnnnnnnnnnnnnnnnnnnnnnnnnnnnnnnnnnnnnnnnnnnnnnnnnnnnnnnnnnnnnnnnnnnnnnnnnnnnnnnnnnnnnnnnnnnnnnnnnnnnnnnnnnnnnnnnnnnnnnnnnnnnnnnnnnnnnnnnnnnnnnnnnnnnnnnnnnnnnnnnnnnnnnnnnnnnnnnnnnnnnnnnnnnnnnnnnnnnnnnnnnnnnnnnnnnnnnnnnnnnnnnnnnnnnnnnnnnnnnnnnnnnnnnnnnnnnnnnnnnnnnnnnnnnnnnnnnnnnnnnnnnnnnnnnnnnnnnnnnnnnnnnnnnnnnnnnnnnnnnnnnnnnnnnnnnnnnnnnnnnnnnnnnnnnnnnnnnnnnnnnnnnnnnnnnnnnnnnnnnnnnnnnnnnnnnnnnnnnnnnnnnnnnnnnnnnnnnnnnnnnnnnnnnnnnnnnnnnnnnnnnnnnnnnnnnnnnnnnnnnnnnnnnnnnnnnnnnnnnnnnnnnnnnnnnnnnnnnnnnnnnnnnnnnnnnnnnnnnnnnnnnnnnnnnnnnnnnnnnnnnnnnnnnnnnnnnnnnnnnnnnnnnnnnnnnnnnnnnnnnnnnnnnnnnnnnnnnnnnnnnnnnnnnnnnnnnnnnnnnnnnnnnnnnnnnnnnnnnnnnnnnnnnnnnnnnnnnnnnnnnnnnnnnnnnnnnnnnnnnnnnnnnnnnnnnnnnnnnnnnnnnnnnnnnnnnnnnnnnnnnnnnnnnnnnnnnnnnnnnnnnnnnnnnnnnnnnnnnnnnnnnnnnnnnnnnnnnnnnnnnnnnnnnnnnnnnnnnnnnnnnnnnnnnnnnnnnnnnnnnnnnnnnnnnnnnnnnnnnnnnnnnnnnnnnnnnnnnnnnnnnnnnnnnnnnnnnnnnnnnnnnnnnnnnnnnnnnnnnnnnnnnnnnnnnnnnnnnnnnnnnnnnnnnnnnnnnnnnnnnnnnnnnnnnnnnnnnnnnnnnnnnnnnnnnnnnnnnnnnnnnnnnnnnnnnnnnnnnnnnnnnnnnnnnnnnnnnnnnnnnnatcccagcagtgcccgtgcagcaggagcgcagtggatgaccttgcgtccctcgggcatgacaaaggaggagggctgctccaggagaagggcctcctgctggccagagtgaggagggccgagcggcttggttctccccgctggcccctggagagaagggagtgttcttagacccctgggtgcttgtctgcacagagctctggtctgtgccaccttggccaggccggctgtgggagagggtctggtcccacgctgcctctgctcagaccactgtgtggggggtgcacagcacagcctgcgggtgaaatgtgagagctcaccatcgagctcacgagacagttattaaaccattcaaatctc

SEQ ID NO: 19737 - DNA, 1486 bp, Macaca Mulatta
  misc_feature (1)...(1486): n = A,T,C or G
ctctcgtttgaggatgtggcgatgtacttcaccagagaggagtggggccacctcgactggggtcagaaggacctctaccgagatgtgatgctggagaactacaggaacatggtcttgctggnnnnnnnnnnnnnnnnnnnnnnnnnnnnnnnnnnnnnnnnnnnnnnnnnnnnnnnnnnnnnnnnnnnnnnnnnnnnnnnnnnnnnnnnnnnnnnnnnnnnnnnnnnnnnnnnnnnnnnnnnnnnnnnnnnnnnnnnnnnnnnnnnnnnnnnnnnnnnnnnnnnnnnnnnnnnnnnnnnnnnnnnnnnnnnnngcagcgattgtggcaattcttcctccaagcctcaaactttattcagcatcgggcgcatctcacactggagaaaaaccgtttaagtgcggagaatgtgggaagagctataatcagcgggtgcacctcacccagcaccagcgggtccacacgggggagaaaccctacaaatgtcaggtgtgcggaaaggctttcngaagtcccttatgtccacaaaaaatcctccactggagagagaccacataaatgtaacgagtgtgggaaaagcttcattcagagcgcacatcttattcacatcaaagaatacacactggggagaaaccattcaggtgtgaggaatgtgggaaagctacaacaacgcgtgcactaactcagcatcagcgcgtcacacaggtgagaagccnnnnnnnnnnnnnnnnnnnnnnnnnnnnnnnnnnnnnnnnnnnnnnnnnnnnnnnnnnnnnnnnnnnnnnnnnnnnnnnnnnnnnnnnnnnnnnnnnnnnnnnnnnnnnnnnnnnnnnnnnnnnnnnnnnnnnnnnnnnnnnnnnnnnnnnnnnnnnnnnnnnnnnnnnnnnnnnnnnnnnnnnnnnnnnnnnnnnnnnnnnnnnnnnnnnnnnnnnnnnnnnnnnnnnnnnnnnnnnnnnnnnnnnnnnnnnnnnnnnnnnnnnnnnnnnnnnnnnnnnnnnnnnnnnnnnnnnnnnnnnnnnnnnnnnnnnnnnnnnnnnnnnnnnnnnnnnnnnnnnnnnnnnnnnnnnnnnnnnnnnnnnnnnnnnnnnnnnnnnnnnnnnnnnnnnnnnnnnnnnnnnnnnnnnnnnnnnnnnnnnnnnnnnnnnnnnnnnnnntggaagcctttccagtgccccgagtgtgggaaaggattcagtcggaggtccaatcttgtcaggcaccagcgaacccatgaagaggagaagtcctatggttgtgtggagtgtgggaacgggctttaccttgagagagtacatgatgaagcaccagagaacccaaatgggaaagaggcctttttgtgtgcagtgagtgttggaaaacagtcagccagagacaccacctggaggtgcaccagggcagtctcaccggagagaagccttcccagtgcggggactgagggaagagcttcagccgccggcagcactagcaggtgcaccggaggccgcacac

SEQ ID NO: 19738 - DNA, 123 bp, Macaca Mulatta
agatccctatggttcaggaggccagaaatttccacctctaggtggtggtggtggcataggttatgaagctaatcctggcgttccaccagcaaccatgagtggttccatgatgggaagtgacat

SEQ ID NO: 19739 - DNA, 639 bp, Macaca Mulatta
ctacatttgccgaagagccctcaggttggactgcaggaactccttaaagctgcgcaggatgagatgcgtcgtcatgtcctgcagccactggttctgtgcctgcagcttcgtcagcaggctggcatttgtggttggttcaggggtggttattgcatctagattctttgcctttttctgcaggaactggatcaggacttttgtactcatttgcacagctctggcttgctcctcactactctcaaacctgttctggaggtactctaggtatacctcaaactccaaaagaccagtgatgattttcaccaggcaagtgtcctcattgaatccagattggaagcatccatctttttcagccatctttggaaggttcaggttgttttctgccagtgcctctttgctgctttcacacatgttactcctgttacatgtctcctttctcagggctgagatgccgtcgaggatgtaccgaatgtgtttgtcaattcgttctgaagaggtcagtggctggctgtgtggggcggctacatttttggaatcttctcctgggagtactggggcggggaaggcagcaggcaacaccaggagcagccccagggagaaggcaactggaccgaaggcgcttgtggagaaggagttcat

SEQ ID NO: 19740 - DNA, 694 bp, Macaca Mulatta
  misc_feature (1)...(694): n = A,T,C or G
gtggaagtgctcagcattggagtgaatggagccacccaatccactggggggagcaatagttcaaaagagaatcctttcctgtttgcattggaagccgtggttatctccgttggctccatgggattgattatcagccttctctgtgtgtatttctggctggaacggacgatgccccgaattcccaccctgaagaacctagaggatcttgttactgaataccacgggaacttttcggcctggagtggtgtgtctaagggactggctgagagtctgcagccagactacagtgaacgactctgactcgtcagtgagattcccccaaaaggaggggccctcggggaggggcctgggccctccccatgcaaccagcatagcccctactgggcccccccatgttacaccctgaagcctgaaacctgaaccccaatcctctgacagaagaaccccagggtcctgtagccctaagtggtactaactttccttcattcaacccatccgcgtctcatagtcacctcaccccactgtggctgatttggaattttgtgtccccatgtaagcgcctcttcattcggcattccccacttgagaattacccttttgccctgtacatgtntttcatctccctcagtctggcccttcctttccacaggattcttcctccctccctctttctctcccttcctctttccatcta

SEQ ID NO: 19741 - DNA, 128 bp, Macaca Mulatta
ctcccaccctcagcctcctaggggcccctcctcaaccctctggcaaatttgtctctgaaaacaaagggttagaaccatggggctcaggggtaatgtttcatgaaatctttaatgaaattggggagagg

SEQ ID NO: 19742 - DNA, 236 bp, Macaca Mulatta
gccacccattccacagcatttggcaggaaaccaagagaacgttctctctcatccccgtttttacagatgaggggcagtgtctctcgcccacagtcacacagagcctggtctcggtcctgggtccttcgattgtagagcctgatctcccactcacctggctcccctctgcctcagagcaggccccacccttgcctccgcacctcggttttcttccgggactcccgtcctgcccctcc

SEQ ID NO: 19743 - DNA, 152 bp, Macaca Mulatta
cagcagggttaaggagagctcctaggtacctctgcactactgtcatgcatgataaaagggaagagaaagaagatagtagaagggagataaagagtgagagcctggagtaaaggtaaggagtgggagaagcagaaagtaagatgaaaaggaaa

SEQ ID NO: 19744 - DNA, 285 bp, Macaca Mulatta
agagcctcctgtcgctgagccctgacgtgccggtgccatccgaccatggagggactgagtccagcccaggctggggctcctcgggactctggagcctgagcccctccgactccagcccgtctggggtcacctcccgcctgcctggccgctccaccagcctggtagaaggccgcagctgtggctgggtgcccccaccccctggcttcgcaccgctggctccccgcctgggccccgagctgtcaccctcacccacttcgcccactgcgacctccaccaccccctcgc

SEQ ID NO: 19745 - DNA, 4182 bp, Macaca Mulatta
  misc_feature (1)...(4182): n = A,T,C or G
ccggccaaggagtgcgaaaaggatcaattccagtgccggaacgagcgctgcatcccctctgtgtggagatgcgacgaggacgatgactgcttagaccacagcgacgaggacgactgccnnnnnnnnnnnnnnnnnnnnnnnnnnnnnnnnnnnnnnnnnnnnnnnnnnnnnnnnnnnnnnnnnnnnnnnnnnnnnnnnnnnnnnnnnnnnnnnnnnnnnnnnnnnnnnnnnnnnnnnnnnnnnnnnnnnnnnnnnnnnnnnnnnnnnnnnnnnnnnnnnnnnnnnnnnnnnnnnnnnnnnnnnnnnnnnnnnnnnnnnnnnnnnnnnnnnnnnnnnnnnnnnnnnnnnnnnnnnnnnnnnnnnnnnnnnnnnnnnnnnnnnnnnnnnnnnnnnnnnnnnnnnnnnnnnnnnnnnnnnnnnnnnnnnnnnnnnnnnnnnnnnnnnnnnnnnnnnnnnnnnnnnnnnnnnnnnnnnnnnnnnnnnnnnnnnnnnnnnnnnnnnnnnnnnnnnnnnnnnnnnnnnnnnnnnnnnnnnnnnnnnnnnnnnnnnnnnnnnnnnnnnnnnnnnnnnnnnnnnnnnnnnnnnnnnnnnnnnnnnnnnnnnnnnnnnnnnnnnnnnnnnnnnnnnnnnnnnnnnnnnnnnnnnnnnnnnnnnnnnnnnnnnnnnnnnnnnnnnnnnnnnnnnnnnnnnnnnnnnnnnnnnnnnnnnnnnnnnnnnnnnnnnnnnnnnnnnnnnnnnnnnnnnnnnnnnnnnnnnnnnnnnnnnnnnnnnnnnnnnnnnnnnnnnnnnnnnnnnnnnnnnnnnnnnnnnnnnnnnnnnnnnnnnnnnnnnnnnnnnnnnnnnnnnnnnnnnnnnnnnnnnnnnnnnnnnnnnnnnnnnnnnnnnnnnnnnnnnnnnnnnnnnnnnnnnnnnnnnnnnnnnnnnnnnnnnnnnnnnnnnnnnnnnnnnnnnnnnnnnnnnnnnnnnnnnnnnnnnnnnnnnnnnnnnnnnnnnnnnnnnnnnnnnnnnnnnnnnnnnnnnnnnnnnnnnnnnnnnnnnnnnnnnnnnnnnnnnnnnnnnnnnnnnnnnnnnnnnnnnnnnnnnnnnnnnnnnnnnnnnnnnnnnnnnnnnnnnnnnnnnnnnnnngctggcaagagcccatccctaatcttcaccaaccggcatgaggtgcggaggatcgacctggtgaagcggaactattcacgcctcatccccatgctcaagaatgtcgtggcactagatgtggaagttgccaccaatcgcatctactggtgtgacctctcctacggtaagatctatagnnnnnnnnnnnnnnnnnnnnnnnnnnnnnnnnnnnnnnnnnnnnnnnnnnnnnnnnnnnnnnnnnnnnnnnnnnnnnnnnnnnnnnnnnnnnnnnnnnnnnnnnnnnnnnnnnnnnnnnnnnnnnnnnnnnnnnnnnnnnnnnnnnnnnnnnnnnnnnnnnnnnnnnnnnnnnnnnnnnnnnnnnnnnnnnnnnnnnnnnnnnnnnnnnnnnnnnnnnnnnnnnnnnggttcatgtattggtctgactgggggaaccaggccaagattgagaaatctgggctcaacggtgtggaccggcaaacactagtgtcagacaatattgaatggcccaacggaatcaccctggnnnnnnnnnnnnnnnnnnnnnnnnnnnnnnnnnnnnnnnnnnnnnnnnnnnnnnnnnnnnnnnnnnnnnnnnnnnnnnnnnnnnnnnnnnnnnnnnnnnnnnnnnnnnnnnnnnnnnnnnnnnnnnnnnnnnnnnnnnnnnnnnnnnnnnnnnnnnnnnnnnnnnnnnnnnnnnnnnnnnnnnnnnnnnnnnnnnnnnnnnnnnnnnnnnnnnnnnnnnnnnnnnnnnnnnnnnnnnnnnnnnnnnnnnnnnnnnnnnnnnnnnnnnnnnnnnnnnnnnnnnnnnnnnnnnnnnnnnnnnnnnnnnnnnnnnnnnnnnnnnnnnnnnnnnnnnnnnnnnnnnnnnnnnnnnnnnnnnnnnnnnnnnnnnnnnnnnnnnnnnnnnnnnnnnnnnnnnnnnnnnnnnnnnnnnnnnnnnnnnnnnnnnnnnnnnnnnnnnnnnnnnnnnnnnnnnnnnnnnnnnnnnnnnnnnnnnnnnnnnnnnnnnnnnnnnnnnnnnnnnnnnnnnnnnnnnnnnnnnnnnnnnnnnnnnnnnnnnnnnnnnnnnnnnnnnnnnnnnnnnnnnnnnnnnnnnnnnnnnnnnnnnnnnnnnnnnnnnnnnnnnnnnnnnnnnnnnnnnnnnnnnnnnnnnnnnnnnnnnnnnnnnnnnnnnnnnnnnnnnnnnnnnnnnnnnnnnnnnnnnnnnnnnnnnnnnnnnnnnnnnnnnnnnnnnnnnnnnnnnnnnnnnnnnnnnnnnnnnnnnnnnnnnnnnnnnnnnnnnnnnnnnnnnnnnnnnnnnnnnnnnnnnnnnnnnnnnnnnnnnnnnnnnnnnnnnnnnnnnnnnnnnnnnnnnnnnnnnnnnnnnnnnnnnnnnnnnnnnnnnnnnnnnnnnnnnnnnnnnnnnnnnnnnnnnnnnnnnnnnnngcaatcagcagctttgatcgcccactgtgggcagagccctgtcttggggagaccagagaactggaagacccagcccctgccctcaaggagctttttgtcttgccgggggaaccaaggtcacagctgcaccaactcccgaggaaccctctttccgagctgcctgtcgtcaagtccaagnnnnnnnnnnnnnnnnnnnnnnnnnnnnnnnnnnnnnnnnnnnnnnnnnnnnnnnnnnnnnnnnnnnnnnnnnnnnnnnnnnnnnnnnnnnnnnnnnnnnnnnnnnnnnnnnnnnnnnnnnnnnnnnnnnnnnnnnnnnnnnnnnnnnnnnnnnnnnnnnnnnnnnnnnnnnnnnnnnnnnnnnnnnnnnnnnnnnnnnnnnnnnnnnnnnnnnnnnnnnnnnnnnnnnnnnnnnnnnnnnnnnnnnnnnnnnnnnnnnnnnnnnnnnnnnnnnnnnnnnnnnnnnnnnnnnnnnnnnnnnnnnnnnnnnnnnnnnnnnnnnnnnnnnnnnnnnnnnnnnnnnnnnnnnnnnnnnnnnnnnnnnnnnnnnnnnnnnnnnnnnnnnnnnnnnnnnnnnnnnnnnnnnnnnnnnnnnnnnnnnnnnnnnnnnnnnnnnnnnnnnnnnnnnnnnnnnnnnnnnnnnnnnnnnnnnnnnnnnnnnnnnnnnnnnnnnnnnnnnnnnnnnnnnnnnnnnnnnnnnnnnnnnnnnnnnnnnnnnnnnnnnnnnnnnnnnnnnnnnnnnnnnnnnnnnnnnnnnnnnnnnnnnnnnnnnnnnnnnnnnnnnnnnnnnnnnnnnnnnnnnnnnnnnnnnnnnnnnnnnnnnnnnnnnnnnnnnnnnnnnnnnnnnnnnnnnnnnnnnnnnnnnnnnnnnnnnnnnnnnnnnnnnnnnnnnnnnnnnnnnnnnnnnnnnnnnnnnnnnnnnnnnnnnnnnnnnnnnnnnnnnnnnnnnnnnnnnnnnnnnnnnnnnnnnnnnnnnnnnnnnnnnnnnnnnnnnnnnnnnnnnnnnnnnnnnnnnnnnnnnnnnnnnnnnnnnnnnnnnnnnnnnnnnnnnnnnnnnnnnnnnnnnnnnnnnnnnnnnnnnnnnnnnnnnnnnnnnnnnnnnnnnnnnnnnnnnnnnnnnnnnnnnnnnnnnnnnnnnnnnnnnnnnnnnnnnnnnnnnnnnnnnnnnnnnnnnnnnnnnnnnnnnnnnnnnnnnnnnnnnnnnnnnnnnnnnnnnnnnnnnnnnnnnnnnnnnnnnnnnntgccatccttacagagctaagtggagacatttccagaacagcccaagtttactatagagactggcccaggctctgaacatctgggacatgctgtggttgagaataaagatggtggaataggttttattacatctcttatttctcttttccccttactctctaccatttcctttatgtggggaaacattttaaagtaataaataggttacttaccatcatatgttcatatagatgaaactaatttttggcttaagtcagaacaactggccaaaactgaagtcatatttgaggggggaaatggcatacacaatattatagtatattggatatttacattcacacaggaatttggtttactgctttgtaaataaaaggaaaaactctgggtatatgt

SEQ ID NO: 19746 - DNA, 1827 bp, Macaca Mulatta
  misc_feature (1)...(1827): n = A,T,C or G
gccgaaatgagttgattgcacgctatattaaactgaggacggggaagactcggacgaganaacaggtnnnnnnnnnnnnnnnnnnnnnnnnnnnnnnnnnnnnnnnnnnnnnnnnnnnnnnnnnnnnnnnnnnnnnnnnnnnnnnnnnnnnnnnnnnnnnnnnnnnnnnnnnnnnnnnnnnnnnnnnnnnnnnnnnnnnnnnnnnnnnnnnnnnnnnnnnnnnnnnnnnnnnnnnnnnnnnnnnnnnnnnnnnnnnnnnnnnnnnnnnnnnnnnnnnnnnnnnnnnnnnnnnnnnnnnnnnnnnnnnnnnnnnnnnnnnnnnnnnnnnnnnnnnnnnnnnnnnnnnnnnnnnnnnnnnnnnnnnnnnnnnnnnnnnnnnnnnnnnnnnnnnnnnnnnnnnnnnnnnnnnnnnnnnnnnnnnnnnnnnnnnnnnnnnnnnnnnnnnnnnnnnnnnnnnnnnnnnnnnnnnnnnnnnnnnnnnnnnnnnnnnnnnnnnnnnnnnnnnnnnnnnnnnnnnnnnnnnnnnnnngtacagcaaacacctgtttgtgcacatcggccagacgaaccccgccttctcagacccacccttggaggcagtagacgtgcgccagatctatgacaaattccccgagaaaaaggggggactgaaggagctctatgagaaggggccccctaatgccttcttccttgtcaagttctggnnnnnnnnnnnnnnnnnnnnnnnnnnnnnnnnnnnnnnnnnnnnnnnnnnnnnnnnnnnnnnnnnnnnnnnnnnnnnnnnnnnnnnnnnnnnnnnnnnnnnnnnnnnnnnnnnnnnnnnnnnnnnnnnnnnnnnnnnnnnnnnnnnnnnnnnnnnnnnnnnnnnnnnnnnnnnnnnnnnnnnnnnnnnnnnnnnnnnnnnnnnnnnnnnnnnnnnnnnnnnnnnnnnnnnnnnnnnnnnnnnnnnnnnnnnnnnnnnnnnnnnnnnnnnnnnnnnnnnnnnnnnnnnnnnnnnnnnnnnnnnnnnnnnnnnnnnnnnnnnnnnnnnnnnnnnnnnnnnnnnnnnnnnnnnnnnnnnnnnnnnnnnnnnnnnnnnnnnnnnnnnnnnnnnnnnnnnnnnnnnnnnnnnnnnnnnnnnnnnnnnnnnnnnnnnnnnnnnnnnnnnnnnnnnnnnnnnnnnnnnnnnnnnnnnnnnnnnnnnnnnnnnnnnnnnnnnnnnnnnnnnnnnnnnnnnnnnnnnnnnnnnnnnnnnnnnnnnnnnnnnnnnnnnnnnnnnnnnnnnnnnnnnnnnnnnnnnnnnnnnnnnnnnnnnnnnnnnnnnnnnnnnnnnnnnnnnnnnnnnnnnnnnnnnnnnnnnnnnnnnnnnnnnnnnnnnnnnnnnnnnnnnnnnnnnnnnnnnnnnnnnnnnnnnnnnnnnnnnnnnnnnnaccttcagcctccggcatgtgtggccactgccccctcaccccccgttggggaagcgtgatgggcaggtgagggcaggatggagaccaagggagtcagtgagtggaggccctgggaaaggagagtgtccggttagggttgggctgaggacagaggggaccatacatctttgcccctctgtgtcccaggcctggtgcccagactccttgcatggcttatgcagtcctcagactctgcacagcgagtgtgggtctctgggtttcagatgatgtgtccaggctccaggaagttgagggacccacaggagaggtgggcagagctggagttctcatccagggctgcttgtccccagagcccaggtttacactacctccctggggcgggggctggccgcagggtaagggagaggctctgcagtgt

SEQ ID NO: 19747 - DNA, 125 bp, Macaca Mulatta
agaaagaacaggagctttgtgttcgtgaaagactagcagaggacaaactggctagagcagaaaatctgttgaagaattacagcttgctaaaggaacagaagttcctgtctctggcaagtagtcca

SEQ ID NO: 19748 - DNA, 254 bp, Macaca Mulatta
gcttgaggtttgggcttggtcagtttgccacagggcttggagatggtgaccgtcttctggcattcggcattgtgcagggctcgcttcagacttccagttctggtcttcagggccgtgttcaggtcacattctccccaggcccggaactggtatttgcactccgctccaaattgcttcttccagttgcaggggatcttacatctctgggtcttcatggtttgcttgcactcggctccagtccgagtgccttcccg

SEQ ID NO: 19749 - DNA, 2125 bp, Macaca Mulatta
  misc_feature (1)...(2125): n = A,T,C or G
tccctcccctcgtcagcactcagcccgcagctatttccttctgccaggctctttgaactctggatctctgcttttgctcgctgctctcccgtttttcattctccacattttctcaactactctttctttatccttagccaccctgcttttttcctccttnnnnnnnnnncggggatttcgccttaaaatgatttgtcttccttaccttcgtccatttcaacactgaagactgcaaagaaccttcacctttcccctagtggcatttaaaaattctcaatctgtaaaaagtatttttaaaaggcaaaggaacaggacgcgggaccctctcaacacccttgatccgagtccagaactgcactagcaaccagaactaatatttcatttaaccctaccaaagggaaggcgagaaaagccagaagcaaacttcagctgcctcagcggatccgtggttcccgcatttggaggagccgcgtgccagaaggcgtaggaccccacggggagacaaggaggactcccgaatctcccttggcggctcctcgaggccgaagcggtggactgagctgcgcggaacagctgcagcggaggannnnnnnnnnnnnnnnnnnnnnnnnnnnnnnnnnnnnnnnnnnnnnnnnnnnnnnnnnnnnnnnnnnnnnnnnnnnnnnnnnnnnnnnnnnnnnnnnnnnnnnnnnnnnnnnnnnnnnnnnnnnnnnnnnnnnnnnnnnnnnnnnnnnnnnnnnnnnnnnnnnnnnnnnnnnnnnnnnnnnnnnnnnnnnnnnnnnnnnnnnnnnnnnnnnnnnnnnnnnnnnnnnnnnnnnnnnnnnnnnnnnnnnnnnnnnnnnnnnnnnnnnnnnnnnnnnnnnnnnnnnnnnnnnnnnnnnnnnnnnnnnnnnnnnnnnnnnnnnnnnnnnnnnnnnnnnnnnnnnnnnnnnnnnnnnnnnnnnnnnnnnnnnnnnnnnnnnnnnnnnnnnnnnnnnnnnnnnnnnnnnnnnnnnnnnnnnnnnnnnnnnnnnnnnnnnnnnnnnnnnnnnnnnnnnnnnnnnnnnnnnnnnnnnnnnnnnnnnnnnnnnnnnnnnnnnnnnnnnnnnnnnnnnnnnnnnnnnnnnnnnnnnnnnnnnnnnnnnnnnnnnnnnnnnnnnnnnnnnnnnnnnnnnnnnnnnnnnnnnnnnnnnnnnnnnnnnnnnnnnnnnnnnnnnnnnnnnnnnnnnnnnnnnnnnnnnnnnnnnnnnnnnnnnnnnnnnnnnnnnnnnnnnnnnnnnnnnnnnnnnnnnnnnnnnnnnnnnnnnnnnnnnnnnnnnnnnnnnnnnnnnnnnnnnnnnnnnnnnnnnnnnnnnnnnnnnnnnnnnnnnnnnnnnnnnnnnnnnnnnnnnnnnnnnnnnnnnnnnnnnnnnnnnnnnnnnnnnnnnnnnnnnnnnnnnnnnnnnnnnnnnnnnnnnnnnnnnnnnnnnnnnnnnnnnnnnnnnnnnnnnnnnnnnnnnnnnnnnnnnnnnnnnnnnnnnnnnnnnnnnnnnnnnnnnnnnnnnnnnnnnnnnnnnnnnnnnnnnnnnnnnnnnnnnnnnnnnnnnnnnnnnnnnnnnnnnnnnnnnnnnnnnnnnnnnnnnnnnnnnnnnnnnnnnnnnnnnnnnnnnnnnnnnnnnnnnnnnnnnnnnnnnnnnnnnnnnnnnnnnnnnnnnnnnnnnnnnnnnnnnnnnnnnnnnnnnnnnnnnnnnnnnnnnnnnnnnnnnnnnnnnnnnnnnnnnnnnnnnnnnnnnnnnnnnnnnnnnnnnnnnnnnnnnnnnnnnnnnnnnnnnnnnnnnnnnnnnnnnnnnnnnnnnnnnnnnnnnnnnnnnnnnnnnnnnnnnnnnnnnnnnnnnnnnnnnnnnnnnnnnnnnnnnnnnnnnnnnnnnnnnnnnnnnnnnnnnnnnnnnnnnnnnnnnnnnnnnnnnnnnnnnnnnnnnnnnnnnnnnnnnnnnnnnnnnnnnnnnnnnnnnnnnnnnnnnnnnnnnnnnnnnnnnnngcagctccatctccagttaccaatgtgaaaaaagggaagattgcaaaaaacagcatctctttgtcttggcaagagccagatcgccccaatggaatcatcctggagtatgaaatcaagtattttgaaaag

SEQ ID NO: 19750 - DNA, 844 bp, Macaca Mulatta
cggttgaattctactaaatgcctccccgttcatgtgccacttttccccctgaatccttctctttaggattgatctctcctttctgtggggcaggttaaagaaaaatgtacattttccaggcctcttcataaattctagtgcttattaaaagttaaagggagcattagacagtgaagtaagaaccttattaaccaaatttgttcagaaaccccagtgtgcagagagtcaattgcccataagcccccgtcacctatttgcattacagaagactttggtttggggaggaagttcaatgaaaggaacagtttttctgaatttttttcattcttggttttcacatttccagatggtcccacatcagaagtatcagcagagggtgaagagatcttctgctgaccctcttcctctctgctgaggcagctgcctcctgatcctggccagctcacctctcctgctgtccccacgtgcacaagtctcttacactggacacccactgctcctcagcgtccagtcctcctgggcggccccaggtcctggacaagaaggaacagatgatcttgagtatcagggtggggaaggaggcccagactctgcttcggccatgatttgtgactgcccaggactctcaggttgggctggccctactcaggattacactgaaagtagtggcctcgtaagtacaggtgatggttttggacatgtcaggaattcctaaaggctgaaagagtgtatccaagtaaggtctgaacctctgactgccttttatttggaggaacacgaaaccaaacagaagatgttttggacttgatctgtgtccatacatgggggacctgtctgcatatat

SEQ ID NO: 19751 - DNA, 280 bp, Macaca Mulatta
tttcacatcacttccagaaacagatttttctaatgtagctttgaaacacccttaaatcggccctcgtaggaagacctggtcaggaaagttgtagaagtctcaaagtcaggagaatttgtgaccacctgttgggttatcagagttctaaatgtcgcacagagcttgcttcgccccagaagatagaagggtttaaagcatcttgattgccagagtgctatgttcaatgattacaattgtgtttttatcagttttgctaagaacagcaacaccatcagagttg

SEQ ID NO: 19752 - DNA, 128 bp, Macaca Mulatta
aggaaccccagtaatgaggaagggtcgctgttcttgtatcaacaccaaccaagggactatccacctacaatccttgaaagaccttaaacaatttgctccaaacctttcctgcgagaaaactgaaatca

SEQ ID NO: 19753 - DNA, 298 bp, Macaca Mulatta
  misc_feature (1)...(298): n = A,T,C or G
accaaagacctcaaacacaggtcctgttcaaagaaaaagaacattagagttaaaaatcaaggctttctgatacctgacagtcacccaggaaatgcaggggaccctggaacatcacctcatctacaccgaactttggagaaattgtcatgggtgcccactgagccctgctgganaaggaaacaccaatgctggagaagccatcagcaattgtggaagattttcttttgctttaatcgttctgtacttggcagacactttgaaatcggtatgggaacgtaagttgcagtccagatcaatg

SEQ ID NO: 19754 - DNA, 944 bp, Macaca Mulatta
agaaactagaatcatgtaagtaacaaaagaactttcactagctaacctaattcatgatatgtcaagagattcctgtgaaagtcagccatcagtcagattatcatctacagagagtctggaaagtctactgtcaaagaacgtagatgctgatttgttgagacttcatgcatctgaatgtatttccaaagatgattctgcattgaaagaaatgccagatttaaagcccgtaatcataaagagcacaacaccgaataatactttatatattcaaaataattcgctatctgattttcaaaacattccagtatgggacagtttaggaagttcaaataatcatttgtacttaactagctcattggaaaatatgactgttgatcgtttaaatgctagtaaagaaactgaagttggaagtgtttctttagttgaacaaagtgctgagaattacattttaaaaaatgataatttgcagttttctcagtgtgaaagtccatccctcactgaactgtttcaggaacacaaagaaaacaatataagccagtgctttactttatctgacctttatgaccagtcatctgccagtttcacagatctaagtttgggatcctttcctctgtcacaattagcaaatcgctgtcagtcttcacccggaatatcagaattaacaggatctctctcgtcattggcatttcataaagcttctcccacaagagaccttgagaatttgtcactttctgaattgattgcagaaacaattgatgtagacaactctcagattaggaaagagtcctttgaggtcagtttatctgaagtgaggtctcctggaatagattcaaatattgatcttagtgtccttataaaaaacccagattttgttccaaagcctatagtagaccaatccattggtccatcatcacgaactaaagttctaaattcaaagctaggga

SEQ ID NO: 19755 - DNA, 419 bp, Macaca Mulatta
tggagactgtcccgacacagccacgctgccctgagaggtttccggggcccgctgcgtgccatcactcaaccttaacacttgatgccgtttctttcaatatttatttccagagtctagaggcagcagacacgacctcttagcagggacttttactgggctggtcggggagggggaggtgggatgggacacccaacactttttccatttcttcagagggaaactcagatgtccaaacaaattttaacaaacacattaagaggtttatttgggtaaatggcccgtagtggcttttgccccggaaaggggaaaggaacaagcgggtagatgatttctagcaggcaggaagtcctgtgcggtgtcaccatgagcacctccagctgtactagtgccattggaataataaatttgatatggtggta

SEQ ID NO: 19756 - DNA, 555 bp, Macaca Mulatta
  misc_feature (1)...(555): n = A,T,C or G
atgtgtcgtggaggccgaatgtttgcaccaaccaaaacctggcgccgttggcatcgtagagtgaacacaacccaaaaacgatatgccatctgttctgccctggctgcctcagccctaccagcactggtcatgtctaaaggnnnaggtcatcgtattgaggaagttcctgaacttcctttggtagtggaagataaagttgaaggctacaagaagaccaaggaagctgttttgctccttaagaaacttaaagcctggaatgatatcaaaaaggtnnnnnnnnnnnnnnnnnnnnnnnnnnnnnnnnnnnnnnnnnnnnnnnnnnnnnnnnnnnnnnnnnnnnnnnnnnnnnnnnnnnnnnnnnnnnnnnnnnnnnnnnnnnnnnnnnnnnnnnnnnnnnnnnnnnnnnnnnnnnnnnnnnnnnnnnnnnnnnnnnnnnnnnnnnnnnnnnnnnnnnnnnnnnnnnnnnnnnnnnnnnnnnnnnnnnnnnnnnnnnnnnnnnnnnnnnnnnnnnnnnnnnnnnnnnnnnnnnnccgcttccctcaagagtaactacaa

SEQ ID NO: 19757 - DNA, 590 bp, Macaca Mulatta
  misc_feature (1)...(590): n = A,T,C or G
tacaacaatactgcggatggagtttataaagttttcaatggaaaagacagcataagtaaagttgccataatcgacacctataaaggtaaaaggnnnnnnnnnnnnnnnnnnnnnnnnnnnnnnnnnnnnnnnnnnnnnnnnnnnnnnnnnnnnnnnnnnnnnnnnnnnnnnnnnnnnnnnnnnnnnnnnnnnnnnnnnnnnnnnnnnnnnnnnnnnnnnnnnnnnnnnnnnnnnnnnnnnnnnnnnnnnnnnnnnnnnnnnnnnnnnnnnnnnnnnnnnnnnnnnnnnnnnnnnnnnnnnnnnnnnnnnnnnnnnnnnnnnnnnnnnnnnnnnnnnnnnnnnnnnnnnnnnnnnnnnnnnnnnnnnnnnnnnnnnnnnnnnnnnnnnnnnnnnnnnnnnnnnnnnnnnnnnnnnnnnnnnnnnnnnnnnnnnnnnnnnnnnnnnnnnnnnnnnnnnnnnnnnnnnnnnnnnnnnnnnnnnnnnnnnnnnnnnnnnnnnnnnnnnnnnnnnnnnnnnataactggattcactttacaatttgcaaaacggctgcaggtcaacctattggtcaagccatcaaacaaaattca

SEQ ID NO: 19758 - DNA, 847 bp, Macaca Mulatta
  misc_feature (1)...(847): n = A,T,C or G
gggcttttcacaagatggcgccgaaagcgaagaaggaagctcctgcccctcctaaagccgaagccaaagcgaaggctttaagggccaagaaggcagtgttgaaaggtgtccacagccacaaaaaaaagaagatccgcacgtcacnccacncntnntccgnnggcggcccaagaaacaacttgcgaactccgggaagcaagcccaattatcctccggnnnnnnnnnnnnnnnnnnnnnnnnnnnnnnnggcccccaatggcttatccaaaagtttcccccgaaacaaacagagagtnnnnnnnnnnnnnnnnnnnnnnnnnnnnaaaaaatnnnnnnnnnnnnnnnnnnnnnnnnnnnnnnnnnnnnnntgtccccccccacacccagccgccagaatataaatnnnnnnnnnnnnnnnnnnnnnnnnnnnnnnnnnnnnnctcaaaaatttttnnnnnnnnnncaaggttagatggaaaacnnnnnnntannnnntggtgggnnnnnnnnnnnnnnnnnnnnnnnnnnnnnnnnaagnnttcnntagaaggagaagacgcccgtcaataaaaaaaaaacaanttttgtgtttgtggggagnnnnnnnnnnnnnnnnnnnnntaatatcttcataaaaaagagaagaggggaggtcgtgccccctgtccggtatgncaaaatataaaaaaaagaggagagtttttctttggttgtcttatacagccccgnagggggagaaaagggagaaaaagcaaaatataatgattagtgcgtacgaccctacaataacataaacancagcggggggggagggnnnntnttatattcgccgcgccccccccccccc

SEQ ID NO: 19759 - DNA, 661 bp, Macaca Mulatta
ggggacaggagggaacgaccactagaaggtggccgaactaattccaataacaacaacagcaatccatgttcagaacaagatgttcttacacaggttgttccaagcacagtagcagatcctgggccatcaaagcccagaagagcacagaggcctaattctctggatctttcagccacaaatgtcctggatggcagcagtatacagataggtgagtcaacacaagatggcaaatcaggatcaggtgaaaagatcaagaaacgtgtgaaaactccctattctcttaagcggtggcgcccctccacctgggtcatctccactgaatcactggactgtgaagtcaacaacaatggcagtaacagggcagttcattccaaatccagcactgctgtttaccttgcagaaggaggcactgccccaaacatgggtgtctaaagatataggaatgaacctgcctggggaaatggttttccaagccctatggaaggggaaattaatttttttgggcattcctttttaaaccttgcaaaaaaaaaaggtttaaaacccaccagaacaaggaaaaaaaggggcttttaaccccccccctgggggaaagaaaaccccccccttgcccaaaaaccccctttgtgggaaaaaaagggggacgttgtggcgtgttttc

SEQ ID NO: 19760 - DNA, 486 bp, Macaca Mulatta
  misc_feature (1)...(486): n = A,T,C or G
cgggcccgagaccgttcacctccctttatcccttgttctcctcttcaggatggagctgacctcttgggaaggagggaggggacagcctctgccctgggaacttcgactcggcctactgctaagcgngtgctggctgccacactggcacaggcccctgccccggatgtgcctggctgttcgaggggaagctgctaccccgccacgggcgacctgctggtgggccgagctgacagactgactgcctcatccacctgtggcctgaatggtccccagccctactgcatcgtcagtcacttgcaggncaggatgaaaagaagtgcttcctttgcgactcccggcgccccttctctgctagagacaacccacacagccatcgcatccagaatgtagtcaccagctttgcaccacagcggcgggcagcctggtggcagtcagagaatggtnggtatccctgcagtcaccatccaactggacctggaggctgag

SEQ ID NO: 19761 - DNA, 482 bp, Macaca Mulatta
tgctggctccaatctacgtccacttagggggaccagctgcccaccccaagtccccaggggacggccctcccctctaccaagccactccaagagccagcccctctctgctccacaaaaaccagggttcttggaaaagctccctgcctccccttgccactggtcccccatcaggcttgggagcgctggcatcccaaaggggcaatgggagaaaggggaggctgctgcattgtaggtgacaacgcaggacatgtgcttggtacaaaaagggcctgagaccttccacctagcttgatgggctgcgagatgagaactgtgagggtgcaggtggcggggagacagatggagaagctgacagatggctggggatcccggggactgccccagaacaaaaacctaagtcctgtgcctgtccccagggtcctgaataaataaatgtctccttacagagcctgacctcatgttatgtgtccttggagccctcg

SEQ ID NO: 19762 - DNA, 237 bp, Macaca Mulatta
catcacccttgcgaacccttattccatgaccatcatgtcctctgatggatccagctcctcgctgcaggctggttctctcttccctacggtggaagttggttctcctgtggggataccatgccccctcttctgcccacacttatgggcatcagaggtgggaggtagggtcaaggccccgtgcttcctggactgttgcatccccctcctggccgtctggtaagatcctctgtgcctctg

SEQ ID NO: 19763 - DNA, 658 bp, Macaca Mulatta
  misc_feature (1)...(658): n = A,T,C or G
aagatcggctcgaggcctgggtgctttgaagtcggagatccgagagtcggagatcggagagtcggacacaggagagtcggacactggagagtcagacaccggagagtcagactgggctcctcagcggggagaggctctgggataactactgttacagctttgaaggnnnnnnnnnnnnnnnnnnnnnnnnnnnnnnnnnnnnnnnnnnnnnnnnnnnngaaagaaatttggattattttagaaacaaatttggaaagaaaaagaatggcgtccgtttcannnnnnnnnnnnnnnnnnnnnnnnnnnnnnnnnnnnnnnnnnnnnnnnnnnnnnnnnnnnnnnnnnnnnnnnnnnnnnnnnnnnnnnnnnnnnnnnnnnnnnnnnnnnnnnnnnnnnnnnnnnnnnnnnnnnnnnnnnnnnnnnnnnnnnnnnnnnnnnnnnnnnnnnnnnnnnnnnnnnnnnnnnnnnnnnnnnngattttccatggtctggtaaagttaaagatgttctgcaaaacgtctttaagctgcagaagttcagaccacttcagcttgaaactattaacgtaacaatggctggaaaggaggtatttcttgttatgcctacaggaggtggaaagagcttatgttaccagttaccagcattatgttcagatggt

SEQ ID NO: 19764 - DNA, 349 bp, Macaca Mulatta
ttgtgtctgactcccaagaatgcccacgctgaaatttggcatgaattaaactgaagcccaggcctctaccttgtttgtctaagactgagcgaggttccagaagacgaacactgtccctagctggaatcccctgtgccgggaccagtagaggaagttagtcagctgttcgcctaccctgtggcaggcctggcccatgggacctaagggcaatgaagagaaatacgcccaaaagcctgcctgaaagaatcagacaagatccagggagataacagatagaagcaggaaagcatctagtgaccgccttagttctcaggggtaggaatggtactgttgttaaatgttccactcc

SEQ ID NO: 19765 - DNA, 648 bp, Macaca Mulatta
  misc_feature (1)...(648): n = A,T,C or G
caggggagagtgtgggccgaggcgcggcggcggctggagcagcgccgtagggtccttcgccagagcatccggtccgagggcgcacacaggcagaaggctcgctgctcgtccnnnnnnnnnnnnnnnnnnnnnnnnnnnggcttttgtgttggtgcctccgagctgcaaggagggtgcactggaggaggaggagnnnnnnnnnnnnnnnnnnnnnnnnnnnnnnnnnnnnnnnnnnnnnnnnnnnnnnnnnnnnnnnnnnnnnnnnnnnnnnnnnnnnnnnnnnnnnnnnnnnnnnnnnnagctcgctcgcctcgagcgcacgaacgtggacgttctctttgtgtggagccctcgaggggggttggggccccggttcggtccgggggagatggcgcagcccatcctgggccatgggagcctggagcccgcctcggccgctggcctggcgtccctggagcttgactcgtcgctggaccagtacgtgcagattcgcatcttcaaaatcatcgtgattggggactccaacgtgggcaagacctgcctaaccttccgcttctgcgggggtaccttcccagacaagactgaagccaccatcggcgtggacttcagggagaagaccgtggaaatcgagggcgagaagatcaaggt

SEQ ID NO: 19766 - DNA, 180 bp, Macaca Mulatta
agacatcgggaaacggctcgaggtgcggaagaacgtgaccgcgtgcctgggcgagcccaaccacatcactcggctggagcacgctcaggcgcggctcaccctgtcctataatcgccgtggcgacctggccatccacctggtcagccccatgggcacccgctccaccctgctggcagccag

SEQ ID NO: 19767 - DNA, 430 bp, Macaca Mulatta
  misc_feature (1)...(430): n = A,T,C or G
ctctgtctccaagcccacagtgacaactggcagcggttatggcttcacagtgccccagggaatgaggattagccttcaatgccaggctcggggttctcctcccatcagttatatttggtataaggaacagactaataaccaggaacccatcaaagtagcaaccttaagtaccttacttttcaagcctgcgatggtagctgactcgggctcctatttctgtgctgccaagggccgagttggctctgagcagcgcagcgacattgtgaagtttgtggtcaaagnnnctcaaaactactcaagaccaagactgaggtacctacaaccatgagacaccccttgaaagnagcaacatctacagtgaagcaatcctgggactggaccactgacgtggatggctaccttggagcaaccagtgctgggccaggtaaga

SEQ ID NO: 19768 - DNA, 101 bp, Macaca Mulatta
ggtcctacgggaagtgaaggtgctcgcaggtcttcagcaccccaatatcgttggctatcacactgcgtggatagaacatgttcacgtgattcagccacgag

SEQ ID NO: 19769 - DNA, 1465 bp, Macaca Mulatta
  misc_feature (1)...(1465): n = A,T,C or G
ttggggacaatatcgaggttttaaatcttggagaaatggatttcgtctacttggctatcagatgcttatgtacctttctgataagcacaacattcggctatacttcatcttcagacaccgagataaaagttaaccctcctcaggattttgagatagtggatcccggatatttaggttatctctatttgcaatggcaacccccactgtctctggataattttaaggaatgcacagtggaatatgaactaaaataccgaaacattggtagtgaaacatggacgatcatcattactaagaatctacagttacgaggatgggtttgatcttaacaagggcgttgaagcaaagatacacacacttttaccatggcaatgcacaaatggatcagaagttcaaagttcctgggcagaagctacttattggatatcgccacaaggaattccagaaactaaagttcaggatatggattgtgtatattacaattggcaatatttactctgttcttggaaacctggcataggtgtacttcttgataccaattacaacttgttttactggtatgagggcttggatcgtgcattacagtgtgttgattacatcaaggttgatggacaaaatattggatgcagatttccctatttggagtcatcagactataaagatttctacatttgtgttaatggatcatcagaaaccaagcctatccgatccagttatttcactttgcagcttcaaaatatagttaaacctttgccgccagtctgtcttacttgtactcaggagagtttatatgaaattaagctgaaatggagcatacctttgggacctattccagcaaggtgttttgtttatgaaattgagatcagagaagatgatactaccttggtgactaccacagttgaaaatgaaacgtacaccttgaaaataacaaatgaaacccgacagttatgctttgtagtaagaagcaaagtgaatatttattgctcagatgatggaatttggagtgagtggagtgataaacaatgttgggaagttgaagaactattgaagaaaactttgctacttttcttgttaccatttggtttcatattaatattagttatatttgtaaccggtctgcttttgtgtaagagagacagctacccgaaaatgaatttttctgtgatagatgaagactttccatatcaagagacatggtattgactcaccagcttccagtcatggccaaatgttcaatatgagtctcaataaactgaatttttcttgnnnnnnnnnnnnnnnnnnnnnnnnnnnnnnnngaacnnnnnnnnnnnnnnnnnnnnnnnnannnnnnnnnnnnnnnnnnnnnnnnnnnnnnnnnnnnnnnnnnnnnnnnnnnnnnnnnnnnnnnnnnnnnnnnnnnnnnnnnnnnnnnnnnnnnnnnnnnnnnnnnnnnnnnnnnnnnnnnnnnnnnnnnnnnnnnaac

SEQ ID NO: 19770 - DNA, 810 bp, Macaca Mulatta
  misc_feature (1)...(810): n = A,T,C or G
ggctatccacaggctgttttcttggaagtcgatgtacatcagtgtcagggaacagctgccaccaacaatatatcagcaacacctacgtttttgttttttcgaaacaaagtgagaattgatcaatatcaaggagcagatgctgtgggattagaagaaaaaatcaagcagcacttagaaaatgaccctggaagcggtgaagacacagatattccaaaaggctatatggatttaatgccttttattaacaaagctggttgtgaatgtcttaatgaaagtgatgagcatggatttgacaactgtttacgaaaagacacgaccttcttggaatctgactgtgatgaacagctacttattactgtggcattcaatcaacctgttaagctttattccatgaaatttcaaggaccagataatggtcaaggccctaaatatgtaaaaatttttatcaacctaccccgatctatggattttgaagaggcagaacgaagtgaaccaactcaagctctggaactgacagaggatgatattanagaagatggcattgttccacttcgttatgttaagtttcagaatgttaacagtgtaactatatttgttcaatcgaatcaggtgnaggaggaaacaacacgaaatttcatattttacttttattgggaactccagtccaggcaaccaatatgaatgacttccaaaccagtagttgggccaaaaaagaaaaaagccactaaagggccaaaaagacactgggacaaaccatattggcaatccggatctaccagctcctgggaataatttgctttggattccccc

SEQ ID NO: 19771 - DNA, 606 bp, Macaca Mulatta
atccagctcccttttcgagttgtaccattctccgatttgagcagcagccctgtgcgccccctgctgccagacctagtcattccaggagcttctgggagaagtaacagtaagagaggaagtgtcccaagctgatgtctctaaatgagatttttacagaaattgttcaaattcagcaaatatttattgagggtctgttgtgtgtcttgacctgtgctgagcaccaagcatataaggatgtaccactgaagcctggccatgatcaaaaccccaccttcaggcacccaagtttttggattaagaagggtgaatgatgttccgcaaatcttggctcatgcagtataattctaggtcttcatgttgatataaatttttagttaaggcaaaacgcttgtgacaatgtcgatttaatgtgtacgagtagagttttaattgtgaacaactagcgtgcacatttatgatttgagcagaacagccctttaagtacagtgtaaagtctcataatttaaaagcctggcagctgcgagtatatgaggtacataggggtgggccacagaaccagcctcctgaattccatttactctggttaggaggtggaacaaagatgac

SEQ ID NO: 19772 - DNA, 1579 bp, Macaca Mulatta
  misc_feature (1)...(1579): n = A,T,C or G
ctgtacaaccatatccagctgtctagtaatttaatgcctggctgtgactactcactttttaaggnnnnnnnnnnnnnnnnnnnnnnnnnnnnnnnnnnnnnnnnnnnnnnnnnnnnnnnnnnnnnnnnnnnnnnnnnnnnnnnnnnnnnnnnnnnnnnnnnnnnnnnnnnnnnnnnnnnnnnnnnnnnnnnnnnnnnnnnnnnnnnnnnnnnnnnnnnnnnnnnnnnnnnnnnnnnnnnnnnnnnnnnnnnnnnnnnnnnnnnnnnnnnnnnnnnnnnnnnnnnnnnnnnnnnnnnnnnnnnnnnnnnnnnnnnnnnnnnnnnnnnnnnnnnnnnnnnnnnnnnnnnnnnnnnnnnnnnnnnnnnnnnnnnnnnnnnnnnnnnnnnnnnnnnnnnnnnnnnnnnnnnnnnnnnnnnnnnnnnnnnnnnnnnnnnnnnnnnnnnnnnnnnnnnnnnnnnnnnnnnnnnnnnnnnnnnnnnnnnnnnnnnnnnnnnnnnnnnnnnnnnnnnnnnnnnnnnnnnnnnnnnnnnnnnnnnnnnnnnnnnnnnnnnnnnnnnnnnnnnnnnnnnnnnnnnnnnnnnnnnnnnnnnnnnnnnnnnnnnnnnnnnnnnnnnnnnnnnnnnnnnnnnnnnnnnnnnnnnnnnnnnnnnnnnnnnnnnnnnnnnnnnnnnnnnnnnnnnnnnnnnnnnnnnnnnnnnnnnnnnnnnnnnnnnnnnnnnnnnnnnnnnnnnnnnnnnnnnnnnnnnnnnnnnnnnnnnnnnnnnnnnnnnnnnnnnnnnnnnnnnnnnnnnnnnnnnnnnnnnnnnnnnnnnnnnnnnnnnnnnnnnnnnnnnnnnnnnnnnnnnnnnnnnnnnnnnnnnnnnnnnnnnnnnnnnnnnnnnnnnnnnnnnnnnnnnnnnnnnnnnnnnnnnnnnnnnnnnnnnnnnnnnnnnnnnnnnnnnnnnnnnnnnnnnnnnnnnnnnnnnnnnnnnnnnnnnnnnnnnnnnnnnnnnnnnnnnnnnnnnnnnnnnnnnnnnnnnnnnnnnnnnnnnnnnnnnnnnnnnnnnnnnnnnnnnnnnnnnnnnnnnnnnnnnnnnnnnnnnnnnnnnnnnnnnnnnnnnnnnnnnnnnnnnnnnnnnnnnnnnnnnnnnnnnnnnnnnnnnnnncattcaaatcagtgatctatgtttgtgtgatttcctaaacataattgtggattataaaaaatgtaacatcataattacattcctaactagaattagtatgtctgtttttgtatctttatgctgtattttaacactttgtattacttaggttattttgctttggttaaaaatggctcaagtagaaaagcagtcccattcatattaagacagtgtacaaaactgtaaataaaatgtgtacagtgaattgtcttttagacaactagatttgtccttttatttctccatctttatagaaggaatttgtacttcttattgcaaggcagtctctatattatgtcttcttttgtggtgtcttccatgtgaacagcataagtttggagcactagtttgattattatgtttattacaatttttaataaattgaataggtagta

SEQ ID NO: 19773 - DNA, 791 bp, Macaca Mulatta
  misc_feature (1)...(791): n = A,T,C or G
ggggctggagtttcgtcgtcgccgccgccgcgtgcgccattatgccgccctacaccgtggtctacttcccagttcgaggccgctgcgcggccctgcgcatgctgctggcagaccagggccagagctggaaggaggaggtggtgacaatggagacctggcaagagggttctctcaaagcctcctgcctgtatgggcagctccccaagttccaggacggagacctcaccctgtaccagtccaataccttcctgcgtcacctgggccgcactcttgggctctatgggaaggaccagcgggaggcagccctggtggacatggtgaatgacggcgtggaggacctccgctgcaaatacctctccctcatctacaccaactacgaggcaggcaaggatgactatgtgaaggcactgcccgggcaactgaagccttttgagaccctgctgtcccagaaccagggaggcaagaccttcattgtgggagaccagatctccttcgctgactacaacctgctggacttgctgctgatccatgaggtcctggcgcccggctgcctggatgcgttccccctgctctcggcatatgtggcgcgcctcagtgcccggcccaagctcaaggcttttcttgggcttcccctgaacacgtgaaactcccccatcaatgggcaaacggaaaacattgagggtttgggggggactcctgaaccgggaagccaggggcctgcttgccctcccttttcctcccggaaccaaataaaatttcctaagaaaagcctttgnaaaaataaaaaaaaa

SEQ ID NO: 19774 - DNA, 389 bp, Macaca Mulatta
  misc_feature (1)...(389): n = A,T,C or G
aagcattgatcccccagactttcagagagccaaagacttcatctccaacatgatgaggaacttctatgaaaagtgttttgagnnnnnnnnnnnnnnnnnnnnnnnnnnnnnnnnnnnnnnnnnnnnnnnnnnnnnnnnnnnnnnnnnnnnnnnnnnnnnnnnnnnnnnnnnnnnnnnnnnnnnnnnnnnnnnnnnnnnnnnnnnnnnnnnnnnnnnnnnnnnnnnnnnnnnnnnagacaacatcttcacctcaagccatggctccagaagaaaggcatccaaggtcatggtggtgctcactgatggtggcatattcgaggaccccctcgaccttacgacagtcatcaactccccaaaaatgcatggtgttgagcgctttgccattgggg

SEQ ID NO: 19775 - DNA, 3084 bp, Macaca Mulatta
  misc_feature (1)...(3084): n = A,T,C or G
taaccgtgatgttttcttttcctgcagcaagtccgcatgcannnnnnnnnnnnnnnnnnnnnnnnnnnnnnnnnnnnnnnnnnnnnnnnnnnnnnnnnnnnnnnnnnnnnnnnnnnnnnnnnnnnnnnnnnnnnnnnnnnnnnnnnnnnnnnnnnnnnnnnnnnnnnnnnnnnnnnnnnnnnnnnnnnnnnnnnnnnnnnnnnnnnccaatgggagcagccaaggcaaggtgcacaacccattccttcccaccccaatgttgccaccgccaccaccaccaccgatggccaggcctgtgcctctgccggtgccagacactnnnnnnnnnnnnnnnnnnnnnnnnnnnnnnnnnnnnnnnnnnnnnnnnnnnnnnnnnnnnnnnnnnnnnnnnnnnnnnnnnnnnnnnnnnnnnnnnnnnnnnnnnnnnnnnnnnnnnnnnnnnnnnnnnnnnnnnnnnnnnnnnnnnnnnnnnnnnnnnnnnnnnnnnnnnnnnnnnnnnnnnnnnnnnnnnnnnnnnnnnnnnnnnnnnnnnnnnnnnnnnnnnnnnnnnnnnnnnnnnnnnnnnnnnnnnnnnnnnnnnnnnnnnnnnnnnnnnnnnnnnnnnnnnnnnnnnnnnnnnnnnnnnnnnnnnnnnnnnnnnnnnnnnnnnnnnnnnnnnnnnnnnnnnnnnnnnnnnnnnnnnnnnnnnnnnnnnnnnnnnnnnnnnnnnnnnnnnnnnnnnnnnnnnnnnnnnnnnnnnnnnnnnnnnnnnnnnnnnnnnnnnnnnnnnnnnnnnnnnnnnnnnnnnnnnnnnnnnnnnnnnnnnnnnnnnnnnnnnnnnnnnnnnnnnnnnnnnnnnnnnnnnnnnnnnnnnnnnnnnnnnnnnnnnnnnnnnnnnnnnnnnnnnnnnnnnnnnnnnnnnnnnnnnnnnnnnnnnnnnnnnnnnnnnnnnnnnnnnnnnnnnnnnnnnnnnnnnnnnnnnnnnnnnnnnnnnnnnnnnnnnnnnnnnnnnnnnnnnnnnnnnnnnnnnnnnnnnnnnnnnnnnnnnnnnnnnnnnnnnnnngttcttttagtttgttttggctcagcagtcagcagttaagtatataacatggcccgcaaggacaatgaatccactcacattgcagaacaattccgaaaatggcaaactactactactactgttcagttttttaaaagttttgaaatgctgcacttacattnnnnnnnnnnnnnnnnnnnnnnnnnnnnnnnnnnnnnnnnnnnnnnnnnnntcacatggaaatggggaagatggtctgttttgacagaaactgacaggaatcaatcaaaacaatcgaattttgaattgagtaaagtgcaatttcattggatagctaaatatctttgtaagatagagattgttgaaaattctatttttgtttttcaagtcctttcaccccaggactctaaattattggggtaaaaaacagccttgcaagaaaaaggggagctannnnnnnnnnnnnnnnnnnnnattgttaaacttgtatccctttaaaaactgaaggaaatnnnnnnnnnnnnnnnnnnnnaaatctaatggtgcttttaccacaatatgttaactacattaaatgctaattaattattttctgttatcaaagcacatgactaaaatgaaatcatggtatctgttaattttataagctagaagtcactataatggattatgccaattctaaaaaattttacacgtatctggcatcataggatttatcagttatcagacacctcattgtaccagagattgtccagaagtttcaaagacctttgcgtccctgaactgggctatgggannnnnnnnnnnnnnnnnnnnnnnnnnnnnnnnnnnnnaaaccaatactgacacaaatgctggtgcccattcagatcaaggggtacttgttaggnnnnnnnnnnnagtttgcacccccaaatgtcctgtatcttatnnnnnnnnnnnnnnnnnnnnnnnnnnnnnnnnnnnnnnnnnnnnnnnnnnnnnnnnnnnnnnnnnnngtgcaagtgatttttctaccagacagcgaagcacccnnnnnnnnnnnnnnnnnnnnnnnnnnnnnnnnnnnnnnnnnnnnnnnnnnnnnnnnnnnnnnnnnnnnnnnnnnnnnnnnnnnnnnnnnnnnnnnnnnnnnnnnnnnnnnnnnnnnnnnnnnnnnnnnnnnnnnnnnnnnnnnnnnnnnnnnnnnnnnnnnnnnnnnnnnnnnnnnnnnnnnnnnnnnnnnnnnnnnnnnnnnnnnnnnnnnnnnnnnnnnnnnnnnnnnnnnnnnnnnnnnnnnnnnnnnnnnnnnnnnnnnnnnnnnnnnnnnnnnnnnnnnnnnnnnnnnnnnnnnnnnnnnnnnnnnnnnnnnnnnnnnnnnnnnnnnnnnnnnnnnnnnnnnnnnnnnnnnnnnnnnnnnnnnnnnnnnnnnnnnnnnnnnnnnnnnnnnnnnnnnnnnnnnnnnnnnnnnnnnnnnnnnnnnnnnnnnnnnnnnnnnnnnnnnnnnnnnnnnnnnnnnnnnnnnnnnnnnnnnnnnnnnnnnnnnnnnnnnnnnnnnnactaaatagaaagctagttgttccgcagataggagtagtctttattgtcctgtacggtcggtggcagtgctattctgagatctgtagatgcttagaatatcagtattttggatgttgctgcattttacaatttatttggagtcttcctttattttcccccagatatatgaaaatatgcaatacctgcttatatcatgtagaaaagcttagcaattattannnnnnnnnnnnnnnnnnnnatttgaccaaagtcggtgctgcacttggcgcnnnnnnnnnnnnnnnnnnnnnnnnnnnnnnnnnnnnnnnnnnnaatgcacgtgcgcaggaagggctcctcttagagaagcagtcaaactgtgaagcactaagctgaccctgcttcaagcaattttgtttttacaactgttcctttcacaagcaagcctnnnnnnnnnnnngacaacttcctttttcttcagctcccacaccccatttttcttagcagactgcagtcaatccacattcaataaaaagtatataatg

SEQ ID NO: 19776 - DNA, 879 bp, Macaca Mulatta
  misc_feature (1)...(879): n = A,T,C or G
ggaagggacagtcggtcgcagaccgcgctgggttgccgccgccgatgccgccatcgtgcnnnnnnnnnnnnnnnnnnnnnnnnnnnnnnnnnnnnnnnnnnnnnnnnnnnnnnnnnnnnnnnnnnnnnnnnnnnnnnnnnnnnnnnnnnnnnnnnnnnnnnnnnnnnnnnnnnnnnnnnnnnnnnnnnnnnnnnnnnnnnnnnnnnnnnnnnnnnnnnnnnnnnnnnnnnnnnnnnnnnnnnnnnnnnnnnnnnnnnnnnnnnnnnnnnnnnnnnnnnnnnnnnnnnnnnnnnnnnnnnnnnnnnnnnnnnnnnnnnnnnnnnnnnnnnnnnnnnnnnnnnnnnnnnnnnnnnnnnnnnnnnnnnnnnnnnnnnnnnnnnnnnnnnnnnnnnnnnnnnnnnnnnnnnnnnnnnnnnnnnnnnnnnnnnnnnnnnnnnnnnnnnnnnnnnnnnnnnnnnnnnnnnnnnnnnnnnnnnnnnnnnnnnnnnnnnnnnnnnnnnnnnnnnnnnnnnnctcctccctcttcttcccaatactgttcctactcctccagatgccccaaataacatgcacaaataagcagggctgcagcgggagtgggcacagtgcgctgctgccaccgaggtgttgtgcatgatgtttggacgctagactacttacatctgataggagaagtttgtgttgtaccagcgcgtgccttggaaagacttaagtaatgcaaaannnnnnnnnnnnnnnnnnnnnnnnnnnnnaatctactgacaagttgctttagtaacccaaagaagtgaaggagaaagcagctccctcaccacccagacattgatttgttcagatgtctcaatgccttatgatactataaaaccacaaaaattttct

SEQ ID NO: 19777 - DNA, 1150 bp, Macaca Mulatta
gaacacactaccccaaaatatggcatcttggcatttcagaaaacagcagaaacaggaagttcactctgtgagcttttcccgcccttctcccctgaagcaggccataaaagaatcctctgacgtttctataaagtaggtcataagaaccttcattccagaagtaccctcaaagacagagacacccagaagaatcggaacatacaggctttgatgtcaaaggtttataaagccaatatctgggagagagaaaaccgtaagacttccggatctcctctggtgaagtgtgtttccctcaacgatcaccaacatgaacatcaaaggatcgccatggaaagggtccctcctgctgctgctggtgtcaaacctgctcctgtgccagaacgtggcccccttgcccatctgtcctggtggggctgccagatgccaggtgacccttcgagacctgtttgaccgcgcagttgtcctgtcccactacatccataacctctcctcagaaatgttcagcgaattcgataaacggtatacccatggccgggggttcattaccagggccatcaacagctgccacacttcttcccttcccacccccgaagacaaggagtaagcccaacagatgaatcaaaaagactttctgagcctgatagtcagcatattgcgatcctggaatgagcccctgtatcatctagtcacagaagtacgtggtatggaagaagccccggaggctatcctatccaaagccgtagagattgaggagcaaaccaaacggcttctagagggcatggagctgatagtcagccaggttcatcctgaaaccaaagaaaatgagatctaccctgtctggacgggacttccatccctgcagatggctgatgaagagtctcgcctttctgcttattataacctgctccactgcctacgcagggattcacataagatcgacaattatctcaagctcctgaagtgccgaatcatccacaacaacaactgctaaagcccacatccatttcatctatttctgagaaggtccttaatgatccatcccattgcaagcttcttttagttttctctcttttgaatgcatgcttgggtgtaacaggtctcctcttaaaaaataaaaactgactccttagagacatcaaaatctaaaaaa

SEQ ID NO: 19778 - DNA, 621 bp, Macaca Mulatta
ctaatgtaattaaccaacgaaaaagctttcaggacttttaaatgctaactgtttttccccttcctgtctaggacaatgctataaagctcaaattagttaggaatgacttatacgttttgttttgaatacctaagagatactttttggatatttatattgccatattcttacttgaatgctttgaatgactacatccagttctgcacctataccctctggtgttgctttttaaccttcctggaatccattttctaaaaaataaagacattttcagatctgagagctacatctcaatgtttgtggtgataattctggacaggataaatagctaaacttaatgtaggcaaatgcagagacatgtatctgaaatgtagacctctacactgagactttcgtggcatagtggctaaaacaagatctacacatgcataaagagggacaaacaccttttcttcataaatacacagctttaggaatatttcaccattctttataggacatagtagtccttgtgttttttcccctgacattggaaagatgtgctaattgaaacttgacttaggaacattgtgccaactcgaaaccttgatttggtgaaaatctcaacgtttagatcctttt

SEQ ID NO: 19779 - DNA, 604 bp, Macaca Mulatta
ccactttattccaacctgagcacctcaatataaaactaaacactggtgaacgtttcctaattctgcattattgtaaatgtacaagttctcctagcagtccaacacttaaatagactaaatcatctctgacacatggtagctttcatataatgaaaatacctaaaataattagtgcaatatactgaactgatcaaaataaaatgaactttggaaaagaaggctgcaagattgttactaacatattgcaatactttatgttacaaattacgggtacattgtttattatagttctagccactggaggaacaactgaagccccttcttgtccaagggggagagagaaataattagctattttagtaactgtacattttgtatacttttaagcaactcttaaatattacagaaaagtaatacagatatggagactacaatgcagtaccctatttacagtacagctgaagatcgaatttaaaataatcaagtttgaatatacataattgttagtgcattgactatattatgtcaaaagggaacaaaagccccctccctggcccaaactacaaaacctatgtaatggccagcagtgattaatcggaaatca

SEQ ID NO: 19780 - DNA, 247 bp, Macaca Mulatta
gatatgaccgggccggacgggaaaagggcccggaccgcgtatacccgctaccagaccctggagctggaaaaggagttccacttcaaccgctacctgacccggcgacggcgcatcgagatcgcccacgcactctgcctgtccgagcgccagatcaagatctggttccagaaccggcgcatgaagtggaagaaggacaacaaactgaaaagtatgagcctggttcgagaaggcagcgccttccagccct

SEQ ID NO: 19781 - DNA, 766 bp, Macaca Mulatta
  misc_feature (1)...(766): n = A,T,C or G
gaagatacatatgaacgaaccctgatggttgatggggaaagtgcaacgattatactcctggatatgtgggaaaataaggnnnnnnnnnnnnnnnnnnnnnnnnnnnnnnnnnnnnnnnnnnnnnnnnnnnnnnnnnnnnnnnnnnnnnnnnnnnnnnnnnnnnnnnnnnnnnnnnnnnnnnnnnnnnnnnnnnnnnnnnnnnnnnnnnnnnnnnnnnnnnnnnnnnnnnnnnnnnnnnnnnnnnnnnnnnnnnnnnnnnnnnnnnnnnnnnnnnnnnnnncagaagggagagcctgtgcagtggtgtttgactgcaagttcatcgagacctccgcagctgtccagcacaacgtgaaggagctgtttgagggcattgtgcggcaggtgcgcctccggcgggacagcaaggagaagaatgagcggcgactggcctatcagaaaaggaaggagagcatgcccaggaaagccaggcgcttctggggcaagatcgtggccaaaaacaacaagaatatggccttcaagctcaagtccaaatcctgccatgacctctctgtactctaggaacccagagtcacccagatgtcccttcgatggacattgttgaaggccattgggaccaataatctatattagattggatacttcagtattgttagttgtggtttccccccattgtagcagggagctgacgtattagccttgtgggcaacatgatgcatgggaaatggaagatttttgtaaaaagtcagtatttattccaggaaaa

SEQ ID NO: 19782 - DNA, 304 bp, Macaca Mulatta
  misc_feature (1)...(304): n = A,T,C or G
gttgagtcaccaccaaacagtagtttcctatcgctcgctgccttcagtgaccctggtcagccctgcaagtcagttccttgtagcaactactataccttcctctactcccccattactctcaacagaagcctgacatctttacagagtcaaggtcttgaggcaggaagctctggctccctccttcccgccagcacctccctgcatcagttatgctgtctcccgaatatctgctgtcctanacaccctgctggcgttttcctctcagtgtacacgcatcaaatccacactacaagtaaccctacct

SEQ ID NO: 19783 - DNA, 1771 bp, Macaca Mulatta
  misc_feature (1)...(1771): n = A,T,C or G
taggcggccgaggaaaaaaaaaggcccggcccaaaggttgaaccaggttcacccaaaaggtttttttccctnnnnnnnnnnnnnnnnnnnaaaggtacccagttcttttatggcggcaaggaacgggaagaaagccccctggccgggaggaatgatgggcccattgttcccctgttcttgttggaatcaccttcggagtccagtgtgctggtcactctgcaatccccatgctaaataaaaactgtagcggcacctaccatatatagctagctattgctaaacctcaaaatcagaacatgttcgataaagcttcttaaaaaggaatatacacatgtatttgtacacacacacacgcacagggcacaccaaaaaatatccaaacatctatcaaggggataatggcctgttatgaaacacacaggtactctcccaactcactcagctggggactgctagaactacgtgaacacaccatacttcaatgctgcagagcatgcacgggagacacaatgaggcccccctccttggaacagttgagaaaggcaggaggaagggcaaaggaagtgaggctgggcaggaaagcatgagcccagacacccaggtgaaagagcaacatctatctgttgcttcctttcttaaaaatgaagcggagaaaatactgaagatttgtggacaacaaacagtcaagacatgtttctgtctagcctgctgaacaaggaaagaaggatgaaaaagcgaggctctcgggcgtcagcaatctcttcaaatttgagataagtgcaaaaatgagccctgtcttggacaggtactnnnnnnnnnnnnnnnaaagggtagaagagaagtaaagggaaaccaggagagggactgagtcagtaacattctgggaaggaaggagaccctgacaaggagggatcacagaggtgacaatgagactggcattttatctgccccaggtcacattggggcggttgaccaggatgggcccagactcctcgcagtaatgaggcgaggggggtggtcatgcggccagccaggacctagatggggacagaacacacacaaccacaagaccacccacgactataggactttacaataaaagcaccggtcagtgccattattcacattataaggataaaacattcacaggccaaaaaggcgccgtcaggaatgtgacacccgcgaggctgcgggatttgaaactccaatgctttatgacctatgtcaatgcctcccctcccgtcttctgcttccttgaaaagctaacagggcaggccgttaggtgcccacgacgccgggatcatgcgccgattctggaagcggtgaatcggagcagtggtacaggaaacagtttccccagcagctatagcagataaggaaaagcgctgccaggaaaaccaaggcacaaattgtgcaaggcttccgttccaggaggaagctgagcaggtagaagcccatgaacatggagtggctgaaccacagggcggggttgaggggcttggggatgaggaggacgggcagcagccactggaggcaacacatgatctctgccgggcagggccttcaccaaggctgccgggcaccgctgcaggaaccgacctaatgggagccagcgggcgcaggcggctgccctccgctttcttcaaccctcactctccaggagctgagccgctgtgctctctggctgtcagcccgggatcaccaaggcagcagggatcctgcaagccctgccatggcgccgccgccaatgtcgccgtctgccgcagcctgc

SEQ ID NO: 19784 - DNA, 226 bp, Macaca Mulatta
atgcttttccgaatctccatgtcggccacggagataattctagcctctctcatcttctgtctagtattctgggtaatcagggcctcaagacctcgggtccccaaaggcgtgaagaatcctccagggccatggggctgtcccctgatcgggcacatactagccctgggaaagaacccacacctggcactgtcatggatgagccagcggtatggggacgtgctgcaga

SEQ ID NO: 19785 - DNA, 814 bp, Macaca Mulatta
  misc_feature (1)...(814): n = A,T,C or G
ggcccggagcccagccagcaggagcagttggtcttcggcagcggggacgctgtggagctgagctgtcccccgcccgggggtggtcccatggggcccactgtctgggtcaaggatggcgcagggctggtgccctcggagcgtgtcctggtggggccccagcggctgcaggtgctgaatgcctcccacgaggactctggggcctacagctgccggcagcggctcacacagctcgtactgtgccacttcagtgtgcgggtgacannnnnnnnnnnnnnnnnnnnnnnnnnnnnnnnnnnnnnnnnnnnnnnnnnnnnnnnnnnnnnnnnnnnnnnnnnnnnnnnnnnnnnnnnnnnnnnnnnnnnnnnnnnnnnnnnnnnnnnnnnnnnnnnnnnnnnnnnnnnnnnnnnnnnnnnnnnnnnnnnnnnnnnnnnnnnnnnnnnnnnnnnnnnnnnnnnnnnnnnnnnnnnnnnnnnnnnnnnnnnnnnnnnnnnnnnnnnnnnnnnnnnnnnnnnnnnnnnnnnnnnnnnnnnnnnnnnnnnnnnnnnnnnnnnnnnnnnnnnnnnnnnnnnnnnnnnnnnnnnnnnnnnnnnnnnnnnnnnnnnnnnnnnnnnnnnnnnnnngagcgctccccgcaccggcccatcctgcaggcggggctgccggccaaccagacggcggtgctgggcagcgatgtggagtttcactgcaaggtgtacagtgatgcgcagccccacatccagtggctcaagcacgtggaggtgaatggcagcaaggtgggccccgacggcacaccctacgtcaccgtgctcaaggt

SEQ ID NO: 19786 - DNA, 889 bp, Macaca Mulatta
  misc_feature (1)...(889): n = A,T,C or G
gggggtatggtgaaattgaattaagtgttaaagtatatataccttaccgtgaaaaatacaaatggaatgtcaaataactagttgaatagtctggactagtctggtaggagatagaaatttgggtattatcagtataaatatccatggaaacagatgtgccacctagtggaaaaagagacagttaagaaagctcaagaatccctgtttttaaagcagtggtttctaaccttggcaacacattaactcatttatgtctagttttccattattggaacactgagtttgagggagttatttctatcctactgctcaaagacatctccaaggtctgatttagcgcacacaaaaaatcgcaaccctctgacataaatgagttaaaatcaccgaaacgatcttcctgaaagaccaaaattgattatttccagccatccatacactacagtaattctttcnaaaaaacattaacctgagcgccctattaacccaccaagccctgctcccgactaagaccaacgacgcgaaaccatccagacgccgcaaaagacaaacgccaaaaattcctttgcccccacaaaagggaggattctccactccccttaccccgaaacaaaccgcaccagtcataaccagaccaaaaacttaccagcacccacccacgagcaaagtttaacacgataaccatccccaaaaaaaccggacaactccacggccaaacacaacacaanactaaccaaaatacttccacacccaccaagcgtcccgccatctactaacccattcgccccatccacaaaacaaacgcctcttccaccgcgacgaaaacgcaacataccgaaaattgcaaaaccctccccaaaaaacacgcggccgatgcccaccccagaacaag

SEQ ID NO: 19787 - DNA, 672 bp, Macaca Mulatta
  misc_feature (1)...(672): n = A,T,C or G
gggatcctgtaggagcctctctccctactgctgctacacaagaccccgagactgacctgcaggacgagaccatgaagagcctggtccttctcgccatcctggccgccttagtggtggtaacttcgtgttatgaatcgcatgaaagcatggaatcttatgaactttatcccttcattaacaggagaaatgcaaataccttcatatcccctcagcagagatggagagctaaagtccaagaaaggatccgagaacgctctaagcctgtccacgagctcaacagggaagcctgtgatgactacagactttgcgaacgctatgccatggtttatggatacaacgctgcctataatcgctacttcagggagcgccgaggggccaaatgagattgggggaagaaaaaatctcgctttttctggagtctggcacctgattttgtatccccttgtagcagcattactgaaatacatagactcatatacaatgcttgtttcctgtatattctcttgtctggctgcacccctttttcccacccccacattgataagtaatgaaagtgcactgcagtgagggtcaaaggagagtcaacatatgtgattgttccataataaacttctgttgtgatactttcaacnnnnnaaaannnannaaannnannaaaccctgttcgccgcc

SEQ ID NO: 19788 - DNA, 887 bp, Macaca Mulatta
  misc_feature (1)...(887): n = A,T,C or G
actcccgaagcccagacagctccnnnnnnnnnnnnnnnnnnnnnnnnnnnnnnnnnnnnnnnnnnnnnnnnnnnnnnnnnnnnnnnnnnnnnnnnnnnnnnnnnnnnnnnnnnnnnnnnnnnnnnnnnnnnnnnnnnnnnnnnnnnnnnnnnnnnnnnnnnnnnnnnnnnnnnnnnnnnnnnnnnnnnnnnnnnnnnnnnnnnnnnnnnnnnnnnnnnnnnnnnnnnnnnnnnnnnnnnnnnncccagattaactcaacagtgtcactccctgggggtgggtctggcccccctgaagatgtgaagccaccagtcttaggggtccggggcctgcactgtccaccccctccaggtggccctggggctggcaaacggctatgtgcaatctgcggggacagaagctcagnnnnnnnnnnnnnnnnnnnnnnnnnnnnnnnnnnnnnnnnnnnnnnnnnnnnnnnnnnnnnnnnnnnnnnnnnnnnnnnnnnnnnnnnnnnnnnnnnnnnnnnnnnnnnnnnnnnnnnnnnnnnnnnnnnnnnnnnnnnnnnnnnnnnnnnnnnnnnnnnnnnnnnnnnnnnnnnnnnnnnnnnnnnnnnnnnnnnnnnnnnnnnnnnnnnnnnnnnnnnnnnnnnnnnnnnnnnnnnnnnnnnnnnnnnnnnnnnnnnnnnnnnnnnnnnnnnnnnnnnnnnnnnnnnnnnnnnnnnnnnnnnnnnnnnnnnnnnnnnnnnnnnnnnnnnnnnnnnnnnnnnnnnnnnnnnccaaatgaccccgtgactaacatctgtcaggcagctgacaaacagctattcacgcttgttgagtgggcgaagaggatcccacacttttcctccttgcctctggatgatcaggtcatattgctgcgggcag

SEQ ID NO: 19789 - DNA, 1050 bp, Macaca Mulatta
  misc_feature (1)...(1050): n = A,T,C or G
atgaccttgggctccccgaggggaggccttctgatgctgctgatggccttggtgacccaggnnnnnnnnnnnnnnnnnnnnnnnnnnnnnnnnnnnnnnnnnnnnnnnnnnnnnnnnnnnnnnnnnnnnnnnnnnnnnnnnnnnnnnnnnnnnnnnnnnnnnnnnnnnnnnnnnnnnnnnnnnnnnnnnnnnnnnnnnnnnnnnnnnnnnnnnnnnnnnnnnnnnnnnnnnnnnnnnnnnnnnnnnnnnnnnnnnnnnnnnnnnnnnnnnnnnnnnnnnnnnnnnnnnnnnnnnnnnnnnnnnnnnnnnnnnnnnnnnnnnnnnnnnnnnnnnnnnnnnnnnnnnnnnnnnnnnnnnnnnnnnnnnnnnnnnnnnnnnnnnnnnnnnnnnnnnnnnnnnnnnnnnnnnnnnnnnnnnnnnnnnnnnnnnnnnnnnnnnnnnnnnnnnnnnnnnnnnnnnnnnnnnnnnnnnnnnnnnnnnnnnnnnnnnnnnnnnnnnnnnnnnnnnnnnnnnnnnnnnnnnnnnnnnnnnnnnnnnnnnnnnnnnnnnnnnnnnnnnnnnnnnnnnnnnnnnnnnnnnnnnnnnnnnnnnnnnnnnnnnnnnnnnnnnnnnnnnnnnnnnnnnnnnnnnnnnnnnnnnnnnnnnnnnnnnnnnnnnnnnnnnnnnnnnnnnnnnnnnnnnnnnnnnnnnnnnnnnnnnnnnnnnnnnnnnnnnnnnnnnnnnnnnnnnnnnnnnnnnnnnnnnnnnnnnnnnnnnnnnnnnnnnnnnnnnnnnnnnnnnnnnnnnnnnnnnnnnnnnnnnnnnnnnnnnnnnnnnnnnnnnnnnnnnnnnnnnnnnnnnnnnnnnnnnnnnnnnnnnnnnnnnnnntgcagagacagacgctggagccgcatttggctctgaggctagctgtgtccgcagcctgtggcctggcacacctgcacgtggagatcttcggtacacagggcaaaccggccattgcccaccgtgacttcaagagccgcaacgtgctggtcaagagcaacctgcagtgttgcattgctgacctgg

SEQ ID NO: 19790 - DNA, 763 bp, Macaca Mulatta
  misc_feature (1)...(763): n = A,T,C or G
gggagaatccgcagcaaccagcaccatgcccatgacactggggtactggaacatccgcgggctcctgactatgacagaagccagtggctgaatgaaaaattcaagctgggcctggactttcccaatctgccctacttgattgatgggactcacaagatcacccagagcaacgccatcctgcgctacattgcccgcaagcacaacctgtgtggggagaccgaaaaggagaagattcgggaagacattttggagaaccagcttatggacaaccgcatgcagctggccagactctgctatgacccagattttgagaaactgaagccagaatacctggagggacttcctgaaatgctgaagctctactcacagtttctggggaagcagccatggtttcttggggacaagatcacctttgtggatttcatcgcttatgatgtccttgagagaaaccaagtatttgagcccagctgcctggatgccttcccaaacctgaaggacttcatctcccgatttgaggtgatgcccccgtcctcctttctctttatgtcccttattcctttccctcctttgtgatgctttcncagtcctgaagctacacaaagaataactcgcatttatggccatnnnnnnnnnnnnnnnnnnnnnnnnnnnnnactttggaggctgaagcgggcaaatcacctgtggtcagtagtttgagactggcctgcccgaatggtgaggccccatcttttctannaaaancaaaaaaccaagatttggc

SEQ ID NO: 19791 - DNA, 482 bp, Macaca Mulatta
  misc_feature (1)...(482): n = A,T,C or G
agcagagcctgcgcatctgaaggcagcatgtccaagaaagggggtggaggtgcagtgaagaacccgggagcagagcccacgctgggngatggaccccttccaggacacgctgcggcggctgcgggaggccttcaagtcggggcgcacgcggccggccgagttccgggctgcgcagctccaaggcctgggccgctttcttcaagaaaacaagcagcttctgcaagacgcactggcccaggacctgcataagnnnnnnnnnnnnnnnnnnnnnnnnnnnnnnnnnnnnnnnnnnnnnnnnnnnnnnnnnnnnnnnnnnnnnnnnnnnnnnnnnnnnnnnnnnnnnnnnnnnnnnnnnnnnnngttcatgaagctggactcggtcttcatccggaaggaaccctttggcctggtcctcatcatcgcaccctggaactaccccgtgaacctgaccctggtgcccctggtgggcgccctcgctgcag

SEQ ID NO: 19792 - DNA, 307 bp, Macaca Mulatta
  misc_feature (1)...(307): n = A,T,C or G
gataaaactatcaaattatggaagattaccgaacgagataaaaggcccgaaggatacaacctgaaggatgaagaggggaaacttaaggacctgtccacggtgacatcactgcaggtnnnnnnnntgcaggtgccagtgctgaagcccatggacctgatggtggatgtgagccctcggaggatctttgccaatggccacacctaccacatcaactccatctccgtcaacagtgactgcgagacctacatgtcggcggatgacctgcgcatcaacctctggcacctggccatcaccgacaggagcttca

SEQ ID NO: 19793 - DNA, 627 bp, Macaca Mulatta
  misc_feature (1)...(627): n = A,T,C or G
tgttagttagatctctcaggattattggagctagcaataatggattctgggcaagtttgcccagactggtttcagaaaattaatgtgtatccaggacattttaaaaacctgtacacagtgtttattgtgtttaggaagcaatttccaaacgtacctataagaaatgtgcgtcaagccaacctgaccaacatggtgaaacccatctgtactaaagataaaaaaattagtcctgcgtggtggcatnnnnnnnnnnnnnnnnnnnnnnnnnnnnnnnnnnnnnnnnnnnngctggaaccccagaagcggagattgcactgagccgagatcgcgccactgtnnnnnnnnnnnnnnnnnnnnncgagactccatctcaataaaaaagaaaagtgtatcaataacatgattatccaggggtattttctaattcagataatcaaactgattatatagaagagttgctttaaaatgtttgccaaagtcttttaaatattattaatactggaagaaaaaatattctgttgtgtctcatacagtgcttaggatgtctttcacagagcttattcaaaagatgaaannnnnnnnnnnnnnnnnnnnnnnaacnnnnnnnnnnnnnnnnnnnnnnnnnna

SEQ ID NO: 19794 - DNA, 774 bp, Macaca Mulatta
  misc_feature (1)...(774): n = A,T,C or G
gggatgaaatgtctgcactgtagtctcagatcactgtcacatatataaattgcttcttcattttaatttgtagaagtactttacagtaggaaacaccagtaaacaacttttatactgttaaaaggcttttttccccttcctaaatgttttaattgtgtcatagtgttttgctcactgaagaagcttcttatggaccttgcaactttgttgctagcttgaggttgattattgtggttgtattgttcactgtgtgtagaaatagtatgagtacgatttcaatagactgttcagtttttaatattagccatagcactggttagtatctcagtagtttcatgaaacgtttcctgtattctaatctattttgaaannnnnnnnnnnnnnnnnnnngtgtcttacagtcaagtttgtagattttcataagccacaattttaaaagatgcagtaatcttccaacctccaatatttatccattcgttgtggacccacacattgcatctttaaattcataataagtttccttaactatcttatgtttctggtcttttaagcttagtgataaggtggaagcacaagaaaaatttcagtagaatacagtttttattttgtaaacactaatgtattaaacttgctatacattaaaggcaataatatatatttttatttgaattgtatatgtgaaatgggaagttataactagttgattttttcattttggtaaaagggtatttcacttgaacaaggtcaatttggttacctcagtatttcagccaa

SEQ ID NO: 19795 - DNA, 256 bp, Macaca Mulatta
ggagcgtccgggctgggccgcaggaccgggagcggagcctcgcaggatcggtctcgggctcaccaaccgcctccgcttctttcgccagtcggtggccgggctggcggcgcggttgcagcggcagttcctggtgcgggcctggggctgcgcgggcccttgcggccgggcagtctttctggccttcgggctagggctgggcctcatcgaggagaagcaggcggagagccgacgggcggtctcggcctgtcaggagatc

SEQ ID NO: 19796 - DNA, 767 bp, Macaca Mulatta
  misc_feature (1)...(767): n = A,T,C or G
ggcaatgtaataaatgtatcctaatcttacatatgtttaactggattacatagatttttatcttttgttaaaatgtgtatactccgtggaccaatataatgttaaagtatgtatatattatataaatatatatgtatatctatgtgctcgcttgtgtaggatgaatgtcttagagtcgtttgtggtattttatgttgctgactctggctccagggcctgtgcttgaaaaggacagataagtattgcccagagctaagtggcactacttacaaagttttaaacatcttctacatactgattcatgtttatttgagctctctttattatagaattttctcttaaagtttcaaacctctaagttgtagcctgtaattatgagaacagtaaaatttaagtaataataaagaatcctatccatatatctaatttgcagtggagttttgcatggtcctctgattatgtccatgctgtgtccaagggagagtagctatatacaatcagcacagatttatacgtgttaagggttttgggacagcacctggtatagaataaataataatgttaactcattcnnnnnnnnnnnnnnnnnnnnnnnnnnnnngcaaactttaaaaccaccaacaannnnnnnnnnnnnnnnnnatcttatataaactaaaaaaaaacaccacatnnnnnnnnnnnnnnnnnnnnnnnnnnnnnnnnnnnnnnnnnaaggaacacccttagagacactttgaggaaatattttttatataaaaaccttt

SEQ ID NO: 19797 - DNA, 707 bp, Macaca Mulatta
catatccagctgaattaaataacataaataacactcaggttaccacacatcttcagccacttcatcatccgtcagaagccagaccttttcctgatttgacatccggtggattcctgtaattccaagcccaattttgaccctggtttttggattaaattagtttgtgaaggattatggaataataaaactgtcactgttggacgtcagcaagttcacatggaggcattgatgcatgctattcacaattattccaaaccaaattttaatttttgcttttagaaaaggaagtttaataaatggtatcaaaatagtacctataatatagtcattaaggtagaaagtgtactgccacagagtagtgagataccatctacatttcacattattctgagcaccacaaaatatgcaaaactttatcagggaaactaagactcttttaaattagaaagcattctttatttgaattatttctgtcagaataaaaataaaatactttgagttttgaactactggattcttattagtttcccaaatacaaagttacacaactaaactagtttttcctatcatgttaacctctgcttttatctcggatgttaaaataaatggtttggtgctttttataaaaggatgatctcagtgctctcctcctccactgttcatctaagtgcctcacatttttttctacctataacactgtaggatgt

SEQ ID NO: 19798 - DNA, 229 bp, Macaca Mulatta
gtgtggtattatcaattacctatctaattggtctccattctctacactcttgtaataaaatgtctatttttaatgtttgtacacaacaatctttctattctagcctgcattgtgcttacatgcctgcataaggtttaagaaccattgatttaatgtaatagggaaagttctaacccaagtatccaaaaatgtgtaagaacaactacctgagctaaataaagatattgtt

SEQ ID NO: 19799 - DNA, 249 bp, Macaca Mulatta
  misc_feature (1)...(249): n = A,T,C or G
taggtatcttgtcaaactccgggccccccaaaaaacgccacaaaggatggtctccagaatctccatcagctccagacggtggctacccccaaggtggtgggaacagagctaagtatgngagagcgcaggcgtgtcctgcgtgccccatgttggcttggtgggaccagctttcattcacccttccccagtggtggcctctggagaaccagtgtctgttcttgacaccttgctgaaaatatgcaaggccaa

SEQ ID NO: 19800 - DNA, 1067 bp, Macaca Mulatta
  misc_feature (1)...(1067): n = A,T,C or G
ccgatcccgactccggggcggcccctgacgccccggccgatcccgactccggggcggcccctgacgccccagcggttccagatgccggggcagcccctgacgccccagccgatccagatgccggggcagcccctgaggttcccgcggcccctgcggctgctgagacccgggcagcccatgtcgccccagctgcgcctgacgccggggctcccactgccccagccgcttctgccacccggtcagcccaagccgcccgggcggcctcggcagcccctgcctccggggccagacgcaagctccatcaccttagaccccccagccccgagatccaggctgccgatccgcctactccgcggcctgctcgcgcgtctgcctggcggggcaagtccgagcgcagctgcggccgccgcgtgtactacgatgaaggggcggccagcagcgacgatgactccagcggagacgagtccgacgatgggaccttcggatgcatccgctggtttcagcatcggcgaaatcgccgccgccganagccccagcgcaacttactccgcaacttcctcatgcaagccttcgggggctgcttcggtcgatctgagagtccccagcccaaagcctcgcnnnnnnnnnnnnnnnnnnnnnnnnnnnnnnnnnnnnnnnnnnnnnnnnnnnnnnnnnnnnnnnnnnnnnnnnnnnnnnnnnnnnnnnnnnnnnnnnnnnnnnnnnnnnnnnnnnnnnnnnnnnnnnnnnnnnnnnnnnnnnnnnnnnnnnnnnnnnnnnnnnnnnnnnnnnnnagggagaaaagtgatgccgagcgacactgagggtcgtttccggctggacaggccagcgccagcaaccgtaagctggacaggcaggggctnnnnnnnnnnnnnnnnnnnnnnnnnnnnnnnnnnnnnnnnnnnnnnnnnnnnnnnnnnnnnnnnnnnnnnnnnnnnnnnnnnnnnnnnnnnnnnnnnnnnnnnnnnnnnnnnnnnnnnnnnnnnnnnnnnnnnnnnnnnnnnngggcggcgaagaggacccgcaggctgcaaggagcaacagcgatg

SEQ ID NO: 19801 - DNA, 4069 bp, Macaca Mulatta
  misc_feature (1)...(4069): n = A,T,C or G
tctttcagcgccgacatgctcaatgtcaccttgcaattgccagctcttaacgggacctttgcccagagcaaatgccccccagtggagtggctgggctggctcaacaccatccaggcccccttcctctgggtgctgttcgtgctggccaccctagagaacatctttgtcctcagcgtcttctgcctgcacaggagcagctgcacggtggcagagatctacctggggaacctggccgcagcagacctgatcctggcctgcgggttgcccttctgggccatcaccatctccaacaacttcaactggctctttggggagacgctgtgccgcgtggtgaatgccattatctccatgaacctgtacagcagcatctgtttcctgatgctggtgagcatcgaccgctacctggccctggtgaaaaccatgtccatgggccggatgcgcggtgtgcgctgggccaagctctacagcttggtgatctgggcatgcacgctgctcctgagctcacccatgctggtgttccggaccatggaggagtacagtgacgagggccacaacgtcactgcttgcgtcatcagctacccatccctcgtctgggaagtgttcaccaacatgctcctgaatatcgtgggcttcctgctgcccctgagcgtcatcaccttctgcacgatgcagatcatgcaggtgctgcggaacaatgagatgcagaagttcaaggagatccagacagagaggagggccacggtgctggtcctggttgtgctgctgctgttcgtcatctgctggctgcccttccaggtcagcaccttcctggacacgctgcatcgccttggcatcctcgccagctgctgggacgagcacatcatcgatgtaatcacacagatcgcctccttcatggcctacagcaacagctgcctcaacccactggtgtatgtgattgtgggcaagcgcttccgaaagaagtcttgggaggtgtaccagggagtgtgccagaaagggggctgtaggtcagaatccattcagatggagaactccatgggcacactgcggacctccatctcggtggaacgccagattcacaaactgcaggactgggcagggagcagacagtgagcaaacgccagcagggctgctgtgaatttgtgttaaggattgagggacagttgcttttcagcatggggaatgtcccccaggaatgccatggggacatccatgcatgaccttgggaaatgagttggtgtctccagtaaaacacaggagaataattcctgccctgcccaattttgcaaggagcatggctatgaggatggggtgaactcatgcacagccaaggactccataaacacgacagcattactgttcttatttgctgccacacctgagccagcaagcgccttcccaggagtggagggggcctggggacagggacaagagtgactgagcttccctcccacatggtgtccctccctgccccagcaagacaacttggatctccaggagaaccaccatccagctttggtgcaatggctgagtgcacaagtgaattgttgccctgggtttctttaacccattcagcgagaactttggaggacaatttcttgcattaatgaaggttaagccctgaggggtccctgataagaacctggataccaggattctgtggcacccctcactgatggacaaggtggtctgtgccaaagaagaatccaataagcacatattgagcacttgctgtataagcaatattgagcactagaggcaagagggaagaaagagaaggagccatctccatcttgaaggaactcaaagactcgactgggaatgactgggcactgccaccgccagaaagctgttagatgagatggttgagcagggtgctgcgggtgatatggacagcagaaagggagagcccaaggttccagctcaaccaataactattgcacaaccacctgtccctgcctcagttccctcttctgtaacatgaagtcgttgtgaggattaaaggcagtaacaggtataaaagtactttgaaaagcaaagggtgctatgtacatgtgaggcattattatgcacatgtaactgggatatgtttactataaggaaaagacactgaggtttagaaatagctccgtggagcagaatcagtattgggagccggtggcagtgtgaagtaccagtgtctggcacacagtaggtgctcattggctcccttccacctgtcctccccaccaccctgagcccccgactgccacacacacatgagcatttggggagaaggccatgtcttcaaagtttgatttgtgatgaggcagaggaagaaatttctaatcggtcttgcccagaggatcacagtgctgagactcccaccgccagcgggtacctggggagggggagagtgcaggcctgctcagggactgttcctctctcagcaacaagggattgttcctgtcaatcaatggtttattggaaggtatcccagtacaagccctagaagagtgtgagtaggaatggcaatggcattcaccatcagcagtgccagggcagcactcattcacttgatacatgaatatttattagctggttggagagctagatcctggagaactagaacctggagggttagaatctggagaggctagaacctagaggggctagaacctaaagaagctaaaatctggaaaggctataacctggagagctagaacctggagggctagaatctggaaagctagaatctggagggctagaacctggagagctagaacnnnnnnnnnnnnnnnnnnnnnnnnnnnnnnnnnnnnnnnnnnnnnnnnnnnnnnnnnnnnnnnnnnnnnnnnnnnnnnnnnnnnnnnnnnnnnnnnnnnnnnnnnnnnnnnnnnnnnnnnnnnnnnnnnnnnnnnnnnnnnnnnnnnnnnnnnnnnnnnnnnnnnnnnnnnnnnnnnnnnnnnnnnnnnnnnnnnnnnnnnnnnnnnnnnnnnnnnnnnnnnnnnnnnnnnnnnnnnnnnnnnnnnnnnnnnnnnnnnnnnnnnnnnnnnnnnnnnnnnnnnnnnnnnnnnnnnnnnnnnnnnnnnnnnnnnnnnnnnnnnnnnnnnnnnnnnnnnnnnnnnnnnnnnnnnnnnnnnnnnnnnnnnnnnnnnnnnnnnnnnnnnnnnnnnnnnnnnnnnnnnnnnnnnnnnnnnnnnnnnnnnnnnnnnnnnnnnnnnnnnnnnnnnnnnnnnnnnnnnnnnnnnnnnnnnnnnnnnnnnnnnnnnnnnnnnnnnnnnnnnnnnnnnnnnnnnnnnnnnnnnnnnnnnnnnnnnnnnnnnnnnnnnnnnnnnnnnnnnnnnnnnnnnnnnnnnnnnnnnnnnnnnnnnnnnnnnnnnnnnnnnnnnnnnnnnnnnnnnnnnnnnnnnnnnnnnnnnnnnnnnnnnnnnnnnnnnnnnnnnnnnnnnnnnnnnnnnnnnnnnnnnnnnnnnnnnnnnnnnnnnnnnnnnnnnnnnnnnnnnnnnnnnnnnnnnnnnnnnnnnnnnnnnnnnnnnnnnnnnnnnnnnnnnnnnnnnnnnnnnnnnnnnnnnnnnnnnnnnnnnnnnnnnnnnnnnnnnnnnnnnnnnnnnnnnnnnnnnnnnnnnnnnnnnnnnnnnnnnnnnnnnnnnnnnnnnnnnnnnnnnnnnnnnnnnnnnnnnnnnnnnnnnnnnnnnnnnnnnnnnnnnnnnnnnnnnnnnnnnnnnnnnnnnnnnnnnnnnnnnnnnnnnnnnnnnnnnnnnnnnnnnnnnnnnnnnnnnnnnnnnnnnnnnnnnnnnnnnnnnnnnnnnnnnnnnnnnnnnnnnnnnnnnnnnnnnnnnnnnnnnnnnnnnnnnnnnnnnnnnnnncactcagaagcctttgggaaggggtgctatttatttctgctcaacctgttaacaggcttctggcatgtacatcagtggtctccaagcttctgggattgtatattcctataggaaaaaaaggattgattatgcatacccaatatgtatacttattaatatgtatgaagatgtgcattctaaaatataatcaatcagtagaaatttaagaaagaagatgtaaaaaa

SEQ ID NO: 19802 - DNA, 376 bp, Macaca Mulatta
  misc_feature (1)...(376): n = A,T,C or G
tgtgaagtatgccacaaaacatttaaacgcccatattacccttaagcaacacatgaaaactcatgccccacacatggaggtatgtccctgtccaagagaaggctgtggaagaacctacacaactggatttaatctccaaagccatttcctctccttccacgaggaaaggcgcccttttgtgtggggggggccggctgtggcaaaacatttgcaatgaaancaaagtctcactaggcatgctgttgtacatgatcctgacaagaagaaaatgaagctcaaagtnnnnnnnctcgtgaaaaacggagtttggcctctcatctcagtggatatatccctcccaaaaggaaacaagggcaaggcttatctttgtgtcaaa

SEQ ID NO: 19803 - DNA, 1738 bp, Macaca Mulatta
  misc_feature (1)...(1738): n = A,T,C or G
cttggtggcacatggacccctgccagggaaggggtcttcagacttgaggttgccagctcagatgtggggctgccgatnnnnnnnnnnnnnnnnnnnnnnnnnnnnnnnnnnnnnnnnnnnnnnnnnnnnnnnnnnnnnnnnnnnnnnnnnnnnnnnnnnnnnnnnnnnnnnnnnnnnnnnnnnnnnnnnnnnnnnnnnnnnnnnnnnnnnnnnnnnnnnnnnnnnnnnnnnnnnnnnnnnnnnnnnnnnnnnnnnnnnnnnnnnnnnnnnnnnnnnnnnnnnnnnnnnnnnnnnnnnnnnnnnnnnnnnnnnnnnnnnnnnnnnnnnnnnnnnnnnnnnnnnnnnnnnnnnnnnnnnnnnnnnnnnnnnnnnnnnnnnnnnnnnnnnnnnnnnnnnnnnnnnnnnnnnnnnnnnnnnnnnnnnnnnnnnnnnnnnnnnnnnnnnnnnnnnnnnnnnnnnnnnnnnnnnnnnnnnnnnnnnnnnnnnnnnnnnnnnnnnnnnnnnnnnnnnnnnnnnnnnnnnnnnnnnnnnnnnnnnnnnnnnnnnnnnnnnnnnnnnnnnnnnnnnnnnnnnnnnnnnnnnnnnnnnnnnnnnnnnnnnnnnnnnnnnnnnnnnnnnnnnnnnnnnnnnnnnnnnnnnnnnnnnnnnnnnnnnnnnnnnnnnnnnnnnnnnnnnnnnnnnnnnnnnnnnnnnnnnnnnnnnnnnnnnnnnnnnnnnnnnnnnnnnnnnnnnnnnnnnnnnnnnnnnnnnnnnnnnnnnnnnnnnnnnnnnnnnnnnnnnnnnnnnnnnnnnnnnnnnnnnnnnnnnnnnnnnnnnnnnnnnnnnnnnnnnnnnnnnnnnnnnnnnnnnnnnnnnnnnnnnnnnnnnnnnnnnnnnnnnnnnnnnnnnnnnnnnnnnnnnnnnnnnnnnnnnnnnnnnnnnnnnnnnnnnnnnnnnnnnnnnnnnnnnnnnnnnnnnnnnnnnnnnnnnnnnnnnnnnnnnnnnnnnnnnnnnnnnnnnnnnnnnnnnnnnnnnnnnnnnnnnnnnnnnnnnnnnnnnnnnnnnnaactcggcttcggaggacagaatctgtcccctcggacatcaacaacccggtggacagagcagccgaaccccattttggaacccttcccaaagcactgacaaagaaggnnnnnnnnnnnnnnnnnnnnnnnnnnnnnnnnnnnnnnnnnnnnnnnnnnnnnnnnnnnnnnnnnnnnnnnnnnnnnnnnnnnnnnnnnnnnnnnnnnnnnnnnnnnnnnnnnnnnnnnnnnnnnnnnnnnnnnnnnnnnnnnnnnnnnnnnnnnnnnnnnnnnnngctgcctacttcattcatcatagacagcagtttatctttccagnncagtgccatctgctggccactgctggaaatgcctccttattgcagaaagtttaaaggaaaacactttcannnnnnnnnnnnnnnnnnnnnnnnnnnnnnnnnnnnnnnnnnnnnnnnnnnnnnnnnnnnnnnnnnnnnnnnnnnnnnnnnnnnnnnnnnnnnnnnnnnnnaggctgaggagccagaggctggcaagtcagaggcagaagacgacgaggacgaggtggacgacttgccaagctctcgccggccctggcggggccccatctctcgcaaggccagccagaccagcgtgtacctgcgggagtgggacatccccttcgagcaggtagagctgggtgagcccatcgggcagggccgctggggccgagtgca

SEQ ID NO: 19804 - DNA, 185 bp, Macaca Mulatta
ctcagagccgactggctcttttaggcactgactccgaacaggattctttcacccaggcatctcctccagagggatccgccagcccgtccagcagcaccatgtgggtgaccaaactcctgccagccctgctgctgcagcatgtcctcctgcatctcctcctgctccccatcgccatcccctatgca

SEQ ID NO: 19805 - DNA, 151 bp, Macaca Mulatta
gattgattatgtcaagtggccagatatggaaggagcaaagacggtttactctgacagcactaaggaactttggtttaggaaagaagagcttagaggaacgcattcaggaggaggcccaacacctcactgaagctttataagaggagaacgg

SEQ ID NO: 19806 - DNA, 619 bp, Macaca Mulatta
aaggacagaccttgatcttagccacctgtagatccagatgaagactctgacaacagtgcaatttatgtacaaggattaaatgacaatgtgactctagatgatctggcagacttctttaagcaatgtggggttgttaagatgaacaagagaactgggcaacccatgatccacatctacctggacaaggaaacaggaaagcccaaaggcgatgccacagtgtcctatgaagacccacctacggccaaggctgccgtggaatggtttgacgggaaagattttcaagggagcaaacttaaagtctctcttgctcggaagaagcctccaatgaacagtatgagggggggtatgccaccccgtgagggcagagggatgccaccaccactccgcggaggtccaggaggcccaggaggtcctgggggacccatgggtcgcatgggaggacgtggaggagatagaggaggctttcctccaagaggaccccggggttcccgagggaaacccctccggaggagggaaacgtcccagcaccgagctggagactggcagtgtcccaatcagggttgtggaaaccagaacttcggctggagaacagagttgcaccagtgtaaggcccaaagcc

SEQ ID NO: 19807 - DNA, 3529 bp, Macaca Mulatta
  misc_feature (1)...(3529): n = A,T,C or G
naccatgaccgagacgtgtggaaacccgagccctgccggatctgcgtctgcgacaacggcaaggtgttgtgcgatgacgtgatctgtgacgagaccaagaactgccccggcgccgaagtccccgagggcgagtgctgtcccgtctgccccgacggctcannnnnnnnnnnnnnnnnnnnnnnnnnnnnnnnnnnnnnnnnnnnnnnnnnnnnnnnnnnnnnnnnnnnnnnnnnnnnnnnnnnnnnnnnnnnnnnnnnnnnnnnnnnnnnnnnnnnnnnnnnnnnnnnnnnnnnnnnnnnnnnnnnnnnnnnnnnnnnnnnnnnnnnnnnnnnnnnnnnnnnnnnnnnnnnnnnnnnnnnnnnnnnnnnnnnnnnnnnnnnnnnnnnnnnnnnnnnnnnnnnnnnnnnnnnnnnnnnnnnnnnnnnnnnnnnnnnnnnnnnnnnnnnnnnnnnnnnnnnnnnnnnnnnnnnnnnnnnnnnnnnnnnnnnnnnnnnnnnnnnnnnnnnnnnnnnnnnnnnnnnnnnnnnnnnnnnnnnnnnnnnnnnnnnnnnnnnnnnnnnnnnnnnnnnnnnnnnnnnnnnnnnnnnnnnnnnnnnnnnnnnnnnnnnnnnnnnnnnnnnnnnnnnnnnnnnnnnnnnnnnnnnnnnnnnnnnnnnnnnnnnnnnnnnnnnnnnnnnnnnnnnnnnnnnnnnnnnnnnnnnnnnnnnnnnnnnnnnnnnnnnnnnnnnnnnnnnnnnnnnnnnnnnnnnnnnnnnnnnnnnnnnnnnnnnnnnnnnnnnnnnnnnnnnnnnnnnnnnnnnnnnnnnnnnnnnnnnnnnnnnnnnnnnnnnnnnnnnnnnnnnnnnnnnnnnnnnnnnnnnnnnnnnnnnnnnnnnnnnnnnnnnnnnnnnnnnnnnnnnnnnnnnnnnnnnnnnnnnnnnnnnnnnnnnnnnnnnnnnnnnnnnnnnnnnnnnnnnnnnnnnnnnnnnnnnnnnnnnnnnnnnnnnnnnnnnnnnnnnnnnnnnnnnnnnnnnnnnnnnnnnnnnnnnnnnnnnnnnnnnnnnnnnnnnnnnnnnnnnnnnnnnnnnnnnnnnnnnnnnnnnnnnnnnnnnnnnnnnnnnnnnnnnnnnnnnnnnnnnnnnnnnnnnnnnnnnnnnnnnnnnnnnnnnnnnnnnnnnnnnnnnnnnnnnnnnnnnnnnnnnnnnnnnnnnnnnnnnnnnnnnnnnnnnnnnnnnnnnnnnnnnnnnnnnnnnnnnnnnnnnnnnnnnnnnnnnnnnnnnnnnnnnnnnnnnnnnnnnnnnnnnnnnnnnnnnnnnnnnnnnnnnnnnnnnnnnnnnnnnnnnnnnnnnnnnnnnnnnnnnnnnnnnnnnnnnnnnnnnnnnnnnnnnnnnnnnnnnnnnnnnnnnnnnnnnnnnnnnnnnnnnnnnnnnnnnnnnnnnnnnnnnnnnnnnnnnnnnnnnnnnnnnnnnnnnnnnnnnnnnnnnnnnnnnnnnnnnnnnnnnnnnnnnnnnnnnnnnnnnnnnnnnnnnnnnnnnnnnnnnnnnnnnnnnnnnnnnnnnnnnnnnnnnnnnnnnnnnnnnnnnnnnnnnnnnnnnnnnnnnnnnnnnnnnnnnnnnnnnnnnnnnnnnnnnnnnnnnnnnnnnnnnnnnnnnnnnnnnnnnnnnnnnnnnnnnnnnnnnnnnnnnnnnnnnnnnnnnnnnnnnnnnnnnnnnnnnnnnnnnnnnnnnnnnnnnnnnnnnnnnnnnnnnnnnnnnnnnnnnnnnnnnnnnnnnnnnnnnnnnnnnnnnnnnnnnnnnnnnnnnnnnnnnnnnnnnnnnnnnnnnnnnnnnnnnnnnnnnnnnnnnnnnnnnnnnnnnnnnnnnnagggtgatgctggtgcccctggagctcccggtagccagggcgcccctggccttcagggaatgcctggtgaacgtggtgcagctggtcttccagggcctaagggtgacagannnnnnnnnnnnnnnnnnnnnnnnnnnnnnnnnnnnnnnnnnnnnnnnnnnnnnnnnnnnnnnnnnnnnnnnnnnnnnnnnnnnnnnnnnnnnnnnnnnnnnnnnnnnnnnnnnnnnnnnnnnnnnnnnnnnnnnnnnnnnnnnnnnnnnnnnnnnnnnnngagaccgtgctgagcctggtccccccggccctgctggcttcgctggcccccctgnggtgctgatggccaacccggtgctaaaggcgaacctggtgatgctggtgctaaaggcgatgctggtccccctggccctgccggacccgctggaccccctggccccattgnggtaatgttggtgctcctggacccaaaggtgctcgtggcagcgctggtccccctgnnnnnnnnnnnnnnnnnnnnnnnnnnnnnnnnnnnnnnnnnnnnnnnnnnnnnnnnnnnnnnnnnnnnnnnnnnnnnnnnnnnnnnnnnnnnnnnnnnnnnnnnnnnnnnnnccgtggtgagactggccccgctggacctcctggtnnnnnnnnnnnnnnnnnnnnnnnnnnnnnnnnnnnnnnnnnnnnnnnnnnnnnnnnnnnnnnnnnnnnnnnnnnnnnnnnnnnnnnnnnnnnnnnnnnnnnnnnnnnnnnnnnnnnnnnnnnnnnnnnnnnnnnnnnnnnnnnnnnnnnnnnnnnnnnnnnnnnnnnnnnnnnnnnnnnnnnnnnnnnnnnnnnnnnnnnnnnnnnnnnnnnnnnnnnnnnnnnnnnnnnnnnnnnnnnnnnnnnnnnnnnnnnnnnnnnnnnnnnnnnnnnnnnnnnnnnnnnnnnnnnnnnnnnnnnnnnnnnnnnnnnnnnnnnnnnnnnnnnnnnnnnnnnnnnnnnnnnnnnnnnnnnnnnnnnnnnnnnnnnnnnnnnnnnnnnnnnnnnnnnnnnnnnnnnnnnnnnnnnnnnnnnnnnnnnnnnnnnnnnnnnnnnnnnnnnnnnnnnnnnnnnnnnnnnnnnnnnnnnnnnnnnnnnnnnnnnnnnnnnnnnnnnnnnnnngaccccaaggcccccgtggtgacaagggtgagacaggcgaacaaggcgacagaggcataaagggtcaccgtggcttctctggcctccagggtccccctggccctcctgnnnnnnnnnnnnnnnnnnnnnnnnnnnnnnnnnnnnnnnnnnnnnnnnnnnnnnnnnnnnnnnnnnnnnnnnnnnnnnnnnnnnnnnnnnnnnnnnnnnnnnnnnnnnnnnnnnnnnnnnnnnnnnnnnnnnnnnnnnnnnnnnnnnnnnnnnnnnnnnnnnnnnnnnnnnnnnnnnnnnnnnnnnnnnnnnccccctggtcctcccagcggtggtttcgacttcagcttcctgccccagccacctcaagagaaggctcacgatggcggccgctactaccgggctgatgatgccaatgtggttcgtgaccgtgacctcgaggtggacaccaccctcaagagcctgagccagcagatcgagaacatccggagccccgagggcagccgcaagaaccccgcccgcacctgccgcgacctcaagatgtgccactctgactggaaga

SEQ ID NO: 19808 - DNA, 136 bp, Macaca Mulatta
cagagctatggccctgaacacctgctaaccttctccaatctgagacgagctgggctcctaacagagcaggcccctggggacaccctcacagccgtggagagtaaagtgagcaagctggtgaccgacaaggctgcag

SEQ ID NO: 19809 - DNA, 690 bp, Macaca Mulatta
aatcggcacgaggcatctggagggtctctctgaagaggctatcatggagctgaacctgccgactggtattcccattgtctatgaattggacaagaacttgaagcctatcaagcccatgcagtcctgggggatgaagagacggtgcgcaaagccatggaagctgtggccgcccagggcaaggccaagaagtgaaggccagcggggaggatactgtccccgggagcaccctccctgcccgtcttgtccctctgcccctcccacctgcacatgtcacactgaccacatctgtagacatcttgagttgtatctgcagatggggactggtggctcccattttcattttagccattttgtcttctgcacccactcccttcgtacaatctagtcagaatagcacttctagagcacaggttctcagtccaagctgtggaaaagctccccttatccaacagagtttaaaggtagtaacttgggtttttgcgagttgtttactaaggacttgtggggaggaatcatgctaagccatgaccaatgaggagaagcaacagagcctctctgtccccaggagccagtcctctgctcttctgcagtcaggccactgcctgggggctctagtcattccagtggaagatgatgtaacctgcatggtgatgggacaactgtttcctccctgaccctagaggacctggc

SEQ ID NO: 19810 - DNA, 726 bp, Macaca Mulatta
ctaccttgttcagcatgagcgaacttacgccagaaagaagcccttggtgtgtaatgaatgcgggaaaacgttccgtcagagctcgtgcctttctaagcatcagagaattcactcaggtgagaagccctatgtatgtgactactgcgggaaggccttcggcctgagtgcggagcttgtccgccaccagagaattcacactggagaaaagccttatgtttgtcaggagtgcgggaaagccttcacccagagctcatgcctttctattcaccggagagttcacactggggagaagccctacatatgtggtgaatgtgggaaagcctttgcccagaaagcaaatctaacacagcaccagagaattcacactggcgagaagccttactcctgtaatgtgtgtggcaaagcttttggcctcagtgcccatctcaaccagcatctgagagttcacacccaggagacactttatcagtgtcaacgttgccagaaagcctttcggtgccactcgagcctcacccgccatcagcgtgtacacaacaagcagcaatactacctgtagccattgggtggcagcagagtcccagaatatgagacttcatccgatgtggaaagttggaaaccatccatcctattgcaagtttctctccaaataaatacatctaaagattgattagaaagtttgtgaacatgtttcattacaacagtgaaaacacaaaaatggagaagctg

SEQ ID NO: 19811 - DNA, 167 bp, Macaca Mulatta
  misc_feature (1)...(167): n = A,T,C or G
ggccgaggaggagctcatcaaagcccagaaggtgtttgaggagatgaatgtggatctgcaggaggagctgccctccctgtggaacagnagccgcgtaggtttctacgtcaacacgttccagagcatcgcgggcctagaggaaaacttccacaaggagatgagcaagn

SEQ ID NO: 19812 - DNA, 204 bp, Macaca Mulatta
tggaaggctgctccagccagcactggtcctatggactgcgtcctggaggaaagagagatgccgaaaatttgatggattctttccaagagatagtcaaagaggttggtcaactggcagaaacccaacacttcgaatgcaccatgcaccagccacgttctcccctccaagacctgaaaggagctctggaaagtctgattgaagagg

SEQ ID NO: 19813 - DNA, 974 bp, Macaca Mulatta
tttgacctgggaggtggcactttcgatgtgtcaatcctcactattgaggatggaatctttagaggtcaagtctacagctggagacacccacttgggtggagaagattttgacaaccgaatggttaaccattttattgcagagttcaagcgcaagcataagaaggacatcagcgagaacaagagagctgtaagacgccttcgtactgcttgtgaacgtgctaagcgtacgctctcttccagcacccaggccagtattgagatcgattctctctatgaaggaatcgacttctatacctccattacccgtgcccgatttgaagaattgaatgctgacctgttccgtggcaccctggacccagtagagaaagcccttcgagatgccaaactagacaagtcacagattcatgatattgtcctggttggtggttctactcgtatccccaagattcagaagcttctccaagatttcttcaacggaaaagaactgaataagagcatcaaccctgatgaagctgttgcttatggtgcagctgtccaggcagccatcctgtctggagacaagtctgaaaatgttcaagatttgttgctcttggatgtcactcctctttcccttggtattgaaactgctggtggagtaatgaccgtccttattaagcgtaataccaccattcctaccaagcagacacagacctgtcctaccaattctgacaaccagcctggtgtgcttattcaggtctatgaaaggaaagcgtgccatgaccaaggataacaacctggcttgggtagtttgaaatcctgggcataaccttcctgcaaccccgaaggggtttcctccgaattgaaagtcacctttttgagcattgaattcccaaatgggtatccctggaagggtatcctggctgggtggacccattaagatcctgggcaaaggcgatgaattacggattttagcttatccggcccgaaatgggaca

SEQ ID NO: 19814 - DNA, 734 bp, Macaca Mulatta
taaggacacaaagctttactgtatctgtaaagtgccttatgatgaatctacgtgggtagatctttttgagctctagttttttgtcttgaaagtttagctatgaaattgaaagttttgaagaaaatgaatattttgggagtgatataaatgaaaatattaaatttaagagtaatgtttcatctatggtcttgcatgcgatattcttacccttgacactagtgaagtaaaatttgctatttcatgtgtttatgattgtcctttgttatcttcttttctgtcaaaaacaagctttctgttgctcctttgctttctcctcttccctctgaattaactccaaatcaacgactaattgatgtctggagaaggagatgtgttactgttgcccaaaatggggagcatcctttctgagatctgttcaaagccctgtgaatacatgaaatcctggaaaccatctgaacatgaatggtcagaggttttgaatttgagtggttcggtttcttaattattttaagcagttctgttttttgtattaaaatactgaaactcaatattttgtcaaagtttccactttcttaccagagacaaaaacagaaaaatacaaaaggtgttccttttccccattcctcaagcataacatccaacaatttggcagctggaagctgtttttgacagttgttacttgtatttggtgatataaacaagattatagaggcactaaaccataaatgtagttt

SEQ ID NO: 19815 - DNA, 1328 bp, Macaca Mulatta
  misc_feature (1)...(1328): n = A,T,C or G
acttgaactgccatgtcctctgaagaaggaaagcttttcgtgggaggtctcaactttaacaccgacgagcaagcgctggaagaccacttcagcagtttcggacctatctctgaggngtggtcgttgtcaaggaccgggagactcagcggtccaggggttttggtttcatcaccttcaccaacccagagcatgcttcagttgccatgagagccatgaacggagagnagtccctggatggtcgtcagatccgtgtggatcatgcaggcaagtctgctcggggaaccagaggaggtggctttggggcccatgggcgtggtcgcagctactctagaggtgnnnnnnnnnnnnnnnnnnnnnnnnnnnnnnnnnnnnnnnnnnnnnnnnnnnnnnnnnnnnnnnnnnnnnnnnnnnnnnnnnnnnnnnnnnnnnnnnnnnnnnnnnnnnnnnnnnnnnnnnnnnnnnnnnnnnnnnnnnnnnnnnnnnnnnnnnnnnnnnnnnnnnnnnnnnnnnnnagatacacaaggaataatttctgatccaggatcgtccttccaaatggctgtatttataaaggtttttggagctgcactgaagcatcttattttatagcatatcaaccttttgtttttaaattgacctgacgaggtagttaaagatctttaacagttccatctttnnnnnnnnnnnnnnnnnnnnnnnnnnnnnnnnnnnnnnnnnnnnnnnnnnnnnnnnnnnnnnnnnnnnnnnnnnnnnnnnnnnnnnnnnnnnnnnnnnnnnnnnnnnnnnnnnnnnnnnnnnnnnnnnnnnnnnnnnnnnnnnnnnnnnnnnnnnnnnnnnnnnnnnnnnnnnnnnnnnnnnnnnnnnnnnnnnnnnnnnnnnnnnnnnnnnnnnnnnnnnnnnnnnnnnnnnnnnnnnnnnnnnnnnnnnnnnnnnnnnnnnnnnnnnnnnnnnnnnnnnnnnnnnnnnnnnnnnnnnnnnnnnnnnnnnnnnnnnnnnnnnnnnnnnnnnnnnnnnnnnnnnnnnnnnnnnnnnnnnnnnnnnnnnnnnnnnnnnnnnnnnnnnnnnnnnnnnnnnnnnnnnnnnnnnnnnnnnnnnnnnnnnnnnnnnnnnnnnnnnnnnnnnnnnnnnnnnnnnngaaaagtgtatcaataacatgattatccaggggtattttctaattcagataatcaaactgattatatagaagagttgctttaacacgttagcaaatgtnnnnnnnnnnnaataatggaagaaaaaatattctgttgtgtctcatacagtgcttaggatgtctttcacagagcttattaaaaagatgaaacctg

SEQ ID NO: 19816 - DNA, 820 bp, Macaca Mulatta
  misc_feature (1)...(820): n = A,T,C or G
ggctaggaaggggatgggactagattctaaaatttatttgggaccatgggaatgatagttgagaagaaaactatttgcacacgacagatttctagatactttttgctgctagttttatgtaatatttattgaacattttgacaaatatttatttttgtaagcctaaaagtgattctttgaaagtttaaagaaacttgaccaaaagacagtacaaaaacactggcacttgaatgttgaatgtcaccgtatgcgtgaaattatatatttcggggtagtgtgagcttttaatgttaagtcatattaaactcttaagtcaaattaagcagacccggcgttggcagtgtagccataactttctgatgttagtaaaaacaaaattggcgacttgaaattaaatcatgccaaggttttgatacacttgtcttaagatattaatgaaacacttcaaaacactgatgtgaagtgtccagaatctcagatgtttgttgtgtgaattttgtttagttgtnnnnnnnnnnnnnnnnnnnnnnnnnnnnagtgaatgtctggcacattgcaatcctcaaacatgtggttatctttgttgtattggcataatcagtgacttgtacattcagcaatagcatttgagcaagttttatcagcaagcaatattttcagttaataaggtttcaaaaatcatgtaaggatttaaacttgctgaatgtaaagattgaacctcaagtcactgtagctttagtaattgcttattgtattagtttagatgctagcactgcatgtgctgtgcatattctgattttattaaaataaaaagttgaac

SEQ ID NO: 19817 - DNA, 709 bp, Macaca Mulatta
agcctggactgagccacgcgccatcctccgagggactgacggcgcttgcagtgcgttgcacagcctcacctcccacccactgataataaagtcttttcttttacccgccaacgcctcctttctttgcccaaaggagttttggctggacagatgctagcgtgaggagctgctgtaggatcccagagaaacttacttgacctaacgatggaaaatggtaaccccagaagtctggtgcttctgtccaggccagttccagacctgttttgagactctgtatttaagtcaacattcagctacacagaagttactttttaatttttaaggaggaaccagtgattacaaatctctcacaattaaaaataggtggaagggccaagtataaaaacattttgcagtattttattctttcatttaaaaagatataatttaaaccatctccagaaacaagatctgtcacccatagagcctagaatcccaataaacacctatgaggtgagcacaaagggcagtgagaggagtcacctgcaagggcctaaccagaggccagggttggcagtgccctaggcggctgggcagccactggcccccactgccccgtggacctctgcagagcgagtcatggtgacgggggcccggttcactgtcagcctcctcatgcagccacggtaggcggggggccagggctgcatggccgtgggctctgggggcg

SEQ ID NO: 19818 - DNA, 318 bp, Macaca Mulatta
  misc_feature (1)...(318): n = A,T,C or G
tgaacgcccctctcggtggaatctggctctggctccctctgctcttgacctggctcacccccgaggtcaactcttcatggtggtanggtacatgagagctacaggtggctcctccagggtgatgtgcgataatgtgccaggcctggtgagcagccagcggcagctgtgtcaccgacatccagatgtgatgcgtgccattagccagggcgtggccgagtggacagcggaatgccagcaccagttccgccagcaccgctggaattgcaacaccctggacagggatcacagcctctttggcagggtcctactccgaagtan

SEQ ID NO: 19819 - DNA, 791 bp, Macaca Mulatta
gggaccagcctgtctttctgctggtgctgccttaaggaggtagttagtggaggggagggctgtaaatcattacttctttctcttcagaaagtggccacttggaaccactcaactatcacattattggcaagactgtgataggccttttgtctttaaatactacaggcctccctggacccatccctcgaagcagaaggaccctttgtttgaggagactacagatgggattccacagcggggtgggtgggaacctgtactagataacccagaggttccttctaacccactggtttggtggggaactcacggtaattccaaatgtacattcgaaggtctagggtctattttcagaagaagcaagaagaattatcagtggcaccttccccactgtcgcagggtaaaacaatagacattctgtgaaatgcaaagctatactttggtttttctagtagtttatctcattttaccctagtcttcctttaaggaaaacttaatctttatcacagttaattagagcgatcccaaggcaggggaccgggcctgcttgcctgtgtgtgatggcagttggagatctggatttagcactggggtctcggcaccctgcagatgtctgagactaagtgttctaccgtccaggtggcgatcaccttctgcgtctaggtactcccactggcaaggccaaggtctcctccaggttttttctgcaattattaatgtcattaaaaaaatgagcaaagccttatccgaatcgggaatagcaactaaagtcaatacattttacaggaagccaa

SEQ ID NO: 19820 - DNA, 499 bp, Macaca Mulatta
  misc_feature (1)...(499): n = A,T,C or G
cccgctccgctttagcgcccgttgaggacggcactaggacccagggaagtccccgagcggggttcgcggaaaggcagccagactcctccttatctccagtgtcaaacttgacatcagcctgcgagcggagcatggtaacttctccagcaatcagagcgctccccctcacatcagtggcatgcttcatggagatatgctcctctcactgccctctgcaccagcaacatggattgtcacctctccatcctcctcctcctcagctgctcttttctcaactgcttcggggaactgattccgcagccttccaatgaagnnnnnnnnnnnnnnnnnnnnnnnnnnnnnnnnnnnnnnnnnnnnnnnnnnnnnnnnnnnnnnnngtgggaagagatcagcggtgtggatgaacattacacacctatcaggacttaccaggtgtgcaatgtcatggatcatagtcaaaacaattggctgagaacaaactgggtccccaggaactcag

SEQ ID NO: 19821 - DNA, 1478 bp, Macaca Mulatta
  misc_feature (1)...(1478): n = A,T,C or G
tccgcgaagtaagaataatgaaggttttgaatcatcccaacatagntagttaaattatttgaagtgattgagactgagnnnnnnnnnnnnnnnnnnnnnnnnnnnnnnnnnnnnnnnnnnnnnnnnnnnnnnnnnnnnnnnnnnnnnnnnnnnnnnnnnnnnnnnnnnnnnnnnnnnnnnnnnnnnnnnnnnnnnnnnnnnnnnnnnnnnnnnnnnnnnnnnnnnnnnnnnnnnnnnnnnnaggcagaaaacctgctcttggacgctgatatgaacatcaagattgcagactttggcttcagcaatgaattcacctttgggaacaagctggacaccttctgtggcagtcccccttacgctgccccagaactcttccagggcaaaaaatatgatggacccgaggtggatgtgtggagcctaggagttatcctctatacactggtcagcggatccctgccttttgatggacagaatctcaagnnnnnnnnnnnnnnnnnnnnnnnnnnnnnnnnnnnnnnnnnnnnnnnnnnnnnnnnnnnnnnnnnnnnnnnnnnnnnnnnnnnnnnnnnnnnnnnnnnnnnnnnnnnnnnnnnnnnnnnnnnnnnnnnnnnnnnnnnnnnnnnnnnnnnnnnnnnnnnnnnnnnnnnnnnnnnnnnnnnnnnnnnnnnnnnnnnnnnnnnnnnnnnnnnnnnnnnnnnnnnnnnnnnnnnnnnnnnnnnnnnnnnnnnnnnnnnnnnnnnnnnnnnnnnnnnnnnnnnnnnnnnnnnnnnnnnnnnnnnnnnnnnnnnnnnnnnnnnnnnnnnnnnnnnnagctggaaggtgacaccatcaccctgaagccccggccttcagctgatctgaccaatagcagcgccccatccccatcccacaaggtacagcgcagcgtgtcggccaatcccaagcagcggcgcttcagcgaccagnnnnnnnnnnnnnnnnnnnnnnnnnnnnnnnnnnnnnnnnnnnnnnnnnnnnnnnnnnnnnnnnnnnnnnnnnnnnnnnnnnnnnnnnnnnnnnnnnnnnnnnnnnnnnnnnnnnnnnnnnnnnnnnnnnnnnnnnnnnnnnnnnnnnnnnnnnnnnnnnnnnnnnnnnnnnnnnnnnaacagcgtcctctccaccagcacaaatcgaagcaggaattccccacttttggagcgggccagcctcggccaggcctccatccagaatggcaaagacagnnnnnnnnnnnnnnnnnnnnnnnnnnnnnnnnnnnnnnnnnnnnnnnnnnnnnnnnnnnnnnnnnnnnnnnnnnnnnnnnnnnnnnnnnnnnnnnnnnnnnnnnnnnnnnnnnnnnnnnnnnnnnnnnnnnnnnnnnnnnnnnnnnnnnngaatttgccctatggtgtggccccagcctctccctctggccacagccagggccggcggggggcctctgggagcatcttcagcaagttcacctccaagtttgtacgcag

SEQ ID NO: 19822 - DNA, 732 bp, Macaca Mulatta
  misc_feature (1)...(732): n = A,T,C or G
aggatcgacccttcgaggacacctgtcgtggaaaccccggccactactatgacaaggctgtcaggaggtgctgttaccgctgccccannnnnnnnnnnnnnnnnnnnnnnnnnnnnnnnnnnnnnnnngactgcaggaagcagtgtgagcctgactactacctggacgaggctggccgctgcacggcctgcgtgagctgttctcgagnnnnnnnnnnnnnnnnnnnnnnnnnnnnnnnnnnnnnnnnnnnnnnnnnnnnnnnnnnnnnnnnnnnnnnnnnnnnnnnnnnnnnnnnnnnnnnnnnnnnnnnnnnnnnnnnnnnnnnnnnnnnnnnnnnnnnnnnnnnnnnnnnnnnnnnnnnnnnnnnnnnnnnnnnnnnnnnnnnnnnnnnnnnnnnnnnnnnnnnnnnnnnnnnnnnnnnnnnnnnnnnnnnnnnnnnnnnnnnnnnnnnnnnnnnnnnnnnnnnnnnnnnnnnnnnnnnnnnnnnnnnnnnnnnnnnnnnnnnnnnnnnnnnnnnnnnnnnnnnnnnnnnnnnnnnnnnnnnnnnnnnnnnnnnnnnnnnnnnnnnnnnnnnnnnnnnnnnnnnnnnnnnnnnnnnnnnnnnnnnnnnnccaggtctgtccccaacgcagccgtgcccacaggggtctggcgactgcaggaagcagtgtgagcctgactactacctggacgaggctggccgctgcacggcctgcgtgagctgttctcgag

SEQ ID NO: 19823 - DNA, 970 bp, Macaca Mulatta
gggcttctttttgaggaagacgcggtcgtaggacttgcggatctttggttcgcacgctcctgctcctgactcaccgctgttcgctctcgccgaggaacaagtcggtcaggaagccgcgcagcaggcatggcttttgaggatactggaaaaacacccgtggagccggaggtggcaattcaccgaattcgagtcaccctaacgagccgcaacgttaaatccctggaaaaggtgtgtgctgacttgatcagaggcgcgaaggaaatgaacctgagagtgaaaggatcagttcgaatgcctaccaagacttttgaaatcatttctaaataaactccttgttggggaaggtgtcgaaaacttgggaagacgtttccggataagaatatcacaaaccgatgcaaatgaacttggcgcagacccctccggacaatttgtaaaacaaggactacttgtccaatataaaaactcaaacccaggaggatttgaagtgaggaaaaatctacccattttgaaaaaatggcgtatatatgtccaaacaagcattgtttaaatataattttgaatataatcccaaatattgcggtggaacaaataaagtaagaaacgggaattagaaaaagtaaaatgagataatagagaaaacaacgaaacaagaatagttatgatgtgaaaagaatgaaatgacgaaatttgactgaccacgtaataaagtagatagaatgattggttatatgtaaaagagagcaacaacccgcaaatagtttagagagaaatgattaaagtaagccattagatataataagggatcgtcaatgtaaaccactatatatgtatatgggcccgttgagtgaattcaaaactggtttagattaatataaaccggcaacgccacagccatttacgtcagaaaataattacaccacattggatagtagaaaagaagacagagaatttagaacccgagtatgaaaaa

SEQ ID NO: 19824 - DNA, 241 bp, Macaca Mulatta
ctgggcttctggctgtgcaagagagttgtctaccctctttctttgtattttccttctttgtttccccctctattttaaaaatggaaaaataaacactacagaatgagacgtgtgattgtgagcctagcctgctcctagaagatctatctacagaggagatcaccaagttagactacttcagacatattatctttattctcagctgaggccaacatgcttttctctaaaccagcaattctta

SEQ ID NO: 19825 - DNA, 560 bp, Macaca Mulatta
tccatcctatatgagaatccttttgatatctgacacccattttaggaaaacttttggattattcgcaaaaagaagtggttcagaagacctgtttatttaatgagctactgaatagtagtagtcagtagtagtactactgaatagtagtagtcatactacaatagtagcagtcaagtagtagtcacttcacctataatctatttttctagtgccttgaggacaggaaatacttaaaaacaaatttagaataagatatttagtatgtctctatctccatgcctgttaatattttttcctttttaaattgaggtttggtaccacgtatgtagcagccgtggaaaagggtgttataacacaagactcaaggaagatggaggctgtaccatatggtacaatgagatgccagtaagacttggagtcaggctcacaaataatgtattaaaatggtaaaatagacagcatttatcttcaaaaattatctctggaaattttgtctcccttacttagttactatctgagatagaagaacacctgaactgtaccatttctcaggttgagcc

SEQ ID NO: 19826 - DNA, 831 bp, Macaca Mulatta
gggcctttctttgcggaatcaccatggcggctgggagcctgtatacgtatcctgaaaactggagggccttcaaggctctcatcgctgcacaatacagcggggctcaggtccgcgtgctctccgcaccaccccacttccattttggccaaaccaaccgcacccctgctcctgaggaggagatggatgaatgtgagcaggcgctggctgctgagcccaaggccaaggaccccttcgcttacttgcccaagagtacctttgtgttggatgaatttaagcgcaagtactccaatgaagacacactctctgtggcactgccatatttctgggaacactttgataaggacggctggtccctgtggtactcagagtatcgcttccctgaagaactcactcagaccttcatgagctgcaatctcatcactggaatgttccagcgactgggacagctgaggaaaaatgccttcgccagtgtcatcctcttttggaaccacaatagcacctccctttctggaagtctggttctttccgaagcccagaagcttgccctttccgctgaagcccaaattggcaaggtggaatacaaagtcatacccattggcggaaaactgggatcctgggcaaccgaggaaaaccccaaaacccttggtttcaagaattacttttttccttgggaaggggggcccttcccgcctgttggggccaaaagcccttcaaaccgggggaaaaatctttcagatgaaaacattctcttggcctatccctaaacgttccctggcaccgggcccttttagggaaaaatggggggtgcctttaaagggaaaatttgaacaa

SEQ ID NO: 19827 - DNA, 615 bp, Macaca Mulatta
cttggaccttaatgattgttggcaagaaatgtgctgctgatctgcgcctgaataagggttatcgaatggtggtgaatgaaggttccgatggtggacagtctgtctatcacgttcatctccatgttcttggaggtcggcagatgcattggcctcctggttaagcacgttttggggataattttctcttctctaggcaatgattaagttaggcaagttccagtatgttaagtaacacacttatttttgcctgtgtatggagagattcaagaaataattttaaaaccacatacataataaaagacattgttgcatggcttatagtctctctgaatgttgcatttgatttgttattttaaaaatatatttgttggaatatttgaaggtgggtttacaactttggaggtttctttttcttcccaaggaggactcaacatatgaacattgcattgttttaatggtgttactagtctttgaagacaaataatgagagtttataaatttagctttaactttgaaatatctttccaggttaaaataggtccaaattagatttttaagctaattctcacgttttctaagaacatagcaaattgatgattttgggtttagaaacaa

SEQ ID NO: 19828 - DNA, 784 bp, Macaca Mulatta
ggattacaagcaagaaaaattcagccttgcagaaatgcatttccaaaaagcacttgatatcaaccctcaaagttcagttttactttgccacattggagtagttcaacatgcactgaaaaaaatcagagaaggctttggataccctaaacaaagccattgtcattgatcccaagaaccctctatgcaaatttcacagagcctcagttttatttgcaaatgaaaaatataagtctgctttacaagaacttgaagaattgaaacaaattgttcccaaagaatccctcgtttacttcttaataggaaaggtttacaagaagttaggtcaaacgcacctcgccctgatgaatttctcttgggctatggatttagatcctaaagggagccaataaccagattaaagaggcaattgataagcgctatcttccagatgatgaggagccaataacccaagaagaacagatcatgggaacagatgaatcccaggagagcagcatgacagatgcggatgacacacaacttcatgcagctgaaagtgatgaattttaacttctggaaatcggactcttacaactgggatgtgtgactagtgctgacatgtttcttgtccctccatatactgagtctttacccttgaaccggcggtgtcatcatccatcacttataccatgaagggtgcccactttcattgggaaccctgaccggtataaccgaatgaaaaggcagtgccaataatttaagctggctaacaaaaactgacctcctttttccagttatgaatggacct

SEQ ID NO: 19829 - DNA, 8294 bp, Macaca Mulatta
  misc_feature (1)...(8294): n = A,T,C or G
tgcatcagggtttaatcagaatatgttctaaaccagtggtccttccaaaggnnnnnnnnnnnnnnnnnnnnnnnnnnnnnnnnnnnnnnnnnnnnnnnnnnnnnnnnnnnnnnnnnnnnnnnnnnnnnnnnnnnnnnnnnnnnnnnnnnnnnnnnnnnnnnnnnnnnnnnnnnnnnnnnnnnnnnnnnnnnnnnnnnnnnnnnnnnnnnnnnnnnnnnnnnnnnnnnnnnnnnnnnnnnnnnnnnnnnnnnnnnnnnnnnnnnnnnnnnnnnnnnnnnnnnnnnnnnnnnnnnnnnnnnnnnnnnnnnnnnnnnnnnnnnnnnnnnnnnnnnnnnnnnnnnnnnnnnnnnnnnnnnnnnnnnnnnnnnnnnnnnnnnnnnnnnnnnnnnnnnnnnnnnnnnnnnnnnnnnnnnnnnnnnnnnnnnnnnnnnnnnnnnnnnnnnnnnnnnnnnnnnnnnnnnnnnnnnnnnnnnnnnnnnnnnnnnnnnnnnnnnnnnnnnnnnnnnnnnnnnnnnnnnnnnnnnnnnnnnnnnnnnnnnnnnnnnnnnnnnnnnnnnnnnnnnnnnnnnnnnnnnnnnnnnnnnnnnnnnnnnnnnnnnnnnnnnnnnnnnnnnnnnnnnnnnnnnnnnnnnnnnnnnnnnnnnnnnnnnnnnnnnnnnnnnnnnnnnnnnnnnnnnnnnnnnnnnnnnnnnnnnnnnnnnnnnnnnnnnnnnnnnnnnnnnnnnnnnnnnnnnnnnnnnnnnnnnnnnnnnnnnnnnnnnnnnnnnnnnnnnnnnnnnnnnnnnnnnnnnnnnnnnnnnnnnnnnnnnnnnnnnnnnnnnnnnnnnnnnnnnnnnnnnnnnnnnnnnnnnnnnnnnnnnnnnnnnnnnnnnnnnnnnnnnnnnnnnnnnnnnnnnnnnnnnnnnnnnnnnnnnnnnnnnnnnnnnnnnnnnnnnnnnnnnnnnnnnnnnnnnnnnnnnnnnnnnnnnnnnnnnnnnnnnnnnnnnnnnnnnnnnnnnnnnnnnnnnnnnnnnnnnnnnnnnnnnnnnnnnnnnnnnnnnnnnnnnnnnnnnnnnnnnnnnnnnnnnnnnnnnnnnnnnnnnnnnnnnnnnnnnnnnnnnnnnnnnnnnnnnnnnnnnnnnnnnnnnnnnnnnnnnnnnnnnnnnnnnnnnnnnnnnnnnnnnnnnnnnnnnnnnnnnnnnnnnnnnnnnnnnnnnnnnnnnnnnnnnnnnnnnnnnnnnnnnnnnnnnnnnnnnnnnnnnnnnnnnnnnnnnnnnnnnnnnnnnnnnnnnnnnnnnnnnnnnnnnnnnnnnnnnnnnnnnnnnnnnnnnnnnnnnnnnnnnnnnnnnnnnnnnnnnnnnnnnnnnnnnnnnnnnnnnnnnnnnnnnnnnnnnnnnnnnnnnnnnnnnnnnnnnnnnnnnnnnnnnnnnnnnnnnnnnnnnnnnnnnnnnnnnnnnnnnnnnnnnnnnnnnnnnnnnnnnnnnnnnnnnnnnnnnnnnnnnnnnnnnnnnnnnnnnnnnnnnnnnnnnnnnnnnnnnnnnnnnnnnnnnnnnnnnnnnnnnnnnnnnnnnnnnnnnnnnnnnnnnnnnnnnnnnnnnnnnnnnnnnnnnnnnnnnnnnnnnnnnnnnnnnnnnnnnnnnnnnnnnnnnnnnnnnnnnnnnnnnnnnnnnnnnnnnnnnnnnnnnnnnnnnnnnnnnnnnnnnnnnnnnnnnnnnnnnnnnnnnnnnnnnnnnnnnnnnnnnnnnnnnnnnnnnnnnnnnnnnnnnnnnnnnnnnnnnnnnnnnnnnnnnnnnnnnnnnnnnnnnnnnnnnnnnnnnnnnnnnnnnnnnnnnnnnnnnnnnnnnnnnnnnnnnnnnnnnnnnnnnnnnnnnnnnnnnnnnnnnnnnnnnnnnnnnnnnnnnnnnnnnnnnnnnnnnnnnnnnnnnnnnnnnnnnnnnnnnnnnnnnnnnnnnnnnnnnnnnnnnnnnnnnnnnnnnnnnnnnnnnnnnnnnnnnnnnnnnnnnnnnnnnnnnnnnnnnnnnnnnnnnnnnnnnnnnnnnnnnnnnnnnnnnnnnnnnnnnnnnnnnnnnnnnnnnnnnnnnnnnnnnnnnnnnnnnnnnnnnnnnnnnnnnnnnnnnnnnnnnnnnnnnnnnnnnnnnnnnnnnnnnnnnnnnnnnnnnnnnnnnnnnnnnnnnnnnnnnnnnnnnnnnnnnnnnnnnnnnnnnnnnnnnnnnnnnnnnnnnnnnnnnnnnnnnnnnnnnnnnnnnnnnnnnnnnnnnnnnnnnnnnnnnnnnnnnnnnnnnnnnnnnnnnnnnnnnnnnnnnnnnnnnnnnnnnnnnnnnnnnnnnnnnnnnnnnnnnnnnnnnnnnnnnnnnnnnnnnnnnnnnnnnnnnnnnnnnnnnnnnnnnnnnnnnnnnnnnnnnnnnnnnnnnnnnnnnnnnnnnnnnnnnnnnnnnnnnnnnnnnnnnnnnnnnnnnnnnnnnnnnnnnnnnnnnnnnnnnnnnnnnnnnnnnnnnnnnnnnnnnnnnnnnnnnnnnnnnnnnnnnnnnnnnnnnnnnnnnnnnnnnnnnnnnnnnnnnnnnnnnnnnnnnnnnnnnnnnnnnnnnnnnnnnnnnnnnnnnnnnnnnnnnnnnnnnnnnnnnnnnnnnnnnnnnnnnnnnnnnnnnnnnnnnnnnnnnnnnnnnnnnnnnnnnnnnnnnnnnnnnnnnnnnnnnnnnnnnnnnnnnnnnnnnnnnnnnnnnnnnnnnnnnnnnnnnnnnnnnnnnnnnnnnnnnnnnnnnnnnnnnnnnnnnnnnnnnnnnnnnnnnnnnnnnnnnnnnnnnnnnnnnnnnnnnnnnnnnnnnnnnnnnnnnnnnnnnnnnnnnnnnnnnnnnnnnnnnnnnnnnnnnnnnnnnnnnnnnnnnnnnnnnnnnnnnnnnnnnnnnnnnnnnnnnnnnnnnnnnnnnnnnnnnnnnnnnnnnnnnnnnnnnnnnnnnnnnnnnnnnnnnnnnnnnnnnnnnnnnnnnnnnnnnnnnnnnnnnnnnnnnnnnnnnnnnnnnnnnnnnnnnnnnnnnnnnnnnnnnnnnnnnnnnnnnnnnnnnnnnnnnnnnnnnnnnnnnnnnnnnnnnnnnnnnnnnnnnnnnnnnnnnnnnnnnnnnnnnnnnnnnnnnnnnnnnnnnnnnnnnnnnnnnnnnnnnnnnnnnnnnnnnnnnnnnnnnnnnnnnnnnnnnnnnnnnnnnnnnnnnnnnnnnnnnnnnnnnnnnnnnnnnnnnnnnnnnnnnnnnnnnnnnnnnnnnnnnnnnnnnnnnnnnnnnnnnnnnnnnnnnnnnnnnnnnnnnnnnnnnnnnnnnnnnnnnnnnnnnnnnnnnnnnnnnnnnnnnnnnnnnnnnnnnnnnnnnnnnnnnnnnnnnnnnnnnnnnnnnnnnnnnnnnnnnnnnnnnnnnnnnnnnnnnnnnnnnnnnnnnnnnnnnnnnnnnnnnnnnnnnnnnnnnnnnnnnnnnnnnnnnnnnnnnnnnnnnnnnnnnnnnnnnnnnnnnnnnnnnnnnnnnnnnnnnnnnnnnnnnnnnnnnnnnnnnnnnnnnnnnnnnnnnnnnnnnnnnnnnnnnnnnnnnnnnnnnnnnnnnnnnnnnnnnnnnnnnnnnnnnnnnnnnnnnnnnnnnnnnnnnnnnnnnnnnnnnnnnnnnnnnnnnnnnnnnnnnnnnnnnnnnnnnnnnnnnnnnnnnnnnnnnnnnnnnnnnnnnnnnnnnnnnnnnnnnnnnnnnnnnnnnnnnnnnnnnnnnnnnnnnnnnnnnnnnnnnnnnnnnnnnnnnnnnnnnnnnnnnnnnnnnnnnnnnnnnnnnnnnnnnnnnnnnnnnnnnnnnnnnnnnnnnnnnnnnnnnnnnnnnnnnnnnnnnnnnnnnnnnnnnnnnnnnnnnnnnnnnnnnnnnnnnnnnnnnnnnnnnnnnnnnnnnnnnnnnnnnnnnnnnnnnnnnnnnnnnnnnnnnnnnnnnnnnnnnnnnnnnnnnnnnnnnnnnnnnnnnnnnnnnnnnnnnnnnnnnnnnnnnnnnnnnnnnnnnnnnnnnnnnnnnnnnnnnnnnnnnnnnnnnnnnnnnnnnnnnnnnnnnnnnnnnnnnnnnnnnnnnnnnnnnnnnnnnnnnnnnnnnnnnnnnnnnnnnnnnnnnnnnnnnnnnnnnnnnnnnnnnnnnnnnnnnnnnnnnnnnnnnnnnnnnnnnnnnnnnnnnnnnnnnnnnnnnnnnnnnnnnnnnnnnnnnnnnnnnnnnnnnnnnnnnnnnnnnnnnnnnnnnnnnnnnnnnnnnnnnnnnnnnnnnnnnnnnnnnnnnnnnnnnnnnnnnnnnnnnnnnnnnnnnnnnnnnnnnnnnnnnnnnnnnnnnnnnnnnnnnnnnnnnnnnnnnnnnnnnnnnnnnnnnnnnnnnnnnnnnnnnnnnnnnnnnnnnnnnnnnnnnnnnnnnnnnnnnnnnnnnnnnnnnnnnnnnnnnnnnnnnnnnnnnnnnnnnnnnnnnnnnnnnnnnnnnnnnnnnnnnnnnnnnnnnnnnnnnnnnnnnnnnnnnnnnnnnnnnnnnnnnnnnnnnnnnnnnnnnnnnnnnnnnnnnnnnnnnnnnnnnnnnnnnnnnnnnnnnnnnnnnnnnnnnnnnnnnnnnnnnnnnnnnnnnnnnnnnnnnnnnnnnnnnnnnnnnnnnnnnnnnnnnnnnnnnnnnnnnnnnnnnnnnnnnnnnnnnnnnnnnnnnnnnnnnnnnnnnnnnnnnnnnnnnnnnnnnnnnnnnnnnnnnnnnnnnnnnnnnnnnnnnnnnnnnnnnnnnnnnnnnnnnnnnnnnnnnnnnnnnnnnnnnnnnnnnnnnnnnnnnnnnnnnnnnnnnnnnnnnnnnnnnnnnnnnnnnnnnnnnnnnnnnnnnnnnnnnnnnnnnnnnnnnnnnnnnnnnnnnnnnnnnnnnnnnnnnnnnnnnnnnnnnnnnnnnnnnnnnnnnnnnnnnnnnnnnnnnnnnnnnnnnnnnnnnnnnnnnnnnnnnnnnnnnnnnnnnnnnnnnnnnnnnnnnnnnnnnnnnnnnnnnnnnnnnnnnnnnnnnnnnnnnnnnnnnnnnnnnnnnnnnnnnnnnnnnnnnnnnnnnnnnnnnnnnnnnnnnnnnnnnnnnnnnnnnnnnnnnnnnnnnnnnnnnnnnnnnnnnnnnnnnnnnnnnnnnnnnnnnnnnnnnnnnnnnnnnnnnnnnnnnnnnnnnnnnnnnnnnnnnnnnnnnnnnnnnnnnnnnnnnnnnnnnnnnnnnnnnnnnnnnnnnnnnnnnnnnnnnnnnnnnnnnnnnnnnnnnnnnnnnnnnnnnnnnnnnnnnnnnnnnnnnnnnnnnnnnnnnnnnnnnnnnnnnnnnnnnnnnnnnnnnnnnnnnnnnnnnnnnnnnnnnnnnnnnnnnnnnnnnnnnnnnnnnnnnnnnnnnnnnnnnnnnnnnnnnnnnnnnnnnnnnnnnnnnnnnnnnnnnnnnnnnnnnnnnnnnnnnnnnnnnnnnnnnnnnnnnnnnnnnnatactttcaggctttggtgaataaatgtcctttgtaaaatataaagaantgtatgcnnnnnnnnnnnnnnnnnnnnnnnnnnnnnnnnnnnnnnnnnnnnnnnnnnnnnnnnnnnnnnnnnnnnnnnnnnnnnnnnnnnnnnnnnnnnnnnnnnnnnnnnnnnnnnnnnnnnnnnnnnnnnnnnnnnnnnnnnnnnnnnnnnnnnnnnnnnnnnnnnnnnnnnnnnnnnnnnnnnnnnnnnnnnnnnnnnnnnnnnnnnnnnnnnnnnnnnnnnnnnnnnnnnnnnnnnnnnnnnnnnnnnnnnnnnnnnnnnnnnnnnnnnnnnnnnnnnnnnnnnnnnnnnnnnnnnnnnnnnnnnnnnnnnnnnnnnnnnnnnnnnnnnnnnnnnnnnnnnnnnnnnnnnnnnnnnnnnnnnnnnnnnnnnnnnnnnnnnnnnnnnnnnnnnnnnnnnnnnnnnnnnnnnnnnnnnnnnnnnnnnnnnnnnnnnnnnnnnnnnnnnnnnnnnnnnnnnnnnnnnnnnnnnnnnnnnnnnnnnnnnnnnnnnnnnnnnnnnnnnnnnnnnnnnnnnnnnnnnnnnnnnnnnnnnnnnnnnnnnnnnnnnnnnnnnnnnnnnnnnnnnnnnnnnnnnnnnnnnnnnnnnnnnnnnnnnnnnnnnnnnnnnnnnnnnnnnnnnnnnnnnnnnnnnnnnnnnnnnnnnnnnnnnnnnnnnnnnnnnnnnnnnnnnnnnnnnnnnnnnnnnnnnnnnnnnnnnnnnnnnnnnnnnnnnnnnnnnnnnnnnnnnnnnnnnnnnnnnnnnnnnnnnnnnnnnnnnnnnnnnnnnnnnnnnnnnnnnnnnnnnnnnnnnnnnnnnnnnnnnnnnnnnnnnnnnnnnnnnnnnnnnnnnnnnnnnnnnnnnnnnnnnnnnnnnnnnnnnnnnnnnnnnnnnnnnnnnnnnnnnnnnnnnnnnnnnnnnnnnnnnnnnnnnnnnnnnnnnnnnnnnnnnnnnnnnnnnnnnnnnnnnnnnnnnnnnnnnnnnnnnnnnnnnnnnnnnnnnnnnnnnnnnnnnnnnnnnnnnnnnnnnnnnnnnnnnnnnnnnnnnnnnnnnnnnnnnnnnnnnnnnnnnnnnnnnnnnnnnnnnnnnnnnnnnnnnnnnnnnnnnnnnnnnnnnnnnnnnnnnnnnnnnnnnnnnnnnnnnnnnnnnnnnnnnnnnnnnnnnnnnnnnnnnnnnnnnnnnnnnnnnnnnnnnnnnnnnnnnnnnnnnnnnnnnnnnnnnnnnnnnnnnnnnnnnnnnnnnnnnnnnnnnnnnnnnnnnnnnnnnnnnnnnnnnnnnnnnnnnnnnnnnnnnnnnnnnnnnnnnnnnnnnnnnnnnnnnnnnnnnnnnnnnnnnnnnnnnnnnnnnnnnnnnnnnnnnnnnnnnnnnnnnnnnnnnnnnnnnnnnnnnnnnnnnnnnnnnnnnnnnnnnnnnnnnnnnnnnnnnnnnnnnnnnnnnnnnnnnnnnnnnnnnnnnnnnnnnnnnnnnnnnnnnnnnnnnnnnnnnnnnnnnnnnnnnnnnnnnnnnnnnnnnnnnnnnnnnnnnnnnnnnnnnnnnnnnnnnnnnnnnnnnnnnnnnnnnnnnnnnnnnnnnnnnnnnnnnnnnnnnnnnnnnnnnnnnnnnnnnnnnnnnnnnnnnnnnnnnnnnnnnnnnnnnnnnnnnnnnnnnnnnnnnnnnnnnnnnnnnnnnnnnnnnnnnnnnnnnnnnnnnnnnnnnnnnnnnnnnnnnnnnnnnnnnnnnnnnnnnnnnnnnnnnnnnnnnnnnnnnnnnnnnnnnnnnnnnnnnnnnnnnnnnnnnnnnnnnnnnnnnnnnnnnnnnnnnnnnnnnnnnnnnnnnnnnnnnnnnnnnnnnnnnnnnnnnnnnnnnnnnnnnnnnnnnnnnnnnnnnnnnnnnnnnnnnnnnnnnnnnnnnnnnnnnnnnnnnnnnnnnnnnnnnnnnnnnnnnnnnnnnnnnnnnnnnnnnnnnnnnnnnnnnnnnnnnnnnnnnnnnnnnnnnnnnnnnnnnnnnnnnnnnnnnnnnnnnnnnnnnnnnnnnnnnnnnnnnnnnnnnnnnnnnnnnnnnnnnnnnnnnnnnnnnnnnnnnnnnnnnnnnnnnnnnnnnnnnnnnnnnnnnnnnnnnnnnnnnnnnnnnnnnnnnnnnnnnnnnnnnnnnnnnnnnnnnnnnnnnnnnnnnnnnnnnnnnnnnnnnnnnnnnnnnnnnnnnnnnnnnnnnnnnnnnnnnnnnnnnnnnnnnnnnnnnnnnnnnnnnnnnnnnnnnnnnnnnnnnnnnnnnnnnnnnnnnnnnnnnnnnnnnnnnnnnnnnnnnnnnnnnnnnnnnnnnnnnnnnnnnnnnnnnnnnnnnnnnnnnnnnnnnnnnnnnnnnnnnnnnnnnnnnnnnnnnnnnnnnnnnnnnnnnnnnnnnnnnnnnnnnnnnnnnnnnnnnnnnnnnnnnnnnnnnnnnnnnnnnnnnnnnnnnnnnnnnnnnnnnnnnnnnnnnnnnnnnnnnnnnnnnnnnnnnnnnnnnnnnnnnnnnnnnnnnnnnnnnnnnnnnnnnnnnnnnnnnnnnnnnnnnnnnnnnnnnnnnnnnnnnnnnnnnnnnnnnnnnnnnnnnnnnnnnnnnnnnnnnnnnnnnnnnnnnnnnnnnnnnnnnnnnnnnnnnnnnnnnnnnnnnnnngatgtttctttctcagcaaaatagaggagaagctttcccctctcccagaagataatagtatgaatgtggatgaagatggagaccccagtgacaggatggacgtgcaagagcaggaagaagatatcagctccttgatcaggagctgcaagttttccatgaaaatgaagatggtagacagtgcccggaagca

SEQ ID NO: 19830 - DNA, 1041 bp, Macaca Mulatta
gcatcttcttcacaagatctacattcattctcttcaagccatcccgcaacaccatcgaggaggtgcgttgcagcaccgcagctcacgctttcaaggtggctgcccgggccacgctgcgccgcagcaacgtctcccgcaagcggtccagcagccttgggggctccactggatccaccccctcctcctccatcagcagcaagagcaacagcgaagacccattcccacagcccgagaggcagaagcagcagcagccgctggccctaacccaacaagagcagcagcagcagcccctgaccctcccacagcagcaacaatcgcagcagcagccaagatgcaagcagaaggtcatcttcggcagtggcacggtcaccttctcactgagcttcgatgagcctcagaagaacgccatggcccacaggaattctacacaccagaactccctggaggcccagaaaagcagcgatacgctggcccgacaccaggcattactcccgctgcagtgcggggaagcggactcagatctgagcgtccaagaaacaggtctgcaaggaccagtgggtggagaccaccggccagaggtggaggtccctgaagagttgtccccagcacttgtagtgtccagttcacagagctttgtcatcagcggtggaggaagcactgttacagaaaatgtactgcattcataaaatggagaagactggtctagggagaatgcagagaggtttcttggggtcccagggatgaggaattgccccagacccctttcctctgaggaagaagggataatagacacatcagatgccccaaatttagtcacaccagtttaaatgacagtgaattgaccaatgttccctttaaaattaaagaaggaagaactttgtgtttctgtggttgcatttcaaatcattgagatctccacggtcagatttgctctgtcgccacatctaatgtctcttccctcattctgtcccatcaacagctcagagatgaaactacggctttaaactaccctcccagagtgtgcagactgatgggacatca

SEQ ID NO: 19831 - DNA, 783 bp, Macaca Mulatta
  misc_feature (1)...(783): n = A,T,C or G
nnnnnnnnnnnnnnnnnnnnnnnnnnnnnnnnnnnnnnnnnngtatactaagaagcaaaggatctcatctaaatggaattgaatggcagtcctagtttgttactttggtgatgagattttcagatttgaactaatctatttgacatgattgtagaaagaatgtaagtattcacacatctccaaacatttgtatttgttacttctttttgttgctaaggtagctcctgtagttatacattgttgcaaaaatttacaaatgttttacaagtgttaacgtnnnnnnnnnnnnnnnnnnnntttagccaaagaagaagtcactatttccaagttagaaaccaccagaaataactgaaattttcgatatgttctaatcttctttgtatttttgagatctgtgtgagaacccacccccactccaggagcatctgtacagcttccatctgccattgaccaggtcctctcatcaaattaaatggaacagaaaatgctctagtgaaacaaaggaaatgtgcaagcatttttcctttttctattattctatttccctttttcctttttggcccccttataatccaagccccagctgaaaggttgcaacaacaccaggttggggagcaggtcaccnaggatcatagttcagtcaagatgacatcattctctggaactagatttncactcactaggtcccctggcctcataacaggaactttagggcaggtgagacacaaggatggacttccctgttgtaaggacctagtagggaaatcttgcaaggtactttag

SEQ ID NO: 19832 - DNA, 234 bp, Macaca Mulatta
tgagactgttcctgagccttcagcactaacctatgagggtgagctggttccctctatatatacatcatacttaactttactagtaatctcacagcatttgccaagtctcccaatatccaattttaaaatgaaatgcattttgctagacagttaaactggcttaacttagtatattattattaattacaatgtaatagaagcttaaaataaagttaaactgattataaaaaaaaa

SEQ ID NO: 19833 - DNA, 184 bp, Macaca Mulatta
  misc_feature (1)...(184): n = A,T,C or G
agggcccaatggctgcaaaatcgcaacccaannnnnnnnnnnnnnnnnnnnnnnnnnnnnnnnnnnnnnnnnnnnnnnnnnnnnnnnnnnnnnnnnnnnnnnnngggaggtggactggttttcactggggagcatcatcttcctactgctgtgcgcgcccttcatcgtctactacttcatcatg

SEQ ID NO: 19834 - DNA, 694 bp, Macaca Mulatta
gcggcagtcctcacagacacagaagcagctcaactaccacacaggtcaccaaagccatatcctggtcactgcttctcagctgccaagccaagctgggtcctcaacattcctggggagctaggaggagcagaggaccagcacatgacatccctggggagctaggaggagcagaggaccagcacatgacatccctggggagctaggaggagcagaggaccagcacatgaggctgagaggcattctgcaaggtgaatttttgaggcagaggctgcccccatcacacaactccctgtcagaggacctcatcctgctcagaaagctgctctagaatttaatttacatgactcgttgggacagacagagttcactgtcttgtcttccacagtgtgacaggggtggccccacccctggcaactgagggccgtggcaggtcctggggaggccatcttaaggaagagcaggcagctagcgttccagctttggaaactctggctggagaaggtggttcacagacgagttcgggggcctcaggcagcccgtcacataggcctttccacaggggagggtagaggcaacaggcaggtcccaggagaccccagcaggtcctccaccgtccagccttcacggcaccaggcagaatttacacataggctcagtctccaagccaaagtgaggtggagcatggtggtggcgg

SEQ ID NO: 19835 - DNA, 2310 bp, Macaca Mulatta
  misc_feature (1)...(2310): n = A,T,C or G
gggaagtttccagggcctttggaaaaccagagattgtctttcctgttggaaaaggcaatcactagggaagcgcagatgtggaaagtgaatgtgcggaaaatgccttcaaatcagaatgtttctccatcccagagagatgaagtaattcaatggctggccaaactcaagtaccaattcaacctttacccagaaacatttgctctggctagcagtcttttggacaggtttttagctaccgtaaagagaattccagtactaaaggtattggcaagagacagtttctgtggatgttcctcatctgaaattttgagaatggagagaattattctggataagttgaattgggatcttcacacagccacaccattggattttcttcatattttccatgctattgcggtatcaactaggcctcagttacttttcagtttgcccaaattgagcccatctcaacatttggcagtccttaccaagcaactacttcactgtatggcctgcaaccaacttctgcaattcagaggatccatgcttgctctggccatggttagtctggaaatggagaaacttattcctaattggctttctcttacaattgaactgcttcagaaagcacagatggatagctcccagttgatccactgtcggggagcttgtggcacatcacctttctactctgcagtcttccctggcctctaaattccggtttatgtctaccgttcccttcaagcacaaccctggtgacctgtgacaaaggagtgttcagattacatccctcctctgtcccaggcccagaattctccaaggacaacagcaagccagaagtgccagtcagaggtacagcagccttttaccatcatctcccagctgccagtgggtgcaagcagacctctgctaaacgcaaagtagaggaaatggaagtggatgacttctatgatggaatcaaacggctctataatgaagattatgtctccgaaaatgtgggttccgtgtgtggcactgatttatcaagacaagagggacatgcttccccttgttcacctttgcaggctgtttctgtcatgtagtttcaacaagtgttacctttgagtgtaaactaaggtagactactctgggaatgagaacatgcaaaatcaggaaaggctgtagaaggatatataccttaacaggctgatttggagtgagnnnnnnnnnnnnnnnnnnnnnnnnnnactctcattatttgtgtggctaattataattcagtgttatttaaacacataaggacnnnnnnnnnnnnnnnnnnnnnnggaaagatccaaactttttttaaacttaaaaaacctctttgtagtatgccagttgcactttttttctgccataatgtaacgtagcttgccccataaaaaattcagttaaaattcatagccagcaaacctgttccccctcagcatcctgatttgattttgcttttgcttgcttctccatttaagttactgaactttatgcatgctgatctgtattgattctcactgaataggaaaccccaaaattattttttagcagtcgaacaaattatttcagtgtgacagccatgatgcaagttccaattagtatgaaagggtactttggaattgtcccatattaatcagagacagcaacagaaaaagttctcatattaccaggttgattttgtgtctcatttcaaattttaatttaaaattatggttttcatttttgtttaccttaaagtgatgcttaaaagtggtatgtaattaggacacttagatttgttgaaagcatttttgacatttgtataaaagaatttgtgataaagttaatatatccaggtgctcaccaaagaaacttgtatgtaaacaactgaaattagatttttctaactgatagttttccactcatttattaatcagtaggaagagacttctagatgtttagggcaagctctgtgaatttagagtctgtaacatgttataactgaatttagtaccctagttttgttaagctattaggattttctaatagaacttactccccaactgcctccccagcctacttatagttctcttaacgacttctggggtcctgagctcccttttgcagtctgaaaaaaggtattgcagtcagaaacatgtactgatggataaaagcctctgggtagcaaataaaaagttgtcctnnnnnnnnanaannnnnnnnnanannaanncctgttcggcccgccctcgggcccttgaaaaaacttttctaaacccatttcttttgggcgccccggggcccagtagggtaaagtgaaccatgggtcactacctggtt

SEQ ID NO: 19836 - DNA, 1461 bp, Macaca Mulatta
  misc_feature (1)...(1461): n = A,T,C or G
aggtggtgtgtgatgagaacggctctaagggttatgcatttgtccacttcgagacccaagaggctgccgacaaggccatcgagaagatgaatggcatgctcctcaatgaccgcaaagnnnnnnnnnnnnnnnnnnnnnnnnnnnnnnnnnnnnnnnnnnnnnnnnnnnnnnnnnnnnnnnnnnnnnnnnnnnnnnnnnnnnnnnnnnnnnnnnnnnnnnnnnnnnnnnnnnnnnnnnnnnnnnnnnnnnnnnnnnnnnnnnnnnnnnnnnnnnnnnnnnnnnnnnnnnnnnnnnnnnnnnnnnnnnnnnnnnnnnnnnnnnnnnnnnnnnnnnnnnnnnnnnnnnnnnnnnnnnnnnnnnnnnnnnnnnnnnnnnnnnnnnnnnnnnnnnnnnnnnnnnnnnnnnnnnnnnnnnnnnnnnnnnnnnnnnnnnnnnnnnnnnnnnnnnnnnnnnnnnnnnnnnnnnnnnnnnnnnnnnnnnnnnnnnnnnnnnnnnnnnnnnnnnnnnnnnnnnnnnnnnnnnnnnnnnnnnnnnnnnnnnnnnnnnnnnnnnnnnnnnnnnnnnnnnnnnnnnnnnnnnnnnnnnnnnnnnnnnnnnnnnnnnnnnnnnnnnnnnnnnnnnnnnnnnnnnnnnnnnnnnnnnnnnnnnnnnnnnnnnnnnnnnnnnnnnnnnnnnnnnnnnnnnnnnnnnnnnnnnnnnnnnnnnnnnnnnnnnnnnnnnnnnnnnnnnnnnnnnnnnnnnnnnnnnnnnnnnnnnnnnnnnnnnnnnnnnnnnnnnnnnnnnnnnnnnnnnnnnnnnnnnnnnnnnnnnnnnnnnnnnnnnnnnnnnnnnnnnnnnnnnnnnnnnnnnnnnnnnnnnnnnnnnnnnnnnnnnnnnnnnnnnnnnnnnnnnnnnnnnnnnnnnnnnnnnnnnnnnnnnnnnnnnnnnnnnnnnnnnnnnnnnnnnnnnnnnnnnnnnnnnnnnnnnnnnnnnnnnnnnnnnnnnnnnnnnnnnnnnnnnnnnnnnnnnnnnnnnnnnnnnnnnnnnnnnnnnnnnnnnnnnnnnnnnnnnnnnnnnnnnnnnnnnnnnnnnnnnnnnnnnnnnnnnnnnnnnnnnnnnnnnnnnnnnnnnnnnnnnnnnnnnnnnnnnnnnnnnnnnnnnnnnnnnnnnnnnnnnnnnnnnnnnnnnnnnnnnnnnnnnnnnnnnnnnnnnnnnnnnnnnnnnnnnnnnnnnnnnnnnnnnnnnnnnnnnnnnnnnnnnnnnnnnnnnnnnnnnnnnnnnnnnnnnnnnnnnnnnnnnnnnnnnnnnnnnnnnnnnnnnnnnnnnnnnnnnnnnnnnnnnnnnnnnnnnnggagaacgcttgttcccactcatccaaacaatgcattcaaacttggctgggaagatcacgggaatgctgctggagatcgacagctctgagctgctgcacatgttagagtcccccgagtctctccgctccaa

SEQ ID NO: 19837 - DNA, 3618 bp, Macaca Mulatta
  misc_feature (1)...(3618): n = A,T,C or G
cagatgattcgaagaatttctccatccaagtgcggcaggtggaggattaccctgtggacatctactacttgatggacctgtcttactccatgaannnnnnnnnnnnnnnnnnnnnnnnnnnnnnnnnnnnnnnnnnnnnnnnnnnnnnnnnnnnnnnnnnnnnnnnnnnnnnnnnnnnnnnnnnnnnnnnnnnnnnnnnnnnnnnnnnnnnnnnnnnnnnnnnnnnnnnnnnnnnnnnnnnnnnnnnnnnnnnnnntatgaagaccacctgcttgcccatgtttggctacaaacacgtgctgtcgctaactgaccaggtgacccgcttcaatgaggaagtgaagaagcagagtgtgtcacggaaccgagatgccccagagggtggctttgatgccatcatgcaggctacagtctgtgatnnnnnnnnnnnnnnnnnnnnnnnnnnnnnnnnnnnnnnnnnnnnnnnnnnnnnnnnnnnnnnnnnnnnnnnnnnnnnnnnnnnnnnnnnnnnnnnnnnnnnnnnnnnnnnnnnnnnnnnnnnnnnnnnnnnnnnnnnnnnnnnnnnnnnnnnnnnnnnnnnnnnnnnnnnnnnnnnnnnnnnnnnnnnnnnnnnnnnnnnnnnnnnnnnnnnnnnnnnnnnnnnnnnnnnnnnnnnnnnnnnnnnnnnnnnnnnnnnnnnnnnnnnnnnnnnnnnnnnnnnnnnnnnnnnnnnnnnnnnnnnnnnnnnnnnnnnnnnnnnnnnnnnnnnnnnnnnnnnnnnnnnnnnnnnnnnnnnnnnnnnnnnnnnnnnnnnnnnnnnnnnnnnnnnnnnnnnnnnnnnnnnnnnnnnnnnnnnnnnnnnnnnnnnnnnnnnnnnnnnnnnnnnnnnnnnnnnnnnnnnnnnnnnnnnnnnnnnnnnnnnnnnnnnnnnnnnnnnnnnnnnnnnnnnnnnnnnnnnnnnnnnnnnnnnnnnnnnnnnnnnnnnnnnnnnnnnnnnnnnnnnnnnnnnnnnnnnnnnnnnnnnnnnnnnnnnnnnnnnnnnnnnnnnnnnnnnnnnnnnnnnnnnnnnnnnnnnnnnnnnnnnnnnnnnnnnnnnnnnnnnnnnnnnnnnnnnnnnnnnnnnnnnnnnnnnnnnnnnnnnnnnnnnnnnnnnnnnnnnnnnnnnnnnnnnnnnnnnnnnnnnnnnnnnnnnnnnnnnnnnnnnnnnnnnnnnnnnnnnnnnnnnnnnnnnnnnnnnnnnnnnnnnnnnnnnnnnnnnnnnnnnnnnnnnnnnnnnnnnnnnnnnnnnnnnnnnnnnnnnnnnnnnnnnnnnnnnnnnnnnnnnnnnnnnnnnnnnnnnnnnnnnnnnnnnnnnnnnnnnnnnnnnnnnnnnnnnnnnnnnnnnnnnnnnnnnnnnnnnnnnnnnnnnnnnnnnnnnnnnnnnnnnnnnnnnnnnnnnnnnnnnnnnnnnnnnnnnnnnnnnnnnnnnnnnnnnnnnnnnnnnnnnnnnnnnnnnnnnnnnnnnnnnnnnnnnnnnnnnnnnnnnnnnnnnnnnnnnnnnnnnnnnnnnnnnnnnnnnnnnnnnnnnnnnnnnnnnnnnnnnnnnnnnnnnnnnnnnnnnnnnnnnnnnnnnnnnnnnnnnnnnnnnnnnnnnnnnnnnnnnnnnnnnnnnnnnnnnnnnnnnnnnnnnnnnnnnnnnnnnnnnnnnnnnnnnnnnnnnnnnnnnnnnnnnnnnnnnnnnnnnnnnnnnnnnnnnnnnnnnnnnnnnnnnnnnnnnnnnnnnnnnnnnnnnnnnnnnnnnnnnnnnnnnnnnnagagtgtcccaagggccctgacatcctggtggtcctgctgtcagtgatgggggccattctgctcatcggccttgccactctgctcatctggaagctcctcatcaccatccacgaccgaaaagagtttgctaaatttgaggaagaacgcgccagagcaaaatgggacacagnnnnnnnnnnnnnnnnnnnnnnnnnnnnnnnnnnnnnnnnnnnnnnnnnnnnnnnnnnnnnnnnnnnnnnnnnnnnnnnnnnnnnnnnnnnnnnnnnnnnnnnnnnnnnnnnnnnnnnnnnnnnnnnnnnnnnnnnnnnnnnnnnnnnnnnnnnnnnnnnnnnnnnnnnnnnnnnnnnnnnnnnnnnnnnnnnnnnnnnnnnnnnnnnnnnnnnnnnnnnnnnnnnnnnnnnnnnnnnnnnnnnnnnnnnnnnnnnnnnnnnnnnnnnnnnnnnnnnnnnnnnnnnnnnnnnnnnnnnnnnnnnnnnnnnnnnnnnnnnnnnnnnnnnnnnnnnnnnnnnnnnnnnnnnnnnnnnnnnnnnnnnnnnnnnnnnnnnnnnnnnnnnnnnnnnnnnnnnnnnnnnnnnnnnnnnnnnnnnnnnnnnnnnnnnnnnnnnnnnnnnnnnnnnnnnnnnnnnnnnnnnnnnnnnnnnnnnnnnnnnnnnnnnnnnnnnnnnnnnnnnnnnnnnnnnnnnnnnnnnnnnnnnnnnnnnnnnnnnnnnnnnnnnnnnnnnnnnnnnnnnnnnnnnnnnnnnnnnnnnnnnnnnnnnnnnnnnnnnnnnnnnnnnnnnnnnnnnnnnnnnnnnnnnnnnnnnnnnnnnnnnnnnnnnnnnnnnnnnnnnnnnnnnnnnnnnnnnnnnnnnnnnnnnnnnnnnnnnnnnnnnnnnnnnnnnnnnnnnnnnnnnnnnnnnnnnnnnnnnnnnnnnnnnnnnnnnnnnnnnnnnnnnnnnnnnnnnnnnnnnnnnnnnnnnnnnnnnnnnnnnnnnnnnnnnnnnnnnnnnnnnnnnnnnnnnnnnnnnnnnnnnnnnnnnnnnnnnnnnnnnnnnnnnnnnnnnnnnnnnnnnnnnnnnnnnnnnnnnnnnnnnnnnnnnnnnnnnnnnnnnnnnnnnnnnnnnnnnnnnnnnnnnnnnnnnnnnnnnnnnnnnnnnnnnnnnnnnnnnnnnnnnnnnnnnnnnnnnnnnnnnnnnnnnnnnnnnnnnnnnnnnnnnnnnttccggccttctgtccctcgttcatagcacctccacatacccagccctgtgccttggtgtgctgtatccacccatggggctgattgtatttacctactacctcttggctgccttgtgaaggaattattcccatgagttggctgggaataagtgccaggatggaatgatgggtcagttgtaccagcatgtgtggcctgttcttctatgggttggacaacctcattttaactcagtctttaatctgagaggccacagtgcaattttattttatttttctcatgatgaggttttcttaacctaaaggaatatgtatataaacatgcttgcgttatgtttctaaatttatatgatggcaaagaaggagagcataggaagccacacagacttgggcagggtacagacactcccacttggcatcattcacagcaagtcactgtccagtggctgtatctgtgaggggctctctcatgatagaaggctatagggatagatgtatggacacattggacccttcctgaggaggagggactgttcttttgtctcagaaaagcagtggctccattggtgttgatatacatccaacattaaaagccacccccaatcgcccaagagaaaaagaaagccttatcaacagttgttccatgag

SEQ ID NO: 19838 - DNA, 254 bp, Macaca Mulatta
ggagaagtgagatgtaaatgttgctcttggacctacgggggcatctgagtccagctcccccgagatgagctgcagccccccagagagagctctgcatgtcaccaagtgaccaggccccagcctccaggcccccaacttcgcccagccactccccgctctggatcctgcacgataacactcgaatctgctgctcatgggaagaacagaactgctcctgcatgcaactaattcaataaaactgtcttgtgagctga

SEQ ID NO: 19839 - DNA, 1912 bp, Macaca Mulatta
  misc_feature (1)...(1912): n = A,T,C or G
ggacgcgaggcggagcggggccccacacaggccgcggcggctggctcgggcccctacggtcccgnnnnnnnnnnnnnnnnnnnnnnnnnnnnnnnnnnnnnnnnnnnnnnnnnnnnnnnnnnnnnnnnnnnnnnnnnnnnnnnnnnnnnnnnnnnnnnnnnnnnnnnnnnnnnaggttcctagaaggtgagtgcggacggtatgcaaagttgtgaatctagtggcgacagtgcggatgaccctctcagtcgtggcctacggagaaggggacagcctcgtgtggtggtgatcggcgccggcttggctggcctggctgcagccaaagcacttctcgagcagggcttcacggatgtcactgtgcttgaggcttccagccacatcggaggccgtgtgcagagtgtgaaacttgnnnnnnnnnnnnnnnnnnnnnnnnnnnnnnnnnnnnnnnnnnnnnnnnnnnnnnnnnnnnnnnnnnnnnnnnnnnnnnnnnnnnnnnnnnnnnnnnnnnnnnnnnnnnnnnnnnnnnnnnnnnnnnnnnnnnnnnnnnnnnnnnnnnnnnnnnnnnnnnnnnnnnnnnnnnnnnnnnnnnnnnnnnnnnnnnnnnnnnnnnnnnnnnnnnnnnnnnnnnnnnnnnnnnnnnnnnnnnnnnnnnnnnagttcttccggcacgatcacaccagtcaatgctgaaagtcaaaatagcgtgggggtgttcacccgagaggaggtgcgtaaccgcatcaggaatgaccctgatgacccagaggccaccaagcgcctgaagctcgccatgatccagcagtacctgaaggtnaggtggagagctgtgagagcagctcacacagcatggacgaggtgtccctgagcgccttcggggagtggaccgagatcccgggcgctcaccacatcatcccctcaggcttcatgcgggttgtggagctgctggcggagggcatccctgcccacgtcatccagctagggaaacaagtccgctgcattcactgggaccaggcctcagcccgcccaagaggccctgagattgagccccnnnnnnnnnnnnnnnnnnnnnnnnnnnnnnnnnnnnnnnnnnnnnnnnnnnnnnnnnnnnnnnnnnnnnnnnnnnnnnnnnnnnnnnnnnnnnnnnnnnnnnnnnnnnnnnnnnnnnnnnnnnnnnnnnnnnnnnnnnnnnnnnnnnnnnnnnnnnnnnnnnnnnnnnnnnnnnnnnnnnnnnnnnnnnnnnnnnnnnnnnnnnnnnnnnnnnnnnnnnnnnnnnnnnnnnnnnnnnnnnnnnnnnnnnnnnnnnnnnnnnnnnnnnnnnnnnnnnnnnnnnnnnnnnnnnnnnnnnnnnnnnnnnnnnnnnnnnnnnnnnnnnnnnnnnnnnnnnnnnnnnnnnnnnnnnnnnnnnnnnnnnnnncagggaaccccaacattccaaaacctcggcgaatcctgcgctcggcctggggcagcaacccctacttccgcggctcctattcatacacgcaggtgggctccagtggggcggatgtggagaagctggccaagcccctgccgtacacggagagctcgaagacagcnnnnnnnnnnnnnnnnnnnnnnnnnnnnnnnnnnnnnnnnnnnnnnnnnnnnnnnnnnnnnnnnnnnnnnnnnnnnnnnnnnnnnnnngcccatgcaggtgctgttttccggtgaggccacccaccgcaagtactattccactacccacggtgctctgctctctggccagcgcgaggctgcccgcctcatcgagatgtaccgagacctcttccagcangggacctgagggctgtcctcgctgccgagaagagcactaacttgtgacctccagcccgccccttgctgccatgtgctcctgccttcctgatcctctgtagaaaggatttttatcttc

SEQ ID NO: 19840 - DNA, 408 bp, Macaca Mulatta
  misc_feature (1)...(408): n = A,T,C or G
gattactttgatattgtgaagagccccatggatctttctaccattaagaggaagttagacactggacagtatcaggagccctggcaatatgtcgatgatatttggcttatgttcaataatgcctggttatataaccggaaaacatcacgggtatacaaatactgctccaagctctctgaggtctttgaacaagaaattgacccagtgatgcaaagccttggatactgttgtggcagaaannnnnnnnnnnnnnnnnnnnnnnnnnnnnnnnnnnnnnnnnnnnnnnnnnnnnnnnnnnnnnnnnnnnnnnnnnnnnnnnnnnnnacaggtatcatttctgtgagaagtgtttcaatgagatccaaggggagagcgtttctttgggggatgacccttcccagcctcaaa

SEQ ID NO: 19841 - DNA, 250 bp, Macaca Mulatta
  misc_feature (1)...(250): n = A,T,C or G
atagaatggagatggcaaagatctctttgggtatatatgggcctggcgaattaatgcaataatttctaattttcggagaaggcaanccctcatgccgggatggcagaagatgagcctgatgctaagagccccaagactgggggaaggccccctccaggtggtgctgaggctggggaacctaccacccttcttcaaaggctccgaggtaccatttcncaaggccgtgcagaacaaagtagagggaatcctg

SEQ ID NO: 19842 - DNA, 596 bp, Macaca Mulatta
  misc_feature (1)...(596): n = A,T,C or G
atccagaggcaggggagggacggtgcaggcgcagagaattgggtttggctggcctcgatttaaagagacagaagctgtcggggtcctggaagacggtccccaataccctnnnnnnnnnnnnnnnnnnnnnnnnnnnnnnnnnnnnnnnnnnnnnnnnnnnnnnnnnnnnnnnnnnnnnnnnnnnnnnnnnnnnnnnnnnnnnnnnnnnnnnnnnnnnnnnnnnnnnnnnnnnnnnnnnnnnnnnnnnnnnnnnnnnnnnnnnnnnnnnnnnnnnnnnnnnnnnnnnnnnnnnnnnnnnnnnnnnnnnnnnnnnnnnnnnnnnnnnnnnnnnnnnnnnnnnnnnnnnnnnnnnnnnnnnnnnnnnnnnnnnnnnnnnnnnnnnnnnnnnnnnnnnnnnnnnnnnnnnnnnnnnnnnnnnnnnnnnnnnnnnnnnnnnnnnnnnnnnnnnnnnnnnnnnnnnnnagacagatgtcatcaatgcttcttggtgggtcatgagcaacaagactcgggatgaactggaaagaagttttgattgttgtggcttattcaacctcacaaccctgtaccaacaagattatgatttctgcactgca

SEQ ID NO: 19843 - DNA, 2827 bp, Macaca Mulatta
  misc_feature (1)...(2827): n = A,T,C or G
ggagacaaagcagcggccgtcattttcgggcctccggaatttagcgctcaccccgctcgccgcannnnnnnnnnnnnnnnnnnnnnnnnnnnnnnnnnnnnnnnnnnnnnnnnnnnnnnnnnnnnnnnnnnnnnnnnnnnnnnnnnnnnnnnnnnnnnnnnnnnnnnnnnnnnnnnnnnnnnnnnnnnnnnnnnnnnnnnnnnnnnnnnnnnnnnnnnnnnnnnnnnnnnnnnnnnnnnnnnnnnnnnnnnnnnnnnnnnnnnnnnnnnnnnnnnnnnnnnnnnnnnnnnnnnnnnnnnnnnnnnnnnnnnnnnnnnnnnnnnnnnnnnnnnnnnnnnnnnnnnnnnnnnnnnnnnnnnnnnnnnnnnnnnnnnnnnnnnnnnnnnnnnnnnnnnnnnnnnnnnnnnnnnnnnnnnnnnnnnnnnnnnnnnnnnnnnnnnnnnnnnnnnnnnnnnnnnnnnnnnnnnnnnnnnnnnnnnnnnnnnnnnnnnnnnnnnnnnnnnnnnnnnnnnnnnnnnnnnnnnnnnnnnnnnnnnnnnnnnnnnnnnnnnnnnnnnnnnnnnnnnnnnnnnnnnnnnnnnnnnnnnnnnnnnnnnnnnnnnnnnnnnnnnnnnnnnnnnnnnnnnnnnnnnnnnnnnnnnnnnnnnnnnnnnnnnnnnnnnnnnnnnnnnnnnnnnnnnnnnnnnnnnnnnnnnnnnnnnnnnnnnnnnnnnnnnnnnnnnnnnnnnnnnnnnnnnnnnnnnnnnnnnnnnnnnnnnnnnnnnnnnnnnnnnnnnnnnnnnnnnnnnnnnnnnnnnnnnnnnnnnnnnnnnnnnnnnnnnnnnnnnnnnnnnnnnnnnnnnnnnnnnnnnnnnnnnnnnnnnnnnnnnnnnnnnnnnnnnnnnnnnnnnnnnnnnnnnnnnnnnnnnnnnnnnnnnnnnnnnnnnnnnnnnnnnnnnnnnnnnnnnnnnnnnnnnnnnnnnnnnnnnnnnnnnnnnnnnnnnnnnnnnnnnnnnnnnnnnnnnnnnnnnnnnnnnnnnnnnnnnnnnnnnnnnnnnnnnnnnnnnnnnnnnnnnnnnnnnnnnnnnnnnnnnnnnnnnnnnnnnnnnnnnnnnnnnnnnnnnnnnnnnnnnnnnnnnnnnnnnnnnnnnnnnnnnnnnnnnnnnnnnnnnnnnnnnnnnnnnnnnnnnnnnnnnnnnnnnnnnnnnnnnnnnnnnnnnnnnnnnnnnnnnnnnnnnnnnnnnnnnnnnnnnnnnnnnnnnnnnnnnnnnnnnnnnnnnnnnnnnnnnnnnnnnnnnnnnnnnnnnnnnnnnnnnnnnnnnnnnnnnnnnnnnnnnnnnnnnnnnnnnnnnnnnnnnnnnnnnnnnnnnnnnnnnnnnnnnnnnnnnnnnnnnnnnnnnnnnnnnnnnnnnnnnnnnnnnnnnnnnnnnnnnnnnnnnnnnnnnnnnnnnnnnnnnnnnnnnnnnnnnnnnnnnnnnnnnnnnnnnnnnnnnnnnnnnnnnnnnnnnnnnnnnnnnnnnnnnnnnnnnnnnnnnnnnnnnnnnnnnnnnnnnnnnnnnnnnnnnnnnnnnnnnnnnnnnnnnnnnnnnnnnnnnnnnnnnnnnnnnnnnnnnnnnnnnnnnnnnnnnnnnnnnnnnnnnnnnnnnnnnnnnnnnnnnnnnnnnnnnnnnnnnnnnnnnnnnnnnnnnnnnnnnnnnnnnnnnnnnnnnnnnnnnnnnnnnnnnnnnnnnnnnnnnnnnnnnnnnnnnnnnnnnnnnnnnnnnnnnnnnnnnnnnnnnnnnnnnnnnnnnnnnnnnnnnnnnnnnnnnnnnnnnnnnnnnnnnnnnnnnnnnnnnnnnnnnnnnnnnnnnnnnnnnnnnnnnnnnnnnnnnnnnnnnnnnnnnnnnnnnnnnnnnnnnnnnnnnnnnnnnnnnnnnnnnnnnnnnnnnnnnnnnnnnnnnnnnnnnnnnnnnnnnnnnnnnnnnnnnnnnnnnnnnnnnnnnnnnnnnnnnnnnnnnnnnnnnnnnnnnnnnnnnnnnnnnnnnnnnnnnnnnnnnnnnnnnnnnnnnnnnnnnnnnnnnnnnnnnnnnnnnnnnnnnnnnnnnnnnnnnnnnnnnnnnnnnnnnnnnnnnnnnnnnnnnnnnnnnnnnnnnnnnnnnnnnnnnnnnnnnnnnnnnnnnnnnnnnnnnnnnnnnnnnnnnnnnnnnnnnnnnnnnnnnnnnnnnnnnnnnnnnnnnnnnnnnnnnnnnnnnnnnnnnnnnnnnnnnnnnnnnnnnnnnnnnnnnnnnnnnnnnnnnnnnnnnnnnnnnnnnnnnnnnnnnnnnnnnnnnnnnnnnnnnnnnnnnnnnnnnnnnnnnnnnnnnnnnnnnnnnnnnnnnnnnnnnnnnnnnnnnnnnnnnnnnnnnnnnnnnnnnnnnnnnnnnnnnnnnnnnnnnnnnnnnnnnnnnnnnnnnnnnnnnnnnnnnnnnnnnnnnnnnnnnnnnnnnnnnnnnnnnnnnnnnnnnnnnnnnnnnnnnnnnnnnnnnnnnnnnnnnnnnnnnnnnnnnnnnnnnnnnnnnnnnnnnnnnnnnnnnnnnnnnnnnnnnnnnnnnnnnnnnnnnnnnnnnnnngtggacagcgccatgtccctgatccaggcagccaagaacttgatgaatgctgtggtgcagacagtgaaagcatcctacgtcgcctctaccaaataccaaaagtcgcagggtatggcttccctcaaccttcctgctgtgtcatggaagatgaaggcaccagagaaaaagcccttggtgaagagagagaaacaggatgagacgcagaccaagattaaacgggcatctcagaagaagcatgtgaacccggtgcaggccctcag

SEQ ID NO: 19844 - DNA, 736 bp, Macaca Mulatta
tctactcgagcacaaaatctcatcaatgtcatgaatgtggcagaggcttcactctgaagtcacatcttaatcattatcagagaatccatactggtgagaaaccttttcaatgtaaagaatgtggaatgaatttcagctggagttgtagcctctttaaacacctgagaagccatgagaggacagatcccataaataccttaagtgtagaggggtctctgttgtagaatagctctgaattttagagaagccttcctggagggaaaccgtactcctataatgagcaaagtaacaacttcaagcatttttccagcataaccatcaaaatcacaaataggttgaaatcctttagttagaactcagcctttaggaacaccggggaacccacaataatagatatctgctcgtgttccccactgagaaatgctttagttagcatcttcatgcttgggaatctagacaagaagagaatccatggatggacatggtcgaggaattccgaaagccttcagatgacattcagtcttcacttgaaactgaaaactgacactaggaacagcctcatgagttcagtagaagtaagcttgatttgcagcttctgcctcgtttgatggcctatctatccagggaagcgcacagtaaaagacttcttcagcatggtgtctgttttggtacctcagcaattaatcttttctagaaattattattccaaccactagaataccctactcactattcc

SEQ ID NO: 19845 - DNA, 807 bp, Macaca Mulatta
ggagaggagagcctcacctccgagttcattcacgacatagaccgggaactgaagacggtgcaggcggtcctgaccctccccaagctgaagctgagttacgaaggcgaagtcaccaagtcgctgcaggagacgaagctgcagtctttgtttgattcaccagactttagcaagatcacaggcaaacccatcaagctgactcaagtggaacaccgggccggcttcgagtggaacgaggatggggcgggagccacccccagcccggggctgcagcctgcgcacctcaccttcctgctggactatcaccttaaccagcctttcatcttcgtcctgagggacacggacacaggggcccttctcttcattggcaagattctggaccccagaggcacctaataccctgtttaacattccagtgccctagaagggaaccctagagggacagcagattccacaggacacaaagctgctcccgtaaggtttcaatgcatacaataaaagagctttatccttcaaaagtaaaagaaaaggaagataaaacttgttggtggccgccgccctcgggccctcaaaaaacttttcaaaccatttttttggggcccccggggcccattagggtaaatggaaattgggccaaagctggttcccaaggaaaaccccgggtcatgaaacaaatggctttgggatcccccaccaattaaaaaaccgccccgggcggggcaaccggagccggttctgaaacaaattcccaaatggggatttttcgagagggcccctttccggggattctttcccaaccagggatgccca

SEQ ID NO: 19846 - DNA, 2858 bp, Macaca Mulatta
  misc_feature (1)...(2858): n = A,T,C or G
cgagcccatccggcccattgaccctgcggcctgggtctcccacactgcagccatgaccggcaccttccctgcatacggcatgagcccctccctgagcaccatcacctccaccagctcctccatcaccagttccatccctgacacagagcgnnnnnnnnnnnnnnnnnnnnnnnnnnnnnnnnnnnnnnnnnnnnnnnnnnnnnnnnnnnnnnnnnnnnnnnnnnnnnnnnnnnnnnnnnnnnnnnnnnnnnnnnnnnnnnnnnnnnnnnnnnnnnnnnnnnnnnnnnnnnnnnnnnnnnnnnnnnnnnnnnnnnnnnnnnnnnnnnnnnnnnnnnnnnnnnnnnnnnnnnnnnnnnnnnnnnnnnnnnnnnnnnnnnnnnnnnnnnnnnnnnnnnnnnnnnnnnnnnnnnnnnnnnnnnnnnnnnnnnnnnnnnnnnnnnnnnnnnnnnnnnnnnnnnnnnnnnnnnnnnnnnnnnnnnnnnnnnnnnnnnnnnnnnnnnnnnnnnnnnnnnnnnnnnnnnnnnnnnnnnnnnnnnnnnnnnnnnnnnnnnnnnnnnnnnnnnnnnnnnnnnnnnnnnnnnnnnnnnnnnnnnnnnnnnnnnnnnnnnnnnnnnnnnnnnnnnnnnnnnnnnnnnnnnnnnnnnnnnnnnnnnnnnnnnnnnnnnnnnnnnnnnnnnnnnnnnnnnnnnnnnnnnnnnnnnnnnnnnnnnnnnnnnnnnnnnnnnnnnnnnnnnnnnnnnnnnnnnnnnnnnnnnnnnnnnnnnnnnnnnnnnnnnnnnnnnnnnnnnnnnnnnnnnnnnnnnnnnnnnnnnnnnnnnnnnnnnnnnnnnnnnnnnnnnnnnnnnnnnnnnnnnnnnnnnnnnnnnnnnnnnnnnnnnnnnnnnnnnnnnnnnnnnnnnnnnnnnnnnnnnnnnnnnnnnnnnnnnnnnnnnnnnnnnnnnnnnnnnnnnnnnnnnnnnnnnnnnnnnnnnnnnnnnnnnnnnnnnnnnnnnnnnnnnnnnnnnnnnnnnnnnnnnnnnnnnnnnnnnnnnnnnnnnnnnnnnnnnnnnnnnnnnnnnnnnnnnnnnnnnnnnnnnnnnnnnnnnnnnnnnnnnnnnnnnnnnnnnnnnnnnnnnnnnnnnnnnnnnnnnnnnnnnnnnnnnnnnnnnnnnnnnnnnnnnnnnnnnnnnnnnnnnnnnnnnnnnnnnnnnnnnnnnnnnnnnnnnnnnnnnnnnnnnnnnnnnnnnnnnnnnnnnnnnnnnnnnnnnnnnnnnnnnnnnnnnnnnnnnnnnnnnnnnnnnnnnnnnnnnnnnnnnnnnnnnnnnnnnnnnnnnnnnnnnnnnnnnnnnnnnnnnnnnnnnnnnnnnnnnnnnnnnnnnnnnnnnnnnnnnnnnnnnnnnnnnnnnnnnnnnnnnnnnnnnnnnnnnnnnnnnnnnnnnnnnnnnnnnnnnnnnnnnnnnnnnnnnnnnnnnnnnnnnnnnnnnnnnnnnnnnnnnnnnnnnnnnnnnnnnnnnnnnnnnnnnnnnnnnnnnnnnnnnnnnnnnnnnnnnnnnnnnnnnnnnnnnnnnnnnnnnnnnnnnnnnnnnnnnnnnnnnnnnnnnnnnnnnnnnnnnnnnnnnnnnnnnnnnnnnnnnnnnnnnnnnnnnnnnnnnnnnnnnnnnnnnnnnnnnnnnnnnnnnnnnnnnnnnnnnnnnnnnnnnnnnnnnnnnnnnnnnnnnnnnnnnnnnnnnnnnnnnnnnnnnnnnnnnnnnnnnnnnnnnnnnnnnnnnnnnnnnnnnnnnnnnnnnnnnnnnnnnnnnnnnnnnnnnnnnnnnnnnnnnnnnnnnnnnnnnnnnnnnnnnnnnnnnnnnnnnnnnnnnnnnnnnnnnnnnnnnnnnnnnnnnnnnnnnnnnnnnnnnnnnnnnnnnnnnnnnnnnnnnnnnnnnnnnnnnnnnnnnnnnnnnnnnnnnnnnnnnnnnnnnnnnnnnnnnnnnnnnnnnnnnnnnnnnnnnnnnnnnnnnnnnnnnnnnnnnnnnnnnnnnnnnnnnnnnnnnnnnnnnnnnnnnnnnnnnnnnnnnnnnnnnnnnnnnnnnnnnnnnnnnnnnnnnnnnnnnnnnnnnnnnnnnnnnnnnnnnnnnnnnnnnnnnnnnnnnnnnnnnnnnnnnnnnnnnnnnnnnnnnnnnnnnnnnnnnnnnnnnnnnnnnnnnnnnnnnnnnnnnnnnnnnnnnnnnnnnnnnnnnnnnnnnnnnnnnnnnnnnnnnnnnnnnnnnnnnnnacaggtgcctatgcaagttcactaaagcctcagggctggtccctgccggaagggctggaccctctcaatcctctcctaggttgtggggctggtcccctgacacccttctccccatcctggtagccctcaaacctcgcacacatgtccccggcattttctcacctggataaagcctgtaagctgggtctcaggctgggctcagcagaggactcgccctgcgactgacagaccattcccacccccacacacaacctcccccgttttcacattcaccatgacaccccagagcaaggacacaggagcccacaagccaattgaggttgggcaaggagactaccaggacttccagacagagtaccaggttttatttttcaccttattctccactttaaacaaatcatgactttctctttaagcctctgctataaattctcctggctgtcctgggcttccatattttgggggctggggtgtcaaaagtgagatgaagtccttagctccaggttttgggataaaccaaggtagggacattttggcatttatttcaattaacagtacttccttggacggttgcggtggctcacgtctgtaatcccagcactttgggaagctgaggcaggtggat

SEQ ID NO: 19847 - DNA, 376 bp, Macaca Mulatta
  misc_feature (1)...(376): n = A,T,C or G
agggggagcctggagcagctggagaacagggaccagctggccccaagnnnnnnnnnnnnnnnnnnnnnnnnnnnnnnnnnnnnnnnnnnnnnnnnnnnnnnnnnnnnnnnnnnnnnnnnnnnnnnnnnnnnnnnnnnnnnnnnnnnnnnnnnnnnnnnnnnnnnnnnnnnnnnnnnnnnnnnnnnnnnnnnnnnnnnnnnnnnnnnnnnnnnnnnnnnnaaagggacctcgcggtaaaccaggagacatgggccctcctggtccccaaggccccccaggaaaggatggacctccaggaatgaaaggagaaaacgggcacccagggagcccaggagaaaagggagagaaaggagagacaggacaagcaggctcgccg

SEQ ID NO: 19848 - DNA, 775 bp, Macaca Mulatta
tggaatatcttccgtcaactcatattttcatgctgttcatgaaagattcaatgccactgaatttaaatagcttttttctctgatacagaaaagttgaattttacatagatggagttagaatttgatatgtgaacagttgtgtttgaagcaaagtgatcaagttatttttaatttggttttcacattagaaacaagtcagtcattcaaataagattcaaatgtctataaaccaaactgatgtaagtaagtggcttcttacttgttttatttaacccctgaattcttttagtttaggggtagaatttatgtgtttaagaggtttttaaggttccattgttgtctacaactctgaagggtaattacatagttatccaaattaagagagtctatttacggaactgaaatacgtggggattcaaatgtattacagtggggaatgaagatactgaaataaacatcttaaatattcatttactggttattatgagtacgtgttgagatggtcgtagttttttttacgactacctctagtgtatattcttatttagtaggcctgaatgcatctttattttcatgttataggacaatattaaggcattttaaaggtcattatcctttcatctattttagagacacctactaaatgtttaatatatacttttggagaagtataacataagggagtctttaatctgtgttttccttggctgggtaaatgactatttaaagagtggtataaaattggatgtgtggtgtttaaaatgaccatgtcccc

SEQ ID NO: 19849 - DNA, 2741 bp, Macaca Mulatta
  misc_feature (1)...(2741): n = A,T,C or G
gcggggccaagatggcgccgagcgccggttgagcggcgtcccggctgcggctagagttttcttgctgcccgtgctcggctggccggggcgggtctgagtggtacccgggaggagaccctttgaaagtcccttgtggggactggaaagaggacggttggttgtgtgtctgtgctcgtggggaccccgtgtgtgtgcctgcataggagagatgttgcaggagatggggtggactctctgagcctcatttcgcgctgcccggggatcttcgacctgcttctctgctgggatctcgctcaagttaaccctcccctgggacgccttcctgccgcctccacttgatctgaggagatcctgtgactgtagcgtgttttatgagcctttactnnnnnnnnnnnnnnnnnnnnnnnnnnnnnnnnnnnnnnnnnnnnnnnnnnnnnnnnnnnnnnnnnnnnnnnnnnnnnnnnnnnnnnnnnnnnnnnnnnnnnnnnnnnnnnnnnnnnnnnnnnnnnnnnnnnnnnnnnnnnnnnnnnnnnnnnnnnnnnnnnnnnnnnnnnnnnnnnnnnnnnnnnnnnnnnnnnnnnnnnnnnnnnnnnnnnnnnnnnnnnnnnnnnnnnnnnnnnnnnnnnnnnnnnnnnnnnnnnnnnnnnnnnnnnnnnnnnnnnnnnnnnnnnnnnnnnnnnnnnnnnnnnnnnnnnnnnnnnnnnnnnnnnnnnnnnnnnnnnnnnnnnnnnnnnnnnnnnnnnnnnnnnnnnnnnnnnnnnnnnnnnnnnnnnnnnnnnnnnnnnnnnnnnnnnnnnnnnnnnnnnnnnnnnnnnnnnnnnnnnnnnnnnnnnnnnnnnnnnnnnnnnnnnnnnnnnnnnnnnnnnnnnnnnnnnnnnnnnnnnnnnnnnnnnnnnnnnnnnnnnnnnnnnnnnnnnnnnnnnnnnnnnnnnnnnnnnnnnnnnnnnnnnnnnnnnnnnnnnnnnnnnnnnnnnnnnnnnnnnnnnnnnnnnnnnnnnnnnnnnnnnnnnnnnnnnnnnnnnnnnnnnnnnnnnnnnnnnnnnnnnnnnnnnnnnnnnnnnnnnnnnnnnnnnnnnnnnnnnnnnnnnnnnnnnnnnnnnnnnnnnnngggaaagagaagaaggcaccgcccttgctggagggggcccccttgcgactgaagccccggagcatccatgagttgtctgtggagcaacagctctactacaaggagatcaccgaggcctgtgtgggctcctgcgaggccaagagggcggnggaagccctgcaaagcattgccacggaccccgggctgtatcagatgctgccacggttcagtaccttcatctcggnnnnnnnnnnnnnnnnnnnnnnnnnnnnnnnnnnnnnnnnnnnnnnnnnnnnnnnnnnnnnnnnnnnnnnnnnnnnnnnnnnnnnnnnnnnnnnnnnnnnnnnnnnngtccatgagctgattccggctgtgatgacctgcatcgtgagcagacagctgtgcctgcgaccagatgtggacaatcactgggcacttcgagactttgctgcccgcctggtggcccagatctgcaagcattttagcacaaccactaacaacatccagtcccgaatcaccaagaccttcaccaannnnnnnnnnnnnnnnnnnnnnnnnnnnnnnnnnnnnnnnnnnnnnnnnnnnnnnnnnnnnnnnnnnnnnnnnnnnnnnnnnnnnnnnnnnnnnnnnnnnnnnnnnnnnnnnnnnnnnnnnnnnnnnnnnnnnnnnnnnnnnnnnnnnnnnnnnnnnnnnnnnnnnnnnnnnnnnnnnnnnnnnnnnnnnnnnnnnnnnnnnnnnnnnnnnnnnnnnnnnnnnnnnnnnnnnnnnnnnnnnnnnnnnnnnnnnnnnnnnnnnnnnnnnnnnnnnnnnnnnnnnnnnnnnnnnnnnnnnnnnnnnnnnnnnnnnnnnnnnnnnnnnnnnnnnnnnnnnnnnnnnnnnnnnnnnnnnnnnnnnnnnnnnnnnnnnnnnnnnnnnnnnnnnnnnnnnnnnnnnnnnnnnnnnnnnnnnnnnnnnnnnnnnnnnnnnnnnnnnnnnnnnnnnnnnnnnnnnnnnnnnnnnnnnnnnnnnnnnnnnnnnnnnnnnnnnnnnnnnnnnnnnnnnnnnnnnnnnnnnnnnnnnnnnnnnnnnnnnnnnnnnnnnnnnnnnnnnnnnnnnnnnnnnnnaggtcctgtccctcagcacctcggcccctggctcaggttccaccaccacctcgcccgtcaccaccaccgtccccagtgtgcagcccatcgtcaagctggtctccaccgccaccaccgcaccccccagcactgctccttctggtcccgggagtgtccagaagtatattgtggtctcacttcccccaacaggggagggcaaaggaggccccgtttcccatccttctccagttcctccaccggcatcatccccctctccactcagcagcagtgccctctgcggggggaagcaggaagctggggacagtccccctccagctccagggactccaaaagcgaatggctcccagccccccaactctggctcccctcagcctgcttcgtgatgctccacctgccagcccccagattcccacacatgcagacatgtacacacgtgcangtacacacgtgcatgcatactaagcggaaggaagttgtagattgcttcctttcatgtcactttctttttagatattgtacagtcagttcctcagaataaaagtttggtttgt

SEQ ID NO: 19850 - DNA, 205 bp, Macaca Mulatta
gctttaagtggtttgtaaaccatgaggcacttcataaaagttctatctgtagtgtgccttcttcctgcttcctctgtgagatatgtatttgcttctgacctgttgagaagctcaggtcaaagtggtgcaaaatagttgataagagttaaaagtgggccctaggagcagtcacagaagtgagctatgaaggctccccaatttggta

SEQ ID NO: 19851 - DNA, 372 bp, Macaca Mulatta
agttgtaggcaaatcattcgttcaaagctgttggcctctgcaaaggaaataccagttccgggcaatccgtgttaccgttcaccagttgccattgagggtttcagagaaccttttaccaggcctacatgctttgtgaacaagtccctgtaattgttgtttgtatgtataattcaaagcaccaaaataagaaaagatgtagatttatttcatcatattatacagaccgaattgttgtataaatttatttactgctagtcttaagaactgctttctttcctttgtttgtttcaatattttccttatgtctcaatttttggttgaataaactagattacattcagatggcctaaggtggtgtgctcagagggtttc

SEQ ID NO: 19852 - DNA, 1263 bp, Macaca Mulatta
  misc_feature (1)...(1263): n = A,T,C or G
gccatggccgagtgcccgttaggtggggaggaagtcaccgacccccccgaccgcctgtgggcctgggacaagtttgtatatttggacgagaagcagcgcgcctggctgcccttaaccatnnnnnnnnnnnnnnnnnnnnnnnnnnnnnnnnnnnnnnnnnnnnnnnnnnnnnnnnnnnnnnnnnnnnnnnnnnnnnnnnnnnnnnnnnnnnnnnnnnnnnnnnnnnnnnnnnnnnnnnnnnnnnnnnnnnnnnnnnnnnnnnnnnnnnnnnnnnnnnnnnnnnnnnnnnnnnnnnnnnnnnnnnnnnnnnnnnnnnnnnnnnnnnnnnnnnnnnnnnnnnnnnnnnnnnnnnnnnnnnnngcagcacctgtctcctttcgccccagggcctgagtctggccagcctacagtggggatgttatgtttctgttcaccttcgtttactatgcctgtgtcttctcctccaccacgctggggtctgggagggaacggacacacagaggatgagctctccccagggcctgctggacctgcccgtagcccactctgctcccctcagcactaccactcctgccagggaggactccatttggcagagcttcttccaggtgcccacctttacctgtgcctcagcttttctcagctggctgatgcttttcagcctctttctgcccctgctgtccctcacggcactactgtttcatgtggcacacccactcagctccgtgaacttgtgagaacacagccgattcacctgagcagggcctctgagaccctggaccagtggtctcacacggtgctgcgcctgcannnnnnnnnnnnnnnnnnnnnnnnnnnnnnnnnnnnnnnnnnnnnnnnnnnnnnnnnnnnnnnnnncgcctgcaaaccctgcctgaacacgggttcaggtgcagctcaagaaaaggcctgaaaggagcccttgtctgcgctcaggactcagaagcctttgcatcagtggtccacagcccgggacgcagcaggaggccaggccggcgagccctgtggacaaaccctcagaacccttggcttgcccatgtggaaaacggatagaggttgggtttccccccttttatagatggtcacacacctgggtgttatatgaggttgtatgtgtcatgaatactttttgtaatgattgattaaatgcaagatagtttatctaacttcatgctgaatcagcttctatccttgacttagattctggtgaagagaagtgagaacaggcagccaccaaatagaaaa

SEQ ID NO: 19853 - DNA, 581 bp, Macaca Mulatta
agtgaaggatcagttttaaacaaacattgggataccaatacagaaaacttgagacagtatttgtatcttttaatcagtgtagctgtgtgcttctgcttctcaagagctggatccatacaggttgtgtgccatctaccctcttgaggttcaggagattcttaattgaataatccacggtttgggacggcatccagaagttttccctatgactttatattttgtattatgtcaaatgttatggcagggcccaaatagcatagccacaagtttggtttatgtgggcataaaattctaaccaaactgcagacatagggagtcatttggagaaagcctgtatgtggtgttttaacctaataaagttgatgagggaaaaggggagaggaagcaaacgtaaagcgggtaaagtgtagagcatcttttatatctcaggcgtggcttcttcagtggaccaagctgcaatgcagtattgacttgacagagcctctacttctgtctcaaaatggctccaaatgatttctgtactgcaaaataaagccaaattgtggaacctacaaaaatacccaaaggaaactcgcgactag

SEQ ID NO: 19854 - DNA, 486 bp, Macaca Mulatta
tggaaacatctccacccaagacgtcttggaatccaagagcaggaagccaagagagtgagcagggagggattgggggtgggggaggcctcaaagtaccctgtgcgtccgttctctgcctccatggaaatggcccctagaatctgaaaggccaggatgaacctaatgactgttcccaaacattgacaaatcctaacccaaccatagtccagcagttaccagtttaaacaaaaaaaacctgagatgagtgttgggtgaatctgtcatctggcaccctccttggctgataactgtcttgatactttcattctttgtaagaggccaaatcgtctaaggacgttgctgaacaagcgtgtgaaatcatttcagatcaaggataagccagtgtgtatgtacgttcattttaatctctgagagattatttttcaatacagggtgccatcagtaatcatgccactactcaccagtgttgttcgccaacagccaccc

SEQ ID NO: 19855 - DNA, 1172 bp, Macaca Mulatta
  misc_feature (1)...(1172): n = A,T,C or G
gggggctttctctgtggtccgacgctgtgtcaagctctgcaccggccatgagtatgcagccaagatcatcaacaccaagaagctgtcagccagagnnnnnnnnnnnnnnnnnnnnnnnnnnnnnnnnnnnnnnnnnnnnnnnnnnnnnnnnnnnnnnnnnnnnnnnnnnnnnnnnnnnnnnnnnnnnnnnnnnnnnnnnnnnnnnnnnnnnnnnnnnnnnnnnnnnnnnnnnnnnnnnnnnnnnnnnnnnnnnnnnnnnnnnnnnnnnnnnnnnnnnnnnnnnnnnnnnnnnnnnnnnnnnnnnnnnnnnnnnnnnnnnnnnnnnnnnnnnnnnnnnnnnnnnnnnnnnnnnnnnnnnnnnnnnnnnnnnnnnnnnnnnnnnnnnnnnnnnnnnnnnnnnnnnnnnnnnnnnnnnnnnnnnnnnnnnnnnnnnnnnnnnnnnnnnnnnnnnnnnnnnnnnnnnnnnnnnnnnnnnnnnnnnnnnnnnnnnnnnnnnnnnnnnnnnnnnnnnnnnnnnnnnnnnnnnnnnnnnnnnggggtgatcctgtacatcctgctccttggctacccacccttctgggacgaggaccagcacaagctgtaccagcagatcaaggccggcgcctannnnttcccgtcccccgaatgggacactgtcactcctgaagccaaaaacctaatcaaccagatgctgaccatcaaccctgccaagcgcatcacagcccatgaggccctgaagcatccgtgggtctgcnnnnnnnnnnnnnnnnnnnnnnnnnnnnnnnnnnnnnnnnnnnnnnnnnnnnnnnnnnnnnnnnnnnnnnnnnnnnnnnnnnnnnnnnnnnnnnnnnnnnnnnnnnnnnnnnnnnnnnnnnnnnnnnnnnnnnnnnnnnnnnnnnnnnnnnnnnnnnnnnnnnnnnnnnnnnnnnnnnnnnnnnnnnnnnnnnnnnnnnnnnnnnnnnnnnnnnnnnnnnnnnnnnnnnnnnnnnnnnnnnnnnnnnnnnnnnnnnnnnnnnnnnnnnnnnnnnnnnnnnnnnnnnnnnnnnnnnnnnnnnnnnnnnnnnngccacgtcccacctgtgcttggccgcatcctgacccactgcctcccatgtttcctcaggagtcttctgacagtgccaacaccaccatagaggatgaagacgctaaag

SEQ ID NO: 19856 - DNA, 1244 bp, Macaca Mulatta
  misc_feature (1)...(1244): n = A,T,C or G
gacagatcgaggagctgctagagctgctgacgagcgagatcctgcaccccagcagccaggccccccacggggtgaaaagccacttcattgagatcttcctggaggagctgaccaaagtgggcgctgaggagnagcttacggcagaccagaacctgaagttcatcgaccccttctgcagaatcgccgcccggaccaaggannnnnnnnnnnnnnnnnnnnnnnnnnnnnnnnnnnnnnnnnnnnnnnnnnnnnnnnnnnnnnnnnnnnnnnnnnnnnnnnnnnnnnnnnnnnnnnnnnnnnnnnnnnnnnnnnnnnnnnnnnnnnnnnnnnnnnnnnnnnnnnnnnnnnnnnnnnnnnnnnnnnnnnnnnnnnnnnnnnnnnnnnnnnnnnnnnnnnnnnnnnnnnnnnnnnnnnnnnnnnnnnnnnnnnnnnnnnnnnnnnnnnnnnnnnnnnnnnnnnnnnnnnnnnnnnnnnnnnnnnnnnnnnnnnnnnnnnnnnnnnnnnnnnnnnnnnnnnnnnnnnnnnnnnnnnnnnnnnnnnnnnnnnnnnnnnnnnnnnnnnnnnnnnnnnnnnnnnnnnnnnnnnnnnnnggcatcttccctgaggacgagatcccggagaaggcctgcaggcgtctgcttgaagggaggcggcagaagaagacgaagaagcagaagcgtctgctcagcttgcggcgcgagagagnnagggaaaggtgagaaggagcccccgagcctgggcatggagaggaagaggagcaggaggaggggtgtgggcgccggccccaaggcgcgggcagaggttgatgagcagccaggcacagctaagtggaccctgctccgagatcagcccgggggccgtggccagagaggagctcaccagaggaggaggacacctcggcagccggccggtgcccgagcaaaggcagccaatgtccaggagccggagaagaagaagaaacgcagggagtgacgtggctgagcccaggacaggcagggagggaggccaggccgcccttgcaccaagggatgaggctgactgggctgctcttggactcaggaccgcagctccagaactcccgtgccaggcaggagggaagggcggcactggagaggtgggcccgtcattaggggccagcatcccaggagctggaccttttcccagagcctccgcctgtggctgtaaggaccttgggtcaaaaggtcaaactctgaagactgaaactgcgcctgcagcaggactgg

SEQ ID NO: 19857 - DNA, 1693 bp, Macaca Mulatta
  misc_feature (1)...(1693): n = A,T,C or G
caggcaggaatccccaaatccaaaattctaacaagcccagggagtggatcaggcatttctttccaaaacggaagtgctttgtctttgaccggccaacaaatgacaaaaatctcttactccatgttgaagaagtacccgaagaccaactggatagtaattttcagatgcaatcagaaaacttctgttcttatatcctcacccatgcaaagaccaagaccctgagggagggaatccttgtcactggaaaccnnnnnnnnnnnnnnnnnnnnnnnnnnnnnnnnnnnnnnnnnnnnnnnnnnnnnnnnnnnnnnnnnnnnnnnnnnnnnnnnnnnnnnnnnnnnnnnnnnnnnnnnnnnnnnnnnnnnnnnnnnnnnnnnnnnnnnnnnnnnnnnnnnnnnnnnnnnnnnnnnnnnnnnnnnnnnnnnnnnnnnnnnnnnnnnnnnnnnnnnnnnnnnnnnnnnnnnnnnnnnnnnnnnnnnnnnnnnnnnnnnnnnnnnnnnnnnnnnnnnnnnnnnnnnnnnnnnnnnnnnnnnnnnnnnnnnnnnnnnnnnnnnnnnnnnnnnnnnnnnnnnnnnnnnnnnnnnnnnnnnnnnnnnnnnnnnnnnnnnnnnnnnnnnnnnnnnnnnnnnnnnnnnnnnnnnnnnnnnnnnnnnnnnnnnnnnnnnnnnnnnnnnnnnnnnnnnnnnnnnnnnnnnnnnnnnnnnnnnnnnnnnnnnnnnnnnnnnnnnnnnnnnnnnnnnnnnnnnnnnnnnnnnnnnnnnnnnnnnnnnnnnnnnnnnnnnnnnnnnnnnnnnnnnnnnnnnnnnnnnnnnnnnnnnnnnnnnnnnnnnnnnnnnnnnnnncagctatgcaggctaagaaggaggcagctgagaaggaacaggagctgctaagacaaaaacagaaggaacagcagcaaatgatggaggctcaagagagaagcttccaggaaaacatagcccaacttaagaagaagatggagagggaaagggaaaactatatgagagaactgagaaagatgctgagtcataagctgaaggnnnggtcctagaagaaccacttactgaaggattcaaagagatatttgagtcgttaaatgaagagattaatcgactgaaagaagagattgaagcagctgaaaatgaagaggcctcagtgttttcacagattcttgatgtggctggcaatatgtttattgcagtgctacctggggctgctaagttagttgatttagggatgaaaattcttagctcttttatgtaataggctgagaaatcctggtaaaaaaattatgaaatgaggtttcttttgttaaaatggtgtaacactgtttctcattttaaaagtatatgtgttattgcagtttcctttaagaaaagtttaaaattaaaaagcaaatttcaaagaatattatggcctgaagttcataaaaacaaacttaattttgactgaagtaataattaatagaaatggtgaacaagttagaagataaaattatcctagaaaagatttaaataaagcacaaagactaatggtaagatgaagaaattattttcaattaatgttatagtcacagagataatttaagttataattagctcttgtaaatcagtgagacgagagtaacaccacatattttaaacaggcaaaaatatgataaaaatgtttaatttactgacaataaaagttgtgc

SEQ ID NO: 19858 - DNA, 856 bp, Macaca Mulatta
gggtgaggaagtcgcagttcagcccagctgagtggtgtctgcagaatccacaccaaccagcatcatgtccatgacactggggtactgggacatccgcgggctggcccacgccatccgcctgctcctggaatacacagactcaagctatgaggaaaagaagtacacaatgggggacgctcctgactatgacagaagccagtggctgaatgaaaaattcaagctgggcctggactttcccaatctgccctacttgattgatgggactcacaagatcacccagagcaacgccatcctgcgctacattgcccgcaagcacaacctgtgtggggagacagaagaggagaagattcgtgtggacattttggagaaccaggctatggacgtctccaatcgagctggccagaagtctggctacagccctgattttgagaaactgaagccagaatacttggagggacttcctgaaatgatgaagctcttctcacagtttctggggaagaggccatggtttgttggagacaagatcagctttgtggatttcctcgcctatgatgtccttgatatgaggcgtatatttgaagcccggttgcttggatgcctttcccaaatctgaaaggacttcatctccccgctttgagggtttggagaagatctcttgcctacgtgaaggtccagcccgctttcctccccaaaaccttggtacaccacggccgggttggcttgggggcacccactacctgcctatgaatgcggcctcaaggggcgcgttaaacagacgacagacccctgccgcccttgtcgctccgcgcggtgaggggggcgacgcgttgcgagttggctctctgccccgccaagt

SEQ ID NO: 19859 - DNA, 720 bp, Macaca Mulatta
  misc_feature (1)...(720): n = A,T,C or G
agctgcacaatattggaccaagtaccatcagtgacaccatcctggaggtgggctggcctttctctgcccgggatgaatttcttctctacattttccatattcaaactctgggacctctgcagtgccaaacgaatcctaatatcnnnnnnnnnnnnnnnnnnnnnnnnnnnnnnnnnnnnnnnnnnnnnnnnnnnnnnnnnnnnnnnnnnnnnnnnnnnnnnnnnnnnnnnnnnnnnnnnnnnnnnnnnnnnnnnnnnnnnnnnnnnnnnnnnnnnnnnnnnnnnnnnnnnnnnnnnnnnnnnnnnnnnnnnnnnnnnnnnnnnnnnnnnnnnnnnnnnnnnnnnnnnnnnnnnnnnnnnnnnnnnnnnnnnnnnnnnnnnnnnnnnnnnnnnnnnnnnnnnnnnnnnnnnnnnnnnnnnnnnnnnnnnnnnnnnnnnnnnnnnnnnnnnnnnnnnnnnnnnnnnnnnnnnnnnnnnnnnnnnnnnnnnnnnnnnnnnnnnnnnnnnnnnnnnnnnnnnnnnnnnnnnnnnnnnnnnnnnnnnnnnnnnnnnnnnnnnnnnnnnnnnnnnnnnnnnnnnnnnnnnnnnnnnnnnnnnnnnnnnnnnnnnnnnnnnnnnnnnnnnnnnagtgtggattctttgacagagccagacctcctcaagaggacatgaccgacaaggaacagctgacaaatgacaagacccgcgaggcatgacaaga

SEQ ID NO: 19860 - DNA, 1729 bp, Macaca Mulatta
  misc_feature (1)...(1729): n = A,T,C or G
aactcctcagttctacagtttatctgttgccccctcctaaatccacagccctagggcacccttcccgaagtaccacagacttagtctggaggccccctctctgttcaactgccctgtggtccccctcctcctcccttgttggctgtgtcccaagctaggcgggattcatggtggggggtgtagtggggaggtgaaatgaggtgattatgtaatcagccaaagtccacccctctttttcaggcagtataaaggcaaaccaccccagccgtcaccatcgatcatcccactgccaccatgctggcctcagggctgctcctggtggccttgctggcctgcctgactgtgatggtcttgatgtctgtctggcagcagaggaacagcaagggaaagctgcctccgggacccaccccattgcccttcattggaaactacctgcagctgaacacagagcagatgtgcaactccctcatgaagnnnnntgagcgctatggcccggtgttcaccattcacctgggcccccggcggggtggtggtgctgtagctaaaagatgccgtaaaggaagctcaggtggaccaggctgannnnnnnnnnnnnnnnnnnnnnnnnnnnnnnnnnnnnnnnnnnnnnnnnnnnnnnnnnnnnnnnnnnnnnnnnnnnnnnnnnnnnnnnnnnnnnnnnnnnnnnnnnnnnnnnnnnnnnnnnnnnnnnnnnnnnnnnnnnnnnnnnnnnnnnnnnnnnnnnnnnnnnnnnnnnnnnnnnnnnnnnnnnnnnnnnnnnnnnnnnnnnnnnnnnnnnnnnnnnnnnnnnnnnnnnnnnnnnnnnnnnnnnnnnnnnnnnnnnnnnnnnnnnnnnnnnnnnnnnnnnnnnnnnnnnnnnnnnnnnnnnnnnnnnnnnnnnnnnnnnnnnnnnnnnnnnnnnnnnnnnnnnnnnnnnnnnnnnnnnnnnnnnnnnnnnnnnnnnnnnnnnnnnnnnnnnnnnnnnnnnnnnnnnnnnnnnnnnnnnnnnnnnnnnnnnnnnnnnnnnnnnnnnnnnnnnnnnnnnnnnnnnnnnnnnnnnnnnnnnnnnnnnnnnnnnnnnnnnnnnnnnnnnnnnnnnnnnnnnnnnnnnnnnnnnnnnnnnnnnnnnnnnnnnnnnnnnnnnnnnnnnnnnnnnnnnnnnnnnnnnnnnnnnnnnnnnnnnnnnnnnnnnnnnnnnnnnnnnnnnnnnnnnnnnnnnnnnnnnnnnnnnnnnnnnnnnnnnnnnnnnnnnnnnnnnnnnnnnnnnnnnnnnnnnnnnnnnnnnnnnnnnnnnnnnnnnnnnnnnnnnnnnnnnnnnnnnnnnnnnnnnnnnnnnnnnnnnnnnnnnnnnnnnnnnnnnnnnnnnnnnnnnnnnnnnnnnnnnnnnnnnnnnnnnnnnnnnnnnnnnnnnnnnnnnnnnnnnnnnnnnnnnnnnnnnnnnnnnnagctgttgtcttcctttcctcttatgttttcctctgggaatgtggggttgcagcttctaacttcatcttatctcactgcccctccccaccctgccacccccacagggcgccgtctgtgcctgggcgagtcgctggcgcgcatggagctctttctgtacctcaccgccatcctgcagagcttctcgctgcagccgctgggtgcgcccgaggacatcgacctgacccggctcagctcaggtcctggcaatttgccgcggcctttccagctgcgcctgctcccgtgctaa

SEQ ID NO: 19861 - DNA, 2737 bp, Macaca Mulatta
  misc_feature (1)...(2737): n = A,T,C or G
ggcctggcctcgccctgtggacgatgatggccttgcccccgtgagctacaacctggccctcagcacccgcccaccttcagccagcaggatgcggctgtggaaggcggtggtggtgactttggccttcatgagtgtggacatctgcgtgaccacggccatctatgtcttcagtcacctggaccgcagccttctggaggacatccgccacttcaacatctttgactcggtgctggacctctgggcagcctgcctgtaccgcagctgcctgctgctgggggccaccattggtgtggccaagaacagtgcgctggggccccggcggctgcgggcctcgtggctggtcatcaccctcgtgtgcctcttcgtgggcatctacgccatggtgaagctgctgctcttctcagaggtgcgcaggcccatccgggacccctggttctgggccctgttcgtgtggacgtacatttcacttggcgcatccttcctgctctggtggctgctgtccaccgtgcgaccaagcacccaggccctggagccaggggcggccactgaggccgagggcttccctgggagtggcctgccaccgcccgagcaggcgtctggggccacgctgcagaagctgctctcctacactaagcccgacgtggccttcctcgtggccgcctctttcttcctcatcgtggcagctctgggnnnnnnnnnnnnnnnnnnnnnnnnnnnnnnnnnnnnnnnnnnnnnnnnnnnnnnnnnnnnnnnnnnnnnnnnnnnnnnnnnnnnnnnnnnnnnnnnnnnnnnnnnnnnnngcaggtattcggggcggcatttttaccctcatatttgccagactgaacattcgccttcgaaactgtctcttccgctcactggtgtcccaggagacaagcttctttgatgagaatcgcacaggttnnnnnnnnnnnnnnnnnnnnnnnnnnnnnnnnnnnnnnnnnnnnnnnnnnnnnnnnnnnnnnnnnnnnnnnnnnnnnnnnnnngaggctctccaaagaggtccagaatgccctggccagagcaagcaacacggccgaggagaccatcagcgccatgaagactgtccggagcttcgccaacgaggaggaggaggcagaggtgtacctgcggaagctgcagcaggtgtacaagctgaacaggaaggaggcggccgcctacatgtactacgtctggggcagcgggnnnnnnnnnnnnnnnnnnnnnnnnnnnnnnnnnnnnnnnnnnnnnnnnnnnnnnnnnnnnnnnnnnnnnnnnnnnnnnnnnnnnnnnnnnnnnnnnnnnnnnnnnnnnnnnnnnnnnnnnnnnnnnnnnnnnnnnnnnnnnnnnnnnnnnnnnnnnnnnnnnnnnnnnnnnnnnnnnnnnnnnnnnnnnnnnnnnnnnnnnnnnnnnnnnnnnnnnnnnnnnnnnnnnnnnnnnnnnnnnnnnnnnnnnnnnnnnncggcaagcccatcagcgccttccaccacaagtacttgcaccgtgtgnnnnnnnnnnnnnnnnnnnnnnnnnnnnnnnnnnnnnnnnnnnnnnnnnnnnnnnnnnnnnnnnnnnnnnnnnnnnnnnnnnnnnnnnnnnnnnnnnnnnnnnnnnnnnnnnnnnnnnnnnnnnnnnnnnnnnnnnnnnnnnnnnnnnnnnnnnnnnnnnnnnnnnnnnnnnnnnnnnnnnnnnnnnnnnnnnnnnnnnnnnnnnnnnnnnnnnnnnnnnnnnnnnnnnnnnnnnnnnnnnnnnnnnnnnnnnnnnnnnnnnnnnnnnnnnnnnnnnnnnnnnnnnnnnnnnnnnnnnnnnnnnnnnnnnnnnnnnnnnnnnnnnnnnnnnnnnnnnnnnnnnnnnnnnnnnnnnnnnnnnnnnnnnnnnnnnnnnnnnnnnnnnnnnnnnnnnnnnnnnnnnnnnnnnnnnnnnnnnnnnnnnnnnnnnnnnnnnnnnnnnnnnnnnnnnnnnnnnnnnnnnnnnnnnnnnnnnnnnnnnnnnnnnnnnnnnnnnnnnnnnnnnnnnnnnnnnnnnnnnnnnnnnnnnnnnnnnnnnnnnnnnnnnnnnnnnnnncagagacaggggagaagggcgcccagctgtcaggtggccagaagcagcgggtggccatggcccgggctctggttcggaaccccccggtcctcatcctggatgaagccaccagcgctttggatgccgagagcgagtatctggtgagtcacagggcggtgggcaatgccggggcaggagcggctccaggcggccagagcccccatcaccctgcagatgggtgctgagaagagacgggccccagaagctctcccaggctgtcagcctcctgggctggtgaattcctggtgttgagagtggggaaccaggagccattctgggcccagccttcaggctccaggcagagctgtatggtgtggggcgagagaaggaatcagaatggggagacctgggtcgtgagcggtggctcacgcctgtaatcccagcactttgggaagccaaagcaggtggatcacctgaggtcaggagttggagaccaggctggccaacatggtgaaaccccgtctctactagaaatacaaaaactagccaggcgtggtagcacatacctgtaatcccaggctacttgggaggctgaggcaggagaattgcttgaacctgggaggtggaggttgcagtgagccgagatcgtgccactgcactccagcctgggcgacagagccagactccatctggc

SEQ ID NO: 19862 - DNA, 359 bp, Macaca Mulatta
aaatgttaattttttaggactctactagttggcatgcaaaaatatgtaaggatcaacattttaccctctcataatcatgctttttggaaatttccatcatcctcaagtaaaacaaatatcagttgaatattggaagctgtgtgtaagatggattcagcgttccacgcacttgctttaaaatttagtactgtgtatactgtggtgtttttactgtgcatatttgagtttttcatgcagtttttctagagcaataatcagcggtgcttttgaacctaggttttacgtgattttaataaaacatggatagttatgaccacctgctgacaatttgtggtttaaaataaaagattttcttgtct

SEQ ID NO: 19863 - DNA, 833 bp, Macaca Mulatta
  misc_feature (1)...(833): n = A,T,C or G
gggaaacgttcttcgccgagagtcgtcggggtttcctgcttcaacagtgcttggacggaacccggcgctcgtcccccatcccggccggccgcccatagccagccttccgtctcctcttcaccgcgtcctcggactgccccaagggccccgccgccgctccagcgccgcgcagccaccgccgccgccgcctgtccttagcctccgccatgacgaccgcgtccacctcgcaggtgcgccagaactaccaccaggactcagaggccgccatcaaccgccagatcaatctggagctctacgcttcctacgtttacctgtccatgtcttactactttgaccgcgatgatgtggctttgaagaactttgccaaatactttcttcaccaatctcatgaggaaagggaacatgccgagaaactgatgaagctgcagaaccaacgaggtggccgaatcttccttcaggatattaagaaaccagactatgacgactgggagagcgggctgaatgcaatgcaatgggnttgtgcttttacattttgggaaaaaattgtgaattcagtcactaactggaacctgcacaaaccgggcccctggaaaaaaaagaaccccccatttggtgtgcactccctgggaaccacctcttccttgaaaaggaaccgggggaaaaccccnatactgaaggcgngggnnnaacacacnttgccccaatttttgccccaaaaagatgggggaaccacccccaaaatttgggggtttnnnnnnnnnnnnnnnnnnctnnnnnnnnnnnnnnnnnnnncccctccgggggagaaacaatggtggtaaatataaaaaaat

SEQ ID NO: 19864 - DNA, 257 bp, Macaca Mulatta
gacatgtgctcaccgatatgaaaaaaggcagcatgttaatacgaagcaggaatcccgagacatctttgggcggtgttatgttctgagccagaatctcaggattgaagacgatatggatgggggagattggagcttttgtgatgggcgattgagaggccatgagaaatttggctcttgccagcaaggtgtagcagctacttttactaaagactttcattacattgtatttggagccccgggtacttacaactggaaag

SEQ ID NO: 19865 - DNA, 1148 bp, Macaca Mulatta
  misc_feature (1)...(1148): n = A,T,C or G
ttcgggtcctgctggggctgcgagagaccaaagcccttggaggggacgggtacaaacaagagttcagttgtggtggattctgccagtgtgcccagctctgaggcctcagctcttgccaaacagacccgagacccatgtcagccccgctgaatgccnnnnnnnnnnnnnnnnnnnnnnnnnnnnnnnnnnnnnnnnnnnnnnnnnnnnnnnnnnnnnnnnnnnnnnnnnnnnnnnnnnnnnnnnnnnnnnnnaggtcccattttcagtgccggagatccccctggtgttccgaggacacacccagcaggacagggaagtgcctaagtctttagtttccaatttgcggatccactgccctctgcttgagggctctgctctgatcacctttgatgaccccaaannnnnnnnnnnnnnnnnnnnnnnnnnnnnnnnnnnnnnnnnnnnnnnnnnnnnnnnnnnnnnnnnnnnnnnnnnnnnnnnnnnnnnnnnnnnnnnnnnnnnnnnnnnnnnnnnntgtccagccagttgagtggccagagggtgttggtcagtggatttcctgccagtctcaggctgagtgaggaggagctgctggacaagcttgagatcttctttggcaagactaggaacggaggtggcgatgtggagtttcgggagctgctgcaagggagtgtcatgctggggtttgctacggatggannnnnnnnnnnnnnnnnnnnnnnnnnnnnnnnnnnnnnnnnnnnnnnnnnnnnnnnnnnnnnnnnnnnnnnnnnnnnnnnnnnnnnnnnnnnnnnnnnnnnnnnnnnnnnnnnnnnnnnnnnnnnnnnnnnnnnnnnctggtgctcaacattcccgatatcttggacggcccagagctgcacgacgtcctggaggtccacttccagaagcccacccgtgggggtggggagatagagtccctgacagtcgtaccccaaggacagcagggcctagcagtcttcacctctgagtcagggtaggggcctccccttctcatcctccccaccccacggccaaggatctcacacggggctgggcttgggtgcccatgtaggaggtctttatgttcaccaacagggagggatcacacattgcgaaacactttgcccggaacagtaaaaacggcctgc

SEQ ID NO: 19866 - DNA, 857 bp, Macaca Mulatta
  misc_feature (1)...(857): n = A,T,C or G
gaatcggcacgagggcgaagcgcacgctggaggaggatcggcggccggtgagggagaagcaagtctggtctctctaattaaagaaggcggctctggtctccactgcgggaatcacacacatacctcagaatgccgggtctaagttgtagattttatcaacacaaatttcctgaggtggaagatgtagtgatggtgaatgtcagatccattgctgaaatgggggcttatgtcagcttgctggaatacaacaacattgaaggcatgattcttcttagtgaattatccagaaggcgtatccgttctatcaacaaactcatccgaattggcaggaatgagtgtgtggttgtcattagggtggacaaagaaaaaggatatattgatttgtcaaaaagaagagtttctccagaggaagcaatcaaatgtgaagataaattcacaaaatcgaaaactgtttatagcattcttcgtcatgttgctgaggtgttagaatacaccaaggatgagcagctggaaagcctattccagaggactgcctgggtctttgatgacaagtacaagagacctggatatggtgcctatgatgcatttaagcatgcagtctcagacccatctattttggatagtttagatttgaatgaagatgaacgggaagtactcattaataatattaataggcgcttaaccccacaggctgtcaaaattcgagcagatattgaagtggcttgttatggttgtgaaggcattgatgctgtaaaagaagccctaagagcaggtttgaattgttctacagaaaacatgcccattaagataatctaatagctcctcctcggtatgtaatgactacngacaccctggag

SEQ ID NO: 19867 - DNA, 813 bp, Macaca Mulatta
gctggtgctcaacattcccgatatcttggacggcccagagctgcacgacgtcctggaggtccacttccagaagcccacccgtgggggtggggagatagagtccctgacagtcgtaccccaaggacagcagggcctagcagtcttcacctctgagtcagggtaggggcctccccttctcatcctccccaccccacggccaaggatctcacacggggctgggcttgggtgcccatgtaggaggtctttatgttcaccaacagggagggatcacacattgcgaaacactttgcccggaacagtaaaaacggcctgcactccatgatgttcttcctcatttcactcatgaaaggaaacgtgatttgggcatgtaaagagatgggggcgggaagaagccagatcttctgctggcagcgccggccttccagaagctcaccttccctccactctcagaggcaacaagcaggacctagggtttggctttttattgacacaaacacaaaggcagctgtggtaatggggtggtggggtacacaaaagcagaaatcgcacttcacacatttgggcctcatgtagacaatgaggatgctgagcctgtccctccacctcccattgcaacggttggggtgataatcctccctaattctagctcagtgagtagagggagtgacctccctacccaggaagtccccattttggtcacagtggcccaggtcctgaccatcccactctgtattcccctgttccatctccccacccatgtaaacaaagttgtgggctgagtttgataagctgccgctctgcttgagaaggcag

SEQ ID NO: 19868 - DNA, 2536 bp, Macaca Mulatta
  misc_feature (1)...(2536): n = A,T,C or G
gagcccgggtccctccacgggcaggaaggggagggcccatcggggctaggggaaccccggcgcagacctggggtnnnnnnnnnnnnnnnnnnnnnnnnnnnnnnnnnnnnnnnnnnnnnnnnnnnnnnnnnnnnnnnnnnnnnnnnnnnnnnnnnnnnnnnnnnnnnnnnnnnnnnnnnnnnnnnnnnnnnnnnnnnnnnnnnnnnnnnnnnnnnnnnnnnnnnnnnnnnnnnnnnnnnnnnnnnnnnnnnnnnnnnnnnnnnnnnnnnnnnnnnnnnnnnnnnnnnnnnnnnnnnnnnnnnnnnnnnnnnnnnnnnnnnnnnnnnnnnnnnnnnnnnnnnnnnnnnnnnnnnnnagaaaaaagcagcaagtcttggcagcagtcaatcttccagaacctatgctggtggaacagcctcagccaccaaggnnnggtatcagcttcctctggtgtgaccagcaagtcttccagtatgaatcccacagaaaccaaggnnnggctgtaaaaacagaacctgagaagaagtcacaatcaaccnnnnnnnnnnnnnnnnnnnnnnnnnnnnnnnnnnnnnnnnnnnnnnnnnnnnnnnnnnnnnnaaaagcctacccaagcaggcatcagatacaggaagtaaggatgctcacaataaaaaagcagtttccagatcagctgaacagcagccatcagagaaatcagcagaaccaaagnagactaaaccacaagacacggtttctgctggtggagagagtgttgctggtgtcgctgcaacatctggcaagccgggtgacaagnnnnnnnnnnnnnnnnnnnnnnnnnnnnnnnnnnnnnnnnnnnnnnnnnnnnnnnnnnnnnnnnnnnnnnnnnnnnnnnnnnnnnnnnnnnnnnnnnnnnnnnnnnnnnnnnnnnnnnnnnnnnnnnnnnnnnnnnnnnnnnnnnnnnnnnnnnnnnnnnnnnnnnnnnnnnnnnnnnnnnnnnnnnnnnnnnnnnnnnnnnnnnnnnnnnnnnnnnnnnnnnnnnnnnnnnnnnnnnnnnnnnnnnnnnnnnnnnnnnnnnnnnnnnnnnnnnnnnnnnnnnnnnnaaacccatggggccagatgatgctatagatgccttgtcatctgacttcacctgtgggtcgcctacagctgctggaaagaaaactgaaaaagaggnaggaatctacagaagttttaaaagctcaatcagcagnnnnnnnnnnnnnnnnnnnnnnnnnnnnnnnnnnnnnnnnnnnnnnnnnnnaggatacaatgagcgatcaagcactggaggctctgtcggcttcactgggcacccggcaagcagaacctgagctcgacctcagctcgattaaggaagtcgatgagnnnnnnnnnnnnnnnnnnnnnnnnnnnnnnnnnnnnnnnnnnnnnnnnnnnnnnnnnnnnnnnnnnnnnnnnnnnnnnnnnnggataaagatggaaaaccactattgccagagcctgaagaaaaacccaannnnnnnnnnnnnnnnnnnnnnnnnnnnnnnnnnnnnnnnnnnnnnnnnnnnnnnnnnnnnnnnnnnnnnnnnnnnnnnnnnnnnnnnnnnnnnnnnnnnnnnnnnnnnnnnnnnnnnnnnnnnnnnnnnnnnnnnnnnnnnnnnnnnnnnnnnnnnnnnnnnnnnnnnnnnnnnnnnnnnnnnnnnnnnnnnnnnnnnnnnnnnnnnnnnnnnnnnnnnnnnnnnnnnnnnnnnnnnnnnnnnnnnnnnnnnnnnnnnnnnnnnnnnnnnnnnnnnnnnnnnnnnnnnnnnnnnnnnnnnnnnnnnnnnnnnnnnnnnnnnnnnnnnnnnnnnnnnnnnnnnnnnnnnnnnnnnnnnnnnnnnnnnnnnnnnnnnnnnnnnnnnnnnnnnnnnnnnnnnnnnnnnnnnnnnnnnnnnnnnnnnnnnnnccatgagtgaagacttccttctggatgctttgtctgaggacttctctggtccacaaaatgcttcatctcttnnnnnnnnnnnnnnnnnnnnnnnnnnnnnnnnnnnnnnnnnnnnnnnnnnnnnnnnnnnnnnnnnnnnnnnnnnnnnnnnnnnnnnnnnnnnnnnnnnnnnnnnnnnnnnnnnnnnnnnnnnnnnnnnnnnnnnnnnnnnnnnnnnnnnnnnnnnnnnnnnnnnnnnnnnnnnnnnnnnnnnnnnnnnnnnnnnnnnnnnnnnnnnnnnnnnnnnnnnnnnnnnnnnnnnnnnnnnnnnnnnnnnnnnnnnnnnnnnnnnnnnnnnnnnnnnnnnnnnnnnnnnnnnnnnnnnnnnnnnnnnnnnnnnnnnnnnnnnnnnnnnnnnnnnnnnnnnnnnnnnnnnnnnnnnnnnnnnnnnnnnnnnnnnnnnnnnnnnnnnnnnnnnnnnnnnnnnnnnnnnnnnnnnnnnnnnnnnnnnnnnnnnnnnnnnnnnnnnnnnnnnnnnnnnnnnnnnnnnnnnnnnnnnnnnnnnnnnnnnnnnnnnnnnnnnnnnnnnnnnnnnnngacaacagaggaaacttccaagccaaaagatga

SEQ ID NO: 19869 - DNA, 677 bp, Macaca Mulatta
tctgtaactccaatattagaaaatatatttattaaaaagtaacttaacatatgagaggtttgaaaggtgattattatgctatgggcaatttcttaacgtttacagtttgtgtttactccatgtagaattagaatactggcaaaaatcactggggaaactacttaggtggaaagcatatctgatgcaggtaatcattatttgactaaattctattgtttcaaggctgctggccacataggatgtttttactactacttttttagcctaagtgcttacataaattggtgattctcttataattgttctcttataattgtgattctcatatgaattgagtcattcttgtcacacccaactaaaacagagtcaagaagctagggggaaaaagtacttgacacacataatatttctcaaagaatataattctctgtgagcctggctactgaaactacttgctgtaacctgagaccagttttgtctatagctgttgagataacttgctgtaactctaggactaattttgcctatggccattgctcaccagttggaacttgccagctccctagagctttactaataccaatgagctttctcttaagaccacaagtaacattcttcgtttaaaataaaaccctcaaacttctctttgttgaacacactaaagatccctagaattg

SEQ ID NO: 19870 - DNA, 377 bp, Macaca Mulatta
tgaaaattgaaataagatatttcatagtttttactaaacaatttgacttctttataattttataaggcaatatttgcaatctcatgacactgtaacagtttttgatgtatttacagtttttacaaaactgaggtaaaattgtttataatgaacatattttaataaactgtatctggtcagttccactgttaaaattgatgagtattaataaaattaggaggtgcttggcattagcaattgacaaaatgggggcaaaaataattttaaaatatagacgtatgcaaaatgcatttacccctgagtaaagaaaatttcattgcaactgtataaacagtacatcttgtggacaactgagtgcagaagtttctttgcttccc

SEQ ID NO: 19871 - DNA, 325 bp, Macaca Mulatta
  misc_feature (1)...(325): n = A,T,C or G
ggggacgttggtgccccagaccaggaattcggcttcgacgttggccctgtctgcttcctgtaaactccctccatcccaacctggctccctcccacccaaccaactttccccccaacccggaaacagacaagcaacccaaactgaacccctcaaaagccaaaaaaatgggagacaatttcacatggactttggnnnnnnnnnnnnnnnnnnncattcatctctcaaacttagtttttatctttgaccaaccgaacatgaccaaaaaccaaaagtgcattcaaccttaccnnnnnnnnnnnnnnnnnnnnnnnnnnnnnnnnnnnnc

SEQ ID NO: 19872 - DNA, 244 bp, Macaca Mulatta
aaacttagaatcccttatgaagttgctgttctagaaatgaagattgttaatttccttcttcagtctctagtgacaacacttaacttcttttctaataaaaaaaaatacctgtagatgattcagtgatttttgtccaattcgtttccatgttctcaagacattaaggaatgttaggcgaaatatactaacttaaaactgtgtttatgtttggccatgccaatataaataaagacatgtgctgctg

SEQ ID NO: 19873 - DNA, 234 bp, Macaca Mulatta
aggcaccccatgtgcagtacgagcgcctgggctccgacgtgacactgccatgtgggacagcaaactgggatgcagcagtgacgtggcgggtaaatgggacagacctggcccctgacctgctcaacggctctcagctggtgctccgtggcctggaactgggccacagtggcctgtacgcctgcttccaccgtgactcctggcacctgcgccaccaagtcctgctgcatgtgggct

SEQ ID NO: 19874 - DNA, 1674 bp, Macaca Mulatta
  misc_feature (1)...(1674): n = A,T,C or G
ccagttaagaagaacctgctcaccatgatggatgaggcctatattcagccacagcctctgggagtggtgctgataatcggagcttggaactacccctttgttctcatcattcagccactgataggagccatcgctgcagnnnnnnnnnnnnnnnnnnnnnnnnnnnnnnnnnnnnnnnnnnnnnnnnnnnnnnnnnnnnnnnnnnnnnnnnnnnnnnnnnnnggacctctatgttgttattaatggtggtgttgaggaaaccacggagctcctgaagcagcgatttgaccacattttctatacgggaaatactgcagttggcaaaattgtcatggaagcnnnnnnnnnnnnnnnnnnnnnnnnnnnnnnnnnnnnnnnnnnnnnnnnnnnnnnnnnnnnnnnnnnnnnnnnnnnnnnnnnnnnnnnnnnnnnnnnnnnnnnnnnnnnnnnnnnnnnnnnnnnnnnnnnnnnnnnnnnnnnnnnnnnnnnnnnnnnnnnnnnnnnnnnnnnnnnnnnnnnnnnnnnnnnnnnnnnnnnnnnnnnnnnnnnnnnnnnnnnnnnnnnnnnnnnnnnnnnnnnnnnnnnnnnnnnnnnnnnnnnnnnnnnnnnnnnnnnnnnnnnnnnnnnnnnnnnnnnnnnnnnnnnnnnnnnnnnnnnnnnnnnnnnnnnnnnnnnnnnnnnnnnnnnnnnnnnnnnnnnnnnnnnnnnnnnnnnnnnnnnnnnnnnnnnnnnnnnnnnnnnnnnnnnnnnnnnnnnnnnnnnnnnnnnnnnnnnnnnnnnnnnnnnnnnnnnnnnnnnnnnnnnnnnnnnnnnnnnnnnnnnnnnnnnnnnnnnnnnnnnnnnnnnnnnnnnnnnnnnnnnnnnnnnnnnnnnnnnnnnnnnnnnnnnnnnnnnnnnnnnnnnnnnnnnnnnnnnnnnnnnnnnnnnnnnnnnnnnnnnnnnnnnnnnnnnnnnnnnnnnnnnnnnnnnnnnnnnnnnnnnnnnnnnnnnnnnnnnnnnnnnnnnnnnnnnnnnnnnnnnnnnnnnnnnnnnnnnnnnnnnnnnnnnnnnnnnnnnnnnnnnnnnnnnnnnnnnnnnnnnnnnnnnnnnnnnnnnnnnnnnnnnnnnnnnnnnnnnnnnnnnnnnnnnnnnnnnnnnnnnnnnnnnnnnnnnnnnnnnnnnnnnnnnnnnnnnnnnnnnnnnnnnnnnnnnnnnnnnnnnnnnnnnnnnnnnnnnnnnnnnnnnnnnnnnnnnnnnnnnnnnnnnnnnnnnnnnnnnnnnnnnnnnnnnnnnnnnnnnnnnnnnnnnnnnnnnnnnnnnnnnnnnnnnnnnnnnnnnnnnnnnnnatattactgaagaatgatcccgttcaacctcctagtgcctctactgaattattcctcttttaaatggttaatgaaccaataatttttaaatcctaccaaaaatagtaagaaaatatgcaaacacactgtgatcaaactcaaaagtcattgccattcatcattaataaaacttgccatttcaaccaaatcccaacattccctaataggatattcagggaacctgccttaaattgtgcttatctaaatcttggagctttgagctaggggaggagaatgtattagactaaatacaaactttaagggagtctcagaacctacaagtgaatccttccctccaggtaatggcact

SEQ ID NO: 19875 - DNA, 531 bp, Macaca Mulatta
ttgtgactatcccgcgacggaggccatcctctccagaatgaagatcttcttgccggtgctgctggctgcgcttctgggtgtggagcgagccagctcgctgatgtgcttctcctgcctgaaccagaagagcaatctgtactggctgaagccgaccatctgctccgagcaggacaactactgcgtgaccgtgtctactagtgctggcattgggaatctcgtgacatttggccacaggctgagcaagacctgttccccgggctgccccctcccagaaggcatcaatgttggtgtggcttccatgggcatcagctgctgccagagcttcctgtgcaatttcagtgcagccgacggcgggctgcgggcaagcgctaccctgctgggcgccgggctgctgctgagcctgctgccggccctgctgcggttcgggccctgatcgcccagaccctgttccccgatcccccagatcaggaaggaaagcccagccctttctggatcccacagggtatgggagcccctgagttctcacgtgcc

SEQ ID NO: 19876 - DNA, 1878 bp, Macaca Mulatta
  misc_feature (1)...(1878): n = A,T,C or G
naggatggtggaacactgtctacacatgttcgaccggatggtcatctatttcttcatagcggcttcctacgcaccctgnggctgaaccttcgggagctgggcccctgggcctcccacatacgctggctggtctggattatggcttccgtgggcaccatctatgtcttcttcttccatgagcgaacacggagctgtgtgcggtttccttgtggggaggcatgtcctaaggctggcnnnnnnnnnnnnnnnnnnnnnnnnnnnnnnnnnnnnnnnnnnnnnnnnnnnnnnnnnnnnnnnnnnnnnnnnnnnnnnnnnnnnnnnngcccaacaccgagggcatctgggagctggtgaccggaggggtcttctactgcctgggcatggtcttcttcaagagtgacgggaggatcccctttgcccacgccatctggcatctctttgtagcatttggtgctggtacccactactatgccatctggagatacctctatctgcccagcaccctgcacaccaaggtgtccaaatgaggtgacccagactccagaggtcacttgggctttaggagtgcagcaccacaggaagtgtttttgcgaacgttaacccagagcacagcgcgaaggcctgtcttcccttcattgggtagagttcttgatggctctgaggtgacttctggtgacgaccagatcgtccctcgagtccccagcgagaaagaaagcatttagccattctcacagaggagaaattaaccctgtaatgtgtttctattttagatgagtgtttcctaatacaagcaacattaacatcttcagaaaaggaagcaggaaggtcctggaaaattnnnnnnnnnnnnnnnnnnnnnnnnnnnnnnnnnnnnnnnnnnnnnnnnnnnnnnnnnnnnnnnnnnnnnnnnnnnnnnnnnnnnnnnnnnnnnnnnnnnnnnnnnnnnnnnnnnnnnnnnnnnnnnnnnnnnnnnnnnnnnnnnnnnnnnnnnnnnnnnnnnnnnnnnnnnnnnnnnnnnnnnnnnnnnnnnnnnnnnnnnnnnnnnnnnnnnnnnnnnnnnnnnnnnnnnnnnnnnnnnnnnnnnnnnnnnnnnnnnnnnnnnnnnnnnnnnnnnnnnnnnnnnnnnnnnnnnnnnnnnnnnnnnnnnnnnnnnnnnnnnnnnnnnnnnnnnnnnnnnnnnnnnnnnnnnnnnnnnnnnnnnnnnnnnnnnnnnnnnnnnnnnnnnnnnnnnnnnnnnnnnnnnnnnnnnnnnnnnnnnnnnnnnnnnnnnnnnnnnnnnnnnnnnnnnnnnnnnnnnnnnnnnnnnnnnnnnnnnnnnnnnnnnnnnnnnnnnnnnnnnnnnnnnnnagttggggatgaggatgctgttacttggccatttcttcccatccccaaaaatccgcagacattacaagagccattcattcataagatggggcaaacagtccctgggcacttgctccctgttccatacttaaggtttgtgataccaacctttggattctgtcttggtgccaatcagtggctgttagaggctactcaggtgtaccccaaaaggaaggcacatggatctagggagactgttccaggtcccctcaacctctgaagtgcccagtaccccaacaacaaggcttctggggacctgttcttcagtccccgtcagggcggggccagcatctttgtccaatgctgcctggacatttactggggaggtgagtagcaggcccacctccaggatctgaattggaatctcagattctctggataaataatctgtctcaaatcaggaggtcctcattctgcgactcccaaccagagtgtagtaggacagacagaatgccttatgcttatctacagcacattcaagggggttccagg

SEQ ID NO: 19877 - DNA, 1936 bp, Macaca Mulatta
  misc_feature (1)...(1936): n = A,T,C or G
ggggacacccccacggcaggagcccgggccgacggagaggacttaggacactatgggaccctccgggaaaagaggggagacgtcgtgacccaggccccgccccgccttgccgccctcgtgcccggcgctaagacccagcgggcgcgcggcccgccctgggcctgtccctgtccccttccgtccgcggggccgccagctcagctctggagagccggcggcgcggcgggcatggctcgggtggcgtgtgggctgctgtggctgctgctgggcagcgccagggcgcagtacgagaagtacagcttccggggcttcccgccagaggacctgatgccgctggccgcggcctacgggcacgcgctggagcagtannnnnnnnnnnnnnnnnnnnnnnnnnnnnnnnnnnnnnnnnnnnnnnnnnnnnnnnnnnnnnnnnnnnnnnnnnnnnnnnnnnnnnnnnnnnnnnnnnnnnnnnnnnnnnnnnnnnnnnnnnnnnnnnnnnnnnnnnnnnnnnnnnnnnnnnnnnnnnnnnnnnnnnnnnnnnnnnnnnnnnnnnnnnnnnnnnnnnnnnnnnnnnnnnnnnnnnnnnnnnnnnnnnnnnnnnnnnnnnnnnnnnnnnnnnnnnnnnnnnnnnnnnnnnnnnnnnnnnnnnnnnnnnnnnnnnnnnnnnnnnnnnnnnnnnnnnnnnnnnggctaaccggctggagaaggcggtggcggcggcctacaccttcctccagaggaatccgaagcacgagctgaccgccaagtacctcaactactaccgggggatgctggacgtcgccgacgagtccctcacggacctagaggcccagccctacgaggnaggccgtgttcctccgggctgtgaagctctacaacagcggggatttccgcagcagcacggaggacatggagcgggccttggcagagtacctggcggtctttgcccggtgcctggccggctgtgaaggggcccatgagcaggtggacttcaaggacttctacccggccatagcagnnnnnnnnnnnnnnnnnnnnnnnnnnnnnnnnnnnnnnnnnnnnnnnnnnnnnnnnnnnnnnnnnnnnnnnnnnnnnnnnnnnnnnnnnnnnnnnnnnnnnnnnnnnnnnnnnnnnnnnnnnnnnnnnnnnnnnnnnnnnnnnnnnnnnnnnnnnnnnnnnnnnnnnnnnnnnnnnnnnnnnnnnnnnnnnnnnnnnnnnnnnnnnnnnnnnnnnnnnnnnnnnnnnnnnnnnnnnnnnnnnnnnnnnnnnnnnnnnnnnnnnnnnnnnnnnnnnnnnnnnnnnnnnnnnnnnnnnnnnnnnnnnnnnnnnnnnnnnnnnnnnnnnnnnnnnnnnnnnnnnnnnnnnnnnnnnnnnnnnnnnnnnnnnnnnnnnnnnnnnnnnnnnnnnnnnnnnnnnnnnnnnnnnnnnnnnnnnnnnnnnnnnnnnnnnnnnnnnnnnnnnnnnnnnnnnnnnnnnnnnnnnnnnnnnnnnnnnnnnnnnnnnnnnnnnnnnnnnnnnnnnagccagagcctgaactggccttagaaggggacaccccacacccctcaagcttgggaagccctttcccgatggccccaccctcaccaacctgggcagcagcaagaactatttattaaaaacttaagatgggccaggcgcggtggctcacgcctgtaatcccagcactttgggaggccaaggcgggtggatcacttgaggccaggagttcaaaaccagcctggccaacatggtgaaacccccgtctctactaaaaaatacaaaaattagccaggcatggtggtgcacacctgtaatcgtagctacccgggaggctgagccaggagaatcacctgaacccaggaggcagagcttacagtgagctgagattgtgccactgcacttcagcctgggtgacagagtgagactccatctttaa

SEQ ID NO: 19878 - DNA, 1040 bp, Macaca Mulatta
aattcctctctccccacgaacatctctggagggacacctgctgtatctgctggctatctcttcctggatatcatcacttatctggtatttgcagtcacctttgtcctcggggtcctgggcaacgggcttgtgatctgggtggctggattccggatgagacacacagtcaccaccatcagttacctgaacctggctgtggctgacttctgtttcacctccactttgccgttcttgatggtcgtgaaggtcatgagaggacattggcctttcggctggttcctgtgcaaattcatctttaccatagtggatatcaacttgtttggaagtgtcttcctgatcgccctcattgctctggaccgctgtgtttgcgtcctgcatccagtctggacccagaaccaccgcaccgtgagcctggccaagaaggtgatcatcgggccctgggtgatggctctgctcctcacattgccagttatcattcgtgtgactacagtacctggtaaaacggggacagtagcctgcacttttgacttttcaccctggaccaatgaccctgtggagaagctgaaggtgaccattgccatgttgacggtgagaggcatcatccggttcatcattggcttcagcgtgcccatgtccatcgttgctgtcagttatgggcttattgccaccaagatccacaagcaaggcttaattaagtccagtcgtcccttgcgggtcctctcctttgtcgtagctgccttttttctctgctggtccccatatcaggtggtggcctttatagccacagtcagactccgaaacatattacaaggcctgtccaaagaacttagaattgcagtggatgcgacaagtgccctggccttcttcaacagctgcctcaaccccatgctctatgtcttcatgggccaggacttccgggagaggctgatccactctctgcccactagtctggagagggccctaaccgaggactcagcccaaaccagtgacacagctaccaattctactttaccttctgcagaggtgccgttacaggcaaa

SEQ ID NO: 19879 - DNA, 307 bp, Macaca Mulatta
  misc_feature (1)...(307): n = A,T,C or G
aggtttgtcaagggctgtttaatgagttactagaaaatggaatttctgtgtggcctggttatttggaaactatgcagtcctcattggaacaactttattcaaagtannnnnnnnnnnnnnnnnnnnnnnnnnnnnnnnnnnnnnnnnnnnnnnnnnnnnnnnnnnnnnnnnatctgagaagcagagacacgacaatgaaggaaatgatgcatatatccaaattaaaagactttttgattaagtatatatcatcagctaagaatgtatagatttttatatttgtataataaatattcttctttcctaa

SEQ ID NO: 19880 - DNA, 556 bp, Macaca Mulatta
atgcagagaaataaagcagattcaggaactggagcgtggctgttggtattgcttcctgcgtagcttctgactgggggctaccattgaggcagacatgagcccagaacacaatgagcttccaggctggtcttgctctcacggctttttgacccgttcagaaacattcctttacattgagggtgggctttacttggaaataacatagcagggaaccatgtggttctaggagacccctctgggttggaagcccctattttccattgttcttctgtcatcctgggtctctctcactttgttccctcagctgctccgcccctctcagcaccacccgtccttctctggacagccccagctacctaatgtggagggcgactctaccagacaaggaggaaggggaccacagtgatgtcgtctggcccttcctgtgaagaacctacaaagacaaaatgagcacgtgatggaattaaagaacagggcagtttacaacatgtctctgtggggagggcagccaaggggaaggtgttacagaaaggccagctaccgctaacaggcactg

SEQ ID NO: 19881 - DNA, 1540 bp, Macaca Mulatta
  misc_feature (1)...(1540): n = A,T,C or G
gttttttcccgccgggggnnnnnnnnnnnnnnnnnnnnnnnnnngnnnnnnnnnnnnnnnnnnnnnnnnnnnnnnnnnnnnnnnnnnnnnnnnnnnnnnnnnnnnnnnnnnnnnnnnnnnnnnnnnnnnnnnnnnnnnnnnnnnnnnnnnnnnnnnnnnnnnnnnnnnnnnnnnnnnnnnnnnnnnnnnnnnnnnnnnnnnnnnnnnnnnnnnnnnnnnnnnnnnggnnnnngacatatcttctgcgcaagtgagttggcaggctttagttaaacaatcattttattgcttgagtacacagacaaatttatgcgaccagggcagaggctgtagatgattcatatttccaattgggagggaggactcgcttggtcttataatatcgagccaaacggtgaatccggctctctatcagaatcagacggaatttagcatccttatcctttctgttcctctcaagatgctttcgaacagcaactgctttcttaattaaatggtagagatcttcaggaagatcaggagcaagtcccttagacttaagaattcttaagattttattgcctgtcacaaaacgtacttgtgcaacaccatgtgaatctctcaggatcacaccgatttgtgaaggagtcaggcccttcttggccagtttgtaaatctgctccttcacgtcgtcagatgtcaacttcaaccaagtggggacgctgcgtcgatagggcaaagccgactgggacaggcccttcccgggagcatgcatgcgacccatgatggcggcagggcacccagacagagacgtgaagccctgaataaatagatcaaaatgactgaaaaagccccagagccacatgtggaagaggatgacgatgatgagctggacaacaagctcaattacaagcctccaccgcagaagtccctgaaagagctgcaggaaatggacaaagatgatgagagtctaattaagtacaagaaaacgctgctgggagatggtcctgtggtaacagatccgaaagcccccaatgtcgttgtcacccggctcaccctggtttgtgcgagtgccccaggaccaatcaccatggaccttactggagatctggaagccctcaaaaaagaaaccattgtgctaaaggaaggttccgaatatagagtcaaaattcacttcaaagtgaacagggatattgtgtcaggcctgaaatatgttcagcacacctaccgcactggagtgaaagtggataaagcaacatttatggttggcagctatgggcctcggcccgaagagtatgagttcctcactccagttgaggaggctcccaagggcatgctggcccgaggcacgtaccacaacaagtccttcttcaccgacgatgacaagcacgaccacctcagctgggagtggaacctgtcgattaagaaggagtggacagaatgaatgcatccacccatccctttccctacccttgccatctggaagaaatctctcaaggccgtgtttcagcaacccttgttcctcctccctgtccacagttggttccaaaaaggctgggga

SEQ ID NO: 19882 - DNA, 779 bp, Macaca Mulatta
ccccaagactcacctagagctaaagaaattaattggagaggtgtccagtggctccggggagacgttcagctaccctgactttctcaggatgatgctgggcaagagatctgccattctaaaaatgtgagtgtcaagttccaacctcccctgtacttacctgttttctcctccccgatccctatccttgtccccagtctcaacttttctacacgttgctcatcatccgttcttccatccttagagggacccttccaaggtcctgaccccatccctttccatagacctggtccccagaaactccaacccctgctcttcctcctcccacttccaccctcacatccccatccccttctagcctttcctagcaccctatgatttattcccttgagaggagtgttccctgatccctgtgcctctttccatctcaaccaggatcctgatgtatgaggaaaaagcaagagaaaaggaaaagccaacaggccccccagccaagaaagctatttctgagttgccctgatttgaagggaaaaggggtgatgggattgaaggggcttctaatgacccagatatggaaacaaaagacaaaattgtaagccagagtcaacaaattaaataaattaccctcctcctccagatcaagtcagcttagtttttatttgggtgaattttttcctgggtttgggaaggagagacaggtcttgagggaagggcagcaaggatttggccgtatgaacaatccatcaacaacgctatagtgtgtccactacagcagatggttt

SEQ ID NO: 19883 - DNA, 2745 bp, Macaca Mulatta
  misc_feature (1)...(2745): n = A,T,C or G
gagcgcgcgggcgtgcgagcagcgagagggacaggggcaaagtgagtgacctgcttttgggggtgaccgccggagcgcggcgtgagccctcccccttgggatcccgcagcggaccagtagcgctgacggacagacagacagacaccgcccccagccccagcgcccacctcctccccggccggcggccgacagtggacgcggcggcgagccgcgggcaggggccggagcccgcgcccggaggcggggtggagnnnnnnnnnnnnnnnnnnnnnnnnnnnnnnnnnnnnnnnnnnnnnnnnnnnnnnnnnnnnnnnnnnnnnnnnnnnnnnnnnnnnnnnnnnnnnnnnnnnnnnnnnnnnnnnnnnnnnnnnnnnnnnnnnnnnnnnnnnnnnnnnnnnnnnnnnnnnnnnnnnnnnnnnnnnnnnnnnnnnnnnnnnnnnnnnnnnnnnnnnnnnnnnnnnnnnnnnnnnnnnnnnnnnnnnnnnnnnnnnnnnnnnnnnnnnnnnnnnnnnnnnnnnnnnnnnnnnnnnnnnnnnnnnnnnnnnnnnnnnnnnnnnnnnnnnnnnnnnnnnnnnnnnnnnnnnnnnnnnnnnnnnnnnnnnnnnnnnnnnnnnnnnnnnnnnnnnnnnnnnnnnnnnnnnnnnnnnnnnnnnnnnnnnnnnnnnnnnnnnnnnnnnnnnnnnnnnnnnnnnnnnnnnnnnnnnnnnnnnnnnnnnnnnnnnnnnnnnnnnnnnnnnnnnnnnnnnnnnnnnnnnnnnnnnnnnnnnnnnnnnnnnnnnnnnnnnnnnnnnnnnnnnnnnnnnnnnnnnnnnnnnnnnnnnnnnnnnnnnnnnnnnnnnnnnnnnnnnnnnnnnnnnnnnnnnnnnnnnnnnnnnnnnnnnnnnnnnnnnnnnnnnnnnnnnnnnnnnnnnnnnnnnnnnnnnnnnnnnnnnnnnnnnnnnnnnnnnnnnnnnnnnnnnnnnnnnnnnnnnnnnnnnnnnnnnnnnnnnnnnnnnnnnnnnnnnnnnnnnnnnnnnnnnnnnnnnnnnnnnnnnnnnnnnnnnnnnnnnnnnnnnnnnnnnnnnnnnnnnnnnnnnnnnnnnnnnnnnnnnnnnnnnnnnnnnnnnnnnnnnnnnnnnnnnnnnnnnnnnnnnnnnnnnnnnnnnnnnnnnnnnnnnnnnnnnnnnnnnnnnnnnnnnnnnnnnnnnnnnnnnnnnnnnnnnnnnnnnnnnnnnnnnnnnnnnnnnnnnnnnnnnnnnnnnnnnnnnnnnnnnnnnnnnnnnnnnnnnnnnnnnnnnnnnnnnnnnnnnnnnnnnnnnnnnnnnnnnnnnnnnnnnnnnnnnnnnnnnnnnnnnnnnnnnnnnnnnnnnnnnnnnnnnnnnnnnnnnnnnnnnnnnnnnnnnnnnnnnnnnnnnnnnnnnnnnnnnnnnnnnnnnnnnnnnnnnnnnnnnnnnnnnnnnnnnnnnnnnnnnnnnnnnnnnnnnnnnnnnnnnnnnnnnnnnnnnnnnnnnnnnnnnnnnnnnnnnnnnnnnnnnnnnnnnnnnnnnnnnnnnnnnnnnnnnnnnnnnnnnnnnnnnnnnnnnnnnnnnnnnnnnnnnnnnnnnnnnnnnnnnnnnnnnnnnnnnnnnnnnnnnnnnnnnnnnnnnnnnnnnnnnnnnnnnnnnnnnnnnnnnnnnnnnnnnnnnnnnnnnnnnnnnnnnnnnnnnnnnnnnnnnnnnnnnnnnnnnnnnnnnnnnnnnnnnnnnnnnnnnnnnnnnnnnnnnnnnnnnnnnnnnnnnnnnnnnnnnnnnnnnnnnnnnnnnnnnnnnnnnnnnnnnnnnnnnnnnnnnnnnnnnnnnnnnnnnnnnnnnnnnnnnnnnnnnnnnnnnnnnnnnnnnnnnnnnnnnnnnnnnnnnnnnnnnnnnnnnnnnnnnnnnnnnnnnnnnnnnnnnnnnnnnnnnnnnnnnnnnnnnnnnnnnnnnnnnnnnnnnnnnnnnnnnnnnnnnnnnnnnnnnnnnnnnnnnnnnnnnnnnnnnnnnnnnnnnnnnnnnnnagcttcaggacattgctgtgctttggggattccctccacatgctgcatgcgcatcttgcccccaggggcagcgcctggaagattcaggagcctgggcggccttcacttactctcacctgcttctgagttgcccaggaggccactggcagatggcccggcgaagagaagagacacattgttggaagaagcagctcatgacagctccccttcctgggattcaccctcgtcctcttcctgctccccttcctggggtgtagcctaaaaggacctgatgtcctcacaccattgaaaccactagttctgtccccccaggagacctggttgtgtgtgtgtgagtggttgaccttcctccatcccctggtccttcccttcccttcccgaggcacagagagacagggcaggatccacgtgcccactgtggaggcagagaaaagagaaagtgttttatatacggtacttatttaatatccctttttaattagaaattaaaacagttaatttaattaaagagtagggttttttcagtattcttggttaatatttaatttcaactatttatgagatgtatcttttgctctctctcgctctcttatttgtaccggtttttgtatataaaattcatgtttccaatctctctctccctgatcggtgacagtcactagcttatctagaacagatatttaattttgctaacacttagctctgccctcaccgttcccctggctccccagcac

SEQ ID NO: 19884 - DNA, 322 bp, Macaca Mulatta
ctcagcccccaggtcacccaggaactgacgacgctgatggatgagaccatgaaggagttgaaggcctacaaatcggaactggaggaacagctgagcccggtggcggaggagacgcgggcacggctgtccaaggagctgcaggcggcgcaggcccggctgggtgccgacatggaggacgtgcgcagccgcctggtgcagtaccgcagcgaggtgcaggccatgctgggccagagtaccgaggagctgcgggcgcgcctcgcctcccacctgcgcaagctgcgcaagcggctcctccgcgatgctgatgacctgcagaagcgtc

SEQ ID NO: 19885 - DNA, 639 bp, Macaca Mulatta
tgtgaagtatatgcatactatactgatacccacatcaccgaagcagtagtaaacactccagggtctcttgtgtgaacagagatcgttggacacatgggcatccaggataggatgtcaacattgtggcccaccaagccttactgatgcttgaggcaaaagaaacaatcagtaatactgcctttatttaaaatcttgatatatagttgggtcatggatgtattgctatatttatgattccaatggctgtttcacacctttatgaaaaagtccctctcctccaacactgatctccaacgctgtctctgaagagtcttcaaatgcctgttattctatccctattcctgtaacagggttaactttagctttatattagttaggccttgacagctgctagagcaaatactcctatttttcctaagcgtcttggctattattcacccttggtatttccagaaccaccttgctgaactggattaactctccacattaaaagaagttttaaaactttcaaaaatacaatgaattagcaaagctctgaaaaacgatactggtttaaaaagtctgtaatgaaacacctaggtggctcttatgtcgaagctgaatcactgaagatctcacagtgtaacctacaatagccta

SEQ ID NO: 19886 - DNA, 2209 bp, Macaca Mulatta
  misc_feature (1)...(2209): n = A,T,C or G
ccttcgttaattagttcatcgcatttcaagtgctggatcctttttgtcccttattgcgtgcggtgtcagcttccttgcggaagtggtggccgtgagagaagaagatggcggcccctgtagtggcgccgcctggtgtggtggttagtcgggccaacaagcgcagcggcgcggggccgggaggcagcggtggcgggggagccagaggggcggaggaggaaccgccgccgccnnnnnnnnnnnnnnnnnnnnnnnnnnnnnnnnnnnnnnnnnnnnnnnnnnnnnnnnnnnnnnnnnnnnnnnnnnnnnnnnnnnnnnnnnnnnnnnnnnnnnnnnnnnnnnnnnnnnnnnnnnnnnnnnnnnnnnnnnnnnnnnnnnnnnnnnnnnnnnnnnnnnnnnnnnnnnnnnnnnnnnnnnnnnnnnnnnnnnnnnnnnnnnnnnnnnnnnnnnnnnnnnnnnnnnnnnnnnnnnnnnnnnnnnnnnnnnnnnnnnnnnnnnnnnnnnnnnnnnnnnnnnnnnnnnnnnnnnnnnnnnnnnnnnnnnnnnnnnnnnnnnnnnnnnnnnnnnnnnnnnnnnnnnnnnnnnnnnnnnnnnnnnnnnnnnnnnnnnnnnnnnnnnnnnnnnnnnnnnnnnnnnnnnnnnnnnnnnnnnnnnnnnnnnnnnnnnnnnnnnnnnnnnnnnnnnnnnnnnnnnnnnnnnnnnnnnnnnnnnnnnnnnnnnnnnnnnnnnnnnnnnnnnnnnnnnnnnnnnnnnnnnnnnnnnnnnnnnnnnnnnnnnnnnnnnnnnnnnnnnnnnnnnnnnnnnnnnnnnnnnnnnnnnnnnnnnnnnnnnnnnnnnnnnnnnnnnnnnnnnnnnnnnnnnnnnnnnnnnnnnnnnnnnnnnnnnnnnnnnnnnnnnnnnnnnnnnnnnnnnnnnnnnnnnnnnnnnnnnnnnnnnnnnnnnnnnnnnnnnnnnnnnnnnnnnnnnnnnnnnnnnnnnnnnnnnnnnnnnnnnnnnnnnnnnnnnnnnnnnnnnnnnnnnnnnnnnnnnnnnnnnnnnnnnnnnnnnnnnnnnnnnnnnnnnnnnnnnnnnnnnnnnnnnnnnnnnnnnnnnnnnnnnnnnnnnnnnnnnnnnnnnnnnnnnnnnnnnnnnnnnnnnnnnnnnnnnnnnnnnnnnnnnnnnnnnnnnnnnnnnnnnnnnnnnnnnnnnnnnnnnnnnnnnnnnnnnnnnnnnnnnnnnnnnnnnnnnnnnnnnnnnnnnnnnnnnnnnnnnnnnnnnnnnnnnnnnnnnnnnnnnnnnnnnnnnnnnnnnnnnnnnnnnnnnnnnnnnnnnnnnnnnnnnnnnnnnnnnnnnnnnnnnnnnnnnnnnnnnnnnnnnnnnnnnnnnnnnnnnnnnnnnnnnnnnnnnnnnnnnnnnnnnnnnnnnnnnnnnnnnnnnnnnnnnnnnnnnnnnnnnnnnnnnnnnnnnnnnnnnnnnnnnnnnnnnnnnnnnnnnnnnnnnnnnnnnnnnnnnnnnnnnnnnnnnnnnnnnnnnnnnnnnnnnnnnnnnnnnnnnnnnnnnnnnnnnnnnnnnnnnnnnnnnnnnnnnnnnnnnnnnnnnnnnnnnnnnnnnnnnnnnnnnnnnnnnnnnnnnnnnnnnnnnnnnnnnnnnnnnnnnnnnnnnnnnnnnnnnnnnnnnnnnnnnnnnnnnnnnnnnnnnnnnnnnnnnnnnnnnnnnnnnnnnnnnnnnnnnnnnnnnnnnnnnnnnnnnnnnnnnnnnnnnnnnnnnnnnnnnnnnnnnnnnnnnnnnnnnnnnnnnnnnnnnnnnnnnnnnnnnnnnnnnnnnnnnnnnnnnnnnnnnnnnnnnnnnnnnnnnnnnnnnnnnnnnnnnnnnntatgcctataacataagtctaaaggaggtgatgcaggtactgagccacgtggtcctggagttccccctgcaacagatggattccccgcttgactcaagccgctactgtgccctgctgcttcctnnnnnnnnnnnnnnnnnnnnnnnnnnnnnnnnnnnnnnnnnnnnnnnnnnnnnnnnnnnnnnnnnnnnnnnnnnnnnnnnnnnnnnnnnnnnnnnnnnnnnnnnnnnnnnnnnnnnnnnnnnnnnaggtactgatggctttctaccagctggagatcctggctgaggaaacaattctgagctggttcagccaaagagatacaactgacaagggccggcagttgcgcaagaatcaaca

SEQ ID NO: 19887 - DNA, 1222 bp, Macaca Mulatta
  misc_feature (1)...(1222): n = A,T,C or G
caaaagagctgtgtctgaacatcagctcctccatgacaaggggaagtccatccaagatttacggcgacgattcttccttcaccatctgatcgcagaaatccacacagctgaaatcagagctacctcggaggtgtcccctaactccaagccctctcccaacacaaagaaccactccgtgcgattcgggtctgatgatgagggcagatacctaactcaggaaaccaacaaggtgggagacgtacaaagagcagccnnnnnnnnnnnnnnnnnnnnnnnnnnnnnncaagcccgggaaacgcaaggagcaggaaaagaaaaaacggcgaactcgctctgcctggttagactctggagtgactgggagtgggctagaaggggaccacctgtctgacacctccacaacgtcgctggagctcgattcacggtaacaggcttctctggcccgtagcctcagcggggtgctctcagctgggttttggagcctcccttctgccttggcttgtacaaacctagaattttctccctttctgtatctctatcaattgtgcagcaactgatagagaataagtcagaatattgtctgccttaaagcagtaccccctaccgcacacacccctatcctccagcaccatagagaggctttagagcccattccaccatcacccaacatcaatcctttaccacgctaccaagtaatttcatattcaagcttcagaagctagtgaccatcttcataatttgctggagaagtgtgtttctcccccttactctcacactttggcaaactttcttcagtgtttttcatttcttaggttctttcacttcaagggagaatatagaagcatattatctacaaacactgcagaacagcatcatgtcataaacgattctgagccattcacactttnnnnnnnnnnnnnnnnnnnnnnnnnnnnnnnnnnnnnnnnnnnnnnnnnnnnnnnnnnnnnntgttttaaacacatgctttaaatttgtttaattaaatttaactctggtttctaccagctcataaaaaaataaatggtttctgaatgtttaagtattaacttacaaggatgtaggtttttctcatgtatctctttgtccatcggcaagatgaaataatgtttctagggtaatgccataggaaaactaaaacttcacatttatgtggcttgtttatccttagctcacagatccaggtaataatgacactcctaga

SEQ ID NO: 19888 - DNA, 162 bp, Macaca Mulatta
ggtggggcaggagaccctgtaggaccccgggccgcaggcccctgaggagcaatgacggaatataagctcgtggtggtgggcgccggcggtgtgggcaagagtgcgctgaccatccagctgatccagaaccacttcgtggacgaatacgaccccacgatagag

SEQ ID NO: 19889 - DNA, 88 bp, Macaca Mulatta
gaacagtgcaaccctgaagctcgtcctgttgagaaaaaaataagatcagctcttcctaccaaaaccataaagcctgtggaaaacaaag

SEQ ID NO: 19890 - DNA, 2962 bp, Macaca Mulatta
  misc_feature (1)...(2962): n = A,T,C or G
cattgactgtgctggaatcctgaagctcagaaactccgacattgaacttcggaaaggagagacggacatcgggaggaagaacacacgggtacggctggtgttccgtgttcacgtcccgcagcccagcggccgcacgctgtccctgcaggtggcctccaaccccatcgaatnnnnnnnnnnnnnnnnnnnnnnnnnnnnnnnnnnnnnnnnnnnnnnnnnnnnnnnnnnnnnnnnnnnnnnnnnnnnnnnnnnnnnnnnnnnnnnnnnnnnnnnnnnnnnnnnnnnnnnnnnnnnnnnnnnnnnnnnnnnnnnnnnnnnnnnnnnnnnnnnnnnnnnnnnnnnnnnnnnnnnnnnnnnnnnnnnnnnnnnnnnnnnnnnnnnnnnnnnnnnnnnnnnnnnnnnnnnnnnnnnnnnnnnnnnnnnnnnnnnnnnnnnnnnnnnnnnnnnnnnnnnnnnnnnnnnnnnnnnnnnnnnnnnnnnnnnnnnnnnnnnnnnnnnnnnnnnnnnnnnnnnnnnnnnnnnnnnnnnnnnnnnnnnnnnnnnnnnnnnnnnnnnnnnnnnnnnnnnnnnnnnnnnnnnnnnnnnnnnnnnnnnnnnnnnnnnnnnnnnnnnnnnnnnnnnnnnnnnnnnnnnnnnnnnnnnnnnnnnnnnnnnnnnnnnnnnnnnnnnnnnnnnnnnnnnnnnnnnnnnnnnnnnnnnnnnnnnnnnnnnnnnnnnnnnnnnnnnnnnnnnnnnnnnnnnnnnnnnnnnnnnnnnnnnnnnnnnnnnnnnnnnnnnnnnnnnnnnnnnnnnnnnnnnnnnnnnnnnnnnnnnnnnnnnnnnnnnnnnnnnnnnnnnnnnnnnnnnnnnnnnnnnnnnnnnnnnnnnnnnnnnnnnnnnnnnnnnnnnnnnnnnnnnnnnnnnnnnnnnnnnnnnnnnnnnnnnnnnnnnnnnnnnnnnnnnnnnnnnnnnnnnnnnnnnnnnnnnnnnnnnnnnnnnnnnnnnnnnnnnnnnnnnnnnnnnnnnnnnnnnnnnnnnnnnnnnnnnnnnnnnnnnnnnnnnnnnnnnnnnnnnnnnnnnnnnnnnnnnnnnnnnnnnnnnnnnnnnnnnnnnnnnnnnnnnnnnnnnnnnnnnnnnnnnnnnnnnnnnnnnnnnnnnnnnnnnnnnnnnnnnnnnnnnnnnnnnnnnnnnnnnnnnnnnnnnnnnnnnnnnnnnnngaaataatacgaaatgacctctctgtgcacgagcacccactcctagttgccacattggagcactctgttcagcggggctgtgctgacttcagcagacagacttttgagtaaataaactgaacacacagctggtaccactcggaacctccagttggctgaatgctaggagctgaacattaatacgtgcaacgacgtggctctccaccaagcaggaaagcccggaagaagggaggccactgtgtctcctggaggagaagtcatctcacgacaacagaagggaggtggctgggctgagacaggagacccaccgtgcaggggcctttcatgggaacggcccacatgcagtctgaccccaagcccagcccttctcgcagccctggggttcaatactggaagtgccttatttaactcgacagggcatcgtagaactgagcattggatttgctactgtaggagtatttgtaggagcagaaaccgtaaacacatttcattgtgaggttttaccctttgtatgaacgaagagaatactggcaggctgcgggaggaccctcatacgagtctcctacgtttggaacgttttctgggctgtcatgtacaaccttgctgcctcacccagtgtgttctagaatcttccagtctgtcatctcagctcttctgtaacacgcttccctcgtctgtgcagtcgaaaccgtaggcctgttcatagtcgcatgctagcatctttgtttttaatctggcttcgaacatggcacaagtaagttgaatagcacatcaataggttactggacaaaagcagaagaacctgctacaggatagactgcatttgcatgtgtgtacatatctaggcatctatttatggataaataataaaagagccgacgcgtcctcgcccgggagggcttccctgtcagcaataaccggcatccgttttggaacctgcgtctggggctccaggcgctgctcttgctggcgtccatcgccgcctcggacggctgtgcattttctcgtcgcgtgcagttcgaggaggaccccagaaagccaggagctgtgattcacagtagctgtaggttaccagacggcagcattagaaagggattgtaaataacatgcaacatgagtgtaacatatttgttcagttataagatgattgttnnnnnnnnnnnnnnnnnnnnnnnnnnnnnnnnnnnnnnnnnnnnnnnnnnnnnnnnnnnnnnnnnnnnnnnnnnnnnnnnnnnnnnnnnnnnnnnnnnnnnnnnnnnnnnnnnnnnnnnnnnnnnnnnnnnnnnnnnnnnnnnnnnnnnnnnnnnnnnnnnnnnnnnnnnnnnnnnnnnnnnnnnnnnnnnnnnnnnnnnnnnnnnnnnnnnnnnnnnnnnnnnnnnnnnnnnnnnnnnnnnnnnnnnnnnnnnnnnnnnnnnnnnnnnnnnnnnnnnnnnnnnnnnnnnnnnnnnnnnnnnnnnnnnnnnnnnnnnnnnnnnnnnnnnnnnnnctgatggagaaagggctcctgcaggaggaacggcctgtaacgtgcactccgcacgatcgcgtctcttgtgtctccctcacagaaggaaacaacctgaaggccgtcccgtcagtctgcacacaaccgtgaagacgtgtggccgcgtcctgcctgcagctgggtaccctgcacccggcatcctgggagtcacatgcagcctttctcaggggactgccatcgaaaaggaaacgtttgatgtctgtgtcagctgtagttaggaaatagatccaataaagccgta

SEQ ID NO: 19891 - DNA, 865 bp, Macaca Mulatta
acctcgcccgaagctatggtatcccctacattgagacctcggccaagacgcgacaggtgaggcagctctccagcccacagctagccagggactcgccccgccccgccccagccagggagcagcactcactcacccctctcccttgacacagggcagccgctctggctctggctccagctccgggaccctctgggaccccccgggacccatgtgacccagcggcccctcgcgctgtaagtctcccgggacggcagggcagtgagggaggcaagggccggggtctgggctcacgccctgcagtcctgggccgacacagctccggggaaggcggaggtccttggggagagctgccctgagccaggccggagcggtgaccctggggcccagcccctcttgtccccagagtgtcccacgggcacctgttggttctgagtcttagtgaggctgctggggacactggccatagctcagatgagagctgggtgcagggtggtcaaaccctggccagatctggagttcaggagggtcctgggccaccctgacctttgaggggctgctgtagcgtggtgcaggtggccctgggctcttcgagatgaccagagcccagcttcctgtgtgtgtggtgggcctggggaagtggctggtggagtcgggagccttgggccaggcacggcttgatcgcacagcagggaacccctcacctaggcagggggccacaggcctgtccctcctgatcccattcctccttttccagggagtagaggatgccttttacacattggtgcgtgagattcggcagcataagctgcggaagctgaaccctcctgatgagagtggccccggctgcatgagctgcaagtgtgtg

SEQ ID NO: 19892 - DNA, 785 bp, Macaca Mulatta
tgggctcggtcgggcgcctggcgtcgtcggctctgcgggtgtcagttcgtccgggctacctcacagcccctcactcccggcggctgacagcagcggcggcggcggcgggcggagcctggcgtttcgaggctgagcggcgccggggttaggggcgcggaggaggagcagtagcgggaggaggagccgtgtgccctggcactgagcggccgcggccatggcgtacgcctatctcttcaagtacatcataatcggcgacacaggtgttggtaaatcatgcttattgctacagtttaccagaccagaggtttcagccagtgcatgaccttactattggtgtagagttcggtgctcgaatgataactattgacgggaaacagataaaacttcagatatgggatacggcagggcaagaatcctttcgttccatcacaaggtcgtattacagaggtgcagcaggagctttactagtttacgatattacacggagagatacattcaaccacttgacaacctggttagaagatgcccgccagcattccaattccaacatggtcattatgcttattggaaataaaagtgatttagaatctagaagagaagtaaaacacgaagaaggtgaagcttttgcacgagaacatggacttatcttcatggaaacgtctgctaagactgcttccaatgtagaagaggcatttattaatacagcaaaagaaatttatgacaaaattcaagaaggagtctttgacattaataatgaggcaaatggcattaccattggccctcag

SEQ ID NO: 19893 - DNA, 13017 bp, Macaca Mulatta
  misc_feature (1)...(13017): n = A,T,C or G
gaaggagagaagtagcaggaccagaggggaaggggctgctgcttgcatcagcccacaccatgctgaccccgccgttgctcctgctgctgcccctgctctcagctctggtcgcggccgctatcgaccccctaagacttgcagccccaagcagtttgcctgcagagatcaaatcacctgtatctcaaagggctggcggtgtgatggtgagagggactgcccagacggatctgacgaggcccctgagatttgtnnnnnnnnnnnnnnnnnnnnnnnnnnnnnnnnnnnnnnnnnnnnnnnnnnnnnnnnnnnnnnnnnnnnnnnnnnnnnnnnnnnnnnnnnnnnnnnnnnnnnnnnnnnnnnnnnnnnnnnnnnnnnnnnnnnnnnnnnnnnnnnnnnnnnnnnnnnnnnnnnnnnnnnnnnnnnnnnnnnnnnnnnnnnnnnnnnnnnnnnnnnnnnnnnnnnnnnnnnnnnnnnnnnnnnnnnnnnnnnnnnnnnnnnnnnnnnnnnnnnnnnnnnnnnnnnnnnnnnnnnnnnnnnnnnnnnnnnnnnnnnnnnnnnnnnnnnnnnnnnnnnnnnnnnnnnnnnnnnnnnnnnnnnnnnnnnnnnnnnnnnnnnnnnnnnnnnnnnnnnnnnngagccagtagaccggccccctgtgctgttgatagccaactcccagaacatcttggccacgtacctgagtggggcccaggtgtctaccatcacacctacgagcactcggcagaccacagccatggacttcagctacgccaatgagaccgtatgatgggtgcatgttggggacaatgctgcccagacgcagctcaagtgtgcccgcgtgactggcctaaaggnnnnnnnnnnnnnnnnnnnnnnnnnnnnnnnnnnnnnnnnnnnnnnnnnnnnnnnnnnnnnnnnnnnnnnnnnnnnnnnnnnnnnnnnnnnnnnnnnnnnnnnnnnnnnnnnnnnnnnnnnnnnnnnnnnnnnnnnnnnnnnnnnnnnnnnnnnnnnnnnnnnnnnnnnnnnnnnnnnnnnnnnnnnnnnnnnnnnnnnnnnnnnngaaggtgtttttcactgactatgggcagatcccaaaggtggaacgttgtgacatggatgggcagaaccgcaccaagcttgtcgacagcaagattgagtttcctcacggcatcacgctggacctgggcagccgccttgtctactgggcagatgcctacctggactataaagaagtggcggactatgagggcaaaggccgccagaccatcatcaagggcatcctgnnnnnnnnnnnnnnnnnnnnnnnnnnnnnnnnnnnnnnnnnnnnnnnnnnnnnnnnnnnnnnnnnnnnnnnnnnnnnnnnnnnnnnnnnnnnnnnnnnnnnnnnnnnnnnnnnnnnnnnnnnnnnnnnnnnnnnnnnnnnnnnnnnnnnnnnnnnnnnnnnnnnnnnnnnnnnnnnnnnnnnnnnnnnagtgaggagccatgcctgtgaaaacggccagtacgggaagccgggtggctgctctgccatcaacctgctggccaatagccacagggcgaagaaaaaccgctgccgctccggcttcagcctgggcagtgatgggaagtcatgcaagagccggagcacgagctgttcctcgtgtatggcaagggccggccaggcatcatccggggcatggatatgggggccaaggtcccggacgaacacatgatccccattgaaaacctcatgaacccccgagccctggacttccacgctgagaccggcttcatctactttgctgacaccaccagctacctcattggccgccagaagatcgatggcactgagcgggagaccatcctgaaggacgnnnnnnnnnnnnnnnnnnnnnnnnnnnnnnnnnnnnnnnnnnnnnnnnnnnnnnnnnnnnnnnnnnnnnnnnnnnnnnnnnnnnnnnnnnnnnnnnnnnnnnnnnnnnnnnnnnnnnnnnnnnnnnnnnnnnnnnnnnnnnnnnnnnnnnnnnnnnnnnnnnnnnnnnnnnnnnnnnnnnnnnnnnnnnnnnnnnnnnnnnnnnnnnnnnnnnnnnnnnnnnnnnnnnnnnnnnnnnnnnnnnnnnnnnnnnnnnnnnnnnnnnnnnnnnnnnnnnnnnnnnnnnnnnnnnnnnnnnnnnnnnnnnnnnnnnnnnnnnnnnnnnnnnnnnnnnnnnnnnnnnnnnnnnnnnnnnnnnnnnnnnnnnnnnnnnnnnnnnnnnnnnnnnnnnnnnnnnnnnnnnnnnnnnnnnnnnnnnnnnnnnnnnnnnnnnnnnnnnnnnnnnnnnnnnnnnnnnnnnnnnnnnnnnnnnnnnnnnnnnnnnnnnnnnnnnnnnnnnnnnnnnnnnnnnnnnnnnnnnnnnnnnnnnnnnnnnnnnnnnnnnnnnnnnnnnnnnnnnnnnnnnnnnnnnnnnnnnnnnnnnnnnnnnnnnnnnnnnnnnnnnnnnnnnnnnnnnnnnnnnnnnnnnnnnnnnnnnnnnnnnnnnnnnnnnnnnnnnnnnnnnnnnnnnnnnnnnnnnnnnnnnnnnnnnnnnnnnnnnnnnnnnnnnnnnnnnnnnnnnnnnnnnnnnnnnnnnnnnnnnnnnnnnnnnnnnnnnnnnnnnnnnnnnnnnnnnnnnnnnnnnnnnnnnnnnnnnnnnnnnnnnnnnnnnnnnnnnnnnnnnnnnnnnnnnnnnnnnnnnnnnnnnnnnnnnnnnnnnnnnnnnnnnnnnnnnnnnnnnnnnnnnnnnnnnnnnnnnnnnnnnnnnnnnnnnnnnnnnnnnnnnnnnnnnnnnnnnnnnnnnnnnnnnnnnnnnnnnnnnnnnnnnnnnnnnnnnnnnnnnnnnnnnnnnnnnnnnnnnnnnnnnnnnnnnnnnnnnnnnnnnnnnnnnnnnnnnnnnnnnnnnnnnnnnnnnnnnnnnnnnnnnnnnnnnnnnnnnnnnnnnnnnnnnnnnnnnnnnnnnnnnnnnnnnnnnnnnnnnnnnnnnnnnnnnnnnnnnnnnnnnnnnnnnnnnnnnnnnnnnnnnnnnnnnnnnnnnnnnnnnnnnnnnnnnnnnnacaatgactgtggggacaacagtgacgaagccggctgcagccactcctgctctagcacccagttcaagtgcaacagcgggcgctgcatccccgagcactggacctgcgatggggacaatgactgcggagattatagtgatgagacgcatgccaactgcaccaaccaggccacgaggccccctggtggctgccacactgatgagttccagtgccggctggatggactgtgcatccccctgcggtggcgctgtgatggggacactgactgcatggactccagcgacgagaagagctgtgagggagtgacccacgtctgcgaccccagtgtcaagtttggctgcaaggactcagnnnnnnnnnnnnnnnnnnnnnnnnnnnnnnnnnnnnnnnnnnnnnnnnnnnnnnnnnnnnnnnnnnnnnnnnnnnnnnnnnnnnnnnnnnnnnnnnnnnnnnnnnnnnnnnnnnnnnnnnnnnnnnnnnnnnnnnnnnnnnnnnnnnnnnnnnnnnnnnnnnnnnnnnnnnnnnnnnnnnnnnnnnnnnnnnnnnnnnnnnnnnnnnnnnnnnnnnnnnnnnnnnnnnnnnnnnnnnnnnnnnnnnnnnnnnnnnnnnnnnnnnnnnnnnnnnnnnnnnnnnnnnnnnnnnnnnnnnnnnnnnnnnnnnnnnnnnnnnnnnnnnnnnnnnnnnnnnnnnnnnnnnnnnnnnnnnnnnnnnnnnnnnnnnnnnnnnnnnnnnnnnnnnnnnnnnnnnnnnnnnnnnnnnnnnnnnnnnnnnnnnnnnnnnnnnnnnnnnnnnnnnnnnnnnnnnnnnnnnnnnnnnnnnnnnnnnnnnnnnnnnnnnnnnnnnnnnnnnnnnnnnnnnnnnnnnnnnnnnnnnnnnnnnnnnnnnnnnnnnnnnnnnnnnnnnnnnnnnnnnnnnnnnnnnnnnnnnnnnnnnnnnnnnnnnnnnnnnnnnnnnnnnnnnnnnnnnnnnnnnnnnnnnnnnnnnnnnnnnnnnnnnnnnnnnnnnnnnnnnnnnnnnnnnnnnnnnnnnnnnnnnnnnnnnnnnnnnnnnnnnnnnnnnnnnnnnnnnnnnnnnnnnnnnnnnnnnnnnnnnnnnnnnnnnnnnnnnnnnnnnnnnnnnnnnnnnnnnnnnnnnnnnnnnnnnnnnnnnnnnnnnnnnnnnnnnnnnnnnnnnnnnnnnnnnnnnnnnnnnnnnnnnnnnggatcctgttttggacagactgggatgccagcctgccccgcatcgaggcagcctccatgagtggggccgggcgccgcaccgtgcaccgggagaccggctctgggggctggcccaacgggctcactgtggactacctggagaagcgcatcctttggattgacgccaggtcannnnnnnnnnnnnnnnnnnnnnnnnnnnnnnnnnnnnnnnnnnnnnnttccgggacacgagttcctgtcacacccatttgcagtgacgctgtacgggggggaggtctactggactgactggcgaacaaacacgctggctaaggccaacaagtggaccggccacaatgtcactgtggtacagaggaccaacacccagccctttgacctgcaggtgtaccacccttcccgccagcccatggnnnnnnnnnnnnnnnnnnnnnnnnnnnnnnnnnnnnnnnnnnnnnnnnnnnnnnnnnnnnnnnnnnnnnnnnnnnnnnnnnnnnnnnnnnnnnnnnnnnnnnnnnnnnnnnnnnnnnnnnnnnnnnnnnnnnnnnnnnnnnnnnnnnnnnnnnnnnnnnnnnnnnnnnnnnnnnnnnnnnnnnnnnnnnnnnnnnnnnnnnnnnnnnnnnnnnnnnnnnnnnnnnnnnnnnnnnnnnnnnnnnnnnnnnnnnnnnnnnnnnnnnnnnnnnnnnnnnnnnnnnnnnnnnnnnnnnnnnnnnnnnnnnnnnnnnnnnnnnnnnnnnnnnnnnnnnnnnnnnnnnnnnnnnnnnnnnnnnnnnnnnnnnnnnnnnnnnnnnnnnnnnnnnnnnnnnnnnnnnnnnnnnnnnnnnnnnnnnnnnnnnnnnnnnnnnnnnnnnnnnnnnnnnnnnnnnnnnnnnnnnnnnnnnnnnnnnnnnnnnnnnnnnnnnnnnnnnnnnnnnnnnnnnnnnnnnnnnnnnnnnnnnnnnnnnnnnnnnnnnnnnnnnnnnnnnnnnnnnnnnnnnnnnnnnnnnnnnnnnnnnnnnnnnnnnnnnnnnnnnnnnnnnnnnnnnnnnnnnnnnnnnnnnnnnnnctggctattgacttccctgaaagcaaactctactggatcagctccgggaaccataccatcaaccgctgcaacctggatgggagtgggctggaggtcatcgacgccatgcggagccagctgggcaaggccactgccctggccatcatggnnnnnnnnnnnnnnnnnnnnnnnnnnnnnnnnnnnnnnnnnnnnnnnnnnnnnnnnnnnnnnnnnnnnnnnnnnnnnnnnnnnnnnnnnnnnnnnnnnnnnnnnnnnnnnnnnnnnnnnnnnnnnnnnnnnnnnnnnnnaccataagggcaccaacccccctaaagaaaacaacggtgactgctcccagctctgcctgcccacgtcagagacgacccgctcctgcatgtgcactgccggctatagcctccggagtggccagcaggcctgtgagggnggcgtgggttcctttctcctgtactctgtgcatgaaaggatcaggggaattcctctggatcccaatgacaagtcagatgccctggtcccagtgtccgggaccnnnnnnnnnnnnnnnnnnnnnnnnnnnnnnnnnnnnnnnnnnnnnnnnnnnnnnnnnnnnnnnnnnnnnnnnnnnnnnnnnnnnnnnnnnnnnnnnnnnnnnnnnnnnnnnnnnnnnnnnnnnnnnnnnnnnnnnnnnnnnnnnnnnnnnnnnnnnnnnnnnnnnnnnnnnnnnnnnnnnnnnnnnnnnnnnnnnnnnnnnnnnnnnnnnnnnnnnnnnnnnnnnnnnnnnnnnnnnnnnnnnnnnnnnnnnnnnnnnnnnnnnnnnnnnnnnnnnnnnnnnnnnnnnnnnnnnggtacctgttctggactgagtggggtcagtatccacgtattgagcggtctcggctagatggcacagaacgtgtggtgctggtcaacgtcagcatcagctggcccaatggcatctcagtggactaccagnnnnnnnnnnnnnnnnnnnnnnnnnnnnnnnnnnnnnnnnnnnnnnnnnnnnnnnnnnnnnnnnnnnnnnnnnnnnnnnnnnnnnnnnnnnnnnnnnnnnnnnnnnnnnnnnnnnnnnnnnnnnnnnnnnnnnnnnnnnnnnnnnnnnnnnnnnnnnnnnnnnnnnnnnnnnnnnnnnnnnnnnnnnnnnnnnnnnnnnnnnnnnnnnnnnnnnnnnnnnnnnnnnnnnnnnnnnnnnnnnnnnnnnnnnnnnnnnnnnnnnnnnnnnnnnnnnnnnnnnnnnnnnnnnnnnnnnnnnnnnnnnnnnnnnnnnnnnnnnnnnnnnnnnnnnnnnnnnnnnnnnnnnnnnnnnnnnnnnnnnnnnnnnnnnnnnnnnnnnnnnnnnnnnnnnnnnnnnnnnnnnnnnnnnnnnnnnnnnnnnnnnnnnnnnnnnnnnnnnnnnnnnnnnnnnnnnnnnnnnnnnnnnnnnnnnnnnnnnnnnnnnnnnnnnnnnnnnnnnnnnnnnnnnnnnnnnnnnnnnnnnnnnnnnnnnnnnnnnnnnnnnnnnnnnnnnnnnnnnnnnnnnnnnnnnnnnnnnnnnnnnnnnnnnnnnnnnnnnnnnnnnnnnnnnnnnnnnnnnnnnnnnnnnnnnnnnnnnnnnnnnnnnnnnnnnnnnnnnnnnnnnnnnnnnnnnnnnnnnnnnnnnnnnnnnnnnnnnnnnnnnnnnnnnnnnnnnnnnnnnnnnnnnnnnnnnnnnnnnnnnnnnnnnnnnnnnnnnnnnnnnnnnnnnnnnnnnnnnnnnnnnnnnnnnnnnnnnnnnnnnnnnnnnnnnnnnnnnnnnnnnnnnnnnnnnnnnnnnnnnnnnnnnnnnnnnnnnnnnnnnnnnnnnnnnnnnnnnnnnnnnnnnnnnnnnnnnnnnnnnnnnnnnnnnnnnnnnnnnnnnnnnnnnnnnnnnnnnnnnnnnnnnnnnnnnnnnnnnnnnnnnnnnnnnnnnnnnnnnnnnnnnnnnnnnnnnnnnnnnnnnnnnnnnnnnnnnnnnnnnnnnnnnnnnnnnnnnnnnnnnnnnnnnnnnnnnnnnnnnnnnnnnnnnnnnnnnnnnnnnnnnnnnnnnnnnnnnnnnnnnnnnnnnnnnnnnnnnnnnnnnnnnnnnnnnnnnnnnnnnnnnnnnnnnnnnnnnnnnnnnnnnnnnnnnnnnnnnnnnnnnnnnnnnnnnnnnnnnnnnnnnnnnnnnnnnnnnnnnnnnnnnnnnnnnnnnnnnnnnnntgaactctctccatgccgaatcaacaatggtggctgccaggacctgtgtctgctcactcaccagggccatgtcaactgctcgtgccgagggggccgaatcctcnnnnnnnnnnnnnnnnnnnnnnnnnnnnnnnnnnnnnnnnnnnnnnnnnnnnnnnnnnnnnnnnnnnnnnnnnnnnnnnnnnnnnnnnnnnnnnnnnnnnnnnnnnnnnnnnnnnnnnnnnnnnnnnnnnnnnnnnnnnnnnnnnnnnnnnnnnnnnnnnnnnnnnnnnnnnnnnnnnnnnnnnnnnnnnnnnnnnnnnnnnnnnnnnnnnnnnnnnnnnnnnnnnnnnnnnnnnnnnnnnnnnnnnnnnnnnnnnnnnnnnnnnnnnnnnagacagcctgtggtgtgggcgagttccgctgccgggacgggacctgcatcgggaactccagccgctgcaaccagtttgtggattgtgaggatgcctcagatgagatgaactgcagtnnnnnnnnnnnnnnnnnnnnnnnnnnnnnnnnnnnnnnnnnnnnnnnnnnnnnnnnnnnnnnnnnnnnnnnnnnnnnnnnnnnnnnnnnnnnnnnnnnnnnnnnnnnnnnnnnnnnnnnnnnnnnnnnnnnnnnnnnnnnnnnnnnnnnnnnnnnnnnnnnnnnnnnnnnnnnnnnnnnnnnnnnnnnnnnnnnnnnnnnnnnnnnnnnnnnnnnnnnnnnnnnnnnnnnnnnnnnnnnnnnnnnnnnnnnnnnnnnnnnnnnnnnnnnnnnnnnnnnnnnnnnnnnnnnnnnnnnnnnnnnnnnnnnnnnnnnnnnnnnnnnnnnnnnnnnnnnnnnnnnnnnnnnnnnnnnnnnnnnnnnnnnnnnnnnnnnnnnnnnnnnnnnnnnnnnnnnnnnnnnnnnnnnnnnnnnnnnnnnnnnnnnnnnnnnnnnnnnnnnnnnnnnnnnnnnnnnnnnnnnnnnnnnnnnnnnnnnnnnnnnnnnnnnnnnnnnnnnnnnnnnnnnnnnnnnnnnnnnnnnnnnnnnnnnnnnnnnnnnnnnnnnnnnnnnnnnnnnnnnnnnnnnnnnnnnnnnnnnnnnnnnnnnnnnnnnnnnnnnnnnnnnnnnnnnnnnnnnnnnnnnnnnnnnnnnnnnnnnnnnnnnnnnnnnnnnnnnnnnnnnnnnnnnnnnnnnnnnnnnnnnnnnnnnnnnnnnnnnnnnnnnnnnnnnnnnnnnnnnnnnnnnnnnnnnnnnnnnnnnnnnnnnnnnnnnnnnnnnnnnnnnnnnnnnnnnnnnnnnnnnnnnnnnnnnnnnnnnnnnnnnnnnnnnnnnnnnnnnnnnnnnnnnnnnnnnnnnnnnnnnnnnnnnnnnnnnnnnnnnnnnnnnnnnnnnnnnnnnnnnnnnnnnnnnnnnnnnnnnnnnnnnnnnnnnnnnnnnnnnnnnnnnnnnnnnnnnnnnnnnnnnnnnnnnnnnnnnnnnnnnnnnnnnnnnnnnnnnnnnnnnnnnnnnnnnnnnnnnnnnnnnnnnnnnnnnnnnnnnnnnnnnnnnnnnnnnnnnnnnnnnnnnnnnnnnnnnnnnnnnnnnnnnnnnnnnnnnnnnnnnnnnnnnnnnnnnnnnnnnnnnnnnnnnnnnnnnnnnnnnnnnnnnnnnnnnnnnnnnnnnnnnnnnnnnnnnnnnnnnnnnnnnnnnnnnnnnnnnnnnnnnnnnnnnnnnnnnnnnnnnnnnnnnnnnnnnnnnnnnnnnnnnnnnnnnnnnnnnnnnnnnnnnnnnnnnnnnnnnnnnnnnnnnnnnnnnnnnnnnnnnnnnnnnnnnnnnnnnnnnnnnnnnnnnnnnnnnnnnnnnnnnnnnnnnnnnnnnnnnnnnnnnnnnnnnnnnnnnnnnnnnnnnnnnnnnnnnnnnnnnnnnnnnnnnnnnnnnnnnnnnnnnnnnnnnnnnnnnnnnnnnnnnnnnnnnnnnnnnnnnnnnnnnnnnnnnnnnnnnnnnnnnnnnnnnnnnnnnnnnnnnnnnnnnnnnnnnnnnnnnnnnnnnnnnnnnnnnnnnnnnnnnnnnnnnnnnnnnnnnnnnnnnnnnnnnnnnnnnnnnnnnnnnnnnnnnnnnnnnnnnnnnnnnnnnnnnnnnnnnnnnnnnnnnnnnnnnnnnnnnnnnnnnnnnnnnnnnnnnnnnnnnnnnnnnnnnnnnnnnnnnnnnnnnnnnnnnnnnnnnnnnnnnnnnnnnnnnnnnnnnnnnnnnnnnnnnnnnnnnnnnnnnnnnnnnnnnnnnnnnnnnnnnnnnnnnnnnnnnnnnnnnnnnnnnnnnnnnnnnnnnnnnnnnnnnnnnnnnnnnnnnnnnnnnnnnnnnnnnnnnnnnnnnnnnnnnnnnnnnnnnnnnnnnnnnnnnnnnnnnnnnnnnnnnnnnnnnnnnnnnnnnnnnnnnnnnnnnnnnnnnnnnnnnnnnnnnnnnnnnnnnnnnnnnnnnnnnnnnnnnnnnnnnnnnnnnnnnnnnnnnnnnnnnnnnnnnnnnnnnnnnnnnnnnnnnnnnnnnnnnnnnnnnnnnnnnnnnnnnnnnnnnnnnnnnnnnnnnnnnnnnnnnnnnnnnnnnnnnnnnnnnnnnnnnnnnnnnnnnnnnnnnnnnnnnnnnnnnnnnnnnnnnnnnnnnnnnnnnnnnnnnnnnnnnnnnnnnnnnnnnnnnnnnnnnnnnnnnnnnnnnnnnnnnnnnnnnnnnnnnnnnnnnagttcaagtgccggcccggacagttccagtgctccacaggcatctgcacaaaccctgccttcatctgcgatggagacaatgactgccaggacaacagtgacgaggccaactgtgnnnnnnnnnnnnnnnnnnnnnnnnnnnnnnnnnnnnnnnnnnnnnnnnnnnnnnnnnnnnnnnnnnnnnnnnnnnnnnnnnnnnnnnnnnnnnnnnnnnnnnnnnnnnnnnnnnnnnnnnnnnnnnnnnnnnnnnnnnnnnnnnnnnnnnnnnnnnnnnnnnnnnnnnnnnnnnnnnnnnnnnnnnnnnnnnnnnnnnnnnnnnnnnnnnnnnnnnnnnnnnnnnnnnnnnnnnnnnnnnnnnnnnnnnnnnnnnnnnnnnnnnnnnnnnnnnnnnnnnnnnnnnnnnnnnnnnnnnnnnnnnnnnnnnnnnnnnnnnnnnnnnnnnnnnnnnnnnnnnnnnnnnnnnnnnnnnnnnnnnnnnnnnnnnnnnnnnnnnnnnnnnnnnnnnnnnnnnnnnnnnnnnnnnnnnnnnnnnnnnnnnnnnnnnnnnnnnnnnnnnnnnnnnnnnnnnnnnnnnnnnnnnnnnnnnnnnnnnnnnnnnnnnnnnnnnnnnnnnnnnnnnnnnnnnnnnnnnnnnnnnnnnnnnnnnnnnnnnnnnnnnnnnnnnnnnnnnnnnnnnnnnnnnnnnnnnnnnnnnnnnnnnnnnnnnnnnnnnnnnnnnnnnnnnnnnnnnnnnnnnnnnnnnnnnnnnnnnnnnnnnnnnnnnnnnnnnnnnnnnnnnnnnnnnnnnnnnnnnnnnnnnnnnnnnnnnnnnnnnnnnnnnnnnnnnnnnnnnnnnnnnnnngtgcggacctgccccctggatgagttccagtgcaacaacaccttgtgcaagccgctggcctggaagtgcgatggcgaggatgactgtggggacaactcagatgagaaccccgaggagtgtnnnnnnnnnnnnnnnctcccaaccggcccttccgttgcaagaatgaccgtgtctgtctgtggatcgggcgccaatgcgacggcatggacaactgtggggatgggactgatgaagaggactgtnnnnnnnnnnnnnnnnnnnnnnnnnnnnnnnnnnnnnnnnnnnnnnnnnnnnnnnnnnnnnnnnnnnnnnnnnnnnnnnnnnnnnnnnnnnnnnnnnnnnnnnnnnnnnnnnnnnnnnnnnnnnnnnnnnnnnnnnnnnnnnnnnnnnnnnnnnnnnnnnnnnnnnnnnnnnnnnnnnnnnnnnnnnnnnnnnnnnnnnnnnnnnnnnnnnnnnnnnnnnnnnnnnnnnnnnnnnnnnnnnnnnnnnnnnnnnnnnnnnnnnnnnnnnnnnnnnnnnnnnnnnnnnnnnnnnnnnnnnnnnnnnnnnnnnnnnnnnnnnnnnnnnnnnnnnnnnnnnnnnnnnnnnnnnnnnnnnnnnnnnnnnnnnnnnnnnnnnnnnnnnnnnnnnnnnnnnnnnnnnnnnnnnnnnnnnnnnnnnnnnnnnnnnnnnnnnnnnnnnnnnnnnnnnnnnnnnnnnnnnnnnnnnnnnnnnnnnnnnnnnnnnnnnnnnnnnnnnnnnnnnnnnnnnnnnnnnnnnnnnnnnnnnnnnnnnnnnnnnnnnnnnnnnnnnnnnnnnnnnnnnnnnnnnnnnnnnnnnnnnnnnnnnnnnnnnnnnnnnnnnnnnnnnnnnnnnnnnnnnnnnnnnnnnnnnnnnnnnnnnnnnnnnnnnnnnnnnnnnnnnnnnntttcagggctgaagatgcccagaggcattgccatcgattgggtggccggaaacgtgtactggactgactcgggccgagatgtgattgaggtggcacagatgaagggcgagaaccgcaagacactcatctcgggcatgattgatgagccccacgccattgtggtggacccactgagggggnnnnnnnnnnnnnnnnnnnnnnnnnnnnnnnnnnnnnnnnnnnnnnnnnnnnnnnnnnnnnnnnnnnnnnnnnnnnnnnnnnnnnnnnnnnnnnnnnnnnnnnnnnnnnnnnnnnnnnnnnnnnnnnnnnnnnnnnnnnnnnnnnnnnnnnnnnnnnnnnnnnnnnnnnnnnnnnnnnnnnnnnnnnnnnnnnnnnnnnnnnnnnnnnnnnnnnnnnnnnnnnnnnnnnnnnnnnnnnnnnnnnnnnnnnnnnnnnnnnnnnnnnnnnnnnnnnnnnnnnnnnnnnnnnnnnnnnnnnnnnnnnnnnnnnnnnnnnnnnnnnnnnnnnnnnnnnnnnnnnnnnnnnnnnnnnnnnnnnnnnnnnnnnnnnnnnnnnnnnnnnnnnnnnnnnnnnnnnnnnnnnnnnnnnnnnnnnnnnnnnnnnnnnnnnnnnnnnnnnnnnnnnnnnnnnnnnnnnnnnnnnnnnnnnnnnnnnnnnnnnnnnnnnnnnnnnnnnnnnnnnnnnnnnnnnnnnnnnnnnnnnnnnnnnnnnnnnnnnnncccctcgaccctgctccgagagtgagttctcctgtgccaacggccgctgcatcgcggggcgctggaaatgcgatggagaccacgactgcgccgacggctcagacgagnnnnnnnnnnnnnnnnnnnnnnnnnnnnnnnnnnnnnnnnnnnnnnnnnnnnnnnnnnnnnnnnnnnnnnnnnnnnnnnnnnnnnnnnnnnnnnnnnnnnnnnnnnnnnnnngcagccgctgtctcgaaggggcctgtgtggtcaacaagcagagtggggacgtcacctgcaancctgcagctgcacggacggccgggtggcccccagctgtctgacctgcatcggccactgcagctatggcggctcctgcaccatgaacagcaaaatgatgcctgagtgccagtg

SEQ ID NO: 19894 - DNA, 944 bp, Macaca Mulatta
  misc_feature (1)...(944): n = A,T,C or G
gacacgaagcttctccggtggctcacagacgctgccagcatcgccgccgccaggagaaatgtctggagtaagacccatctccagagacaccttgatggagaccctcctgtatgagcagctcctggaacccctaaccatggaggttcttggtgtcactgaccctgaagaggacctggaccctatggaggacttcaatcctttggagtgtatggaggnnnnnnnnnnntggccctgcggctggcctgcatcggggacgagatggatgtgagcctcagggccccgcgcctggcccagctctctgaggtggccatgcacagnagcctgggtctggctttcatctacgaccagatggacgacatcagggatgttcttagaagtttcatggatggtttcaccacccttagggagaacataatgaggttctggagatccccgaatcccaggtcctgggnnnnnnnnnnnnnnnnnnnnnnnnnnnnnnnnnnnnnnnnnnnnnnnnnnnnnnnnnnnnnnnnnnnnnnnnnnnnnnnnnnnnnnnnnnnnnnnnnnnnnnnnnnnnnnnnnnnnnnnnnnnnnnnnnnnnnnnnnnnnnnnnnnnnnnnnnnnnnnnnnnnnnnnnnnnnnnnnnnnnnnnnnnnnnnnnnnnnntatatttaaactctgagatagtgctggaacactgctgaggttttatactcagnnnnnnnnnnnnnnnnnnnnnnnnnnnnnnnnnnnnnnnnnagatgaattcctatggctccgaacttgttgccggttaactgtggcttgtgcccaggaagagccattcactcctgcccctgcccacacggcagttagcagggggagtgctggccacacccctgtgtgatgtgtgatgcccttggcaaagaatctaccggaatagattccaaggagcaggagtgctcaataaaatgttggtttcc

SEQ ID NO: 19895 - DNA, 803 bp, Macaca Mulatta
  misc_feature (1)...(803): n = A,T,C or G
ggnnnnnnnnnnnnnnnnnnnnnnnnnnnnnnnnnnnnnnnnngggagctgccatcttgcgtccccgcgtgtgtgcgcctaatctcagctggtccacccgagaccccttgagcaccaaccctagtcccccgcgcggccccttattcgctccgacaagatgaaagaaacaatcatgaaccaggaaaaactcgccaaactgcaggcacaagtgcgcattggtgggaaaggaactgctcgcagaaagaagaaggtggttcatagaacagccacagcagatgataaaaaacttcatttctccttaaagaagttaggggtaaacaatatctctggtattgaagaggtgaatatgtttacaaaccaaggaacagtgatccactttaacaaccctaaagttcatgcatctctggcagcgaacactttcacaattacaggcccatgctgagacgaagcagctgaaagaaatgctacccagcatctttaaccagccttggcgcagattgtctgacttgtttaaaggagactggccgaatcttctggcccaaaaaatactgtgggatggaaaaagcacccacttggctactgggaaaggattgaatgatgaatgaaacttctccggaatcttgttggaaaaaatttttattaggaatctgaaggatgagggcaacataaattgcaattcaaacttgggaaattttgagttttacaaattttttcgggacctcgaattattatattaaggacnnnnnnnnnnnnnnnnnngtggggggaaaatctgaaaaaaacctctaaccctaattaatttt

SEQ ID NO: 19896 - DNA, 1313 bp, Macaca Mulatta
  misc_feature (1)...(1313): n = A,T,C or G
gtgggtgtgcctgctgccttggacatgatgctgactggtagaaacattcgtgcagacagggcaaagaaaatgggattggttgaccaattagtggaacccctgggnnnnnnnnnnnnnnnnnnnnnnnnnnnnnnnnnnnnnnnnnnnnnnnnnnnnnnnnnnnnnnnnnnnnnnnnnnnnnnnnnnnnnnnnnnnnnnnnnnnnnnnnnnnnnnnnnnnnnnnnnnnnnnnnnnnnnnnnnnnnnnnnnnnnnnnnnnnnnnnnnnnnnnnnnnnnnnnnnnnnnnnnnnnnnnnnnnnnnnnnnnnnnnnnnnnnnnnnnnnnnnnnnnnnnnnnnnnnnnnnnnnnnnnnnnnnnnnnnnnnnnnnnnnnnnnnnnnnnnnnnnnnnnnnnnnnnnnnnnnnnnnnnnnnnnnnnnnnnnnnnnnnnnnnnnnnnnnnnnnnnnnnnnnnnnnnnnnnnnnnnnnnnnnnnnnnnnnnnnnnnnnnnnnnnnnnnnnnnnnnnnnnnnnnnnnnnnnnnnnnnnnnnnnnnnnnnnnnnnnnnnnnnnnnnnnnnnnnnnnnnnnnnnnnnnnnnnnnnnnnnnnnnnnnnnnnnnnnnnnnnnnnnnnnnnnnnnnnnnnnnnnnnnnnnnnnnnnnnnnnnnnnnnnnnnnnnnnnnnnnnnnnnnnnnnnnnnnnnnnnnnnnnnnnnnnnnnnnnnnnnnnnnnnnnnnnnnnnnnnnnnnnnnnnnnnnnnnnnnnnnnnnnnnnnnnnnnnnnnnnnnnnnnnnnnnnnnnnnnnnnnnnnnnnnnnnnnnnnnnnnnnnnnnnnnnnnnnnnnnnnnnnnnnnnnnnnnnnnnnnnnnnnnnnnnnnnnnnnnnnnnnnnnnnnnnnnnnnnnnnnnnnnnnnnnnnnnnnnnnnnnnnnnnnnnnnnnnnnnnnnnnnnnnnnnnnnnnnnnnnnnnnnnnnnnnnnnnnnnnnnnnnnnnnnnnnnnnnnnnnnnnnnnnnnnnnnnnnnnnnnnnnnnnnnnnnnnnnnnnnnnnnnnnnnnnnnnnnnnnnnnnnnnnnnnnnnnnnnnnnnnnnnnnnnnnnnnnnnnnnnnnnnnnnnnnnnnnnnnnnnnnnnnnnncaggaaggagttgacccgaagaagctggattccctgaccacaagttttggctttcctgtgggtgccgccacactggtggatgaagttggcgtggatgtagcaaaacatgtggcggaagatctgggcaaagtctttggggagcggtttggaggcggaaacccagaactgctgacacagatggtgtccaagggcttcctagg

SEQ ID NO: 19897 - DNA, 515 bp, Macaca Mulatta
attctcacccaggagtctcccaaaacgctaagaggctccctgggacctggggaagaatgctgggcatctccatcagagatctagtagagaaggaactatttgtctcttctgcttggctccttatccttgtgctggcaagaggcagggaactgggaatctgactctcagcactgcccctcaacttgttctggccctgtgagccacacctgtgtcttggctgtcccttcgtggctggaggcctcggtacccatgaggccagtctctctcttgaagcctcagcatccccaggccagggatagtgcctttcctccagggttttcagaagtagctgtataatgaatgtcaccaccgtggttttacatcacctaatttaggaggtagaatgggaggaaaggacattttaagcaacccactcaaaccctggacccccttcaaggctccaccacgtttaagtgggaattgagctgattgtgagggaatcagggcagaggatgggaaggtgctctaggcagagg

SEQ ID NO: 19898 - DNA, 1729 bp, Macaca Mulatta
  misc_feature (1)...(1729): n = A,T,C or G
tcagagggggacagaaatcttcagtgatgccatctgtgattctgaaaccagaaaacatcaaaaagagnnnnnnnnnnnnnnnnnnnnnnnnnnnnnnnnnnnnnnnnnnnnnnnnnnnnnnnnnnnnnnnnnnnnnnnnnnnnnnnnnnnnnnnnnnnnnnnnnnnnnnnggtttctaggtcatagtaaaagtgaccaagaagagaaagagattctgccagcagcagagatttcagaatctagcagtgacgaagaagaggcttccacaccacctgttccaaggagaacacccagaactgtgtccaggaacctgcgatcttccttgaagtcatccttatatacccccacgaagatgccaaagannnnnnnnnnnnnnnnnnnnnnnnnnnnnnnnnnnnnnnnnnnnnnnnnnnnnnnnnnnnnnnnnnnnnnnnnnnnnnnnnnnnnnnnnnnnnnnnnnnnnnnnnnnnnnnnnnnnnnnnnnnnnnnnnnnnnnnnnnnnnnnnnnnnnnnnnnnnnnnnnnnnnnnnnnnnnnnnnnnnnnnnnnnnnnnnnnnnnnnnnnnggtgcatgtacatctctggtgtccttgggacagggaagactgctactgtgcatgaggtgatgcgctgcttgcagcaggcagcccaagccaatgatgttcctccctttcaatacattgaggtcaatggcatgaagctgacggagccccaccaagtctatgnnnnnnnnnnnnnnnnnnnnnnnnnnnnnnnnnnnnnnnnnnnnnnnnnnnnnnnnnnnnnnnnnnnnnnnnnnnnnnnnnnnnnnnnnnnnnnnnnnnnnnnnnnnnnnnnnnnnnnnnnnnnnnnnnnnnnnnnnnnnnnnnnnnnnnnnnnnnnnnnnnnnnnnnnnnnnnnnnnnnnnnnnnnnnnnnnnnnnnnnnnnnnnnnnnnnnnnnnnnnnnnnnnnnnnnnnnnnnnnnnnnnnnnnnnnnnnnnnnnnnnnnnnnnnnnnnnnnnnnnnnnnnnnnnnnnnnnnnnnnnnnnnnnnnnnnnnnnnnnnnnnnnnnnnnnnnnnnnnnnnnnnnnnnnnnnnnnnnnnnnnnnnnnnnnnnnnnnnnnnnnnnnnnnnnnnnnnnnnnnnnnnnnnnnnnnnnnnnnnnnnnnnnnnnnnnnnnnnnnnnnnnnnnnnnnnnnnnnnnnnnnnnnnnnnnnnnnnnnnnnnnnnnnnnnnnnnnnnnnnnnnnnnnnnnnnnnnnnnnnnnnnnnnnnnnnnnnnnnnnnnnnnnnnnnnnnnnnnnnnnnnnnnnnnnnnnnnnnnnnnnnnnnnnnnnnnnnnnnnnnnnnnnnnnnnnnnnnnnnnnnnnnnnnnnnnnnnnnnnnnnnnnnnnnnnnnnnnnnnnnnnnnnnnnnnnnnnnnnnnnnnnnnnnnnnnnnnnnnnnnnnnnnnnnnnnnnnnnnnnnnnnnnnnnnnnnnnnnnnnnnnnnnnnnnnnnnnnnnnnnnnnnnnnnnnnnnnnnnnngctccttcgggtgcggctcaatgtcagccaggacgacgtgctgtatgcactgaaagaagagtaaaggggtttcacaagttaaaagactgtggtgttgctgggttttgttttttgagacagggtcttgctctgtcgcccaggctggagtgcagtggcacaatcatggctcactgcagccttgacttccccggcttaggtgacccccctacctcagcctctcaggtg

SEQ ID NO: 19899 - DNA, 1455 bp, Macaca Mulatta
  misc_feature (1)...(1455): n = A,T,C or G
caggtcctggcaggagaacatctctctgaaagagctccagagccgaggcgtgtgtttgctgaagctccaggtatccagtcagcgcactgggctgtatggacggctgctggtcacctttgagcccaggcgatgcgggtctgtggcagctcttcccagtaacagctttacttctggtnnnnnnnnnnnnnnnnnnnnnnnnnnnnnnnnnnnnnnnnnnnnnnnnnnnnnnnnntgacccgggtcacccagaagtcggtcacggtggcctttgatgagtcccacgatttccagttgagtttggaccgagagaattcctacagactgttaaaacttgccaatgatgtcacttacaggcgactgaaaannnnnnnnnnnnnnnnnnnnnnnnnnnnnnnnnnnnnnnnnnnnnnnnnnnnnnnnnnnnnnnnnnnnnnnnnnnnnnnnnnnnnnnnnnnnnnnnnnnnnnnnnnnnnnnnnnnnnnnnnnnnnnnnnnnnnnnnnnnnnnnnnnnnnnnnnnnnnnnnnnnnnnnnnnnnnnnnnnnnnnnnnnnnnnnnnnnnnnnnnnnnnnnnnnnnnnnnnnnnnnnnnnnnnnnnnnnnnnnnnnnnnnnnnnnnnnnnnnnnnnnnnnnnnnnnnnnnnnnnnnnnnnnnnnnnnnnnnnnnnnnnnnnnnnnnnnnnnnnnnnnnnnnnnnnnnnnnnnnnnnnnnnnnnnnnnnnnnnnnnnnnnnnnnnnnnnnnnnnnnnnnnnnnnnnnnnnnnnnnnnnnnnnnnnnnnnnnnnnnnnnnnnnnnnnnnnnnnnnnnnnnnnnnnnnnnnnnnnnnnnngtgaaaaacaaaaagacccaggataagagagaaaaaagtaattttcgaaatgaagttaagctgttaagaaaagaactgaaggggagggaagaagcagctatactcgagagcctcacttcggcaaacgtggtccttgcaacaaacacaggtnnnnnnnnnnnnnnnnnnnnnnnnnnnnnnnnnnnnnnnnnnnnnnnnnnnnnnnnnnnnnnnnnnnnnnnnnnnnnnnnnnnnnnnnnnnnnnnnnnnnnnnnnnnnnnnnnnnnnnnnnnnnnnnnnnnnnnnnnnnnnnnnnnnnnnnnnnnnnnnnnnnnnnnnnnnnnnnnnnctggctggactgtcgctcagcctgatggagcgcctggccgaggagtatggcgcgagggcggtgcggacgctgacggtgcagtaccgcatgcaccaggccatcatgcgctgggcctctgacaccatgtaccacgggcagctcacggcccacccttctgtggcggggcacctgctgaggnagggacctcccaggcgtggctgccacagaagagacgggtgtgcccctgctcctggtggacaccgccggctgcgggctgtttgagctagaggaagaggacgaacagtcgaaagggaaccctgg

SEQ ID NO: 19900 - DNA, 182 bp, Macaca Mulatta
tttattttgttttagtgagcttaagaaacagcagatacatctttcacggatctaacgggtgttgtcctgaccgagaaaaaaactgggatgagaatggtttggactggagttggaaggggaggacagtactgggggtaggaaaaggaacagagctacactggactcgggcacattcggagcag

SEQ ID NO: 19901 - DNA, 1082 bp, Macaca Mulatta
  misc_feature (1)...(1082): n = A,T,C or G
aggaaatccacgcccgatttagaagaggagccagatcttaccaagnnnnnnnnnnnnnnnnnnnnnnnnnnnnnnnnnnnnnnnnnnnnnnnnnnnnnnnnnnnnnnnnnnnnnnnnnnnnnnnnnnnnnnnnnnnnnnnnnnnnnnnnnnnnnnnnnnnnnnnnnnnnnnnnnnnnnnnnnnnnnnnnnnnnnnnnnnnnnnnnnnnnnnnnnnnnnnnnnnnnnnnnnnnnnnnnnnnnnnnnnnnnnnnnnnnnnnnnnnnnnnnnnnnnnnnnnnnnnnnnnnnnnnnnnnnnnnnnnnnnnnnnnnnnnnnnnnnnnnnnnnnnnnnnnnnnnnnnnnnnnnnnnnnnnnnnnnnnnnnnnnnnnnnnnnnnnnnnnnnnnnnnnnnnnnnnnnnnnnnnnnnnnnnnnnnnnnnnnnnnnnnnnnnnnnnnnnnnnnnnnnnnnnnnnnnnnnnnnnnnnnnnnnnnnnnnnnnnnnnnnnnnnnnnnnnnnnnnnnnnnnnnnnnnnnnnnnnnnnnnnnnnnnnnnnnnnnnnnnnnnnnnnnnnnnnnnnnnnnnnnnnnnnnnnnnnnnnnnnnnnnnnnnnnnnnnnnnnnnnnnnnnnnnnnnnnnnnnnnnnnnnnnnnnnnnnnnnnnnnnnnnnnnnnnnnnnnnnnnnnnnnnnnnnnnnnnnnnnnnnnnnnnnnnnnnnnnnnnnnnnnnnnnnnnnnnnnnnnnnnnnnnnnnnnnnnnnnnnnnnnnnnnnnnnnnnnnnnnnnnnnnnnnnnnnnnnnnnnnnnnnnnnnnnnnnnnnnnnnnnnnnnnnnnnnnnnnnnnnnnnnnnnnnnnnnnnnnnnnnnnnnnnnnnnnnnnnnnnnnnnnnnnnnnnnnnnnnnnnnnnnnnnnnnnnnnnnnnnnnnnnnnnnnnnnnnnnnnnnnnnnnnnnnnnnnnnnnnnnnnnnnnnnnnnnnagactgtacccatccagacgctgcacatcacaacacttacttaacagaacggtccccgacaacatgctgtgtgctggagacactcggagcggcgggccccaggcgaacctgcacgacgcctgccag

SEQ ID NO: 19902 - DNA, 820 bp, Macaca Mulatta
ggaccgttactatcgtgaaaacatgtaccgtttaccccaaccaagtgtactacaggcctgtggatcagtactttaaccagaacaactttgtgcacgactgcgtcaatatcacgattaagcagcacacagtcaccaccaccaccaaaggggagaacttcaccgagaccgacgttaagatgatggagcgcgtggttgagcagatgtgtatcacccagtacgagaaggaatcacaggcctattatcagagaggatcgagcatggtcctcttctcctccccgcctgtgatcctcctgatttctttcctcatcttcctgatagtgggatgaggaaggtcttcctgttttcaccatctttctaatctttttccaggttgagggagggagtatccatctgcagcccttttagtggtggtgtctcattcttgcttctctctttgtccctgataggctaatcaatacccttggcactgatgggcactggaaaatatagagtagacctgagatgctagtcaagccccctttgattgagttcatcatgggccgttgctaatgccgggccagtaaaagtataacagcaaataaccattggttaatctgtacttatttttggacttagtgcagcaggttgaggctaaaacaaatctcagaacagtctcaaatacctttgcctggatacctctggctccttcagcggctagagctcagtatactaatgccctgtcttagcagagatttcatagctatttagagatattttccattttaagaaaacccagcaacatttctgccaagtttgttaggaggccgcatgatactcattc

SEQ ID NO: 19903 - DNA, 245 bp, Macaca Mulatta
tggtggccccatcaaggaggcacctgtggcagagcctggccagggcagaagcaaagcaggaaagtgagtgtctgtctgccctcccgtccagcggtctacacctcccctccagcggtctacacctcccctccagccgtctacacctcccctctagccgtctacgcctcccctccagccgtctacgcctcccctccagtcgtctacgcctcccctccagccgtctacgcctcccctccagccgtctc

SEQ ID NO: 19904 - DNA, 690 bp, Macaca Mulatta
  misc_feature (1)...(690): n = A,T,C or G
cccagagacctcatcagccttggtgtatccaaactccaggttcctgaaatatccgggagcatatgtcagtgatgactactctcaaatgctggcaaatccaggctagtgttctgtctgggctcagacatccacataaccctgtcacccacagaccgccgtctaactcaaagacttcctctggctccccaaggctgcaaagcaaaacagcctgtgttcaactgctggagggtctttttctagggtccctgaatgccgtggtgaggctggtgaggtcctggtccctatctgcctggaggcaaaggcctggacggcttgacttgtggggcaggagtctccgcagcccattcccaagggagactgtgaccgtccatcatgccctctctcaagagccctggccctgctccaactccttcatactccactccaagtgccccacctctccccagcccctctccaggcctgccaagtgggaagaaggggccccatggcagctcctgaccttgggtcctgaagtgacctcactggcctgccannnnnnnnnnnnnctgtactgagcactgaaccacattcagggaaatggcttgttgaacttcgaagcaactgtgaattcatcctggaggggcggtggagatcaagagtgacagatcacagggtgaggaccacctccacacccatcccctctggagaagg

SEQ ID NO: 19905 - DNA, 306 bp, Macaca Mulatta
gatggacttcaacagaaatctttatgatattggggaacaactggacagtgaagagctggcctccctcaagttcctgagcctggactgcatcccacaaaggaagcaagaacccatcaaagatgccttgatgttattccagagactccaggaaaagagaatgttggaggaaaacaatctgtccttcctgaaggagctgctcttccgaattaatagactggatttgctcactacttacctaaacactagaaaggaggagatggaaagggaacttcaggcaccaggcagggctcagatttctgcctacag

SEQ ID NO: 19906 - DNA, 1696 bp, Macaca Mulatta
  misc_feature (1)...(1696): n = A,T,C or G
ggtgtttgctgagaacaaggatgagattgctttagtcctgtttggtacggatggcactgacaatcccctttctggtggggatcagtatcagaacatcacagtgcacagacatctgatgctaccagattttgatttactggaggacattgaaagcaaaatccaaccaggttctcaacaggctgactncctggatgcactaatcgtgagcatggatgtgattnnnnnnnnnnnnnnnnnnnnnnnnnnnnnnnnnnnnnnnnnnnnnnnnnnnnnnnnnnnnnnnnnnnnnnnnnnnnnnnnnnnnnnnnnnnnnnnnnnnnnnnnnnnnnnnnnnnnnnnnnnnnnnnnnnnnnnnnnnnnnnnnnnnnnnnnnnnnnnnnnnnnnnnnnnnnnnnnnnnnnnnnnnnnnnnnnnnnnnnnnnnnnnnnnnnnnnnnnnnnnnnnnnnnnnnnnnnnnnnnnnnnnnnnnnnnnnnnnnnnnnnnnnnnnnnnnnnnnnnnnnnnnnnnnnnnnnnnnnnnnnnnnnnnnnnnnnnnnnnnnnnnnnnnnnnnnnnnnnnnnnnnnnnnnnnnnnnnnnnnnnnnnnnnnnnnnnnnnnnnnnnnnnnnnnnnnnnnnnnnnnnnnnnnnnnnnnnnnnnnnnnnnnnnnnnnnnnnnnnnnnnnnnnnnnnnnnnnnnnnnnnnnnnnnnnnnnnnnnnnnnnnnnnnnnnnnnnnnnnnnnnnnnnnnnnnnnnnnnnnaacagtttattgcttaaatgatgatgatgaaactgaagttttaaaagaggatattattcaaggnnnnnnnnnnnnnnnnnnnnnnnnnnnnnnnnnnnnnnnnnnnnnnnnnnnnnnnnnnnnnnnnnnnnnnnnnnnnnnnnnnnnnnnnnnnnnnnnnnnnnnnnnnnnnnaggttcagagaagattcttcatgggaaatcaagttctaaaggtctttgcagcaagagatgatgagnnnnnnnnnnnnnnnnnnnnnnnnnnnnnnnnnnnnnnnnnnnnnnnnnnnnnnnnnnnnnnnnnnnnnnnnnnnnnnnnnnnnnnnnnnnnnnnnnnnnnnnnnnnnnnnnnnnnnnnnnnnnnnnnnnnnnnngtgtttagtgtatgtgcagctgcctttcatggaagacttgcggcaatacatgttttcatccttgaaaaacagtaagaaatatgctcccacnnnnnnnnnnnnnnnnnnnnnnnnnnnnnnnnnnnnnnnnnnnnnnnnnnnnnnnnnnnnnnnnnnnnnnnnnnnnnnnnnnnnnnnnnnnnnnnnnnnnnnnnnnnnnnnnnnnnnnnnnnnnnnnnnnnnnnnnnnnnnnnnnnnnnnnnnnnnnnnnnnnnnnnnnnnnnnnnnnnnnnnnnnnnnnnnnnnnnnnnnnnnnnnnnnnnnnnnnnnnnnnnnnnnnnnnnnnnnnnnnnnnnnnnnnnnnnnnnnnnnnnnnnnnnnnnnnnnnnnnnnnnnnnnnnnnnnnnnnnnnnnnnnnnnnnnnnnnnnnnnnnnnnnnnnnnnnnnnnnnnnnnnnnnnnnnnnnnnnnnnnnnnnnnnnnnnnnnnnnnnnnnnnnnnnnnnnnnnnnnnnnnnnnnnnnnnnnnnnnnnnnngttggaagtgtgaatcctgctgaaaacttccgtgttctagtgaaacagaagaaggccagctttgaggaa

SEQ ID NO: 19907 - DNA, 619 bp, Macaca Mulatta
aggtcgcatttaaagttctggagcgacggggactccattacttcgttaggtgctttcttcctgagcacgcccctgagagcactgccctcctccctgggcctctacctcagacttaaggatactgaggctcaaggctgaactgctccacatctcccagttggtcagggtcctgctggctgggccccagtgctctgtccaggttctgagcaatcagtgtggatagggggctggagacattgattcttcagggttcaggacagaaggttctggctcgcaatctcaatatttctgggttggatgtggacgtgggaccttcctggtggggtaaacaggagggtgcttgcccttcccagtgttagtggagaggacatagggcttctgttcctctgtcctgagtggggaaggagctctgagggctggccctgcacagaggagggggcaccgaagactcactgacccactgctgtaccttctgcatctcactcactgcccactgcctttttctcttccttgcaggtggttcctgcacgtgcgccggctcctgcaagtgcaaagagtgcaaatgcacctcctgcaagaagagtgagtgcggggccatctccaggaatctgggggctgt

SEQ ID NO: 19908 - DNA, 261 bp, Macaca Mulatta
  misc_feature (1)...(261): n = A,T,C or G
gcctccagaggtgaagcccccaatggagcctatggctactcttacatgcccagcggggcctatgtctatcccccgccagtcgccaatggaatgtacccctgccctcctggctacccctatccaccgcccccgcctgngagttctatccaggaccccccatgatggacggggccatgggatacgtgcagcccccaccaccgccctatcctgggcccatggaacctccggtcagcggccccgatgtcccctccactcctgcag

SEQ ID NO: 19909 - DNA, 187 bp, Macaca Mulatta
gatgtaaatgaccacaaccccacttttatgtctttccccattgcccatgtcaaagaggatgtcacagtgggctccttggtgcaccatataattgctcacgatccagatgaaggaaggaatggaaaaataacatacagcatcctctcaggaaatgaaaatatggcgtttatgctagatgagtcatcag

SEQ ID NO: 19910 - DNA, 266 bp, Macaca Mulatta
aggtctttcctgatcattgacttgtcttggatttgaccctgaacagtaaagataaacagggctgtgagagttcttgggggaatagaagcccactccctattgctgagtgctgcaaagtacctagaaacatccttggccaccgaagactatcctcctcacccatcccctttatttctggtgttcaacaaaaggatattcagtgcacatctggaacaggatcagctgaagcgctgcagggagtcgggaaggtagtaacagctaccagt

SEQ ID NO: 19911 - DNA, 2125 bp, Macaca Mulatta
  misc_feature (1)...(2125): n = A,T,C or G
ctcggaacccaggcctggggggcggtggggccgcgtatggagccccagccccccggagctgccaacattgccaatgccaccgccacgctacacacagnnnnnnnnnnnnnnnnnnnnnnnnnnnnnnnnnnnnnnnnnnnnnnnnnnnnnnnnnnnnnnnnnnnnnnnnnnnnnnnnnnnnnnnnnnnnnnnnnnnnnnnnnntacccttgggatggcgtgagcactcccccagtgatggacccatctgtgacgctgtggcagtttctgctgcagctgctcagacagcaaggcaatggccacatcatctcctggacttcacgggatggtggtgaattcaagctggtggatgcagaggaggtggcccgggctgtgggggctacgcaagaacaagaccaacatgaattacgacaagctcagccgggccttgcggtactactatgacaagaatatcatccgccaaagtgagcggccaaaagttcgtttacaagtttgtgtcccatcctgaggtcgcaaggtgctccactgaagactgcgcgccccagtcagaaggtgtctgttacctccgccccaagccaaatgtggcccctgctgctgtacatgccaccccaggggacactgcctctggaaagccaggcacacccaagggtgcaggaatggcaggcccgggtggtttggcacgcagcagccggaacgagtacatgcgttcgggcctctattccaccttcaccatccagtctctgcagccacagccaccccctcatcctcggcctgctgtggtgctccccaatgcagctcctgcaggagcagcagcgcccccctcggggagcaggagcaccagtccaagccccttggaggcctgcctggaggctgaggaggccggcttgcctctgcaggtcatcctgaccccacccgaggccccaaacctgaaatcgcaggagctgaatatggagccaggtttgggccgggctttgcccgcagaagtgaaagtggaagggcccaagaagagttggaagttgccggggagagagggtttgtgccggaaactaccaaggccgagccagaagtccctccataggagggcgtgccagcccggcnnnnnnnnnnnnnnnnnnnnnnnnnnnnnnnnnnnnnnnnnnnnnnnnnnnnnnnnnnnnnnnnnnnnnnnnnnnnnnnnnnnnnnnnnnnnnnnnnnnnnnnnnnnnnnnnnnnnnnnnnnnnnnnnnnnnnnnnnnnnnnnnnnnnnnnnnnnnnnnnnnnnnnnnnnnnnnnnnnnnnnnnnnnnnnnnnnnnnnnnnnnnnnnnnnnnnnnnnnnnnnnnnnnnnnnnnnnnnnnnnnnnnnnnnnnnnnnnnnnnnnnnnnnnnnnnnnnnnnnnnnnnnnnnnnnnnnnnnnngcgccccgtagtccgtccaagctctccttccagtgtccgtccagtggcagcgcccaggtgcacatcccttccatcagcgtggctggcctctcgacccccgtggtgctctccccagggccccagaagccatgactacnnnnnnnnnnnnnnnnnnttctggggtcactctatccatgctctctccagccagccatctcaaggagaaacatagttcaactgaaagactcacgctctgattgtggtggggtagggatccttgggaagaattactcccaggagtaactgactctcattaactcctccacagaaaacacacagcttccacagcttctctcttttctgtcggtcccccagtggctgcccttacacgtctcctacttcagtggtaggggcggtttgtttattttttgaaggccactgggaggcgactgacctaaccttttaggatggttaggacatctcccccacctccccacttttttccgcaagacaagacaatcagggtctggcctagacctttctttctttattcctcaccctgcccttggggagatgagggagccctgtctgcattttcggatgtgagtagaatagttagtttatttcgttctattattcctggccatactcaggggtccaggaagaatttgtaccatttaatgggttggaagtcttggccaaggaagaatcgccccctggaatagaagtttcgacctccccagcctttctc

SEQ ID NO: 19912 - DNA, 2534 bp, Macaca Mulatta
  misc_feature (1)...(2534): n = A,T,C or G
ggcaaggtcttagacctattcctgaagcagaaattggattggcggtgattttcatgactacaaagaattactgtgatcctcggggccatcccagtacaggnnnnnnnnnnnnnnnnnnnnnnnnnnnnnnnnnnnnnnnnnnnnnnnnnnnnnnnnnnnnnnnnnnnnnnnnnnnnnnnnnnnnnnnnnnnnnnnnnnnnnnnnnnnnnnnnnnnnnnnnnnnnnnnnnnnnnnnnnnnnnnnnnnnnnnnnnnnnnnnnnnnnnnnnnnnnnnnnnnnnnnnnnnnnnnnnnnnnnnnnnnnnnnnnnnnnnnnnnnnnnnnnnnnnnnnnnnnnnnnnnnnnnnnnnnnnnnnnnnnnnnnnnnnnnnnnnnnnnnnnnnnnnnnnnnnnnnnnnnnnnnnnnnnnnnnnnnnnnnnnnnnnnnnnnnnnnnnnnnnnnnnnnnnnnnnnnnnnnnnnnnnnnnnnnnnnnnnnnnnnnnnnnnnnnnnnnnnnnnnnnnnnnnnnnnnnnnnnnnnnnnnnnnnnnnnnnnnnnnnnnnnnnnnnnnnnnnnnnnnnnnnnnnnnnnnnnnnnnnnnnnnnnnnnnnnnnnnnnnnnnnnnnnnnnnnnnnnnnnnnnnnnnnnnnnnnnnnnnnnnnnnnnnnnnnnnnnnnnnnnnnnnnnnnnnnnnnnnnnnnnnnnnnnnnnnnnnnnnnnnnnnnnnnnnnnnnnnnnnnnnnnnnnnnnnnnnnnnnnnnnnnnnnnnnnnnnnnnnnnnnnnnnnnnnnnnnnnnnnnnnnnnnnnnnnnnnnnnnnnnnnnnnnnnnnnnnnnnnnnnnnnnnnnnnnnnnnnnnnnnnnnnnnnnnnnnnnnnnnnnnnnnnnnnnnnnnnnnnnnnnnnnnnnnnnnnnnnnnnnnnnnnnnnnnnnnnnnnnnnnnnnnnnnnnnnnnnnnnnnnnnnnnnnnnnnnnnnnnnnnnnnnnnnnnnnnnnnnnnnnnnnnnnnnnnnnnnnnnnnnnnnnnnnnnnnnnnnnnnnacaatgacaaacttcaggatgatagtgagatgcttccaagaaagttgttattgactgaatttagatcactggtgattgaaaactctacttccagaaatccatctggcataaatgattatggtcaacttaacaatttcaagaaattcaaaaaggtnnnnnnnnnnnnnnnnnnnnnnnnnnnnnnnnnnnnnnnnnnnnnnnnnnnnnnnnnnnnnnnnnnnnnnnnnnnnnnnnnnnnnnnnnnnnnnnnnnnnnnnnnnnnnnnnnnnnnnnnnnnnnnnnnnnnnnnnnnnnnnnnnnnnnnnnnnnnnnnnnnnnnnnnnnnnnnnnnnnnnnnnnnnnnnnnnnnnnnnnnnnnnnnnnnnnnnnnnnnnnnnnnnnnnnnnnnnnnnnnnnnnnnnnnnnnnnnnnnnnnnnnnnnnnnnnnnnnnnnnnnnnnnnnnnnnnnnnnnnnnnnnnnnnnnnnnnnnnnnnnnnnnnnnnnnnnnnnnnnnnnnnnnnnnnnnnnnnnnnnnnnnnnnnnnnnnnnnnnnnnnnnnnnnnnnnnnnnnnnnnnnnnnnnnnnnnnnnnnnnnnnnnnnnnnnnnnnnnnnnnnnnnnnnnnnnnnnnnnnnnnnnnnnnnnnnnnnnnnnnnnnnnnnnnnnnnnnnnnnnnnnnnnnnnnnnnnnnnnnnnnnnnnnnnnnnnnnnnnnnnnnnnnnnnnnnnnnnnnnnnnnnnnnnnnnnnnnnnnnnnnnnnnnnnnnnnnnnnnnnnnnnnnnnnnnnnnnnnnnnnnnnnnnnnnnnnnnnnnnnnnnnnnnnnnnnnnnnnnnnnnnnnnnnnnnnnnnnnnnnnnnnnnnnnnnnnnnnnnnnnnnnnnnnnnnnnnnnnnnnnnnnnnnnnnnnnnnnnnnnnnnnnnnnnnnnnnnnnnnnnnnnnnnnnnnnnnnnnnnnnnnnnnnnnnnnnnnnnnnnnnnnnnnnnnnnnnnnnnnnnnnnnnnnnnnnnnnnnnnnnnnnnnnnnnnnnnnnnnnnnnnnnnnnnnnnnnnnnnnnnnnnnnnnnnnnnnnnnnnnnnnnnnnnnnnnnnnnnnnnnnnnnnnnnnnnnnnnnnnnnnnnnnnnnnnnnnnnnnnnnnnnnnnnnnnnnnnnnnnnnnnnnnnnnnnnnnnnnnnnnnnnnnnnnnnnnnnnnnnnnnnnnnnnnnnnnnnnnnnnnnnnnnnnnnnnnnnnnnnnnnnnnnnnnnnnnnnnnnnnnnnnnnnnnnnnnnnnnnnnnnnnnnnnnnnnnnnnnnnnnnnnnnnnnnnnnnnnnnnnnnnnnnnnnnnnnnnnnnnnnnnnnnnnnnnnnnnnnnnnnnnnnnnnnnnnnnnnnnnnnnnnnnnnnnnnnnnnnnnnnnnnnnnnnnnnntctacatcactctcaccttccaaatcttgtggaagtgcatctacttgccagaacccaattaaacttacttccaagttctggctacttgcaggtggaactccagctgcaagggagttagggaaatgaag

SEQ ID NO: 19913 - DNA, 2083 bp, Macaca Mulatta
gccgagccgagccgagccgagaggcggctctgtggccgcaggcgcaggcccgggcgacagccgatacgtgaggcgcgccggcccgcggcagctccgggactcaacatgcgctgctcgcagggaggcgtctggctggctctggccgcgtcgctcctgcatgtgtccctgcaaggcgagttccagaggaagctttacaaggagctggtcaagaactacaaccccttggagaggcccgtggccaatgactcgcaaccgctcaccgtctacttctccctgagcctcctgcagatcatggacgtggatgagaagaaccaagttttaaccaccaacatttggctgcaaatgtcttggacagatcactatttacagtggaatgtgtcagaatatccaggggtgaagactgttcgtttcccagatggccagatttggaaaccagacattcttctctataacagtgcggatgagcgctttgacgccacattccacaccaacgtgttggtgaattcttctgggcattgccagtacctgcctccaggcatattcaagagttcctgctacatcgatgtgcgctggtttccctttgatgtgcagcattgcaaactgaagtttggatcctggtcttatggaggctggtccttggatctgcagatgcaggaggcagatatcagtggctatatccccagtggagaatgggacctagtgggaattcccggcaagaggagtgaaaagttctatgagtgctgcaaagagccctaccccgatgtcaccttcacagtgaccatgcgccgcaggaccctctactacggcctcaacctgctgatcccctgtgtgctcatctctgcccttgccctgctggtgttcctgcttcctgcagattccggggagaagatttccctggggataacagtcttactctctctcactgtcttcatgctgctcgtggctgagatcatgcccgcaacatctgattcagtaccattgatagcccagtacttcgccagcaccatgatcatcgtgggcctctccgtggtggtgacggtgatcgtgctgcagtaccaccaccacgaccccgacgggggcaagatgcccaagtggaccagagtcatccttctgaactggtgcgcgtggttcctgcgcatgaagaggccgggagaggataaggtgcgcccggcctgccagcacaagcagcgccgctgcagcctggccagcgtggagatgagcgccgtggcgcggccgcccgccagcaacgggaacctgctgtacatcggcttccgcggcctggacggcatgcattgcgccccgacccccgactccggggtggtgtcgcggccgcatggcctgctcccccacgcacgacgagcacctcctgcacggtgggcagccccccgagggggacccggacctggccaagatcctggaggaggtccgctacatcgccaaccgctttcgctgccaggacgaaagcgaggcggtctgcagcgagtggaagttcgccgcctgcgtggtggaccgcctgtgcctcatggccttctcggtcttcaccatcatctgcaccatcggcatcctgatgtcggctcccaacttcgtggaggccgtgtccaaagactttgcgtaaccacgcctggttctgtacatgtggaaaactcacagatgggcaaggcctttggcttggtgagattttggggtgctaatccaggacaacattaaacgccacaactccgatgttcctttctggctgtcagtcgtgttgctcacggtttcctcattactttaggtagtaggatctcagcactcagtttaatacgctcaggtgggctgatgatccccttggcacatccgcactgtcggtcagcagggccactgagaagtcattttgcccattggcccactgcctggaaagcccttcagagagctcccagtggctcctcaccccgggacagttggttttgcatgtctgcatgccacttgccatgaaggcctacctgaaaattcaacatttgctttttgcttgtgtacaaacctagattgaagctaaaataaaccagactcactaaatccattccaataatttactggtggaagg

SEQ ID NO: 19914 - DNA, 360 bp, Macaca Mulatta
  misc_feature (1)...(360): n = A,T,C or G
ccaggaccgagtggcacacattcttctggctgtggggcccgatctttatctcttggaccatgcagcctgctctgcagtgngacgccccctggcctggccccaggagtaagcagcttcctacagatggctgtctccttcacctaccgacacctggcactcttcacagacacaggctacatctggatgggaacagcatcactcaaggnaggagaagctatgtgagttcaactgcaacatccgggcacctccaaagcagatggtctggtgnnnggtgcagccgtcctcgtagcaaggagagagccgtggtggtggcctgggagaggcggctgatggtggtgggcgatgcacccgagagcatcc

SEQ ID NO: 19915 - DNA, 1336 bp, Macaca Mulatta
  misc_feature (1)...(1336): n = A,T,C or G
aaagatctagaagagctttgcgaaaagaggacctattttttgtgcatagaaagaggtacccctttttaaataaggtggaaaggcgggtttgataacatatatatattaatgaggcgatgtgtttttatcgaacagacatattgggtgaggaaagttttttgtttgatttagttgcccacacaatctgtcaaaaagaaaatgatcggttgttatattgaggttcttacaacgcatatgtagggacataaaggttttagtgtttttaactggtattaggcactatcgccccatatctttagccacctttcggtcccatagaataccaccctgatttccatgggttcccaagggttcttttcggaaaacgtgggggctctttccgataaaaggaaaatatatagtgtggagctgcgcaaaaaaaaaaataggggagaaataactcttagaataaagagtgtccaaaaaccctggctcttgtattcgggtggtcaccaaaatattgggaggagggggatttaaggattcccaattttataggaaattttcccttccaggagaaaaaaggggtattttttctttgatctagggaggtttagccttaaaagactacggattaattgagcttttttatggatggacagagacaatcgcattttatggatggtggacgtgtgaaatcccacaggtatgtgcatgactttcagagaagttattttgcggggaggttaacaagaagtggtgccatttacaagcagtgttttactgtttttgcttgccccgctgccacaagtcagctaagtcataacaaaagcttcaaactgatgctaaggaaggccatgccctttggaaacaagaaattcccaatctgttttatgttatgttcctgacatcttttcctgcattcactaccaggaaataaggatgaaattaaatatcaaaattctaatcgatgatatcagtgcaatgttcaggaaatattcattcagaaagatctgagaaaccattcaaaatggtgggacatcagaacctacttacactgctgtgggggaaatgcagatttaaaannnnnnnnnnnnnnnnnnnnntaaagcagaagtttctttttgtatttggtaaacgtaggttccataaagccagatgctatacagtgcaaagactaatgtggcaatagttctaaggacaagttgctgctcaggttttatgtatagataacagaaagcacagtttactaacatggtaaaccaacagagttcaagtcagattaataccctaaggattagattttatttgttatgcttgaaatttgctacacaaggacttattctaacctatattt

SEQ ID NO: 19916 - DNA, 883 bp, Macaca Mulatta
  misc_feature (1)...(883): n = A,T,C or G
gggggtttctgttcttcttaggatggttgccaacctacagtctcattgatcagcagccaatatgnnnnnnnnnnnnnnnnnnnnttcttagaaacatcctctagagtaatagaaacaaatttttatgagcataaccctatataaagacaaaatgaatatctgcccttaccatatataccattaggccttgccattgctttaatgtacactcatagttgaaattagtgcaggattaactcagatgtactagattttcattgttcattgatatgctcagtatgctgccagataagatgaatttaattatattcaaccaaagcaatatactcttacatgatttctaggccccatgacccagtatctagagacattaattctaaccagttgtttgcttttaaatgagcgatttcattttgggaaacaggtttcaaatgaatatatatacatgggtaaaattactctgtgctagtgtagtcttattagagaatgtttatggtcccacttgtatatgaaaatgtggttagaaatgttatttggataatgtatatataagaagttagagtatgtaaagtataacttcagccacatttttagaacactgttttacatttttgcaaaaccttcttgtaggaaaagagagctctctacatgaagaataacttgtttttatatttcagatttttattttaaaagccggtgtctgttaaaccaggaaaaaacaccaaaggaacctccacgattcctggggttcaatcattctgggaattcgttactcacgtttttcgaaggtacctattttgggtgccataaactaattggttaacttattcagggaaaccaacaaattgcctggtttaataaaaggaacttttgaaccaagggt

SEQ ID NO: 19917 - DNA, 101 bp, Macaca Mulatta
  misc_feature (1)...(101): n = A,T,C or G
naggaacatcagaaagcctgggctttgaacctgaacggttttgatgtagaggaagccaagatccttaggctcagtggaaaaccacaaaatgctccagaggg

SEQ ID NO: 19918 - DNA, 589 bp, Macaca Mulatta
ggcctccttccagaagagatcctgacccccacactctaccatggctactatgtccggcctcgggccgccccagctggggagggcagcagggcaggggcctccgagcttaggctcagtgagggcaagttccaggcatttctggatgtgagccactttaccccagacgaggtgactgtgaggactgtggataacctgctggaggtgtctgcccggcacccccagcgcctggaccgccacggcttcgtgtcccgagagttctgccgcacctatgtcctgcctgctgatgtcgacccctggcgggtccgagctgctctctcccatgatggcatcttaaacctggaagcgcctcggggtggccgacatttggacacagaggtcaatgaggtctacatctccctgctccctgcgcctcctgatccagaggaagaggaggaggcagccatagttgagccctgattgccacagacccagcacccagcaaatccctctctacctcccatggtgatatgggcagctgcccaccactccagaggtagcagcgtccttgggggaaaggaaaggtgcatggtctacaatgtatggtttggtc

SEQ ID NO: 19919 - DNA, 3906 bp, Macaca Mulatta
  misc_feature (1)...(3906): n = A,T,C or G
ggcccggagcccagccagcaggagcagttggtcttcggcagcggggacgctgtggagctgagctgtcccccgcccgggggtggtcccatggggcccactgtctgggtcaaggatggcgcagggctggtgccctcggagcgtgtcctggtggggccccagcggctgcaggtgctgaatgcctcccacgaggactctggggcctacagctgccggcagcggctcacacagctcgtactgtgccacttcagtgtgcgggtgacannnnnnnnnnnnnnnnnnnnnnnnnnnnnnnnnnnnnnnnnnnnnnnnnnnnnnnnnnnnnnnnnnnnnnnnnnnnnnnnnnnnnnnnnnnnnnnnnnnnnnnnnnnnnnnnnnnnnnnnnnnnnnnnnnnnnnnnnnnnnnnnnnnnnnnnnnnnnnnnnnnnnnnnnnnnnnnnnnnnnnnnnnnnnnnnnnnnnnnnnnnnnnnnnnnnnnnnnnnnnnnnnnnnnnnnnnnnnnnnnnnnnnnnnnnnnnnnnnnnnnnnnnnnnnnnnnnnnnnnnnnnnnnnnnnnnnnnnnnnnnnnnnnnnnnnnnnnnnnnnnnnnnnnnnnnnnnnnnnnnnnnnnnnnnnnnnnnnnngagcgctccccgcaccggcccatcctgcaggcggggctgccggccaaccagacggcggtgctgggcagcgatgtggagtttcactgcaaggtgtacagtgatgcgcagccccacatccagtggctcaagcacgtggaggtgaatggcagcaaggtgggccccgacggcacaccctacgtcaccgtgctcaannnnnnnnnnnnnnnnnnnnnnnnnnnnnnnnnnnnnnnnnnnnnnnnnnnnnnnnnnnnnnnnnnnnnnnnnnnnnnnnnnnnnnnnnnnnnnnnnnnnnnnnnnnnnnnnnnnnnnnnnnnnnnnnnnnnnnnnnnnnnnnnnnnnnnnnnnnnnnnnnnnnnnnnnnnnnnnnnnnnnnnnnnnnnnnnnnnnnnnnnnnnnnnnnnnnnnnnnnnnnnnnnnnnnnnnnnnnnnnnnnnnnnnnnnnnnnnnnnnnnnnnnnnnnnnnnnnnnnnnnnnnnnnnnnnnnnnnnnnnnnnnnnnnnnnnnnnnnnnnnnnnnnnnnnnnnnnnnnnnnnnnnnnnnnnnnnnnnnnnnnnnnnnnnnnnnnnnnnnnnnnnnnnnnnnnnnnnnnnnnnnnnnnnnnnnnnnnnnnnnnnnnnnnnnnnnnnnnnnnnnnnnnnnnnnnnnnnnnnnnnnnnnnnnnnnnnnnnnnnnnnnnnnnnnnnnnnnnnnnnnnnnnnnnnnnnnnnnnnnnnnnnnnnnnnnnnnnnnnnnnnnnnnnnnnnnnnnnnnnnnnnnnnnnnnnnnnnnnnnnnnnnnnnnnnnnnnnnnnnnnnnnnnnnnnnnnnnnnnnnnnnnnnnnnnnnnnnnnnnnnnnnnnnnnnnnnnnnnnnnnnnnnnnnnnnnnnnnnnnnnnnnnnnnnnnnnnnnnnnnnnnnnnnnnnnnnnnnnnnnnnnnnnnnnnnnnnnnnnnnnnnnnnnnnnnnnnnnnnnnnnnnnnnnnnnnnnnnnnnnnnnnnnnnnnnnnnnnnnnnnnnnnnnnnnnnnnnnnnnnnnnnnnnnnnnnnnnnnnnnnnnnnnnnnnnnnnnnnnnnnnnnnnnnnnnnnnnnnnnnnnnnnnnnnnnnnnnnnnnnnnnnnnnnnnnnnnnnnnnnnnnnnnnnnnnnnnnnnnnnnnnnnnnnnnnnnnnnnnnnnnnnnnnnnnnnnnnnnnnnnnnnnnnnnnnnnnnnnnnnnnnnnnnnnnnnnnnnnnnnnnnnnnnnnnnnnnnnnnnnnnnnnnnnnnnnnnnnnnnnnnnnnnnnnnnnnnnnnnnnnnnnnnnnnnnnnnnnnnnnnnnnnnnnnnnnnnnnnnnnnnnnnnnnnnnnnnnnnnnnnnnnnnnnnnnnnnnnnnnnnnnnnnnnnnnnnnnnnnnnnnnnnnnnnnnnnnnnnnnnnnnnnnnnnnnnnnnnnnnnnnnnnnnnnnnnnnnnnnnnnnnnnnnnnnnnnnnnnnnnnnnnnnnnnnnnnnnnnnnnnnnnnnnnnnnnnnnnnnnnnnnnnnnnnnnnnnnnnnnnnnnnnnnnnnnnnnnnnnnnnnnnnnnnnnnnnnnnnnnnnnnnnnnnnnnnnnnnnnnnnnnnnnnnnnnnnnnnnnnnnnnnnnnnnnnnnnnnnnnnnnnnnnnnnnnnnnnnnnnnnnnnnnnnnnnnnnnnnnnnnnnnnnnnnnnnnnnnnnnnnnnnnnnnnnnnnnnnnnnnnnnnnnnnnnnnnnnngggtccctagcagcctaccctgctgcccctttacagccactccccggcatgagactcagtgcagatggacatacagctacacaaagcttcagtctgtgtgnnnnnnnnnnnnnnnnnnnnnnnnnnnnnnnnnnnnnnnnnnnnnnnnnnnnnnnnnnnnnnnncctccaggtgcagaggtacaccctgggtgtccctgctgctgtgcaacggcctcctgatgtgctgcagcaccaaggggcctttgttctggggggacccagtgcagaatgtaagtgggcccacccggtgggactctcgtggggcagggagctgggcccaacatggccccagcctctgcctttgcatcacgggacatcacagggtgggcctcaacccctcccacacccaaagctgagcctgcagggaagccccacgtgtcgagcaccttgttcctgggggtgttagtggcactgccccccgacctccaggctttcccagttcccaccctgcccctcagagactgaaattacgggtacctgaagatgggagcctctaccttttatccaaaaggtttattccagaaactagtgtacatttctataaatagatgctgtgnnnnnnnnnnnnnnnnnnnnnnnnnnnnnnnnnnnnngaagaggaaaagactggtacaacggaggcctgcgaccctgggggcacaggaggcaggcnnnnnnnnnnnnnnnnnnnnnnnnnnnnngaggcaggccccaggggtctcacccatgcaagcagaggagcagggccttttctggcactgcagttttgttttaaaactggacctgtatatttgtaaagctatttatgggcccccggcaccctcgttcccacagcccaacacttctagcatttagccagccacatggcggagagttttaatttttnnnnnnnnnnnnnnnnnnnnnnnnnnnnnnnnnnnnnnnnnnnnnnnnnnnnnnnnnnnnnnnnnnnnnnnnnnnnnnnnnnnnnnnnnnnnnnnnnnnnnnnnnnnnnnnnnnnnnnnnnnnnnnnnnnnnnnnnnnnnnnnnnnnnnnnnnnnnnnnnnnnnnnnnnnnnnnnnnnnnnnnnnnnnnnnnnnnnnnnnnnnnnnnnnnnnnnnnnnnnnnnnnnnnnnnnnnnnnnnnnnnnnnnnnnnnnnnnnnnnnnnnnnnnnnnnnnnnnnnnnnnnnnnnnnnnnnnnnnnnnnnnnnnnnnnnnnnnnnnnnnnnnnnnnnnnnnnnnnnnnnnnnnnnnnnnnnnnnnnnnnnnnnnnnnnnnnnnnnnnnnnnnnnnnnnnnnnnnnnnnnnnnnnnnnnnnnnnnnnnnnnnnnnnnnnnnnnnnnnnnnnnnnnnnnnnnnnnnnnnnnnnnnnnnnnnnnnnnnnnnnnnnnnnnnnnnnnnnnnnnnnnnnnnnnnnnnnnnnnnnnnnnnnnnnnnnnnnnnnnnnnnnnnnnnnnnnnnnnnnnnnnnnnnnnncccagtgcatggtggccagaggtgtcacccaaacctgcaggtgcgattttgttaacccagcgacgaactttgcaaaaaataaagacacccggttcctaacct

SEQ ID NO: 19920 - DNA, 1448 bp, Macaca Mulatta
  misc_feature (1)...(1448): n = A,T,C or G
aatgacagtctcattccttcgtgggctgcaagtatacatcagtgcttcccacttacctaatatgtctgttggtggccccgtatggaaaccctgtgtgtctgttagcatgatagtttacaaatggttttttcagtcctatccaaatttattgaaccaacaaaaataattagttctgccctgagataagcagattaagtttgttcattgtctgctttattctctccatgtggcaacatcctgtcagcctctttcagagtgtgcaaacattttaccattctaaatggtgactctctgtccttggacccatttattattcatagatgaggaaaacctttctgcatgggcctctgtggaccacagcattcctgccctttcctgccctcctgccccagccccacttctgaaaatatcagctgctgatccagccactggatattttatatcctcccttttccctaagcacgatgtcagaccaaattgcttgtttctttttcttggaatactttaattcggatcctttgggtttggagaaagggaatgtgaaagctgtcattacagacaacaggtttcagtgatgaggaggacaacactgcctttcaaacattttactgatctgttagattttaagaactcttgaattgtgtggtatctaataaaagggaaggtaagatggataatcactttctgatttgggttctgaattggagactcggtttttatgagatatatcttttatgccatgtatagatcctcccctgttatttttgggttattttacttcttatacattccttctttgactcctcttctgcctgcttttggggataggtttttttgtttgtttatttgcttcctctgttttgttttaagcatcattttcttaggtgggggaggcagaggtatgagggaaagagagtctgagaattaaagattttagtataagcaattggctgtgttgctgaaatccattgtatcatcttattgaatttgacaatttgtaattcttgcataataaagaaccaaaggtataatgttttgttgagaggtggttagggattttggccctaacgaatacagtgaatgtatgatgactatttgggaggatacatttatgtacccagaggcccccactaataactggtactatggttacttccttgtgtacatttctcttaaaagtgatattatatctgtttgtatgagaaacccaataaccaataaaatgaccgcatattcctgactaaacatagtaaggaaaatgcacactttgtttttacttttccgtttcattctaaaggtagttaagatgaactttatatgaaagcattttatcacacaatacccaggnnnnnnnnnnnnnnnnnnnnnnnnnnnnnnncccgtacccattcgcctaaatgagtgattacatcactgggccgctttaaactctactgggaaactgctac

SEQ ID NO: 19921 - DNA, 178 bp, Macaca Mulatta
atttatagcaatccatgttagtttttactgttgccacaaccctgttttatactatacttaataaattcagatatatttttcacggtttttccaaaatcagagtggaatggttttgatatagatgctgtatcccactgtttattcatgttcacattttaaaatcatttggaattctgct

SEQ ID NO: 19922 - DNA, 14481 bp, Macaca Mulatta
  misc_feature (1)...(14481): n = A,T,C or G
agaatgtgccccctgatctggccatctgttgcttcgtcctggagcagtccctgtccgtgcgagccctgcaggagatgctggcnnnnnnnnnnnnnnnnnnnnnnnnnnnnnnnnnnnnnnnnnnnnnnnnnnnnnnnnnnnnnnnnnnnnnnnnnnnnnnnnnnnnnnnnnnnnnnnnnnnnnnnnnnnnnnnnnnnnnnnnnnnnnnnnnnnnnnnnnnnnnnnnnnnnnnnnnnnnnnnnnnnnnnnnnnnnnnnnnnnnnnnnnnnnnnnnnnnnnnnnnnnnnnnnnnnnnnnnnnnnnnnnnnnnnnnnnnnnnnnnnnnnnnnnnnnnnnnnnnnnnnnnnnnnnnnnnnnnnnnnnnnnnnnnnnnnnnnnnnnnnnnnnnnnnnnnnnnnnnnnnnnnnnnnnnnnnnnnnnnnnnnnnnnnnnnnnnnnnnnnnnnnnnnnnnnnnnnnnnnnnnnnnnnnnnnnnnnnnnnnnnnnnnnnnnnnnnnnnnnnnnnnnnnnnnnnnnnnnnnnnnnnnnnnnnnnnnnnnnnnnnnnnnnnnnnnnnnnnnnnnnnnnnnnnnnnnnnnnnnnnnnnnnnnnnnnnnnnnnnnnnnnnnnnnnnnnnnnnnnnnnnnnnnnnnnnnnnnnnnnnnnnnnnnnnnnnnnnnnnnnnnnnnnnnnnnnnnnnnnnnnnnnnnnnnnnnnnnnnnnnnnnnnnnnnnnnnnnnnnnnnnnnnnnnnnnnnnnnnnnnnnnnnnnnnnnnnnnnnnnnnnnnnnnnnnnnnnnnnnnnnnnnnnnnnnnnnnnnnnnnnnnnnnnnnnnnnnnnnnnnnnnnnnnnnnnnnnnnnnnnnnnnnnnnnnnnnnnnnnnnnnnnnnnnnnnnnnnnnnnnnnnnnnnnnnnnnnnnnnnnnnnnnnnnnnnnnnnnnnnnnnnnnnnnnnnnnnnnnnnnnnnnnnnnnnnnnnnnnnnnnnnnnnnnnnnnnnnnnnnnnnnnnnnnnnnnnnnnnnnnnnnnnnnnnnnnnnnnnnnnnnnnnnnnnnnnnnnnnnnnnnnnnnnnnnnnnnnnnnnnnnnnnnnnnnnnnnnnnnnnnnnnnnnnnnnnnnnnnnnnnnnnnnnnnnnnnnnnnnnnnnnnnnnnnnnnnnnnnnnnnnnnnnnnnnnnnnnnnnnnnnnnnnnnnnnnnnnnnnnnnnnnnnnnnnnnnnnnnnnnnnnnnnnnnnnnnnnnnnnnnnnnnnnnnnnnnnnnnnnnnnnnnnnnnnnnnnnnnnnnnnnnnnnnnnnnnnnnnnnnnnnnnnnnnnnnnnnnnnnnnnnnnnnnnnnnnnnnnnnnnnnnnnnnnnnnnnnnnnnnnnnnnnnnnnnnnnnnnnnnnnnnnnnnnnnnnnnnnnnnnnnnnnnnnnnnnnnnnnnnnnnnnnnnnnnnnnnnnnnnnnnnnnnnnnnnnnnnnnnnnnnnnnnnnnnnnnnnnnnnnnnnnnnnnnnnnnnnnnnnnnnnnnnnnnnnnnnnnnnnnnnnnnnnnnnnnnnnnnnnnnnnnnnnnnnnnnnnnnnnnnnnnnnnnnnnnnnnnnnnnnnnnnnnnnnnnnnnnnnnnnnnnnnnnnnnnnnnnnnnnnnnnnnnnnnnnnnnnnnnnnnaggtcctggacgtgctgtgctccctgtgtgtgtgtaatggtgtggctgtacgctccaaccaagatcttattactgagaacttgctgcctggccgtgagcttctgctgcagacaaacctcatcaactatgtcaccanncagcatccggcccaacatcttcgtggaccgagcggnnnnnnnnnnnnnnnnnnnnnnnnnnactttgaggtgatggtggatgaggtgactccattaaaacagctcaggccacccacttgcgggtgggctgggccctcaccgatggctacagcccctaccctgggggcggcgagggctggggcggcaacggggtcggcgatgacctctattcctacggctttgatggactgcatctctggacagnnnnnnnnnnnnnnnnnnnnnnnnnnnnnnnnnnnnnnnnnnnnnnnnnnnnnnnnnnnnnnnnnnnnnnnnnnnnnnnnnnnnnnnnnnnnnnnnnnnnnnnnnnnnnnnnnnnnnnnnnnnnnnnnnnnnnnnnnnnnnnnnnnnnnnnnnnnnnnnnnnnnnnnnnnnnnnnnnnnnnnnnnnnnnnnnnnnnnnnnnnnnnnnnnnnnnnnnnnnnnnnnnnnnnnnnnnnnnnnnnnnnnnnnnnnnnnnnnnnnnnnnnnnnnnnnnnnnnnnnnnnnnnnnnnnnnnnnnnnnnnnnnnnnnnnnnnnnnnnnnnnnnnnnnnnnnnnnnnnnnnnnnnnnnnnnnnnnnnnnnnnnnnnnnnnnnnnnnnnnnnnnnnnnnnnnnnnnnnnnnnnnnnnnnnnnnnnnnnnnnnnnnnnnnnnnnnnnnnnnnnnnnnnnnnnnnnnnnnnnnnnnnnnnnnnnnnnnnnnnnnnnnnnnnnnnnnnnnnnnnnnnnnnnnnnnnnnnnnnnnnnnnnnnnnnnnnnnnnnnnnnnnnnnnnnnnnnnnnnnnnnnnnnnnnnnnnnnnnnnnnnnnnnnnnnnnnnnnnnnnnnnnnnnnnnnnnnnnnnnnnnnnnnnnnnnnnnnnnnnnnnnnnnnnnnnnnnnnnnnnnnnnnnnnnnnnnnnnnnnnnnnnnnnnnnnnnnnnnnnnnnnnnnnnnnnnnnnnnnnnnnnnnnnnnnnnnnnnnnnnnnnnnnnnnnnnnnnnnnnnnnnnnnnnnnnnnnnnnnnnnnnnnnnnnnnnnnnnnnnnnnnnnnnnnnnnnnnnnnnnnnnnnnnnnnnnnnnnnnnnnnnnnnnnnnnnnnnnnnnnnnnnnnnnnnnnnnnnnnnnnnnnnnnnnnnnnnnnnnnnnnnnnnnnnnnnnnnnnnnnnnnnnnnnnnnnnnnnnnnnnnnnnnnnnnnnnnnnnnnnnnnnnnnnnnnnnnnnnnnnnnnnnnnnnnnnnnnnnnnnnnnnnnnnnnnnnnnnnnnnnnnnnnnnnnnnnnnnnnnnnnnnnnnnnnnnnnnnnnnnnnnnnnnnnnnnnnnnnnnnnnnnnnnnnnnnnnnnnnnnnnnnnnnnnnnnnnnnnnnnnnnnnnnnnnnnnnnnnnnnnnnnnnnnnnnnnnnnnnnnnnnnnnnnnnnnnnnnnnnnnnnnnnnnnnnnnnnnnnnnnnnnnnnnnnnnnnnnnnnnnnnnnnnnnnnnnnnnnnnnnnnnnnnnnnnnnnnnnnnnnnnnnnnnnnnnnnnnnnnnnnnnnnnnnnnnnnnnnnnnnnnnnnnnnnnnnnnnnnnnnnnnnnnnnnnnnnnnnnnnnnnnnnnnnnnnnnnnnnnnnnnnnnnnnnnnnnnnnnnnnnnnnnnnnnnnnnnnnnnnnnnnnnnnnnnnnnnnnnnnnnnnnnnnnnnnnnnnnnnnnnnnnnnnnnnnnnnnnnnnnnnnnnnnnnnnnnnnnnnnnnnnnnnnnnnnnnnnnnnnnnnnnnnnnnnnnnnnnnnnnnnnnnnnnnnnnnnnnnnnnnnnnnnnnnnnnnnnnnnnnnnnnnnnnnnnnnnnnnnnnnnnnnnnnnnnnnnnnnnnnnnnnnnnnnnnnnnnnnnnnnnnnnnnnnnnnnnnnnnnnnnnnnnnnnnnnnnnnnnnnnnnnnnnnnnnnnnnnnnnnnnnnnnnnnnnnnnnnnnnnnnnnnnnnnnnnnnnnnnnnnnnnnnnnnnnnnnnnnnnnnnnnnnnnnnnnnnnnnnnnnnnnnnnnnnnnnnnnnnnnnnnnnnnnnnnnnnnnnnnnnnnnnnnnnnnnnnnnnnnnnnnnnnnnnnnnnnnnnnnnnnnnnnnnnnnnnnnnnnnnnnnnnnnnnnnnnnnnnnnnnnnnnnnnnnnnnnnnnnnnnnnnnnnnnnnnnnnnnnnnnnnnnnnnnnnnnnnnnnnnnnnnnnnnnnnnnnnnnnnnnnnnnnnnnnnnnnnnnnnnnnnnnnnnncttcttattcaaggccaagaaggtcgccatgatgacccaaccaccggccacccccacgctgcctcggctccctcacgacgtggtgcctgcagacaaccgcgatgaccctgagatcatcctcaacaccaccacgnnnnnnnnnnnnnnnnnnnnnnnnnnnnnnnnnnnnnnnnnnnnnnnnnnnnnnnnnnnnnnnnnnnnnnnnnnnnnnnnnnnnnnnnnnnnnnnnnnnnnnnnnnnnnnnnnnnnnnnnnnnnnnnnnnnnnnnnnnnnnnnnnnnnnnnnnnnnnnnnnnnnnnnnnnnnnnnnnnnnnnnnnnnnnnnnnnnnnnnnnnnnnnnnnnnnnnnnnnnnnnnnnnnnnnnnnnnnnnnnnnnnnnnnnnnnnnnnnnnnnnnnnnnnnnnnnnnnnnnnnnnnnnnnnnnnnnnnnnnnnnnnnnnnnnnnnnnnnnnnnnnccaggtggaacccaacacaaagctatttcctgctgtcttcgtcctgcccacccaccagaacgtcatccagtttgagctggggaagcagaannnnnnnnnnnnnnnnnnnnnnnnnnnnnnnnnnnnnnnnnnnnnnnnnnnnnnnnnnnnnnnnnnnnnnnnnnnnnnnnnnnnnnnnnnnnnnnnnnnnnnnnnnnnnnnnnnnnnnnnnnnnnnnnnnnnnnnnnnnnnnnnnnnnnnnnnnnnnnnnnnnnnnnnnnnnnnnnnnnnnnnnnnnnnnnnnnnnnnnnnnnnnnnnnnnnnnnnnnnnnnnnnnnnnnnnnnnnnnnnnnnnnnnnnnnnnnnnnnnnnnnnnnnnnnnnnnnnnnnnnnnnnnnnnnnnnnnnnnnnnnnnnnnnnnnnnnnntgggcaacaatcgcgtggcgcacgctctgtgcagccacgtggaccaggctcagctgctgcacgccctggaggacgcgcacctgccaggcccactgcgtgcaggctactacgacctcctcattagcatccatctcgaaagtgcctgccgcagccgccgctccatgctctctgaatacatcgtgcccctcacacctgagacccgcgccatcacgctcttccctcctggaaggagcacagaaaatggtcacccccggcacggcctgccgggagttggagtcagcacttcgctgcggcccccgcatcatttctcggccccctgtttcgtggccgctctgccagctgctggggcagcagaggctccggcccgcctcagccccgccatcccgctggaggccctacgggacaaggcactgaggatgctgggggaggcggtgcgcgacggtgggcagcacgctcgcgatcccgtcgggggctccgtggagttccagtttgtgcctgtgctcaagctcgtgtccaccctgctggtaatgnnnnnnnnnnnnnnnnnnnnnnnnnnnnnnnnnnnnnnnnnnnnnnnnnnnnnnnnnnnnnnnnnnnnnnnnnnnnnnnnnnnnnnnnnnnnnnnnnnnnnnnnnnnnnnnnnnnnnnnnnnnnnnnnnnnnnnnnnnnnnnnnnnnnnnnnnnnnnnnnnnnnnnnnnnnnnnnnnnnnnnnnnnnnnnnnnnnnnnnnnnnnnnnnnnnnnnnnnnnnnnnnnnnnnnnnnnnnnnnnnnnnnnnnnnnnnnnnnnnnnnnnnnnnnnnnnnnnnnnnnnnnnnnnnnnnnnnnnnnnnnnnnnnnnnnnnnnnnnnnnnnnnnnnnnnnnnnnnnnnnnnnnnnnnnnnnnnnnnnnnnnnnnnnnnnnnnnnnnnnnnnnnnnnnnnnnnnnnnnnnnnnnnnnnnnnnnnnnnnnnnnnnnnnnnnnnnnnnnnnnnnnnnnnnnnnnnnnnnnnnnnnnnnnnnnnnnnnnnnnnnnnnnnnnnnnnnnnnnnnnnnnnnnnnnnnnnnnnnnnnnnnnnnnnnnnnnnnnnnnnnnnnnnnnnnnnnnnnnnnnnnnnnnnnnnnnnnnnnnnnnnnnnnnnnnnnnnnnnnnnnnnnnnnnnnnnnnnnnnnnnnnnnnnnnnnnnnnnnnnnnnnnnnnnnnnnnnnnnnnnnnnnnnnnnnnnnnnnnnnnnnnnnnnnnnnnnnnnnnnnnnnnnnnnnnnnnnnnnnnggtccctgcaggaactggtgtcccacatggtggtgcgctgggcccaagaggacttcgtgcagagccccgaactggtgcgggccatgttcagcctcctgcaccggcagtacgacgggctgggtgagctgctgcgtgccctgccacgggcgtacaccatctcaccgtcctccgtggaagacaccatgagcctgcttgagtgcctcggccagatccgctccctgctcatcgtacagatgggccctcaggaagagaacctcatgatccagagcatnnnnnnnnnnnnnnnnnnnnnnnnnnnnnnnnnnnnnnnnnnnnnnnnnnnnnnnnnnnnnnnnnnnnnnnnnnnnnnnnnnnnnnnnnnnnnnnnnnnnnnnnnnnnnnnnnnnnnnnnnnnnnnnnnnnnnnnnnnnnnnnnnnnnnnnnnnnnnnnnnnnnnnnnnnnnnnnnnnnnnnnnnnnnnnnnnnnnnnnnnnnnnnnnnnnnnnnnnnnnnnnnnnnnnnnnnnnnnnnnnnnnnnnnnnnnnnnnnnnnnnnnnnnnnnnnnnnnnnnnnnnnnnnnnnnnnnnnnnnnnnnnnnnnnnnnnnnnnnnnnnnnnnnnnnnnnnnnnnnnnnnnnnnnnnnnnnnnnnnnnnnnnnnnnnnnnnnnnnnnnnnnnnnnnnnnnnnnnnnnnnnnnnnnnnnnnnnnnnnnnnnnnnnnnnnnnnnnnnnnnnnnnnnnnnnnnnnnnnnnnnnnnnnnnnnnnnnnnnnnnnnnnnnnnnnnnnnnnnnnnnnnnnnnnnnnnnnnnnnnnnnnnnnnnnnnnnnnnnnnnnnnnnnnnnnnnnnnnnnnnnnnnnnnnnnnnnnnnnnnnnnnnnnnnnnnnnnnnnnnnnnnnnnnnnnnnnnnnnnnnnnnnnnnnnnnnnnnnnnnnnnnnnnnnnnnnnnnnnnnnnnnnnnnnnnnnnnnnnnnnnnnnnnnnnnnnnnnnnnnnnnnnnnnnnnnnnnnnnnnnnnnnnnnnnnnnnnnnnnnnnnnnnnnnnnnnnnnnnnnnnnnnnnnnnnnnnnnntaatccaagcctgcaagggtgaggccctgcggatccgtgccatcctccgctcccttgtgcccttggaggacctcgtgggcatcatcagcctcccactgcagatgcctaccctgggcaaagnnnnnnnnnnnnnnnnnnnnnnnnnnnnnnnnnnnnnnnnnnnnnnnnnnnnnnnnnnnnnnnnnnnnnnnnnnnnnnnnnnnnnnnnnnnnnnnnnnnnnnnnnnnnnnnnnnnnnnnnnnnnnnnnnnnnnnnnnnnnnnnnnnnnnnnnnnnnnnnnnnnnnnnnnnggccactttcagcaccacggagatggcactggcgctgaaccgctacctgtgcctggccgtgctgcctctcatcaccaagtgtgcgccgctctttgcgggcacggaacaccgcgccatcatggtggactccatgctgcacacggtgtaccgcctgtcccggggtcgctcgctcaccaaggcgcagcgcgacgtcatcgaggactgcctcatggctctctgcaggnnnnngcaggtacatccgcccgtcgatgctgcagcacctgctgcggcgtctggtgttcgacgtgcccatcttaaacgagtttgccaagatgccactcaannnnnnnnnnnnnnnnnnnnnnnnnnnnnnnnnnnnnnnnnnnnnnnnnnnnnnnnnnnnnnnnnnnnnnnnnnnnnnnnnnnnnnnnnnnnnnnnnnnnnnnnnnnnnnnnnnnnnnnnnnnnnnnnnnnnnnnnnnnnnnnnnnnnnnnnnnnnnnnnnnnnnnnnnnnnnnnnnnnnnnnnnnnnnnnnnnnnnnnnnnnnnnnnnnnnnnnnnnnnnnnnnnnnnnnnnnnnnnnnnnnnnnnnnnnnnnnnnnnnnnnnnnnnnnnnnnnnnnnnnnnnnnnnnnnnnnnnnnnnnnnnnnnnnnnnnnnnnnnnnnnnnnnnnnnnnnnnnnnnnnnnnnnnnnnnnnnnnnnnnnnnnnnnnnnnnnnnnnnnnnnnnnnnnnnnnnnnnnnnnnnnnnnnnnnnnnnnnnnnnnnnnnnnnnnnnnnnnnnnnnnnnnnnnnnnnnnnnnnnnnnnnnnnnnnnnnnnnnnnnnnnnnnnnnnnnnnnnnnnnnnnnnnnnnnnnnnnnnnnnnnnnnnnnnnnnnnnnnnnnnnnnnnnnnnnnnnnnnnnnnnnnnnnnnnnnnnnnnnnnnnnnnnnnnnnnnnnnnnnnnnnnnnnnnnnnnnnnnnnnnnnnnnnnnnnnnnnnnnnnnnnnnnnnnnnnnnnnnnnnnnnnnnnnnnnnnnnnnnnnnnnnnnnnnnnnnnnnnnnnnnnnnnnnnnnnnnnnnnnnnnnnnnnnnnnnnnnnnnnnnnnnnnnnnnnnnnnnnnnnnnnnnnnnnnnnnnnnnnnnnnnnnnnnnnnnnnnnnnnnnnnnnnnnnnnnnnnnnnnnnnnnnnnnnnnnnnnnnnnnnnnnnnnnnnnnnnnnnnnnnnnnnnnnnnnnnnnnnnnnnnnnnnnnnnnnnnnnnnnnnnnnnnnnnnnnnnnnnnnnnnnnnnnnnnnnnnnnnnnnnnnnnnnnnnnnnnnnnnnnnnnnnnnnnnnnnnnnnnnnnnnnnnnnnnnnnnnnnnnnnnnnnnnnnnnnnnnnnnnnnnnnnnnnnnnnnnnnnnnnnnnnnnnnnnnnnnnnnnnnnnnnnnnnnnnnnnnnnnnnnnnnnnnnnnnnnnnnnnnnnnnnnnnnnnnnnnnnnnnnnnnnnnnnnnnnnnnnnnnnnnnnnnnnnnnnnnnnnnnnnnnnnnnnnnnnnnnnnnnnnnnnnnnnnnnnnnnnnnnnnnnnnnnnnnnnnnnnnnnnnnnnnnnnnnnnnnnnnnnnnnnnnnnnnnnnnnnnnnnnnnnnnnnnnnnnnnnnnnnnnnnnnnnnnnnnnnnnnnnnnnnnnnnnnnaggacagtgatgaagtcaggccctgagatcgtgaaggatggcctccgctccttcttcgagagtgcctcggagnnnnnnnnnnnnnnnnnnnnnnnnnnnnnnnnnnnnnnnnnnnnnnnnnnnnnnnnnnnnnnnnnnnnnnnnnnnnnnnnnnnnnnnnnnnnnnnnnnnnnnnnnnnnnnnnnnnnnnnnnnnnnnnnnnnnnnnnnnnnnnnnnnnnnnnnnnnnnnnnnnnnnnnnnnnnnnnnnnnnnnnnnnnnnnnnnnnnnnnnnnnnnnnnnnnnnnnnnnnnnnnnnnnnnnnnnnnnnnnnnnnnnnnnnnnnnnnnnnnnnnnnnnnnnnnnnnnnnnnnnnnnnnnnnnnnnnnnnnnnnnnnnnnnnnnnnnnnnnnnnnnnnnnnnnnnnnnnnnnnnnnnnnnnnnnnnnnnnnnnnnnnnnnnnnnnnnnnnnnnnnnnnnnnnnnnnnnnnnnnnnnnnnnnnnnnnnnnnnnnnnnnnnnnnnnnnnnnnnnnnnnnnnnnnnnnnnnnnnnnnnnnnnnnnnnnnnnnnnnnnnnnnnnnnnnnnnnnnnnnnnnnnnnnnnnnnnnnnnnnnnnnnnnnnnnnnnnnnnnnnnnnnnnnnnnnnnnnnnnnnnnnnnnnnnnnnnnnnnnnnnnnnnnnnnnnnnnnnnnnnnnnnnnnnnnnnnnnnnnnnnnnnnnnnnnnnnnnnnnnnnnnnnnnnnnnnnnnnnnnnnnnnnnnnnnnnnnnnnnnnnnnnnnnnnnnnnnnnnnnnnnnnnnnnnnnnnnnnnnnnnnnnnnnnnnnnnnnnnnnnnnnnnnnnnnnnnnnnnnnnnnnnnnnnnnnnnnnnnnnnnnnnnnnnnnnnnnnnnnnnnnnnnnnnnnnnnnnnnnnnnnnnnnnnnnnnnnnnnnnnnnnnnnnnnnnnnnnnnnnnnnnnnnnnnnnnnnnnnnnnnnnnnnnnnnnnnnnnnnnnnnnnnnnnnnnnnnnnnnnnnnnnnnnnnnnnnnnnnnnnnnnnnnnnnnnagggcgcagtggctgacggagccgaatcccagcgcggaggagctgttcaggatggtgggcgagatcttcatctactggtccaagtcccacnaacttcaagcgcgaggagcagaactttgtggtccagaacgagatcaacaacatgtccttcctgactgcggacaaaagagcaaaatggcnnnnnnnnnnnnnnnnnnnnnnnnnnnnnnnnnnnnnnnnnnnnnnnnnnnnnnnnnnnnnnnnnnnnnnnnnnnnnnnnnnnnnnnnnnnnnnnnnnnnnnnnnnnnnnnnnnnnnnnnnnnnnnnnnnnnnnnnnnnnnnnnnnnnnnnnnnnnnnnnnnnnnnnnnnnnnnnnnnnnnnnnnnnnnnnnnnnnnnnnngaaagacacagatgaggaggtccgggaatttctgaacaacaaccttcaccttcagggaaaggnnnnnnnnnnnnnnnnnnnnnnnnnnnnnnnnnnnnnnnnnnnnnnnnnnnnnnnnnnnnnnnnnnnnnnnnnnnnnnnnnnnnnnnnnnnnnnnnnnnnnnnnnnnnnnnnnnnnnnnnnnnnnnnnnnnnnnnnnnnnnnnnnnnnnnnnnnnnnnnnnnnnnnnnnnnnnnnnnnnnnnnnnnnnnnnnnnnnnnnnnnnnnnnnnnnnnnnnnnnnnnnnnnnnnnnnnnnnnnnnnnnnnnnnnnnnnnnnnnnnnnnnnnnnnnnnnnnnnnnnnnnnnnnnnnnnnnnnnnnnnnnnnnnnnnnnnnnnnnnnnnnnnnnnnnnnnnnnnnnnnnnnnnnnnnnnnnnnnnnnnnnnnnnnnnnnnnnnnnnnnnnnnnnnnnnnnnnnnnnnnnnnnnnnnnnnnnnnnnnnnnnnnnnnnnnnnnnnnnnnnnnnnnnnnnnnnnnnnnnnnnnnnnnnnnnnnnnnnnnnnnnnnnnnnnnnnnnnnnnnnnnnnnnnnnnnnnnnnnnnnnnnnnnnnnnnnnnnnnnnnnnnnnnnnnnnnnnnnnnnnnnnnnnnnnnnnnnnnnnnnnnnnnnnnnnnnnnnnnnnnnnnnnnnnnnnnnnnnnnnnnnnnnnnnnnnnnnnnnnnnnnnnnnnnnnnnnnnnnnnnnnnnnnnnnnnnnnnnnnnnnnnnnnnnnnnnnnnnnnnnnnnnnnnnnnnnnnnnnnnnnnnnnnnnnnnnnnnnnnnnnnnnnnnnnnnnnnnnnnnnnnnnnnnnnnnnnnnnnnnnnnnnnnnnnnnnnnnnnnnnnnnnnnnnnnnnnnnnnnnnnnnnnnnnnnnnnnnnnnnnnnnnnnnnnnnnnnnnnnnnnnnnnnnnnnnnnnnnnnnnnnnnnnnnnnnnnnnnnnnnnnnnnnnnnnnnnnnnnnnnnnnnnnnnnnnnnnnnnnnnnnnnnnnnnnnnnnnnnnnnnnnnnnnnnnnnnnnnnnnnnnnnnnnnnnnnnnnnnnnnnnnnnnnnnnnnnnnnnnnnnnnnnnnnnnnnnnnnnnnnnnnnnnnnnnnnnnnnnnnnnnnnnnnnnnnnnnnnnnnnnnnnnnnnnnnnnnnnnnnnnnnnnnnnnnnnnnnnnnnnnnnnnnnnnnnnnnnnnnnnnnnnnnnnnnnnnnnnnnnnnnnnnnnnnnnnnnnnnnnnnnnnnnnnnnnnnnnnnnnnnnnnnnnnnnnnnnnnnnnnnnnnnnnnnnnnnnnnnnnnnnnnnnnnnnnnnnnnnnnnnnnnnnnnnnnnnnnnnnnnnnnnnnnnnnnnnnnnnnnnntcaggactcaagccagatcgagctgctgaaggagctgctggatctgcagaaggacatggtggtgatgttgctgtcgttactagaagnnnnnnnnnnnnnnnnnnnnnnnnnnnnnnnnnnnnnnnnnnnnnnnnnnnnnnnnnntccaatgtggagatgatcctcaagttcttcgacatgttcctgaaactcaaggacattgtgggctctgaagccttccaggactacgtaacggatccccgtggcctcatctccaagaaggattgccagaagnnnnnnnnnnnnnnnnnnnnnnnnnnnnnnnnnnnnnnnnnnnnnnnnnnnnnnnnnnnnnnnnnnnnnnnnnnnnnnnnnnnnnnnnnnnnnnnnnnnnnnnnnnnnnnnnnnnnnnnnnnnnnnnnnnnnnnnnnnnnnnnnnnnnnnnnnnnnnnnnnnnnnnnnnnnnnnnnnnnnnnnnnnnnnnnnnnnnnnnnnnnnnnnnnnnnnnnnnnnnnnnnnnnnnnnnnnnnnnnnnnnnnnnnnnnnnnnnnnnnnnnnnnnnnnnnnnnnnnnnnnnnnnnnnnnnnnnnnnnnnnnnnnnnnnnnnnnnnnnnnnnnnnnnnnnnnnnnnnnnnnnnnnnnnnnnnnnnnnnnnnnnnnnnnnnnnnnnnnnnnnnnnnnnnnnnnnnnnnnnnnnnnnnnnnnnnnnnnnnnnnnnnnnnnnnnnnnnnnnnnnnnnnnnnnnnnnnnnnnnnnnnnnnnnnnnnnnnnnnnnnnnnnnnnnnnnnnnnnnnnnnnnnnnnnnnnnnnnnnnnnnnnnnnnnnnnnnnnnnnnnnnnnnnnnnnnnnnnnnnnnnnnnnnnnnnnnnnnnnnnnnnnnnnnnnnnnnnnnnnnnnnnnnnnnnnnnnnnnnnnnnnnnnnnnnnnnnnnnnnnnnnnnnnnnnnnnnnnnnnnnnnnnnnnnnnnnnnnnnnnnnnnnnnnnnnnnnnnnnnnnnnnnnnnnnnnnnnnnnnnnnnnnnnnnnnnnnnnnnnnnnnnnnnnnnnnnnnnnnnnnnnnnnnnnnnnnnnnnnnnnnnnnnnnnnnnnnnnnnnnnnnnnnnnnnnnnnnnnnnnnnnnnnnnnnnnnnnnnnnnnnnnnnnnnnnnnnnnnnnnnnnnnnnnnnnnnnnnnnnnnnnnnnnnnnnnnnnnnnnnnnnnnnnnnnnnnnnnnnnnnnnnnnnnnnnnnnnnnnnnnnnnnnnnnnnnnnnnnnnnnnnnnnnnnnnnnnnnnnnnnnnnnnnnnnnnnnnnnnnnnnnnnnnnnnnnnnnnnnnnnnnnnnnnnnnnnnnnnnnnnnnnnnnnnnnnnnnnnnnnnnnnnnnnnnnnnnnnnnnnnnnnnnnnnnnnnnnnnnnnnnnnnnnnnnnnnnnnnnnnnnnnnnnnnnnnnnnnnnnnnnnnnnnnnnnnnnnnnnnnnnnnnnnnnnnnnnnnnnnnnnnnnnnnnnnnnnnnnnnnnnnnnnnnnnnnnnnnnnnnnnnnnnnnnntgccgagaatggggagaaagaagaagttcccgaacccccaccagagccccccaagaagcaagcacctccctcaccccctccaaagaaggaagaagctgggggtgaattctggggagaactggaggtgcagagggtgaagttcctnnnnnnnnnnnnnnnnnnnnnnnnnnnnnnnnnnnnnnnnnnnnnnnnnnnnnnnnnnnnnnnnnnnnnnnnnnnnnnnnnnnnnnnnnnnnnnnnnnnnnnnnnnnnnnnnnnnnnnnnnnnnnnnnnnnnnnnnnnnnnnnnnnnnnnnnnnnnnnnnnnnnnnnnnnnnnnnnnnnnnnnnnnnnnnnnnnnnnnnnnnnnnnnnnnnnnnnnnnnnnnnnnnnnnnnnnnnnnnnnnnnnnnnnnnnnnnnnnnnnnnnnnnnnnnnnnnnnnnnnnnnnnnnnnnnnnnnnnnnnnnnnnnnnnnnnnnnnnnnnnnnnnnnnnnnnnnnnnnnnnnnnnnnnnnnnnnnnnnnnnnnnnnnnnnnnnnnnnnnnnnnnnnnnnnnnnnnnnnnnnnnnnnnnnnnnnnnnnnnnnnnnnnnnnnnnnnnnnnnnnnnnnnnnnnnnnnnnnnnnnnnnnnnnnnnnnnnnnnnnnnnnnnnnnnnnnnnnnnnnnnnnnnnnnnnggtcctggacaaacatggggacatctacgggcgggagcggattgctgagctactgggcatggacctggccacactagagatcaccgcccacaatgagcgcaagcccgacccgccaccagggctgctgacctggnnnnnnnnnnnnnnnnnnnnnnnnnnnnnnnnnnnnnnnnnnnnnnnnnnnnnnnnnnnnnnnnnnnnnnnnnnnnnnnnnnnnnnnnnnnnnnnnnnnnnnnnnnnnnnnnnnnnnnnnnnnnnnnnnnnnnnnnnnnnnnnnnnnnnnnnnnnnnnnnnnnnnnnnnnnnnnnnnnnnnnnnnnnnnnnnnnnnnnnnnnnncagctggtaatgaccgtgggccttctggcggtggtcgtctacctgtacaccgtagtggccttcaacttcttccgcaagttctacaacaagagcgaggatgaggatgagcctgacatgaaatgtgacgacatgatgac

SEQ ID NO: 19923 - DNA, 434 bp, Macaca Mulatta
  misc_feature (1)...(434): n = A,T,C or G
gacatgnnnnnnnnnnnnnnnnnnnnnnnnnnnnngaacaactcagcaaaataaaattcctgtttattgttggacaacattgtttcacacatacatcaaacaggccaaaaaaaataaacagcaacttcatagacnnnnnnnnnnnnnnnnnnnnncttttatctttggcctttttaaccatctcatacaaaccaactacttatagtacagctaagcacatacacaaaaaagttactggaatgctcggaataagattgtttttctgttgtcgtttttgctttatntnnnnnnnnnnnnnnnnnnnnnnagattataatgaacatggtcacaccacaagtaaagtcagaagtaggacagagaacgctccgaaggctggtttggtcatccgagatcattaaaaatggctgaccctaacaatatgtacaaaaatatcc

SEQ ID NO: 19924 - DNA, 421 bp, Macaca Mulatta
tacgtgtatgacctggaactgaactgagctgcccagagtcaggaagtcttccgggaaggtcacctgagcctggacgcttctccatgagacgcatcttctccacactcaggactcctctccgcagttcctgtcccttctcttaatttaatctttttatgtgctgtgttattgtattaggtgttatttccattatttatatttgtttagccaaaggatacgtgtcccctgtggggatggtccacagtcactgtttctctgctgctgcaaatacatggataacaccgttaattccatgtgttttcataataaaacttcaaaataaaacacagacagttactttgtgattttaatttgatttgggggtaaaaggaattgcctggtaccattgggagggacaaactacagtttcccaaaacagtaa

SEQ ID NO: 19925 - DNA, 814 bp, Macaca Mulatta
  misc_feature (1)...(814): n = A,T,C or G
ggtatcttgacctacgtggcttggaagataagtggttttcccaaaaaccgtgttattggaagtggttgcaatctggattcagccagattccgttacctgatgggggaaagactgggagttcacccattaagctgtcatgggtgggtccttggggaacatggagattccagtgtgcctgtatggagtggaatgaatgttgctggtgtctccctgaagactctgcacccagatttagggactgataaagataaggaacagtggaaagaggttcacaagcaggtggttgagagtgcttatgaggtgatcaaactcaaaggctacacatcctgggccattggactctctgtagcagatttggcataaagtataatgaagaatcttaggcgagtgcacccagtttccaccatgattaagggtctctatggaataaaggatgatgtcttcctcagtgttccttgcattttgggacagaatggaatctcagaccttgtgaaggtgactctgactcctgaggaagacgccccgttttgaagaagagtgcagataccctttgggggattccaaaaagaacttgcatttttaaaattcttcctggattgtcataaccattttccactggtcctaaggcttaacaacagggaatttctaagttttggaagggttggttacacatggttggctcctttttttttaattccgggatatctgtgggnnnnnnnnnnnnnnnnnnnggttaaattaattttannnnnnnnnnnnnnnnnnggaacctttnnnnnnnnnnnnnnnnnnnnnnnncattttttttatactc

SEQ ID NO: 19926 - DNA, 432 bp, Macaca Mulatta
tggctgtgagcacctccccactaccccacactgctccgtgcgccttgatacagcacacccattcagtaccatccagccatgtctgtgcctagcaagaaagggccacagttcctatttcagtggccaccatacttagttctgacctgtcagggattccgttcccatcgaagggggatactaaggacatcaggaaccactcctatcttcctgggtgtacatctgggatcctaagacaggaccagaatagtaccagctgggcccctgccagatgaggggcaggcagagggccaacggtgactgctgcctcttgtcaaaacctgtacaccgttgtattggcagcaggggccacagaggggcaggggccctggtaaactaggtccggtcataataggggcctcagcaccctgggtctgtgtgtgcataggcctagga

SEQ ID NO: 19927 - DNA, 975 bp, Macaca Mulatta
ctgcatcggaccggtgcagatcacggggttgctcttttgctcataagaggggcttcgctggcagtctgaagggcaagcttgagtcaggaccctgtaattaagatcctcaattggctggagggcagatctcgcgagtagggtacaaggcactatgaaacgatctagcaacgcggtaaaaatactgctttggtgggcgacgcggtacaggtgccgaagagcgttcgttacgggaatgccgaagcgtgggaaaaagggagcggtggcagaagacggggatgagctcaagacagagccagagcccaagaagagtaagacgcccgcaaagaaaaatgacaaggaggcagcaggagagggcccagccctgtatgaggacccccccgatcagaaaacctcacccagtggcaaacctgccacactcaagatctgctcttggaacgtggatgggcttcgagcctggattaagaagaaaggattagattgggtaaaggaagaagccccagatatactgtgccttcaagagaccaaatgttcagagaacaaactaccagctgaacttcaagagctgcctggactctctcatcaatactggtccgctccttcggacaaggaaggatacagtggcgtgggcctactttcccgccattgcccactcaaagtttcttatggcataggcgaggaggagcatgatcaggaaggccgggtgattgtggctgaatttgactcgtttgtgctggtaacaacgtatgtacctaatgcaggccggggtctggtacgactggagtaccggcagcgctgggatgaagcctttcgcaagttcctgaagggcttggcttcccgaaagccccttgtgctgtgtggagacctcaatgtggcacatgaagaaattgaccttcgcaaccccaagggtaacaaaaagaatgctggcttcacgccacaaagagcgccaaggctttggggaattactgccaggctgtg

SEQ ID NO: 19928 - DNA, 786 bp, Macaca Mulatta
  misc_feature (1)...(786): n = A,T,C or G
gggggaacacaaccaagcttaagacggtggggtcagcttcacattctcaggaactctccttctctgggccacggaattaacgcgagcagccatggtggcctccgctttcacctcatcagcagtgaccggtgtggccaaagtggccagggtggcctctggctgtgccgtagtcttgcccctggcgaggattgctacagtcgtgattggaggagttgtggctgtggaggctgtgcccatggtgctcggtgtcatgggcttcactgcgacgggaatcacctcttcctccatagcagccaagatgatgtccgcagcagccattgccaatgggggtggagttgccccgggcagccttgtggctactctgcagtcactgggagcaactggactctccgggttgaccagattcatcctgggctccactgggtctgccattgcggctggcattgcgaggttctactagctccctgcccctcgccctgcagagaagagaaccgtgccagggggagaaggcacccagccatcctgacccagcgaagagccaactatcccaaatatacctggggtgaaatataccagattccgcacgccccgaggaaaataagaaataaagatgaattgttgccacttcnnnnnnnnnnnnnnnnnnnnnnnnnnnnnnnnnnnnnnnnnnnnngttcggcccccctcggcccctcgaagaaccttttctaaaaccatttcgtttggccccgcggggcccctttaagttaaagttgaacatggggccataaactggtttccctaaga

SEQ ID NO: 19929 - DNA, 603 bp, Macaca Mulatta
  misc_feature (1)...(603): n = A,T,C or G
aggaaactactaaagttcctggggaagcaaagtagaatttcataagaacaaaatgnnnnnnnnnnnnnnnnnnnnnnnnnnnnnnnnnnnnnnnnnnnnnnnnnnnnnnnnnnnnnnnnnnnnnnnnnnnnnnnnnnnnnnnnnnnnnnnnnnnnnnnnnnnnnnnnnnnnnnnnnnnnnnnnnnnnnnnnnnnnnnnnnnnnnnnnnnnnnnnnnnnnnnnnnnnnnnnnnnnnnnnnnnnnnnnnnnnnnnnnnnnnnnnnnnnnnnnnnnnnnnnnnnnnnnnnnnnnnnnnnnnnnnnnnnnnnnnnnnnnnnnnnnnnnnnnnnnnnnnnnnnnnnnnnnnnnnnnnnnnnnctgctgatggctgcgaacttcctagattgttaaataaattataataaacttaactcttttcgtttaatatctgcagttcagttagtaatttttcatatgtagcatgttgcctgtatgcagttgaactgtataaagttcattgcgaagcagattatcttctggttttgcatagcaatcaaaattgaaatttgtttgctacctcaacaaattaaggacattttcacaagcttagaaataaacaaatat

SEQ ID NO: 19930 - DNA, 319 bp, Macaca Mulatta
tgagggatcctctcagattttaaagtttcttatcaaagggataatctgtagagtaataggatgtttgaggaatcctgtgcttaatacaaacctgtgatgggacaaaaaggtttgtaacaagttttctgctccaatccaatgtctcttgaacagtctgagtgaaatgtgaaaagctgagtaaccctcattggcaatttttttttttggaaggaattagctgaagaagtgcttccacttcttgggtttgagaagccaggatatggatggttcagactgggagaagatggagccacctgctaaagcagcatgaagctgccct

SEQ ID NO: 19931 - DNA, 727 bp, Macaca Mulatta
aaaagctggaaacacagctctgtgcagttctacattcactgattattgcagtgtgattttctatcagttttgtaaatacaggacttgccgtttcttttgatctcttgattgaagaaggatagggtattaaagtgcttttgtcatgaggaattttcatttggttcttttgtcaactttcttgcttgttctgctaaaccctctgtgtatttccattccagatatatttgaacagataagtaggcatgcagctctgagactccagagttttatgccatatcaaaagcattttcaagaatccctcaattctatcctgaaatgatgttattctgataataaagctcagatctgcaactttagtgttacatatttttcacttcaataaaattaatggccagtttttcctgacaatttataggaacagtatctttcaacatactcgccacattatcctgaaatatctgcaatacttgtctttagtaactgcatttctgttaagattatgatttgatgagaaacaattgaaaatatatccgatctaatcaaattaggtcagcttcctattgctctcaggtgttgcctgtcttcacgaatgattagtatcgattgacttcattcttaggtagttttaaatcttcatttctcttcagcatgaactaacttctcatcatgggggcacatagtaactgcattctcagaagatttatgcagttaaccaactgatacaagt

SEQ ID NO: 19932 - DNA, 403 bp, Macaca Mulatta
gctctttcaccctgaatttgacctacttgctggggtactgttgcttccttttgaaccatcaaccgggaaggttctgtccagaaaaaattgaatgtgaacgggggcacccccttttcttgccaaaatatatctctgcctttggttttattttccttggggtccagttgtcagtctctggggttttgtgcactgaacctcacccggggcagacaagggcaaggctggggaggatggggagggaagagaggatttggttcctcttcttcttgtttctcgagtgtttcgtaatcacttcatgggtggtaccgcctagaattctcccagcagcctgtcatgggagggcttcaggttagccctggtcaaaccacctttgaatctgcatgttattaaaagtaggtataat

SEQ ID NO: 19933 - DNA, 4141 bp, Macaca Mulatta
  misc_feature (1)...(4141): n = A,T,C or G
agtgacgcggggtgggctggagacgtttcccgccctctgggaagagtaaatgggccgcccacctgccgggcctcggccgcccgcacctgctcgtgagaagccgctggctggggcaccgcccccggtccccgcccgggtccgcgcactgggagcacgctggccctttaagagcgcggcggccgcggcgcgcggggaggagggctgggagcgcccggagccgcgctgaactcgccggggacgtcgggcgcccgctccttggctggctggctggctggttcgctcgctcgctctctcgggtgggctccctgcgcctcctcccgggactgcgtgaggacccgggcccggtcgggcgcggcggcgagcagaatccccgggcaggaggcacgcgctccgggcagcgcccggccccgggcatggacagagggagctgggcgcgcagggggcgccgcgggaccgggcggccggagcgctgagccagacaaaggctctggagttgcgctcgctctcgggagccgggccccaggctctgggcgccaaggctgcgggaccccgcggggggtagctccggccggccccctttcccgcccgctgattccgagctcccggacctgccctgcccgcttctcctcgggcttgggaatttgccgaggcgacctaggcggctccagcggggaccgggagcccgaggtgcgcggcgcgcccgccgggccaggagccagggagcgtcgcaagtttccaaggcgcgtgcgaggacccggcgtgcagtgttccgggccgggctgggcgccgagagcatgggcagcaaccggagcgcgcccggacggccgggctggactggcagcctccttggcgactgggaggaggcggcgcggccgcgactgctgccgctgctcctggtgcttctgggctgcctgggccttggtgtaggggccgaagacgcagaggtccatgccgagnnnnnnnnnnnnnnnnnnnnnnnnnnnnnnnnnnnnnnnnnnnnnnnnnnnnnnnnnnnnnnnnnnnnnnnnnnnnnnnnnnnnnnnnnnnnnnnnnnnnnnnnnnnnnnnnnnnnnnnnnnnnnnnnnnnnnnnnnnnnnnnnnnnnnnnnnnnnnnnnnnnnnnnnnnnnnnnnnnnnnnnnnnnnnnnnnnnnnnnnnnnnnnnnnnnnnnnnnnnnnnnnnnnnnnnnnnnnnnnnnnnnnnnnnnnnnnnnnnnnnnnnnnnnnnnnnnnnnnnnnnnnnnnnnnnnnnnnnnnnnnnnnnnnnnnnnnnnnnnnnnnnnnnnnnnnnnnnnnnnnnnnnnnnnnnnnnnnnnnnnnnnnnnnnnnnnnnnnnnnnnnnnnnnnnnnnnnnnnnnnnnnnnnnnnnnnnnnnnnnnnnnnnnnnnnnnnnnnnnnnnnnnnnnnnnnnnnnnnnnnnnnnnnnnnnnnnnnnnnnnnnnnnnnnnnnnnnnnnnnnnnnnnnnnnnnnnnnnnnnnnnnnnnnnnnnnnnnnnnnnnnnnnnnnnnnnnnnnnnnnnnnnnnnnnnnnnnnnnnnnnnnnnnnnnnnnnnnnnnnnnnnnnnnnnnnnnnnnnnnnnnnnnnnnnnnnnnnnnnnnnnnnnnnnnnnnnnnnnnnnnnnnnnnnnnnnnnnnnnnnnnnnnnnnnnnnnnnnnnnnnnnnnnnnnnnnnnnnnnnnnnnnnnnnnnnnnnnnnnnnnnnnnnnnnnnnnnnnnnnnnnnnnnnnnnnnnnnnnnnnnnnnnnnnnnnnnnnnnnnnnnnnnnnnnnnnnnnnnnnnnnnnnnnnnnnnnnnnnnnnnnnnnnnnnnnnnnnnnnnnnnnnnnnnnnnnnnnnnnnnnnnnnnnnnnnnnnnnnnnnnnnnnnnnnnnnnnnnnnnnnnnnnnnnnnnnnnnnnnnnnnnnnnnnnnnnnnnnnnnnnnnnnnnnnnnnnnnnnnnnnnnnnnnnnnnnnnnnnnnnnnnnnnnnnnnnnnnnnnnnnnnnnnnnnnnnnnnnnnnnnnnnnnnnnnnnnnnnnnnnnnnnnnnnnnnnnnnnnnnnnnnnnnnnnnnnnnnnnnnnnnnnnnnnnnnnnnnnnnnnnnnnnnnnnnnnnnnnnnnnnnnnnnnnnnnnnnnnnnnnnnnnnnnnnnnnnnnnnnnnnnnnnnnnnnnnnnnnnnnnnnnnnnnnnnnnnnnnnnnnnnnnnnnnnnnnnnnnnnnnnnnnnnnnnnnnnnnnnnnnnnnnnnnnnnnnnnnnnnnnnnnnnnnnnnnnnnnnnnnnnnnnnnnnnnnnnnnnnnnnnnnnnnnnnnnnnnnnnnnnnnnnnnnnnnnnnnnnnnnnnnnnnnnnnnnnnnnnnnnnnnnnnnnnnnnnnnnnnnnnnnnnnnnnnnnnnnnnnnnnnnnnnnnnnnnnnnnnnnnnnnnnnnnnnnnnnnnnnnnnnnnnnnnnnnnnnnnnnnnnnnnnnnnnnnnnnnnnnnnnnnnnnnnnnnnnnnnnnnnnnnnnnnnnnnnnnnnnnnnnnnnnnnnnnnnnnnnnnnnnnnnnnnnnnnnnnnnnnnnnnnnnnnnnnnnnnnnnnnnnnnnnnnnnnnnnnnnnnnnnnnnnnnnnnnnnnnnnnnnnnnnnnnnnnnnnnnnnnnnnnnnnnnnnnnnnnnnnnnnnnnnnnnnnnnnnnnnnnnnnnnnnnnnnnnnnnnnnnnnnnnnnnnnnnnnnnnnnnnnnnnnnnnnnnnnnnnnnnnnnnnnnnnnnnnnnnnnnnnnnnnnnnnnnnnnnnnnnnnnnnnnnnnnnnnnnnnnnnnnnnnnnnnnnnnnnnnnnnnnnnnnnnnnnnnnnnnnnnnnnnnnnnnnnnnnnnnnnnnnnnnnnnnnnnnnnnnnnnnnnnnnnnnnnnnnnnnnnnnnnnnnnnnnnnnnnnnnnnnnnnnnnnnnnnnnnnnnnnnnnnnnnnnnnnnnnnnnnnnnnnnnnnnnnnnnnnnnnnnnnnnnnnnnnnnnnnnnnnnnnnnnnnnnnnnnnnnnnnnnnnnnnnnnnnnnnnnnnnnnnnnnnnnnnnnnnnnnnnnnnnnnnnnnnnnnnnnnnnnnnnnnnnnnnnnnnnnnnnnnnnnnnnnnnnnnnnnnnnnnnnnnnnnnnnnnnnnnnnnnnnnnnnnnnnnnnnnnnnnnnnnnnnnnnnnnnnnnnnnnnnnnnnnnnnnnnnnnnnnnnnnnnnnnnnnnnnnnnnnnnnnnnnnnnnnnnnnnnnnnnnnnnnnnnnnnnnnnnnnnnnnnnnnnnnnnnnnnnnnnnnnnnnnnnnnnnnnnnnnnnnnnnnnnnnnnnnnnnnnnnnnnnnnnnnnnnnnnnnnnnnnnnnnnnnnnnnnnnnnnnnnnnnnnnnnnnnnnnnnnnnnnnnnnnnnnnnnnnnnnnnnnnnnnnnnnnnnnnnnnnnnnnnnnnnnnnnnnnnnnnnnnnnnnnnnnnnnnnnnnnnnnnnnnnnnnnnnnnnnnnnnnnnnnnnnnnnnnnnnnnnnnnnnnnnnnnnnnnnnnnnnnnnnnnnnnnnnnnnnnnnnnnnnnnnnnnnnnnnnnnnnnnnnnnnnnnnnnnnnnnnnnnnnnnnnnnnnnnnnnnnnnnnnnnnnnnnnnnnnnnnnnnnnnnnnnnnnnnnnnnnnnnnnnnnnnnnnnnnnnnnnnnnnnnnnnnnnnnnnnnnnnnnnnnnnnnnnnnnnnnnnnnnnnnnnnnnnnnnnnnnnnnnnnnnnnnnnnnnnnnnnnnnnnnnnnnnnnnnnnnnnnnnnnnnnntgggtgcccacagtgccaggcactgggcatgcggagttcctcccttccagctccctgtgcccgcagggtcctgggaggagagacactggtggggataggccagccacgcatcagactctgaaccccactaaggagcccattgtggcctgaggctgccctcctccggggttcagccctgaggacagagatgcctccttcctcttttccttcccaaagcaagcaggaggctgtggctgctgtgggaaatggtactgtacagctggctctgcttccccatggccctgagcgagtggggtctgccacccaggatccccgaggcgctttgggggcgaagggttctgcgggcatatgcgagtggtttctcgtgcactggcaccaagtgcggatccggca

SEQ ID NO: 19934 - DNA, 730 bp, Macaca Mulatta
ttgtttgttacaggaaaactaacccttcttccattttcttcctcagaaatgaacgtgagggaattccagcaaatctgatccagcagttggacgtttgtgtggaaattcctcaacagggcattatccgctccctgaacgtccatgtgagtggtgccctgctgatctgggagtacaccaggcagcagctgctctcgcacggagacgccaagccatgatgtgccttcctcagtgaagcgctggtgctgttcaaaccttttttaaaaaaactatttggactaaagaaacagattatgaaatttactgtgataatttgtatttcttttttcttgcaatttaatgccaaaagtttgccatgtgccttaaacataatactatatattttcccctttaataaacactttttgttaaattgtattcttccattaataaaatattttaagcagttgtggaaataaaagaatggattttttaagagataatttatttcctagaaatgcctattctcagaaatgtggtctatgatagtgcagagttaaagccgcgatcatctgtcaacactcatacccttcagtcataaggagaccaggaggttgaggcaaaggttccgaatgaagaggggtcgtcagcctctgtgccgctttccgtctcggtactcccctcgggaagcacgcttggcaggatgcagagccagcgtccctgtgagatcgagaatgctcaggcaataggcttt

SEQ ID NO: 19935 - DNA, 110 bp, Macaca Mulatta
aggaacaactttctcaagttcttgatgccatgtttgaaaggatagtcaaagctgatgagcatgtcattgaccaaggagatgatggagacaacttttatgtcatagaacgg

SEQ ID NO: 19936 - DNA, 805 bp, Macaca Mulatta
ggattttccagggaaaaagagagttttgtcccacagtcagcaggccactagtttattaacttccagtcaccttgatttttgctaaaatgaagactctgcagtctacacttctcctgttactgtttgtgcctctgataaagccagcaccaccaactcagcaggactcacgcattatctatgattatggaacagataattttgaagaatccatatttagccaagattatgaggataaatacctggatggaaaaaatattaaggaaaaagaaactgtgataatacccgatgagaaaagtcttcaattacaaaaagatgaggcaataacaccattacctcccaggaaagaaaatgatgaaatgcccacgtgtctgctgtgtgtttgtttaagtggctctgtatactgtgaagaagttgacattgatactgtaccacccttgccaaaggaatcagcctatctttacgcacgattcaacaaaattaaaaagctgactgccaaagattttgcagacatacctaacttaagaagactcgattttacgggaaatttgatagaagatatagaagacggtactttttttcaaactttctctgttagaagaacttttccttgctgaaaatcacctactaaaacttccagttcttccctcccaaactcacttttattttatgccaaaatacaaccaaattccagagtagggggaatccaaagcaaatgcctttcaaaaaaactggaataaccctcccctttccctcctaacttggaccataatggccctggaaaaccgtggcctccttaattttccca

SEQ ID NO: 19937 - DNA, 157 bp, Macaca Mulatta
agagacctcatgactattccccaccttttcgatttgggacagtgcctaatggaagcacggagagaaacattcggaataactatccctacatgcatcagtacatgaccaaatttaatcagaagggagtagaggatgccttggtcagcctgaaaacggg

SEQ ID NO: 19938 - DNA, 2442 bp, Macaca Mulatta
  misc_feature (1)...(2442): n = A,T,C or G
ccgatctactttaagagttgaaacctacgggcctggggggcgaagagcgttccctcctgccatgggacaactgagacagagcgccccggccgcttcgggggcccggaaagggcgcggcccaggacccagggaggnnnnnnnnnnnnnnnnnnnnnnnnnnnnnnnnnnnnnnnnnnnnnnnnnnnnnnnnnnnnnnnnnnnnnnnnnnnnnnnnnnnnnnnnnnnnnnnnnnnnnnnnnnnnnnnnnnnnnnnnnnnnnnnnnnnnnnnnnnnnnnnnnnnnnnnnnnnnnnnnnnnnnnnnnnnnnnnnnnnnnnnnnnnnnnnnnnnnnnnnnnnnnnnnnnnnnnnnnnnnnnnnnnnnnnnnnnnnnnnnnnnnnnnnnnnnnnnnnnnnnnnnnnnnnnnnnnnnnnnnnnnnnnnnnnnnnnnnnnnnnnnnnnnnnnnnnnnnnnnnnnnnnnnnnnnnnnnnnnnnnnnnnnnnnnnnnnnnnnnnnnnnnnnnnnnnnnnnnnnnnnnnnnnnnnnnnnnnnnnnnnnnnnnnnnnnnnnnnnnnnnnnnnnnnnnnnnnnnnnnnnnnnnnnnnnnnnnnnnnnnnnnnnnnnnnnnnnnnnnnnnnnnnnnnnnnnnnnnnnnnnnnnnnnnnnnnnnnnnnnnnnnnnnnnnnnnnnnnnnnnnnnnnnnnnnnnnnnnnnnnnnnnnnnnnnnnnnnnnnnnnnnnnnnnnnnnnnnnnnnnnnnnnnnnnnnnnnnnnnnnnnnnnnnnnnnnnnnnnnnnnnnnnnnnnnnnnnnnnnnnnnnnnnnnnnnnnnnnnnnnnnnnnnnnnnnnnnnnnnnnnnnnnnnnnnnnnnnnnnnnnnnnnnnnnnnnnnnnnnnnnnnnnnnnnnnnnnnnnnnnnnnnnnnnnnnnnnnnnnnnnnnnnnnnnnnnnnnnnnnnnnnnnnnnnnnnnnnnnnnnnnnnnnnnnnnnnnnnnnnnnnnnnnnnnnnnnnnnnnnnnnnnnnnnnnnnnnnnnnnnnnnnnnnnnnnnnnnnnnnnnnnnnnnnnnnnnnnnnnnnnnnnnnnnnnnnnnnnnnnnnnnnnnnnnnnnnnnnnnnnnnnnnnnnnnnnnnnnnnnnnnnnnnnnnnnnnnnnnnnnnnnnnnnnnnnnnnnnnnnnnnnnnnnnnnnnnnnnnnnnnnnnnnnnnnnnnnnnnnnnnnnnnnnnnnnnnnnnnnnnnnnnnnnnnnnnnnnnnnnnnnnnnnnnnnnnnnnnnnnnnnnnnnnnnnnnnnnnnnnnnnnnnnnnnnnnnnnnnnnnnnnnnnnnnnnnnnnnnnnnnnnnnnnnnnnnnnnnnnnnnnnnnnnnnnnnnnnnnnnnnnnnnnnnnnnnnnnnnnnnnnnnnnnnnnnnnnnnnnnnnnnnnnnnnnnnnnnnnnnnnnnnnnnnnnnnnnnnnnnnnnnnnnnnnnnnnnnnnnnnnnnnnnnnnnnnnnnnnnnnnnnnnnnnnnnnnnnnnnnnnnnnnnnnnnnnnnnnnnnnnnnnnnnnnnnnnnnnnnnnnnnnnnnnnnnnnnnnnnnnnnnnnnnnnnnnnnnnnnnnnnnnnnnnnnnnnnnnnnnnnnnnnnnnnnnnnnnnnnnnnnnnnnnnnnnnnnnnnnnnnnnnnnnnnnnnnnnnnnnnnnnnnnnnnnnnnnnnnnnnnnnnnnnnnnnnnnnnnnnnnnnnnnnnnnnnnnnnnnnnnnnnnnnnnnnnnnnnnnnnnnnnnnnnnnnnnnnnnnnnnnnnnnnnnnnnnnnnnnnnnnnnnnnnnnnnnnnnnnnnnnnnnnnnnnnnnnnnnnnnnnnnnnnnnnnnnnncaggcgtgccccaccacgcccggctaattttttgtattttgtctagatatggggggctctctatgttgctcagggtggtctcgaactcctggactcaagcagtccgcccacctcagactcccaaagtgctggaattagaggcatgagccccagcacctggccttacctttctacttttataattctgtatgtgattattttatgaatatgaagaaactttagtaaatgtacttgtttacacagttatgtgaatggattaggtaaacaaaatgaggagacgtacaatgggggaagaagaaaaagtcctctgtaagatgtcactgtctgggttccagttctccctcagctgtactttggtttcaatgactggcaacttctaaaggggccagccttttgaactggacaaccttacaagtatatgagtattatttataggtagttgtttacatgtgagtcgggaccaaagagaactggatccatgtgaagtcctgtgtgtgactggtccctacctgggcagtctcatttgcacctgtagcccctatctatggacaggctgggactgaggcagacgggttagatcacatacagcaaatagggtctatgtcatatccc

SEQ ID NO: 19939 - DNA, 154 bp, Macaca Mulatta
  misc_feature (1)...(154): n = A,T,C or G
tcaaaactcaccaatgaagacttcaggaaacttctcatgacccccagggctgcacctacctctgcaccaccttctaagtcacgtcaccatgagngatgccaagggagtacaatgaggatgaagacccagctgcacgaaggaggaaaaagaaaag

SEQ ID NO: 19940 - DNA, 1366 bp, Macaca Mulatta
tccctcctccggggaaaacccttttttaccacccaagtttttgtgtgtggctctggggaacaacactagaaggaaggagaggccctgggaaaaaaggtggttttttaagggaaggccattttttgccggggtgggaaccaaatggaaaaagggccccggggctttccaatcggtaaattccctggtttgggtggaatcccaacaatcttggctggaaaaggggaaccagaagaggcccaaggatgggagcccacccgatccaggacagagtattttgcgctccgggagggggcaatgatcttgatcttcatggtgctgggcgctaggggccgtgatctccttctgcattcggctcggcaatgccagggtacatagtggtgcctcctgataggacattgttagcgtagaggtccttcctgatgtcaatatcacacttcatgatgctgttgtaggtggtttcatggatgcctgcagactccatcccgatgaaggatggctggaacagggtctctgggcagcggaagcgttcatttccgatggtgatcacttgcccatcaggcagctcgtaactcttctcaagggaggaggaggatgcggcagtggccatctcattttcaaagtcccagagctacataacaccagtttctcccttgatgtcccggacaatctcacgctcagcggtagtaacgaaggaatagccacgctcagtcaggatttttcatgaggtagtcagtgagatctcggccagccagatccagacgcatgatggcatggggcaaggcataaccttcatagatggggacattgtgggtgacaccatctccagagtccagcacgatgccagttgtgcgtccagaggcgtagagggacagcaccgcctggatagccacatacatggctgggacattgaaagtctcaaacataatctgggtcattttttcccgattggccttggggttcaggggcgcctccgtgagcagggtgggatgctcttcaggggcaacacgaagctcgttgtagaaagagtggtgccagatcttttccatgtcgtcccagttggtaatgatgccgtgttctatcgggtacttcagggtcaagattcctcttttgctctgtgcttcgtcacccacgtagctgtctttttgtcccattcccaccatcaccccctgatgtctgggacgtcccacaatggatgggaaaacagccctgggagcatcgtccccagcaaagccggccttacagagcccagagccattgtcacacaccaaggcagtgctgtcctcttcttcacacatagctggagctgcttcacaggattcctgacagtgcttggctgggcttctccacactgggtggtgttcccccc

SEQ ID NO: 19941 - DNA, 777 bp, Macaca Mulatta
gggagctgcagtcttggaccataatcatggtggacatgatggagttaccgaggtcgcgcatcaacgtcggcatgctagctcagttcatcgacaagcctgtctgcttcgtagggaggctggaaaaggtatgcgggttcgcagtcatgggctcccctgtccgtagctggagggagggaccccatgaccgcctgggtggcggattctaagtggataacggcggatgaaaaagcacggaaagcctcagatgactgcgctcccgaatcctttattttgcaaaaggagacttcttggaaattctttagccgttgtagccccattttggtgcctcttttatgacacggaaacaaggtgttttcagatgctctgcgttctaaattccagtgcccgtcgcctccgttctggccgtgcttacgtaggggaaattataaacacgactcccacatctagcttcagatttcttagtttactcagacgtcacggacgccgacaaaactaatctgctggattccttctcttctgaaattacttctttttgcaaacctcgtttcctcgtaatcgcttctctgtaaaacatgccttgattgtccgctttgggtcccgtagtagtgagttatctaacccccactattaaagtgaagttccctcattctacaggcgagaaaaaaggcccaaagtcttgggaatcagtgacctggaaaactgaggaaaaagaaaactatttatataaagaacttattttgtaagctcattttccttcacaacatcccttttccctaa

SEQ ID NO: 19942 - DNA, 315 bp, Macaca Mulatta
agtgtaccaacgtacgtgttggtagcacttaagacttacacttgccttctagctggtagcattcctttatacatggtggattaattataaataaatagtcagatgtatcctaacataatttcttatttaattttattatttatatattgtgtcagttcagaggccaaaaagagctcatgaacatgtcgcaggctctgacggcgctgaccatggagaaggctggatttgatcatctagtgtcttcagtaaccaaagctaattattaaggaaaaaaacttgaagaaagaaaatagtccttacttcatctataatgag

SEQ ID NO: 19943 - DNA, 845 bp, Macaca Mulatta
ggggggatggcagatgagattgccaaggctcaggtcgctcggcctggtggcgacacgatcttcgggaagatcatccgcaaggaaataccagccaaaatcatttttgaggatgaccagtgccttgctttccacgacatttcccctcaagcaccaacacattttctggtgatacccaagaaacatatatcccagatttctgcagcagaagatgatgatgaaagtcttcttggacacttaatgattgttggcaagaaatgtgctgctgatctgggcctgaataagggttatcgaatggtggtgaatgaaggttcagatggtggacagtctgtctatcacgttcatctcccatgttcttggaggtcggcagatgcattggcctcctggttaagcacgttttggggataattttctcttctctaggcaatgattaagttagggaagttccagtatgttaagtaacacactttatttttgcctgtgatatggggagatttctagaaattatttttaaaaacctcattacattagataaaagacatttgttggcaattgattatacaatatactcctagctatcaaattgtttaaatattagtaaatacatataactaaacttgacatacctgtagtttcgattataaaaaagatgtgtgcagcccaccccctttccctttatcaaaaatgcctttctctgaaacactattttttttaggcgtccggcggaccccatgaatatggttaaaagagggaacccggcgattattagccatgttatctcttaggggaaactcccttgtgacccgaaatttagtcgttgcgtgggaaatgctcctaccaaatataag

SEQ ID NO: 19944 - DNA, 338 bp, Macaca Mulatta
tactgagctgcctacttcggtatctatgacactagaaacggaatgcttccggatcccaagaacactcacattgtcctcagctggatgatcgcacagactgccactgcccttggtgggttggcttcctatccatttgacaccgtttgcccccacatgatgatgcagtcagggcgcaaaggaactgacttcatgtacacagacatgcttgactactaaagaaggttgctcctgatgaaggaggcaaagcttttctcaagggtgcatggtccagtgttctcagaggcatgggtggtgctttcgtgcttgtcttgtatgattaaatcaagaaccacacataa

SEQ ID NO: 19945 - DNA, 1019 bp, Macaca Mulatta
  misc_feature (1)...(1019): n = A,T,C or G
acagccagtgcagaggagaggaacgtgtgtccggtgtcccgatccctgcggagctagtacctggaagctctgtgccctgggcgccttacagccctgcacctgcctgccgcttccccactgaggccatgggcccgggagttctgctgctcctgctggtggccacagcttggcatggtnnggtcagggaatcccagtgatagagcccagtggccctgagttggtcgtgaagccgggagaaatggtgaccctgcgatgtgtgggcaatggcagtgtggaatgggatggccccatatcacctcactggaccctgtactctgatggccccagcagcgtcctcaccaccaccaacgctaccttccaaaacacaaggacctatcgctgcactgagcctggagaccccctgggaggcagcgccgccatccacctctacgtcaaannnnnnnnnnnnnnnnnnnnnnnnnnnnnnnnnnnnnnnnnnnnnnnnnnnnnnnnnnnnnnnnnnnnnnnnnnnnnnnnnnnnnnnnnnnnnnnnnnnnnnnnnnnnnnnnnnnnnnnnnnnnnnnnnnnnnnnnnnnnnnnnnnnnnnnnnnnnnnnnnnnnnnnnnnnnnnnnnnnnnnnnnnnnnnnnnnnnnnnnnnnnnnnnnnnnnnnnnnnnnnnnnnnnnnnnnnnnnnnnnnnnnnnnnnnnnnnnnnnnnnnnnnnnnnnnnnnnnnnnnnnagtcatcccagggcccccagctttgacactggtgcctgaagagctggtgcggattcgaggggaggctgcccagatcgtgtgctcagccagcaacattgacgttgactttgatgtcttcctccaacacaacaccaccaangctcgcaatccctcagcgatctgactttcacgataaccgttaccaaaaagtcctgaccctcagcctcggtcaagtcgacttccaacatgctggcaactactcctgcgtggccagcaacgtgcagggcaagcactccacctccatgttcttccgggtcgtag

SEQ ID NO: 19946 - DNA, 311 bp, Macaca Mulatta
tgcctcataggtctcttcccgccagcactggacgctgccccccatggcggtcagcaggcagggctccgtggggtggtaggccaacgactgcaccacgccatgacccacaggcagggccagagccagggcaccctgtggagcgaggggtagggagtggttatttgtggctgggctgtcccctcgttcctgaggtccctgggcaccccccatctcagtcctgcctgaagctctcagtcacctctcacctgaccttcagccacctgcctctaattgcctcctggacactgcaaaatgaacctaccccagactga

SEQ ID NO: 19947 - DNA, 1085 bp, Macaca Mulatta
  misc_feature (1)...(1085): n = A,T,C or G
taggcccagtccaagaatatgagctgctgcttcaggtgacctatagagattccaaggagaaaagagatttgaggaattttctgaagctcttgaagcctccattattatggtcacacgggctcatgattatcagagcaaaggctaccacnnnnnnnnnnnnnnnnnnnnnnnnnnnnnnnnnnnnnnnnnnnnnnnnnnnnnnnnnnnnnnnnnnnnnnnnnnnnnnnnnnnnnnnnnnnnnnnnnnnnnnnnnnnnnnnnnnnnnnnnnnnnnnnnnnnnnnnnnnnnnnnnnnnnnnnnnnnnnnnnnnnnnnnnnnnnnnnnnnnnnnnnnnnnnnnnnnnnnnnnnnnnnnnnnnnnnnnnnnnnnnnnnnnnnnnnnnnnnnnnnnnnnnnnnnnnnnnnnnnnnnnnnnnnnnnnnnnnncttaaaaaagcatacaaaaaaattcaaggtttgaagtttgttcaggtcacccaatttcgnnnnnnnnnnnnnnnnnnnnnnntggagtgcaatggtgcaatctaggctcactgtaaccctgcaacctctgcctacggggttcaagagattatcctgcctcaacctcccaagtagctgggattacaggcacccaccacgacatccagctaacttttttgtatttttagtagagacagggtttcaccatgttggtcatgctggtctcaaacccctgacctcaggtgatctgcctgcctcggcccccaaagtgctgggatttcaggcatgagccaccacatctggcctaggaccttaaatattgaaaagcattctcaaaactgtgggtcagtgagtagaagtacaaaacaatagtagtagggcagaaagttggaagaaggcaggagatcatggtgctcgtccatgggaaaaagtgagggttggggataagggttgtgggttgtcgaagggtggattttctccttcagcaaccacaggagatatgatgcctcataatttggagccagaagtggggctttgggtgaaatatctttgcacagacatcatgtatacatcatagttcaaaaccccagtagtcattgttacagcaaataaagaaatatt

SEQ ID NO: 19948 - DNA, 753 bp, Macaca Mulatta
gggttatgaaaactcctgagtagtagaatggtgggtaggagctaggatgtttttctacaatcgaattttaaactaactttatctattttatagatactattgaacagttttttaatagttcgtacctaactctaacttttcataaaactttaatgttttttccttcactaccttaaatatgcaagaaatactaacttgttatagggcatcttaactgttttctctatcattaggtaaaattatatttcgactgattgatctgtgtgacaaaattatttcttagctataatcagcacatcacttacttcaaacaaaattccccagcaatagtagtaggtatatcaatcacctggggagttttcttcataatatacatattcatcttgtaacgcatacatagtcatcatcctccttctcaacccatcttcctaaccccacatgcttgccagttcttgaagggataaagtgattctaataatgtttcacttctctctgttgaatttaatgtgatataattctagtataaaaatattttggacagttgtttaacattggtcctaagtggatttgtactgtcgaatatcttctagtgctgatttttctgtagagcaaaccatatttctttcactggatagctttctttattagatgtgtttcttcacttaagattaaaaactgagatggaattcatttcagaaggtcttgtcattcatcccctgccttcaaaaccaagcttttacctctactaacctt

SEQ ID NO: 19949 - DNA, 723 bp, Macaca Mulatta
catgagtaaaacacaagacttcacattcagccgaattgtggtctgttacaaggcaggcctttcctacatggggtggagagaccagcctttcttcctttggtaggaatggcctgagttggtgttgtgggcaggccactggtttgtatgatgtatcagtagagcaacccgttaatattttgtagtttgtattaaacctgaactgagaccttgatgagtctttattttaggaggtatattactagcttttgattttaagaggaatttactctgctttccctgtttaggggaaaatgagagctgcctccaaatcgggattatattgacacaggtagacacagggaatggaactgaatgaacccaaggtgttaacattttgtttcactacacatgagggagaagaataagccctgctatagtgttgactggagcatggcgacttatgccacagactgggttgccagttagtctcggtgtgactacttggacacctatttttacttggacacactattcaaagggctgcatgggatccagaaacttggcctcttctgataaatgcctggtacctgctatgtaaaagagagttggaggtttctttttcttttgaactgggagaaagaggaagacagaaagggctggtggccttgggtaggcctttcagtagttgtacagtactgggcaattcttagcctttcctgggttctagccttgattagagatagc

SEQ ID NO: 19950 - DNA, 2715 bp, Macaca Mulatta
  misc_feature (1)...(2715): n = A,T,C or G
actggcccgctggcactgctggggctgccagcggaggaaccagagcctgccttcccgccagtgcttgagcctcgatggtttgcccactatgacgtgcaaagcctgctctttgattgggctccgaggtctcaggggacggggagccactcagaggccagctctgggaccctggcttcagcggacgaccaggctgccagctcggacctgctgcatggggcacctggctttgtgtgtgagctcgggggtgagggtgagctaggcctgggtggaccagcatccccacctgtgccccctgcactgcccaacgcggccgtgtccatcctggaggagccacagaaccaaaaatcggcctacagcctggagcacgcagacctgggtgccggctactaccgcaagtacttctatggcaaannnnnnnnnnnnnnnnnnnnnnnnnnnnnnnnnnnnnnnnnnnnnnnnnnnnnnnnnnnnnnnnnnnnnnnnnnnnnnnnnnnnnnnnnnnnnnnnnnnnnnnnnnnnnnnnnnnnnnnnnnnnnnnnnnnnnnnnnnnnnnnnnnnnnnnnnnnnnnnnnnnnnnnnnnnnnnnnnnnnnnnnnnnnnnnnnnnnnnnnnnnnnnnnnnnnnnnnnnnnnnnnnnnnnnnnnnnnnnnnnnnnnnnnnnnnnnnnnnnnnnnnnnnnnnnnnnnnnnnnnnnnnnnnnnnnnnnnnnnnnnnngctgagtttccagcgcaaggtgggcatcctgtactgccgggcgggccagggctcagaggaggagatgtacaacaaccaggaggcgggaccagccttcatgcagtttctcaccttgctgggcgatgtggtgcggctcaaaggctttgagagttaccgggcccaactagacacnnnnnnnnnnnnnnnnnnnnnnnnnnnnnnnnnnnnnnnnnnnnnnnnnnnnnnnnnnnnnnnnnnnnnnnnnnnnnnnnnnnnnnnnnnnnnnnnnnnnnnnnnnnnnnnnnnnnnnnnnnnnnnnnnnnnnnnnnnnnnnnnnnnnnnnnnnnnnnnnnnnnnnnnnnnnnnnnnnnnnnnnnnnnnnnnnnnnnnnnnnnnnnnnnnnnnnnnnnnnnnnnnnnnnnnnnnnnnnnnnnnnnnnnnnnnnnnnnnnnnnnnnnnnnnnnnnnnnnnnnnnnnnnnnnnnnnnnnnnnnnnnnnnnnnnnnnnnnnnnnnnnnnnnnnnnnnnnnnnnnnnnnnnnnnnnnnnnnnnnnnnnnnnnnnnnnnnnnnnnnnnnnnnnnnnnnnnnnnnnnnnnnnnnnnnnnnnnnnnnnnnnnnnnnnnnnnnnnnnnnnnnnnnnnnnnnnnnnnnnnnnnnnnnnnnnnnnnnnnnnnnnnnnnnnnnnnnnnnnnnnnnnnnnnnnnnnnnnnnnnnnnnnnnnnnnnnnnnnnnnnnnnnnnnnnnnnnnnnnnnnnnnnnnnnnnnnnnnnnnnnnnnnnnnnnnnnnnnnnnnnnnnnnnnnnnnnnnnnnnnnnnnnnnnnnnnnnnnnnnnnnnnnnnnnnnnnnnnnnnnnnnnnnnnnnnnnnnnnnnnnnnnnnnnnnnnnnnnnnnnnnnnnnnnnnnnnnnnnnnnnnnnnnnnnnnnnnnnnnnnnnnnnnnnnnnnnnnnnnnnnnnnnnnnnnnnnnnnnnnnnnnnnnnnnnnnnnnnnnnnnnnnnnnnnnnnnnnnnnnnnnnnnnnnnnnnnnnnnnnnnnnnnnnnnnnnnnnnnnnnnnnnnnnnnnnnnnnnnnnnnnnnnnnnnnnnnnnnnnnnnnnnnnnnnnnnnnnnnnnnnnnnnnnnnnnnnnnnnnnnnnnnnnnnnnnnnnnnnnnnnnnnnnnnnnnnnnnnnnnnnnnnnnnnnnnnnnnnnnnnnnnnnnnnnnnnnnnnnnnnnnnnnnnnnnnnnnnnnnnnnnnnnnnnnnnnnnnnnnnnnnnnnnnnnnnnnnnnnnnnnnnnnnnnnnnnnnnnnnnnnnnnnnnnnnnnnnnnnnnnnnnnnnnnnnnnnnnnnnnnnnnnnnnnnnnnnnnnnnnnnnnnnnnnnnnnnnnnnnnnnnnnnnnnnnnnnnnnnnnnnnnnnnnnnnnnnnnnnnnnnnnnnnnnnnnnnnnnnnnnnnnnnnnnnnnnnnnnnnnnnnnnnnnnnnnnnnnnnnnnnnnnnnnnnnnnnnnnnnnnnnnnnnnnnnnnnnnnnnnnnnnnnnnnnnnnnnnnnnnnnnnnnnnnnnnnnnnnnnnnnnnnnnnnnnnnnnnnnnnnnnnnnnnnnnnnnnnnnnnnnnnnnnnnnnnnnnnnnnnnnnnnnnnnnnnnnnnnnnnnnnnnnnnnnnnnnnnnnnnnnnnnnnnnnnnnnnnnnnnnnnnnnnnnnnnnnnnnnnnnnnnnnnnnnnnnnnnnnnnnnnnnnnnnnnnnnnnnnnnnnnnnnnnnnnnnnnnnnnnnnnnnnnnnnnnnnnnnnnnnnnnnnnnnnnnnnnnnnnnnnnnnnnnnnnnnnnnnnnnnnnnnnnnnnnnnnnnnnnnnnnnnnnnnnnnnnnnnnnnnnnnnnnnnnnnnnnnnnnnnnnnnnnnnnnngacagcccatcccagagagcggagaccctaagggaactccaaagtctgatgctgagngccagagcctgggaacctctcagagaaggtctctcacttggagtccatgctcaggaagctgcaggaggacctgcagaagg

SEQ ID NO: 19951 - DNA, 150 bp, Macaca Mulatta
gctgcagactgcaatacatagagtgacactagctcagatttagtgcctgtgctttgtggaagtgccctgaaaaacatagggatacagcccttgttagatgctgttactgtgtacttgccttcacctgaagagcgtaactatgaatttctg

SEQ ID NO: 19952 - DNA, 1698 bp, Macaca Mulatta
  misc_feature (1)...(1698): n = A,T,C or G
agtaaagccgtgaaagaccgcgaaggtaancaaagagaggcgacggagccgctcaagaagtcgagatcgaagatttagaggccgctacagaagtccttactccggaccaaaatttaacagtgccatccgaggaaagattgggttgcctcatagcatcaaattaagtagacgacgttcccgaagcaaaagtccattcagaaaagacaagagccctgtgagggaacctattgataatttaactcctgaggaaagagatgcaaggacagtcttctgtatgcagctggcggcaagaattcgaccaagggatttggaagagtttttctctacagtaggaaaggttcgagatgtgagaatgatatctgacagaaattcaagacgttccaaaggaattgcttatgtggagttcgttgatgttagctcagtgcctctagcaataggattaactggccaacgagttttaggagtgccaatcatagttaaggaatcacaggcgggagaaaaaacagagctgcagcaatggcaaacaatttacaaaagggaagtgctggacctatgaggctttatgtgggctcattacacttcaacataactgaagatatgcttcgtgggatctttgagccttttggaaggattgaaagtatccagctgatgatggacagtgaaactggtcgatccaagggatatggatttattacattttctgattcagaatgtgccaaaaaggctttggaacaacttaatggatttgaactagcaggaaggccaatgaaagttggtcatgttactgaacgtactgatgcttcgagtgctagttcatttttggacagtgatgaactggaaaggactggaattgatttgggaacaactggtcgtcttcagttaatggcaagacttgcagagggtacaggtttgcagattccaccagcagcacagcaagctctacagatgagtggctctttggcatttggtgctgtggcagaattctcttttgttatagatttgcaaacaagactttcccagcagactgaagcttcagctttagctgcagctgcctctgttcagccacttgcaacacaatgttttcaactctctaacatgtttaaccctcaaacagaagaagaagttggatgggatacagagattaaggatgatgtgattgaagaatgtaataaacatggaggagttattcatatttatgttgacaaaaattcagctcagggcaatgtgtatgtgaagtgcccatcaattgctgcagctattgctgctgtcaatgcattgcatggcaggtggtttgctggtaaaatgataacagcagcgtatgtacctcttccaacttaccacaaactgtttcctgattctatgacagcaacacaactactgggttccagtagacgatgaaggaagatatagtcccttatgtatatagctttatttctttcttgagaattcatcttgagttatcttttatttagataaaaataaagaggcaaggatctactgtcatttgtatacaatttcctgttaccttgaaaaaataaaaatgttcacaggaatgcagtgtgctcattctccctaaatagtaaatcccactgtatacaaaactgttctcttgttctgccttttaaaatgttcatgtagaaaattaatgaactataggaatagctctaggagaacaaatgtgcttcctgtaacaaaggc

SEQ ID NO: 19953 - DNA, 2065 bp, Macaca Mulatta
  misc_feature (1)...(2065): n = A,T,C or G
gatagtgacgagaggctgcgagactgtggaaatgaccctgaggaggaatgggctgggccagcttggcttccatgtgaattttgaaggaattgtcgcagatgtggaaccttttggctttgcctggaaggctggccttcgccaagggagccgcctcgtggagatctgcaaagtcgccgtggccactctgacacacgagcagatgatcgacctgctccgcacttctgtgactgtgaaggtggtcatcatccagccccacgacgacggctccccccgaannnnnnnnnnnnnnnnnnnnnnnnnnnnnnnnnnnnnnnnnnnnnnnnnnnnnnnnnnnnnnnnnnnnnnnnnnnnnnnnnnnnnnnnnnnnnnnnnnnnnnnnnnnnnnnnnnnnnnnnnnnnnnnnnnnnnnnnnnnnnnnnnnnnnnnnnnnnnnnnnnnnnnnnnnnnnnnnnnnnnnnnnnnnnnnnnnnnnnnnnnnnnnnnnnnnnnnnnnnnnnnnnnnnnnnnnnnnnnnnnnnnnnnnnnnnnnnnnnnnnnnnnnnnnnnnnnnnnnnnnnnnnnnnnnnnnnnnnnnnnnnnnnnnnnnnnnnnnnnnnnnnnnnnnnnnnnnnnnnnnggtgccagtcccctctactgctcgaacaccagggctcaggccctttggaatgtgacggagccagggagagggaagacaccatggaaacaagcaggcacccgnnnnnnnnnnnnnnnnnnnnnnnnnnnnnnnnnnnnnnnnnnnnnnnnnnnnnnnnnnnnnnnnnnnnnnnnnnnnnnnnnnnnnnnnnnnnnnnnnnnnnnnnnnnnnnnnnnnnnnnnnnnnnnnnnnnnnnnnnnnnnnnnnnnnnnnnnnnnnnnnnnnnnnnnnnnnnnnnnnnnnnnnnnnnnnnnnnnnnnnnnnnnnnnnnnnnnnnnnnnnnnnnnnnnnnnnnnnnnnnnnnnnnnnnnnnnnnnnnnnnnnnnnnnnnnnnnnnnnnnnnnnnnnnnnnnnnnnnnnnnnnnnnnnnnnnnnnnnnnnnnnnnnnnnnnnnnnnnnnnnnnnnnnnnnnnnnnnnnnnnnnnnnnnnnnnnnnnnnnnnnnnnnnnnnnnnnnnnnnnnnnnnnnnnnnnnnnnnnnnnnnnnnnnnnnnnnnnnnnnnnnnnnnnnnnnnnnnnnnnnnnnnnnnnnnnnnnnnnnnnnnnnnnnnnnnnnnnnnnnnnnnnnnnnnnnnnnnnnnnnnnnnnnnnnnnnnnnnnnnnnnnnnnnnnnnnnnnnnnnnnnnnnnnnnnnnnnnnnnnnnnnnnnnnnnnnnnnnnnnnnnnnnnnnnnnnnnnnnnnnnnnnnnnnnnnnnnnnnnnnnnnnnnnnnnnnnnnnnnnnnnnnnnnnnnnnnnnnnnnnnnnnnnnnnnnnnnnnnnnnnnnnnnnnnnnnnnnnnnnnnnnnnnnnnnnnnnnnnnnnnnnnnnnnnnnnnnnnnnnnnnnnnnnnnnnnnnnnnnnnnnnnnnnnnnnnnnnnnnnnnnnnnnnnnnnnnnnnnnnnnnnnnnnnnnnnnnnnnnnnnnnnnnnnnnnnnnnnnnnnnnnnnnnnnnnnnnnnnnnnnnnnnnnnnnnnnnnnnnnnnnnnnnnnnnnnnnnnnnnnnnnnnnnnnnnnnnnnnnnnnnnnnnnnnnnnnnnnnnnnnnnnnnnnnnnnnnnnnnnnnnnnnnnnnnnnnnnnnnnnnnnnnnnnnnnnnnnnnnnnnnnnnnnnnnnnnnnnnnnnnnnnnnnnnnnnnnnnnnnnnnnnnnnnnnnnnnnnnnnnnnnnnnnnnnnnnnnnnnnnnnnnnnnnnnnnnnnnnnnnnnnnnnnnnnnnnnnnnnnnnnnnnnnnnnnnnnnnnnnnnnnnnnnnnnnnnnnnnnnnnnnnnnnnnnnnnnnnnnnnnnnnnnnnnnnnnnnnnnnnnnagaccagagggtggcatccttctgcaccctgacagatatgcagcatggccaggacctggaaggggcccaggagctgcccttatgtgtagatccaggcagtggcaaagagttcatggacacgactgg

SEQ ID NO: 19954 - DNA, 318 bp, Macaca Mulatta
cctaataataatgcacagaaagagacttattctaagtggaggcaatttagtataaggccaaaggagagatgttctttgtcctgggagctggtggaagatcttaggttctgggagttggtgggaggtggtaacaaaggaataggtttgtctgttatatcatgagctaccaacaatagtcaaaagactagagtacaccaagtttgttttccaatcttatctaaccctgtgcagcctgttcttaaaggggaaagagaaaagctctcccaccttctagtctaggatgtccagatttacatagtttttaaatcccaaccgttg

SEQ ID NO: 19955 - DNA, 805 bp, Macaca Mulatta
gggttcatgcagccatccatttgcgcaaaatggggtgagaagattcaagaggacgtttattacttcctcataccgcatggcttttgatgattctggattctaaacaacccagaatggtcatttcaggcacaacgatactacgttcgtgtgtgtctgcttttaaacttggctgggctatcagaccctattctcggctcaggttttaagaagccatcagcaaatgtgtacgtgcaggctgcagctgcagcctgcatcccttcgcctgcagcctactttggggaaataaagtgccttactgactgtagccattacagtatccaatgtcttttgacaggtgcctgtccttgaaaaacaaagtttctatttttacttttaattggtttagttcttactgctggccaactcttatatccccagcaaatcaccaggccattggattttttccattatgttcattacccttatatcatgtacctcagaatctctctctctcctctcttctagttaaaggtttcctggccttggaactttttttcttttccctttcctttttcttttttaccgttttgtgttttttctaagccctctgaaaacagtgggggaggcccttatcaagctcccaggttttttcccctccagaggtgtactctaaaaaccgggggggggggggtccatttttgggtccgggatttttaaaacaagtgtcaaaaatagcccctgaatcattggttaccccgcaaaaaggtttttttaaagaatatgtgggtccaaaaaaatgttttcaatttgcccaataaaagaggga

SEQ ID NO: 19956 - DNA, 328 bp, Macaca Mulatta
agatctttaatctcatgaagtacgacagctacagccgcttcttaaagtctgacttgtttttaaaacacaagcgaaccgaggaagaggaagaagattcgcctgatgctcaaactgcagctaaaagagcttccagaatttataacacatgagcccccaaagagccaggactggcagctttaagaagcaaaggaacttcctctcaggaccctgcagggtttatcattgctttgttatttgtaaggactgaaatgtacaaaacccttccataggatatgtgtgttttattaactgcttcaccagtaaattttgcgtgatggctaagctaaca

SEQ ID NO: 19957 - DNA, 1666 bp, Macaca Mulatta
  misc_feature (1)...(1666): n = A,T,C or G
gttgaggcgccccgcccagtcagcagggttgcgcgtgccctgtgagaccgccaagatggtggtgggcgcgttccctatggcgaagctgctatacttgggcatccggcaggtcagcaagccgcttgccaaccgcattaaggaggccgcccgccgaagcgagttcttcaagacctatatctgcctcccgccggctcaacnnnnnnnnnnnnnnnnnnnnnnnnnnnnnnnnnnnnnnnnnnnnnnnnnnnnnnnnnnnnnnnnnnnnnnnnnnnnnnnnnnnnnnnnnnnnnnnnnnnnnnnnnnnnnnnnnnnnnnnnnnnnnnnnnnnnnnnnnnnnnnnnnnnnnnnnnnnnnnnnnnnnnnnnnnnnnnnnnnnnnnnnnnnnnnnnnnnnnnnnnnnnnnnnnnnnnnnnnnnnnnnnnnnnnnnnnnnnnnnnnnnnnnnnnnnnnnnnnnnnncgctgcagcggcaggtgcaggcggcgccgccacagggcgccctagaagaactgcgcacagagctgcaagaagtgcgcgcccagctctgcaaccccggcccggtccgcgtcccaggcagtgtctgcgtccaagaaataggagcttgctggaccctgaatttggacatggcctgtgtacctaacgtggccttcttcccacgccacccctgcctgtgctggcccagtggaaaccaccaggatcttggtgcaacttggcatttggttacccctgctgataagagcagcagttacctgccactgggaccagcaggtgaagtgttgcaacatagccctctccatcatccttcaccccctagccccgactccaaaccaggacgacctgcaaagtcccagccagcaggacaccgcgggcactctggcaaatgaaaaaaacggaacctggtcttgagctgaatcaatgtgttattgttaccgctcccccccaccccaccccggtttacctgatcagtgttaacctttaccgggacactcatctgttacactggaacaccctcttctctttgtcaatgggtacagacctctgtaaggaaatgcagtgtgttgcagtggtcttttctccccctcaccttctaaggtcagctctagttgagcatcactgctgtctttaggagnnnnnnnnnggtgtggctgggagccatggcttatacctgtaatcccagcacctggggaggctgaggcggccagatcacttgaggtcaggagttccagaccagcctggccacatggtgaaaccccatctctactaaaaatacaaaaattagctgggtgtgatagggtgcgcttgtaatcccagctactcgggaggctgaggcaggagaattgcttgaacccacgaggtggagattgcagtgagccaagatggtaccattacactctagcctgggcgacagagcaagacaccatctcaaaaccaaaagttaactaggcgtggtggtgggtgcctgtaatcccagctacttgggaggcttagacaggagaattgcttgaacttggaaggtggaggttgcagtgagccgagatnnnnnnnnnnnnnnnnnnnnnnnnnnnnnnnnnnnnnnnnnnnnnnnnnnnnnnnnnnnnnnnnnnnnnnnnnnnnnnnnnctgtaatcccggctacttggaaggctgagacaggagaattgcttgaac

SEQ ID NO: 19958 - DNA, 113 bp, Macaca Mulatta
atgatgggcccacctcctggtatgaggcctcctatgggtcccccaatggggatcccccctggaagagggactccaatgggcatgccccctccgggaatgcggcctcctccccc

SEQ ID NO: 19959 - DNA, 555 bp, Macaca Mulatta
  misc_feature (1)...(555): n = A,T,C or G
tcggacttcatccacggggaggtgctgggcaagggctgctttggtcaggccatcaaggnnnnnnnnnnnnnnnnnnnnnnnnnnnnnnnnnnnnnnnnnnnnnnnnnnnnnnnnnnnnnnnnnnnnnnnnnnnnnnnnnnnnnnnnnnnnnnnnnnnnnnnnnnnnnnnnnnnnnnnnnnnnnnnnnnnnnnnnnnnnnnnnnnnnnnnnnnnnnnnnnnnnnnnnnnnnnnnnnnnnnnnnnnnnnnnnnnnnnnnnnnnnnnnnnnnnnnnnnnnnnnnnnnnnnnnnnnnnnnnnnnnnnnnnnnnnnnnnnnnnnnnnnnnnnnnnnnnnnnnnnnnnnnnnnnnnnnnnnnnnnnnnnnnnnnnnnnnnnnnnnnnnnnnnnnnnnnnnnnnnnagaacaagaacgtggtggtggctgactttgggctggcacggctcatggtagatgaaaagactcagcccgaggacctgcggagcctcaagaagccagaccgcaagaagcgctacaccgtggtgggtaacccctactggatggcgcccgagatgatca

SEQ ID NO: 19960 - DNA, 470 bp, Macaca Mulatta
  misc_feature (1)...(470): n = A,T,C or G
ggagtgtgggcgtgccttcaaccagcacggccacctaatccagcaccagaaagtgcacagaaagttgtgacccatggctgacacaagaatccattctcacagaaactgcacgtggaaccacaagcagccttcagcccaagagaagtttctgttaactctataggaagcctttctttggtgattcagtgtcacaaaataactcaaaaaagaagcacttagcatgctgttcctgtggaaaaacttcagagactgcctgttttattttcctcaacatcttgaagttatattggagagtaatcataacattgtggtgaattttggtaaaaacagccataattttttctttgacattagtttatttgaactaagggaatttaaggcataagaactattatcccaataaaatcttacattccaaataaagttctttttccnnnnnnnannnnnnnnnnnnnnnnnnnnnnnnnnnn

SEQ ID NO: 19961 - DNA, 889 bp, Macaca Mulatta
  misc_feature (1)...(889): n = A,T,C or G
cttgttctggggtgggcatcggccgcgtgttttttggggagggttttgcaattttcggtatgttgcgttttcgtcgcggtggaagaggcgtttgttttgtggatggggcgaatgggttagtagatggcgggacgcttggtgggtgtggaagtattttggttagtnttgtgttgtgtttggccgtggagttgtccggtttttttggggatggttatcgtgttaaactttgctcgtgggtgggtgctggtaagtttttggtctggttatgactggtgcggtttgtttcggggtaaggggagtggagaatcctcccttttgtgggggcaaaggaatttttggcgtttgtcttttgcggcgtctggatggtttcgcgtcgttggtcttagtcgggagcagggcttggtgggttaatagggcgctcaggttaatgttttttngaaagaattactgtagtgtatggatggctggaaataatcaattttggtctttcaggaagatcgtttcggtgattttaactcatttatgtcagagggttgcgattttttgtgtgcgctaaatcagaccttggagatgtctttgagcagtaggatagaaataactccctcaaactcagtgttccaataatggaaaactagacataaatgagttaatgtgttgccaaggttagaaaccactgctttaaaaacagggattcttgagctttcttaactgtctctttttccactaggtggcacatctgtttccatggatatttatactgataatacccaaatttctatctcctaccagactagtccagactattcaactagttatttgacattccatttgtatttttcacggtaaggtatatatactttaacacttaattcaatttcaccataccccc

SEQ ID NO: 19962 - DNA, 907 bp, Macaca Mulatta
gggatgttagcgtttcccgccgggggagtaaggctgcgtcacccggcttggctactaagagaaggactgacggtcttgctagtggggaaacatgtctagtttctctagggcgccccagcaatgggccacttttgctagaatatggtatctcttagatgggaaaatgcagccacctggcaaacttgccgctatggcatcaataagacttcagggattacataaacctgtgtaccatgcactgagtgactgtggggatcatgttgttataatgaacacaagacacattgcattttctggaaacaaatgggaacaaaaagtatactcttcgcatactggctacccaggtggatttagacaagtaacagctgctcagcttcacctgagggatccagtggcaattgtaaaactagctatttatggcatgctgcctaaaaaccttcacagaagaacaatgatggaaaggttgcatctttttccagatgaggatattccagaagatattcttaagaatttggtggaggagcttcctcaaccacgaaaaatacctaaacgtctagatgagtacacacaagaagaaaatagatgccttcccaaagagtgtgggacttccccctgaaagattatccggctataaggagaataagaatttgcagaaaattaaacagtggaaatggattgaaaacttttctttctggatgagttttccctaaccttacaggaatgggagtagaaacaattttgctacagtttccgccaacctggtttttaatgggcccaaatcccctggggggaaaagggcccggaaagggacaaccccttcccaataaccaaatcgcccctctaacactttaacggtttttcggggaagccatcttctacggtgaatccgaatcttgaactggttatt

SEQ ID NO: 19963 - DNA, 643 bp, Macaca Mulatta
  misc_feature (1)...(643): n = A,T,C or G
tgcaacttaattttattaggacaaggctgttggacactggagtggcaccttccatggccaggagtggcaattgggaggggtcacaagggatgccacccaggcatctagaagccacagctgccctccacagcgcggcaccgcacggtgcgcaggaatgtctcgaccttgttcatgtccttcctgaagcagtagagcagcctgtagttcttgagcagtgtgtcatcgttgtgcgagtttgtgtcaaacttgctgtaggtctgcttgaagatctgcccagtccgggggctgccgtcttccagcctccacatcagcgtttggatgccttcctctaggcctcgtgccgaattcggcacgnnnnnnnnnnnnnnnnnnnnnnnnnnnnnnnnnnnnnnnnnnnnnnnnnnaaggagtgagggcatggaaaatatacagcacaccaatgaaacaaaatgnnnnnnnnnnnnnnnnnnnnnnntagaaaatagaaaaatgtatttacaagtagtacattactatgatgagaaagcacaaagacacctgctgctataatacatgcattggctcgagaagaaactacggaacaccctgcaagggagaagcctagaaaagaagaaaggccgaaggttgactcttcatccctatt

SEQ ID NO: 19964 - DNA, 981 bp, Macaca Mulatta
  misc_feature (1)...(981): n = A,T,C or G
gatcaccaacgtaatcaacccagcgctggacaaatattttccggcagactctggagtgttaatcatagctgagcccggcagatactatgttgcatcagctttcacacttgcggttaatatcatcgccaagaaaattgtattaaaggaacagactggctctgatgnnnnnatgagtcgagtgaacagacctttatgtattatgtgaatgatggcgtctatggatcatttaattgcatactgtatgatcacgcacatgtaaagccccttctgcaaaagnagagacctaaaccagatgagaagtattattcatccagcatatggggaccaacatgtgatggccttgatcggattgttgagcgctgtgacctgcccgaaatgcatgtgggtgattggatgctctttgaaaacatgggtgcttacactgttgctgctgcctctacgttcaatggcttccagaggccgacgatctactatgtgatgtcagggcctgcgtggcaactcacgcagcaattccagaaccccgacttcccacccgaagtagaggaacaggacaccagcaccctgcctgtgtcttgtgcctgggagagtgggatgaaacgccacccagcagcctgtgcttcagctggtattaatgtgtagatatcaccctagtagctgttaactacaagtttagcttaaattaagggatttggggggaccatgtaacttaattactgctagttttgaaatgtctttgtaagagtagggtcggcacgatgcagccatatggaagactaggatatgggtcacacttatctgtgttcctatggaaactatttgaatatttgttttacatggatttttattcactcttcagacacgctactcaagagtgcccctcagctgctgaacaagcgtttgtagcttgtacaatggcagaatgggccaaaagcttagtgttgtgacctgtttttaaaataaagtatcttgaaataattaggc

SEQ ID NO: 19965 - DNA, 3297 bp, Macaca Mulatta
  misc_feature (1)...(3297): n = A,T,C or G
gaagatcaaattcccaggggcttccctaccattgacatgggcccacagttgaaggtggttgagcgtactcgcacggccaccatgctttgtgcagccagtggtaatccggatccagaaatcacttggtttaaagattttctacctgtggacacaagcaacaacaatggtcgtattaagcagttacgatcaggnnnnnnnnnnnnnnnnnnnnnnnnnnnnnnnnnnnnnnnnnnnnnnnnnnnnnnnnnnnnnnnnnnnnnnnnnnnnnnnnnnnnnnnnnnnnnnnnnnnnnnnnnnnnnnnnnnnnnnnnnnnnnnnnnnnnnnnnnnnnnnnnnnnnnnnnnnnnnnnnnnnnnnnnnnnnnnnnnnnnnnnnnnnnnnnnnnnnnnnnnnnnnnnnnnnnnnnnnnnnnnnnnnnnnnnnnnnnnnnnnnnnnnnnnnnnnnnnnnnnnnnnnnnnnnnnnnnnnnnnnnnnnnnnnnnnnnnnnnnnnnnnnnnnnnnnnnnnnnnnnnnnnnnnnnnnnnnnnnnnnnnnnnnnnnnnnnnnnnnnnnnnnnnnnnnnnnnnnnnnnnnnnnnnnnnnnnnnnnnnnnnnnnnnnnnnnnnnnnnnnnnnnnnnnnnnnnnnnnnnnnnnnnnnnnnnnnnnnnnnnnnnnnnnnnnnnnnnnnnnnnnnnnnnnnnnnnnnnnnnnnnnnnnnnnnnnnnnnnnnnnnnnnnnnnnnnnnnnnnnnnnnnnnnnnnnnnnnnnnnnnnnnnnnnnnnnnnnnnnnnnnnnnnnnnnnnnnnnnnnnnnnnnnnnnnnnnnnnnnnnnnnnnnnnnnnnnnnnnnnnnnnnnnnnnnnnnnnnnnnnnnnnnnnnnnnnnnnnnnnnnnnnnnnnnnnnnnnnnnnnnnnnnnnnnnnnnnnnnnnnnnnnnnnnnnnnnnnnnnnnnnnnnnnnnnnnnnnnnnnnnnnnnnnnnnnnnnnnnnnnnnnnnnnnnnnnnnnnnnnnnnnnnnnnnnnnnnnnnnnnnnnnnnnnnnnnnnnnnnnnnnnnnnnnnnnnnnnnnnnnnnnnnnnnnnnnnnnnnnnnnnnnnnnnnnnnnnnnnnnnnnnnnnnnnnnnnnnnnnnnnnnnnnnnnnnnnnnnnnnnnnnnnnnnnnnnnnnnnnnnnnnnnnnnnnnnnnnnnnnnnnnnnnnnnnnnnnnnnnnnnnnnnnnnnnnnnnnnnnnnnnnnnnnnnnnnnnnnnnnnnnnnnnnnnnnnnnnnnnnnnnnnnnnnnnnnnnnnnnnnnnnnnnnnnnnnnnnnnnnnnnnnnnnnnnnnnnnnnnnnnnnnnnnnnnnnnnnnnnnnnnnnnnnnnnnnnnnnnnnnnnnnnnnnnnnnnnnnnnnnnnnnnnnnnnnnnnnnnnnnnnnnnnnnnnnnnnnnnnnnnnnnnnnnnnnnnnnnnnnnnnnnnnnnnnnnnnnnnnnnnnnnnnnnnnnnnnnnnnnnnnnnnnnnnnnnnnnnnnnnnnnnnnnnnnnnnnnnnnnnnnnnnnnnnnnnnnnnnnnnnnnnnnnnnnnnnnnnnnnnnnnnnnnnnnnnnnnnnnnnnnnnnnnnnnnnnnnnnnnnnnnnnnnnnnnnnnnnnnnnnnnnnnnnnnnnnnnnnnnnnnnnnnnnnnnnnnnnnnnnnnnnnnnnnnnnnnnnnnnnnnnnnnnnnnnnnnnnnnnnnnnnnnnnnnnnnnnnnnnnnnnnnnnnnnnnnnnnnnnnnnnnnnnnnnnnnnnnnnnnnnnnnnnnnnnnnnnnnnnnnnnnnnnnnnnnnnnnnnnnnnnnnnnnnnnnnnnnnnnnnnnnnnnnnnnnnnnnnnnnnnnnnnnnnnnnnnnnnnnnnnnnnnnnnnnnnnnnnnnnnnnnnnnnnnnnnnnnnnnnnnnnnnnnnnnnnnnnnnnnnnnnnnnnnnnnnnnnnnnnnnnnnnnnnnnnnnnnnnnnnnnnnnnnnnnnnnnnnnnnnnnnnnnnnnnnnnnnnnnnnnnnnnnnnnnnnnnnnnnnnnnnnnnnnnnnnnnnnnnnnnnnnnnnnnnnnnnnnnnnnnnnnnnnnnnnnnnnnnnnnnnnnnnnnnnnnnnnnnnnnnnnnnnnnnnnnnnnnnnnnnnnnnnnnnnnnnnnnnnnnnnnnnnnnnnnnnnnnnnnnnnnnnnnnnnnnnnnnnnnnnnnnnnnnnnnnnnnnnnnnnnnnnnnnnnnnnnnnnnnnnnnnnnnnnnnnnnnnnnnnnnnnnnnnnnnnnnnnnnnnnnnnnnnnnnnnnnnnnnnnnnnnnnnnnnnnnnnnnnnnnnnnnnnnnnnnnnnnnnnnnnnnnnnnnnnnnnnnnnnnnnnnnnnnnnnnnnnnnnnnnnnnnnnnnnnnnnnnnnnnnnnnnnnnnnnnnnnnnnnnnnnnnnnnnnnnnnnnnnnnnnnnnnnnnnnnnnnnnnnnnnnnnnnnnnnnnnnnnnnnnnnnnnnnnnnnnnnnnnnnnnnnnnnnnnnnnnnnnnnnnnnnnnnnnnnnnnnnnnnnnnnnnnnnnnnnnnnnnnnnnnnnnnnnnnnnnnnnnnnnnnnnnnnnnnnnnnnnnnnnnnnnnnnnnnnnnnnnnnnnnnnnnnnnnnnnnnnnnnnnnnnnnnnnnnnnnnnnnnnnnnnnnnnnnnnnnnnnnnnnnnnnnnnnnnnnnnnnnnnnnnnnnnnnnnnnnnnnnnnnnnnnnnnnnnnnnnnnnnnnnnnnnnnnnnnnnnnnnnnnnnnnnnnnnnnnnnnnnnnnnnnnnnnnnnnnnnnnnnnnnnnnnnnnnnnnnnnnnnnnnnnnnnnnnnnnnnnnnnnnnnnnnnnnnnnnnnnnnnnnnnnnnnnnnnnnnnnnnnnnnnnnnnnnnnnnnnnnnnnnnnnnnnnnnnnnnnnnnnnnnnnnnnnnnnnnnnnnnnnnnnnnnnnnnnnnnnnnnnnnnnnnnnnnnnnnnnnnnnnnnnnnnnnnnnnnnnnnnnnnnnnnnnnnnnnnnnnnnnnnnnnnnnnnnnnnnnnnnnnnnnnnnnnnnnnnnnnnnnnnnnnnnnnnnnnnnnnnnnnnnnnnnnnnnnnnnnnnnnnnnnnnnnnnnnnnagctgcttaaggagatatctaggaagcgcagaagcatccgttatgggagagaagttgaattaaagccatatattgccgctcactttgatgtccttcccactgagttcaccctgggggatgacaagcattatggtggatttacaaacaagcaactccaaagtggtcaagaatatgtcttctttgtgttagcagtaatggaacatgcagagtct

SEQ ID NO: 19966 - DNA, 3989 bp, Macaca Mulatta
  misc_feature (1)...(3989): n = A,T,C or G
atttctcttggatttggctacacacttatagatcttctgcactgtttacaggcacagnnnnnnnnnnnnnnnnnnnnnnnnnnnnnnnnnnnnnnnnnnnnnnnnnnnnnnnnnnnnnnnnnnnnnnnnnnnnnnnnnnnnnnnnnnnnnnnnnnnnnnnagccccaaaaggaacactgaaaaacgtaatcgtgaacaggaaaataaatatatagaagaacttgcagagctgatttttgcaaattttaatgatatagacaactttaacttcaaacctgacaaatgtgcaatcttaaaagaaactgtgaagcaaattcgtcagatcaaagaacaanagagaaagcagcagctgccaacatagatgaagtgcagaagtcagatgtatcctctacagggcagggtgtcatcgacaaggatgcgctggggcctatgatgcttgagnnnnnnnnnnnnnnnnnnnnnnnnnnnnnnnnnnnnnnnnnnnnnnnnnnnnnnnnnnnnnnnnnnnnnnnnnnnnnnnnnnnnnnnnnnnnnnnnnnnnnnnnnnnnnnnnnnnnnnnnnnnnnnnnnnnnnnnnnnnnnnnnnnnnnnnnnnnnnnnnnnnnnnnnnnnnnnnnnnnaatgggggatcttggtctggcgaacctccgaggcggaacagccataccttcaattgtcggatgctggtaaaacctttacctgattcagaagaggagggtcatgataaccaggaagctcatcagaaatatgaaactatgcagtgcttcgctgtctctcaaccaaagtccatcaaagaagaaggagaannnnnnnnnnnnnnnnnnnnnnnnnnnnnnnnnnnnnnnnnnnnnnnnnnnnnnnnnnnnnnnnnnnnnnnnnnnnnnnnnnnnnnnnnnnnnnnnnnnnaggcaagatcacttctctggataccagcaccatgagagcagccatgaaaccaggctgggaggacctggtaagaaggtgcattcagaagttccatgcgcagcatgaaggagaatctttgtcgtatgccaagaggcatcatcatgaannnnnnnnnnnnnnnnnnnnnnnnnnnnnnnnnnnnnnnnnnnnnnnnnnnnnnnnnnnnnnnnnnnnnnnnnnnnnnnnnnnnnnnnnnnnnnnnnnnnnnnnnnnnnnnnnnnnnnnnnnnnnnnnnnnnnnnnnnnnnnnnnnnnnnnnnnnnnnnnnnnnnnnnnnnnnnnnnnnnnnnnnnnnnnnnnnnnnnnnnnnnnnnnnnnnnnnnnnnnnnnnnnnnnnnnnnnnnnnnnnnnnnnnnnnnnnnnnnnnnnnnnnnnnnnnnnnnnnnnnnnnnnnnnnnnnnnnnnnnnnnnnnnnnnnnnnnnnnnnnnnnnnnnnnnnnnnnnnnnnnnnnnnnnnnnnnnnnnnnnnnnnnnnnnnnnnnnnnnnnnnnnnnnnnnnnnnnnnnnnnnnnnnnnnnnnnnnnnnnnnnnnnnnnnnnnnnnnnnnnnnnnnnnnnnnnnnnnnnnnnnnnnnnnnnnnnnnnnnnnnnnnnnnnnnnnnnnnnnnnnnnnnnnnnnnnnnnnnnnnnnnnnnnnnnnnnnnnnnnnnnnnnnnnnnnnnnnnnnnnnnnnnnnnnnnnnnnnnnnnnnnnnnnnnnnnnnnnnnnnnnnnnnnnnnnnnnnnnnnnnnnnnnnnnnnnnnnnnnnnnnnnnnnnnnnnnnnnnnnnnnnnnnnnnnnnnnnnnnnnnnnnnnnagacctaaaaatggccaatttgcaaaactccccattaattatgaatcctcccccactcagcaagatgggaagctttgactcaaaagactgttttggactttatggggagccctctgaaggtacacctggacaagcagagagcagctgccatcctggagagcaaaaggaaacaaatgaccccaacctgcccccgcccgtgagcggcgagagagccgacgggcagagcagactgcatgacagcaaagggcagaccaaactcctgcagctgctgaccaccaaatctgatcagatggagccctcgcccttagccagctctttgtcggacacaaacaaagactccacaggtagcttgcctggttctgggtcaacacatggaacctcgctcaaggagaagcataaaattttgcacagactgttgcaggacagcagttcccctgtggacttggccaagttatcagcagaaaccacaggcaaagacctgagccaggagtccagcagcacagctcctggatcagaagtgactattaaacaggaaccggtgagccccaagaagaaagagaatgcactacttcgctatttcctagataaagatgatactaaagatattggtttaccagaaataacccccaaacttgagcgtctggacagtaagacaggttcaaccagtaactcaaaattaatagcaatgaaaactgagaaggaggagannnnnnnnnnnnnnnnnnnnnnnnnnnnnnnnnnnnnnnnnnnnnnnnnnnnnnnnnnnnnnnnnnnnnnnnnnnnnnnnnnnnnnnnnnnnnnnnnnnnnnnnnnnnnnnnnnncctgctggatcagtgnacaagcaagccatcatcaatgacntcatgcaactcacagctgaaaacagccctgtcacacctgttggagcccagaaaacagcactgcgaatttcacagagcnnnnnnnnnnnnnnnnnnnnnnnnnnnnnnnnnnnnnnnnnnnnnnnnnnnnnnnnnnnnnnnnnnnnnnnnnnnnnnnnnnnnnnnnnnnnnnnnnnnnnnnnnnnnnnnnnnnnnnnnnnnnnnnnnnnnnnnnnnnnnnnnnnnnnnnnnnnnnnnnnnnnnnnnnnnnnnnnnnnnnnnnnnnnnnnnnnnnnnnnnnnnaggaatgattggtagcagtgcttctcggcctaccatgccatctggagaatgggcaccacagagttcggctgtgagagtcacctgtgctgctaccaccagtgccatgaaccggccagtccaaggaggtatgattcggaacccagcggccagcatccccatgaggcccagcagccagcctggccaaagacagacgcttcagtctcaggtcatgaatataggnnnnnnnnnnnnnnnnnnnnnnnnnnnnnnnnnnnnnnnnnnnnnnnnnnnnnnnnnnnnnnnnnnnnnnnnnnnnnnnnnnnnnnnnnnnnnnnnnnnnnnnnnnnnnnnnnnnnnnnnnnnnnnnnnnnnnnnnnnnnnnnnnnnnnnnnnnnnnnnnnnnnnnnnnnnnnnnnnnnnnnnnnnnnnnnnnnnnnnnnnnnnnnnnnnnnnnnnnnnnnnnnnnnnnnnnnnnnnnnnnnnnnnnnnnnnnnnnnnnnnnnnnnnnnnnnnnnnnnnnnnnnnnnnnnnncagagccaagcagtagatccagaacagttctcaagtcaggattccaacatcatgctggagcagaaggcgcctgttttcccacagcagtatgcgtctcaggcacaaatggcccagggtagctattctcccatgcaagatccaaactttcacaccatgggacagcgacctagttatgccacactccgtatgcagcccagaccgggcctcaggcccacgggcctagtgcagaaccagccaaatcaactgagacttcaacttcagcatcgcctccaagcacagcagnnnnnnnnnnnnnnnnnnnnnnnnnnnnnnnnnnnnnnnnnnnnnnnnnnnnnnnnnnnnnnnnnnnnnnnnnnnnaggcacctattaatgcacagatgctggcccagagacagagggaaattctgaaccagcatcttcgacagagacagatgcatcagcaacagcaagttcagcaacgaactttgatgatgagaggacaagggttgaatataacaccaagcatggtggctcctagtggtatgccagcaactatgagcaaccctcggattccccaggcaaatgcacagcagtttccatttcctccaaactacgg

SEQ ID NO: 19967 - DNA, 731 bp, Macaca Mulatta
ttaagtgagcaaaagccttcaaactattgagaaagagcaatagactgagtgcagacaccagtgtgctcttattactgtatcaattaaatgaatgtatttgagtgtttggatacttacctctgaatgtattttgaataataacttcaagtgcaaattatgccatgcataatgtctttggtctcatgtttttccccccttttcttttaggctttgtcttctgagtctatagaaaaacttccagtctttaacatgtcagccttcaaacattatcagatgagctctgaggctgatgactggtgtatcccaagcagggatccaaagaacctggcaaaagaagcggccatgtgaagagggacactcaagacactttatgggatcaaagtgggtctgcaccagtgctgcttcctgaatgtttgtgtgtgaacccttgtttcctccaaaacaaacaacagcaacgaaaactctttaatcagaacactgatccaatgaggattggagcttgtttctgtgacccaggagaacttagtgcaagactacaggagttaacagatggtcagctccttatttttttatgtagaataactcatgagtttatataaaatcccaaagaaataagcctcagttttccatctgtttttgataacaagaatgagaaagggagtgagcgtgaagatggcagttagcagtttcaatagactaatattttaggcctcttgttcacatcaaaagat

SEQ ID NO: 19968 - DNA, 2636 bp, Macaca Mulatta
  misc_feature (1)...(2636): n = A,T,C or G
gagcgtgactatcacagcctgtgcgagcggcagcccattgggcgcctgctgttccgagagttctgtgccacgaggccggagctgagccgctgcatcgccttcctggatggggtgnngagtatgaagtgaccccggatgagaagcgaaaggcatgtgggcggcagctaatgcagaattttctgagccacacgnnnnnnnnnnnnnnnnnnnnnnnnnnnnnnnnnnnnnnnnnnnnnnnnnnnnnnnnnnnnnnnnnnnnnnnnnnnnnnnnnnnnnnnnnnnnnnnnnnnnnnnnnnnnnnnnnnnnnnnnnnnnnnnnnnnnnnnnnnnnnnnnnnnnnnnnnnnnnnnnnnnnnnnnnnnnnnnnnnnnnnnnnnnnnnnnnnnnnnnnnnnnnnnnnnnnnnnnnnnnnnnnnnnnnnnnnnnnnnnnnnnnnnnnnnnnnnnnnnnnnnnnnnnnnnnnnnnnnnnnnnnnnnnnnnnnnnnnnnnnnnnnnnnnnnnnnnnnnnnnnnnnnnnnnnnnnnnnnnnnnnnnnnnnnnnnnnnnnnnnnnnnnnnnnnnnnnnnnnnnnnnnnnnnnnnnnnnnnnnnnnnnnnnnnnnnnnnnnnnnnnnnnnnnnnnnnnnnnnnnnnnnnnnnnnnnnnnnnnnnnnnnnnnnnnnnnnnnnnnnnnnnnnnnnnnnnnnnnnnnnnnnnnnnnnnnnnnnnnnnnnnnnnnnnnnnnnnnnnnnnnnnnnnnnnnnnnnnnnnnnnnnnnnnnnnnnnnnnnnnnnnnnnnnnnnnnnnnnnnnnnnnnnnnnnnnnnnnnnnnnnnnnnnnnnnnnnnnnnnnnnnnnnnnnnnnnnnnnnnnnnnnnnnnnnnnnnnnnnnnnnnnnnnnnnnnnnnnnnnnnnnnnnnnnnnnnnnnnnnnnnnnnnnnnnnnnnnnnnnnnnnnnnnnnnnnnnnnnnnnnnnnnnnnnnnnnnnnnnnnnnnnnnnnnnnnnnnnnnnnnnnnnnnnnnnnnnnnnnnnnnnnnnnnnnnnnnnnnnnnnnnnnnnnnnnnnnnnnnnnnnnnnnnnnnnnnnnnnnnnnnnnnnnnnnnnnnnnnnnnnnnnnnnnnnnnnnnnnnnnnnnnnnnnnnnnnnnnnnnnnnnnnnnnnnnnnnnnnnnnnnnnnnnnnnnnnnnnnnnnnnnnnnnnnnnnnnnnnnnnnnnnnnnnnnnnnnnnnnnnnnnnnnnnnnnnnnnnnnnnnnnnnnnnnnnnnnnnnnnnnnnnnnnnnnnnnnnnnnnnnnnnnnnnnnnnnnnnnnnnnnnnnnnnnnnnnnnnnnnnnnnnnnnnnnnnnnnnnnnnnnnnnnnnnnnnnnnnnnnnnnnnnnnnnnnnnnnnnnnnnnnnnnnnnnnnnnnnnnnnagatggtggagaccgagtgcttccaggagctgaatgtctttgggctggatggctcagtccccccagacctggactggaggggccagccacctgcaccccctaaaaagggactgctgcagagactcttcagtcgccaannnnnnnnnnnnnnnnnnnnnnnnnnnnnnnnnnnnnnnnnnnnnnnnnnnnnnnnnnnnnnnnnnnnnnnnnnnnnnnnnnnnnnnnnnnnnnnnnnnnnnnnnnnnnnnnnnnnnnnnnnnnnnnnnnnnnnnnnnnnnnnnnnnnnnnnnnnnnnnnnnnnnnnnnnnnnnnnnnnnnnnnnnnnnnnnnnnnnnnnnnnnnnnnnnnnnnnnnnnnnnnnnnnnnnnnnnnnnnnnnnnnnnnnnnnnnnnnnnnnnnnnnnnnnnnnnnnnnnnnnnnnnnnnnnnnnnnnnnnnnnnnnnnnnnnnnnnnnnnnnnnnnnnnnnnnnnnnnnnnnnnnnnnnnnnnnnnnnnnnnnnnnnnnnnnnnnnnnnnnnnnnnnnnnnnnnnnnnnnnnnnnnnnnnnnnnnnnnnnnnnnnnnnnnnnnnnnnnnnnnnnnnnnnnnnnnnnnnnnnnnnnnnnnnnnnnnnnnnnnnnnnnnnnnnnnnnnnnnnnnnnnnnnnnnnnnnnnnnnnnnnnnnnnnnnnnnnnnnnnnnnnnnnnnnnnnnnnnnnnnnnnnnnnnnnnnnnnnnnnnnnnnnnnnnnnnnnnnnnnnnnnnnnnnnnnnnnnnnnnnnnnnnnnnnnnnnnnnnnnnnnnnnnnnnnnnnnnnnnnnnnnnnnnnnctgtgagacccgtcagcccactgccccggccggcccagataggtttgcctctgccttccagctcccagggcctggtccctgatgctgggccctgtcctggagacacctctttcagaaacacccgagcccagcccctaggagggggtggggcatccctggtcaaccctcaaacattccagactcccctcataacaacagacacgtgcccagcaataatccgccccttcnnnnnnnnnnnnnnnnnnnnnnnnnnnnnnnnnnnnnnnnnnnnnnnnnnnnnnnnnnnnnnnnnnctgtgcctgtgccccaggccccagtcctggcccttcccagactgtgatggccatcctggtctcagtgttagggtagcatgggattacagggccttgttttttccatatttaaagccaatttttattactcattttgtccaatgta

SEQ ID NO: 19969 - DNA, 2726 bp, Macaca Mulatta
  misc_feature (1)...(2726): n = A,T,C or G
gggagttgcttcagcgtcttggtgctgctgtgccgtggaacgtttgcagccttttagccaagatgcctgaggaaacgcagacccaggaccaaccgatggaggaggaggaggttgagacgttcgcctttcaggcagaaattgcccagttgatgtcattgattatcaatactttttattcgaacaaagagatctttctaagagagctaatttcaaattcatcagatgcattggacaaaatccgctatgagagcttgacggatcccagtaaattagactctgggaaagagctgcatattaacctgataccaaataaacaagatcgaaccctcactattgtggatactggaattgggatgaccaaggctgacttgatcaataaccttggtactatcgccaagtctgggaccaaagcgttcatggaagctttgcaggctggtgcagatatctccatgattggccagttcggtgttggtttttattctgcttatttggttgctgagaaagtaactgtgatcaccaaacataacgatgatgagcagtacgcctgggagtcctcagcagggggatcatttacagtgaggacagacacaggtgaacctatgggtcgtggaacaaaggttatcctacacctgaaagaagaccaaactgagtacttggaggaacgaagaataaaggagattgtgaagaaacattctcagtttattggatatcccattactctttttgtggagaaggaacgtgataaagaagtcagcgatgatgaggcataaggtgaagaaaagaaaaaagacaannnnnnnggacgaggcaatagtctgaagacaaacctgaaattgaagatgttggttctgatgaggaaaaacacagttggccagatggtgatccgggaaagaagagaaagagtaaggagaagtacatcgatcaagaagaactcaacaaaacaaagcccatctggaccagaaatcccgacgatattactaatgaggagtatggagaattctacaagagcttgaccaatgactgggaagatcacttggcagtgaagcatttttcagttgaagggcagttggaattcagagcccttctatttgtcccacgacgtgctccttttgacctgtttgaaaacagaaagaaaaagaacaacatcaaattgtatgtacgcagagttttcatcatggataactgtgaggagctaatccctgaatatctgaacttcattagaggggtggtagactcagaggatctccctctaaatatatcccgtgagatgttgcagcaaagcaaaattttgaaagttatcaggaagaatttggtcaaaaaatgcttagaactctttactgaactggcggaagataaagagaactacaagaagttctatgagcagttctctaaaaacataaagcttggaatacatgaagactcacaaaatcggaagaagctttcagagctgttaaggtactacacatctgcctctggcgatgagatggtttctctcaaggattactgcaccagaatgaaggaaaaccagaaacatatctattatatcacaggtgagaccaaggaccaggtagctaactcagcctttgtggaacgtcttcggaaacatggcttagaagtgatctatatgatcgagcccattgatgagtactgtgtccaacagctaaaagaatttgaggggaagacattagtgtcagtcaccaaagagggcttggaacttccagaggatgaagaagagaaaaagaacccgnnnnnnnnnnnnnnnnnnntttgaagaacctctgcaaaatcatgaaagacatactgggagaaaaaagttgaaaaggtggtttgtgtcaaaaccgattgggtgacgtctccatgctgtatttgtcacaagcacatattggctgggacagcaaaacagggagaggatcatggaaagctcaaggccctaagaagacaactcaacaatgggttacatggcagcaaagaaacacctggagataaaccctgaccattccattattgagaccttaaggcaaaaggcagaggctgataagaacgacaagtctgtgaaggatctggtcatcttgctttacgaaactgcactcctgtcttctggcttcagtctggaagatccccagacacatgccaacaggatctacaggatgatcaaacttggtctgggtatcgatgaagatgatcctactgctgatgataccagtgcagctgtaactgaagaaatgccgcccctcgaaggagatgacgacacatcacgcatggaagaagttagactaacctccggctgagggatgacttacctgttcaatactctaaaattcttctgataatatattttccaggatgtttttctttatttttgttaatattaaaaagtctgtatggcgtggcaacaactacttttaggggaagataagatttctgtctatttctaagtgatgctgtggtaccttaggcactaaagcagagctagtaatgcttttttagtttcacattggttttattttaacagactgggggtaacgttgtgttgttaagatgtatgtaaacatgaatgttaaactttgttgggtccacagggggtttaaccttatccaagcccgggattttctaaaatagaacccaaattcctttgttttaattgaaaattgtttccctcggaagcccttattattataaccctgggggaaatgttctttaggaaaaaacagtatattttttggttc

SEQ ID NO: 19970 - DNA, 1287 bp, Macaca Mulatta
  misc_feature (1)...(1287): n = A,T,C or G
caccgcggcgagaggcatgggcacgtggctgcggagggtggccgagctctgggaagaaaagcccgtgtgcctctgcctagcgtcgctagggcgctgactcggtgtggattgattggaaaggtttgagggagtacttgggaagcatggtggcacatgatgaagagtggaggtctcctacctattaaaaggaccatccgagtcataggtgtcaataaccagtccttcagagaacaagagnnnnnnnnnnnnnnnnnnnnnnnnnnnnnnnnnnnnnnnnnnnnnnnnnnnnnnnnnnnnnnnnnnnnnnnnnnnnnnnnnnnnnnnnnnnnnnnnnnnnnnnnnnnnnnnnnnnnnnnnnnnnnnnnnnnnnnnnnnnnnnnnnnnnnnnnnnnnnnnnnnnnnnnnnnnnnnnnnnnnnnnnnnnnnnnnnnnnnnnnnnnnnnnnnnnnnnnnnnnnnnnnnnnnnnnnnnnnnnnnnnnnnnnnnnnnnnnnnnnnnnnnnnnnnnnnnnnnnnnnnnnnnnnnnnnnnnnnnnnnnnnnnnnnnnnnnnnnnnnnnnnnnnnnnnnnnnnnnnnnnnnnnnnnnnnnnnnnnnnnnnnnnnnnnnnnnnnnnnnnnnnnnnnnnnnnnnnnnnnnnnnnnnnnnnnnnnnnnnnnnnnnnnnnnnnnnnnnnnnnnnnnnnnnnnnnnnnnnnnnnnnnnnnnnnnnnnnnnnnnnnnnnnnnnnnnnnnnnnnnnnnnnnnnnnnnnnnnnnnnnnnnnnnnnnnnnnnnnnnnnnnnnnnnnnnnnnnnnnnnnnnnnnnnnnnnnnnnnnnnnnnnnnnnnnnnnnnnnnnnnnnnnnnnnnnnnnnnnnnnnnnnnnnnnnnnnnnnnnnnnnnnnnnnnnnnnnnnnnnnnnnnnnnnnnnnnnnnnnnnnnnnnnnnnnnnnnnnnnnnnnnnnnnnnnnnnnnnnnnnnnnnnnnnnnnnnnnnnnnnnnnnnnnnnnnnnnnnnnnnnnnnnnnnnnnnnnnnnnnnnnnnnnnnnnnnnnnnnnnnnnnnnnnnnnnnnnnnnnnnnnnnnnnnnnnnnnnnnnnnnnnnnnnnnnnnnnnnnnnnnnnnnnnnnnnnnnnnnnnnnnnnnnnnnnnnnnnnnnnnnnnnnnnnnnnnnnnnnnnnnnnnnnnnnnnnnnnnnnnnnaaactttacattttcctgtttcaagacatcttggttctgactcggcccgtcacacggaacgaacggcactcttaccaggtttaccggcagccaatcccagtccaggagc

SEQ ID NO: 19971 - DNA, 4244 bp, Macaca Mulatta
  misc_feature (1)...(4244): n = A,T,C or G
agacaattgagtttgatgagagtgcgggggcagtgctgaggatccagcctctgaggacaccgcgggatgaaaacgtgtacgagtgtgtggcccagaactcggttggggagattacagtccatgccaagctcactgtcctccgannnnnnnnnnnnnnnnnnnnnnnnnnnnnnnnnnnnnnnnnnnnnnnnnnnnnnnnnnnnnnnnnnnnnnnnnnnnnnnnnnnnnnnnnnnnnnnnnnnnnnnnnnnnnnnnnnnnnnnnnnnnnnnnnnnnnnnnnnnnnnnnnnnnnnnnnnnnnnnnnnnnnnnnnnnnnnnnnnnnnnnnnnnnnnnnnnnnnnnnnnnnnnnnnnnnnnnnnnnnnnnnnnnnnnnnnnnnnnnnnnnnnnnnnnnnnnnnnnnnnnnnnnnnnnnnnnnnnnnnnnnnnnnnnnnnnnnnnnnnnnnnnnnnnnnnnnnnnnnnnnnnnnnnnnnnnnnnnnnnnnnnnnnnnnnnnnnnnnnnnnnnnnnnnnnnnnnnnnnnnnnnnnnnnnnnnnnnnnnnnnnnnnnnnnnnnnnnnnnnnnnnnnnnnnnnnnnnnnnnnnnnnnnnnnnnnnnnnnnnnnnnnnnnnnnnnnnnnnnnnnnnnnnnnnnnnnnnnnnnnnnnnnnnnnnnnnnnnnnnnnnnnnnnnnnnnnnnnnnnnnnnnnnnnnnnnnnnnnnnnnnnnnnnnnnnnnnnnnnnnnnnnnnnnnnnnnnnnnnnnnnnnnnnnnnnnnnnnnnnnnnnnnnnnnnnnnnnnnnnnnnnnnnnnnnnnnnnnnnnnnnnnnnnnnnnnnnnnnnnnnnnnnnnnnnnnnnnnnnnnnnnnnnnnnnnnnnnnnnnnnnnnnnnnnnnnnnnnnnnnnnnnnnnnnnnnnnnnnnnnnnnnnnnnnnnnnnnnnnnnnnnnnnnnnnnnnnnnnnnnnnnnnnnnnnnnnnnnnnnnnnnnnnnnnnnnnnnnnnnnnnnnnnnnnnnnnnnnnnnnnnnnnnnnnnnnnnnnnnnnnnnnnnnnnnnnnnnnnnnnnnnnnnnnnnnnnnnnnnnnnnnnnnnnnnnnnnnnnnnnnnnnnnnnnnnnnnnnnnnnnnnnnnnnnnnnnnnnnnnnnnnnnnnnnnnnnnnnnnnnnnnnnnnnnnnnnnnnnnnnnnnnnnnnnnnnnnnnnnnnnnnnnnnnnnnnnnnnnnnnnnnnnnnnnnnnnnnnnnnnnnnnnnnnnnnnnnnnnnnnnnnnnnnnnnnnnnnnnnnnnnnnnnnnnnnnnnnnnnnnnnnnnnnnnnnnnnnnnnnnnnnnnnnnnnnnnnnnnnnnnnnnnnnnnnnnnnnnnnnnnnnnnnnnnnnnnnnnnnnnnnnnnnnnnnnnnnnnnnnnnnnnnnnnnnnnnnnnnnnnnnnnnnnnnnnnnnnnnnnnnnnnnnnnnnnnnnnnnnnnnnnnnnnnnnnnnnnnnnnnnnnnnnnnnnnnnnnnnnnnnnnnnnnnnnnnnnnnnnnnnnnnnnnnnnnnnnnnnnnnnnnnnnnnnnnnnnnnnnnnnnnnnnnnnnnnnnnnnnnnnnnnnnnnnnnnnnnnnnnnnnnnnnnnnnnnnnnnnnnnnnnnnnnnnnnnnnnnnnnnnnnnnnnnnnnnnnnnnnnnnnnnnnnnnnnnnnnnnnnnnnnnnnnnnnnnnnnnnnnnnnnnnnnnnnnnnnnnnnnnnnnnnnnnnnnnnnnnnnnnnnnnnnnnnnnnnnnnnnnnnnnnnnnnnnnnnnnnnnnnnnnnnnnnnnnnnnnnnnnnnnnnnnnnnnnnnnnnnnnnnnnnnnnnnnnnnnnnnnnnnnnnnnnnnnnnnnnnnnnnnnnnnnnnnnnnnnnnnnnnnnnnnnnnnnnnnnnnnnnnnnnnnnnnnnnnnnnnnnnnnnnnnnnnnnnnnnnnnnnnnnnnnnnnnnnnnnnnnnnnnnnnnnnnnnnnnnnnnnnnnnnnnnnnnnnnnnnnnnnnnnnnnnnnnnnnnnnnnnnnnnnnnnnnnnnnnnnnnnnnnnnnnnnnnnnnnnnnnnnnnnnnnnnnnnnnnnnnnnnnnnnnnnnnnnnnnnnnnnnnnnnnnnnnnnnnnnnnnnnnnnnnnnnnnnnnnnnnnnnnnnnnnnnnnnnnnnnnnnnnnnnnnnnnnnnnnnnnnnnnnnnnnnnnnnnnnnnnnnnnnnnnnnnnnnnnnnnnnnnnnnnnnnnnnnnnnnnnnnnnnnnnnnnnnnnnnnnnnnnnnnnnnnnnnnnnnnnnnnnnnnnnnnnnnnnnnnnnnnnnnnnnnnnnnnnnnnnnnnnnnnnnnnnnnnnnnnnnnnnnnnnnnnnnnnnnnnnnnnnnnnnnnnnnnnnnnnnnnnnnnnnnnnnnnnnnnnnnnnnnnnnnnnnnnnnnnnnnnnnnnnnnnnnnnnnnnnnnnnnnnnnnnnnnnnnnnnnnnnnnnnnnnnnnnnnnnnnnnnnnnnnnnnnnnnnnnnnnnnnnnnnnnnnnnnnnnnnnnnnnnnnnnnnnnnnnnnnnnnnnnnnnnnnnnnnnnnnnnnnnnnnnnnnnnnnnnnnnnnnnnnnnnnnnnnnnnnnnnnnnnnnnnnnnnnnnnnnnnnnnnnnnnnnnnnnnnnnnnnnnnnnnnnnnnnnnnnnnnnnnnnnnnnnnnnnnnnnnnnnnnnnnnnnnnnnnnnnnnnnnnnnnnnnnnnnnnnnnnnnnnnnnnnnnnnnnnnnnnnnnnnnnnnnnnnnnnnnnnnnnnnnnnnnnnnnnnnnnnnnnnnnnnnnnnnnnnnnnnnnnnnnnnnnnnnnnnnnnnnnnnnnnnnnnnnnnnnnnnnnnnnnnnnnnnnnnnnnnnnnnnnnnnnnnnnnnnnnnnnnnnnnnnnnnnnnnnnnnnnnnnnnnnnnnnnnnnnnnnnnnnnnnnnnnnnnnnnnnnnnnnnnnnnnnnnnnnnnnnnnnnnnnnnnnnnnnnnnnnnnnnnnnnnnnnnnnnnnnnnnnnnnnnnnnnnnnnnnnnnnnnnnnnnnnnnnnnnnnnnnnnnnnnnnnnnnnnnnnnnnnnnnnnnnnnnnnnnnnnnnnnnnnnnnnnnnnnnnnnnnnnnnnnnnnnnnnnnnnnnnnnnnnnnnnnnnnnnnnnnnnnnnnnnnnnnnnnnnnnnnnnnnnnnnnnnnnnnnnnnnnnnnnnnnnnnnnnnnnnnnnnnnnnnnnnnnnnnnnnnnnnnnnnnnnnnnnnnnnnnnnnnnnnnnnnnnnnnnnnnnnnnnnnnnnnnnnnnnnnnnnnnnnnnnnnnnnnnnnnnnnnnnnnnnnnnnnnnnnnnnnnnnnnnnnnnnnnnnnnnnnnnnnnnnnnnnnnnnnnnnnnnnnnnnnnnnnnnnnnnnnnnnnnnnnnnnnnnnnnnnnnnnnnnnnnnnnnnnnnnnnnnnnnnnnnnnnnnnnnnnnnnnnnnnnnnnnnnnnnnnnnnnnnnnnnnnnnnnnnnnnnnnnnnnnnnnnnnnnnnnnnnnnnnnnnnnnnnnnnnnnnnnnnnnnnnnnnnnnnnnnnnnnnnnnnnnnnnnnnnnnnnnnnnnnnnnnnnnnnnnnnnnnnnnnnnnnnnnnnnnnnnnnnnnnaggggcttatctgggtgattgggcctgtgctggccgtggtcttcataatctgcattgtcatcgctatcctgctctacaagaannnnnnnnnnnnnnnnnnnnnnnnnnnnnnnnnnnnnnnnnnnnnnnnnnnnnnnnnnnnnnnnnnnnnnnnnnnnnnnnnnnnnnnnnnnnnnnnnnnnnnnnnnnnnnnnnnnnnnnnnnnnnnnnnnnnnnnnnnnnnnnnnnnnnnnnnnnnnnnnnnnnnnnnnnnnnnnnnnnnnnnnnnnnnnnnnnnnnnnnnnnnnnnnnnnnnnnnnnnnnnnnnnnnnnnnnnnnnnnnnnnnnnnnnnnnnnnnnnnnnnnnnnnnnnnnnnnnnnnnnnnnnnnnnnnnnnnnnnnnnnnnnnnnnnnnnnnnnnnnnnnnnnnnnnnnnnnnnnnnnnnnnnnnnnnnnnnnnnnnnnnnnnnnnnnnnnnnnnnnnnnnnnnnnnnnnggcatcgtgggtagtgattacatcaatgccaactacgtggatggctaccggcgtcagaacgcgtacattgccacgcaggggccgctgcccgagacctttggggacttctggcgtatggtgtgggagcagcggtcggccaccatcgtcatgatgacgcggctggaggagaagtcacgg

SEQ ID NO: 19972 - DNA, 612 bp, Macaca Mulatta
ggtgatgcagctaactgccccagtttggaaaacatggacttggatgaattgtctttgtttggacccctgcctgggccaggcccagccctcgtggaccggaatcgattatccagtgagagcagctgtaagagctggctgagctccatgactatggacagtgaagatggctaccagacatgtgtgtctgaggactccagcaggggtgccttcagtcggcagacgagcacagatgatgaatgctttatccccaaggagggggatgattttctgaggaggtcatcttcaaggaggaaccggagcatcagtaacaccagcagcggatccatgtctcccttgtgggagggcaacttctcaagcgcgtttgggaccctgccccggaagagcagaaagggaagtgtccgaaagcaactcttgaaatttatccctggccttcatcgtgctgtggaagaggaagaaagtcgcttttgacggattgtggtgtcctttcaaattggcttatttcacaaatatctctagactcacccacatcccagcttggtgggaaagtgcagaagaattgcaaaactgacatcccatttcacagcaagagtgacctttatttaaattgttgtg

SEQ ID NO: 19973 - DNA, 721 bp, Macaca Mulatta
gaggcgtacctggtctccccggtgaccaacgcggtgatcaccgtgccggcctacttcaacgactcgcagcgccaggccaccaaggatgccggggtgatcgcggggctcaacgtgctgcggatcatcaacgagcccacggcggcggccatcgcctacggcctggacagaacgggcaagggggagcgcaacgtgctcatctttgacctgggcgggggcaccttcgacgtgtccatcctgacgatcgacgacggcatcttcgaggtgaaagccacggccggggacacccacctgggtggggaggactttgacaacaggctggtgaaccacttcgtggaggagttcaagagaaaacacaagaaggacatcagccagaacaagcgagccgtgaggcggctgcgcaccgcctgcgagagggccaagcggaccctgtcgtccagcacccaggccagcctggagatcgactccctgtttgagggcatcgacttctatacgtccatcaccagggcgaggttcgaggagctgtgctcggacctgttccgaagcaccctggagcccgtggagaaggctctacgcgacgccaagctggacaaggcccagatccacgacctggtcctggtcgggggctccacccgcatccccaaggtgcagaagctgctgcaggacttcttcaacgggcgcgacctgaacaagagcatcaaccccgacgaggctgtggcctacg

SEQ ID NO: 19974 - DNA, 750 bp, Macaca Mulatta
ggttgctaagagtaggagtagaaactttcagtctcccagtgttacaatatttggatatctttcacctctaaaatcttttttccagatttgtaattttgatgtataatgaaaaaaatgaaagactgaatttcagtatcatatcaaatacttttatttcagtgtttattgatgtaaggactaaattactgtaatgtcacgggaattcatttcttttcatgattttaatcactgcaaattggaaagtcaaataaatggtgcaattaaaatttcttttttcccttctagcaaaacctgtgataagtcctcttgaacttcggatggaagaattaaggcatcattttaggatagagtttgcagtagcagaaggtgcaaagaatgtaatgaaattacttggctcaggaaaagtaacagacagaaaagcactttcagaagtaattctaaataaaatttttatttgatttaataaatacattattcaaagtacgtgattatttgagtgacaacaattgtcttttccctgtgcaaggctcaagcaagatttaatgaatcaagtcagaagttggaccttttaaagtattcattagagcagagattaaatgaacttcccaagaatcatcccaaaagcagtattattattgaagaactgtcacttgttgcatcaccaacactaagtccacgtcaaagtatgatatctacacaaaatcaatatagtacactatccaaaccagcagcattaacaggtatgtagtg

SEQ ID NO: 19975 - DNA, 617 bp, Macaca Mulatta
gactccctgaaggaaaaggagaactgtgccatctcagagggcattttccaagaggaagcttcaacagaccacaccaaaatgccgtctcaaatggagcatgccatggaaaccatgatgtttacatttcacaaattcgcgggggataaaggctacttaacaaaggaggacctgagagtactcatggaaaaggagtttcctggatttttggaaaatcaaaaagaccctctggccgtggacaaaataatgaaggacctggaccagtgcagagatggcaaagtgggcttccagagcttcttttccctaattgcgggcctcaccattgcatgcaatgactattttgtagtacacatgaagcagaagggaaagaagtaggcaaaaacgagcaattccctcctccctgataagagctgtcccaaagggtcgcttgaggaatctgccccacagcttcccccatagaaggatttcatgagcagatcaggacccttagcaaatgtaaaaataaaatctaactcccatttgacaagctgagaaaggaaagttaaataccagataagcttttgatttttgtattgtttgcatccccttgccctcaataaataaagttcttttttagttcc

SEQ ID NO: 19976 - DNA, 426 bp, Macaca Mulatta
  misc_feature (1)...(426): n = A,T,C or G
gaaattttagatgggcagaaatcaggagaccatctaaagcggggtagaaagaaagggagaaacagacaggaagttcctgcatttacnnnnnnnnnnnnnnnnnnnnnnnnnnnnnnnnnnnnnnnnnnnnnnnnnnnnnnnnnnnnnnnnnnnnnnnnnnnnnnnnnnnnnnnnnnnnnnnnnnnnnnnnnnnnnnnnnnnnnnnnnnnnnnnnnnnnnnnnnnnnnnnnnnnnnnnnnnnnnnnnnnnnnnnnnnnnnnnnnnnnnnnnnnnnnnnnnnnnnnnnnnnnnnnnnnnnnnnnnnnnnnnnnnnnnnnnnnnnnnnnnnnnnnnnnnnnnnnnnnnnggtgtgtactcatgaggaacaagatattttacagcgtgactcaaacaagagccagaaactgctaaagaaactcatgtcag

SEQ ID NO: 19977 - DNA, 117 bp, Macaca Mulatta
gatggagcaaaaacaggtggtacctccctttaaaccaaatatttctggggaatttggtttggacaactttgattctcagtttaccaatgaacctgtccagctcactccagatgacga

SEQ ID NO: 19978 - DNA, 417 bp, Macaca Mulatta
  misc_feature (1)...(417): n = A,T,C or G
atgtgggtctgttttcattgctttcccttctttccacttttcttcttatgactgcttagttgtatctttcaaatgcctgaaaccctatggctcagtacagatattatatatgaaaaaatgcagaatttcagagagtgtttatctttttccagaatggattcattcacttctcataggcagttataatgacaacacctcctgtcccgattcagaattgaatattacatgaacacagtcaaaaattgactgtaggtatgagctcacccctctgaagttctcctgtcactggagccaattattgtctttgtaatctgaggccagttttggtctttgcagctttacaatgctgtctatcatatggtttctgtattcatccagatngtttagttgctatgctataaactacacaattccact

SEQ ID NO: 19979 - DNA, 664 bp, Macaca Mulatta
gcccacctgggagcgcctctagtgacggacagttcctggagtgcacggaagtcacagctggtctatcagtccagacagggacctttggtcaaatattctaattacttccaagccccctctgactacagatactacccctaccagtccttccagaccccacaacaccccagcttcctcttccaggacaagagggtgtcctggtccctggtctacctccccaccattcagagctgctggaactacggcttctcctgctcctccgacgagctccccatcctgggcctcaccaagtctggtggctcagatcgcagcattgcctacgaaaacaaagccctgatgctctgcgaagggctctttgtggcagacgccaccgatttcgagggccggaaggctgcgattcccagtgccctggacaccaacagctccaagagcacctccttcttcccctgcccagcagggcacttcaacagtttccgcacggtcatccgccccttctacctgaccaattcctcgggtgtggactagatgacgtggcccaagggtggtaagaacccgagaaccccaggacgccctcactgcaggctcccctccttggcttccttcttctctgcaacaatcatcaacaagcgtccaccagatgtcccctactcccctgagctctcag

SEQ ID NO: 19980 - DNA, 704 bp, Macaca Mulatta
  misc_feature (1)...(704): n = A,T,C or G
gttgaaactgcctcctaggataggctcataggggtctcttgaggttcttagtgtaactcacctagatttacagcctcactggaatcgtttcactactcacagtctctttcatcttcagttttatctttaatctcctcttttatcttggactgacatttagtgtagctatgtgaaaaggtcatagccgagattcctggtttgggtgttacgcttacatacttaaatgaaagtgtgtgacatactcatagtgtaacacaacatgaataaaaggcatacattttgcagcagtcagtctcttcagaaaaccctcttctatagtagggttgagttacttcctatcaagccagtgtgtggtaacaggctcaatattcctgaatgaaataccagactagtgacaagctcctggtcttcagatgtcttctcgttaaggagatgggccttttggaggtaaaggatacaattagtgagttctgtcatgattcgctattctagaacttgcatgacctttactgtgttagctctttgaatgttgttgaaattttagactttctttgtaaacaaatgatatgtccttatcattgtataaaagctgttacgtgcaacaatgtggagattccttatctgatttaataaaatacttaaacactnnnnnnnnnnnnnnnnnnnnnnnnnnnnnnnnnncggtacccaagttcgcctatagt

SEQ ID NO: 19981 - DNA, 512 bp, Macaca Mulatta
  misc_feature (1)...(512): n = A,T,C or G
ttcccgtcccccgaatgggacactgtcactcctgaagccaaaaacctaatcaaccagatgctgaccatcaaccctgccaagcgcatcacagcccatgaggccctgaagcatccgtgggtctgcncaacgttccacggtagcctccatgatgcacagacaggagactgtggagtgtctgaaaaagttcaatgccaggagaaagctcaaggnnnnnnnnnnnnnnnnnnnnnnnnnnnnnnnnnnnnnnnnnnnnnnnnnnnnnnnnnnnnnnnnnnnnnnnnnnnnnnnnnnnnnnnnnnnnnnnnnnnnnnnnnnnnnnnnnnnnnnnnnnnnnnnnnnnnnnnnnnnnnnnnnnnnnnnnnnnnnnnnnnnnnnnnnnnnnnnnnnnnnnnnnnnnnnnnnnnnnnnnnnnnnnnnnnnnnnnnnnnnnnnnnagaggtcagcctcagagccctgggctggtcctgatgcaggcccagccctgtccacctgccctcacccacgtcccacct

SEQ ID NO: 19982 - DNA, 155 bp, Macaca Mulatta
tgaaggaattatatctaaatgttacccccacatatcttgaaagtcagttcctaacagtcacagcctgggagttcatgttagccttctttcagagcttgcaactatgtatatccacataactaatcaaaataatacgtgttttggtgagaattagc

SEQ ID NO: 19983 - DNA, 741 bp, Macaca Mulatta
  misc_feature (1)...(741): n = A,T,C or G
aggtgaaaccataaaaagcataagccaacagtctggtgcaagaatagagcttcagagaaatcctccaccaaatgcagatcctaatatgaagttatttacaattcgtggcactccacaacagatagattatgctcggcaactcatagaagaaaagattggtgnnnnnnnnnnnnnnnnnnnnnnnnnnnnnnnnnnnnnnnnnnnnnnnnnnnnnnnnnnnnnnnnnnnnnnnnnnnnnnnnnnnnnnnnnnnnnnnnnnnnnnnnnnnnnnnnnnnnnnnnnnnnnnnnnnnnnnnnnnnnnnnnnnnnnnnnnnnnnnnnnnnnnnnnnnnnnnnnnnnnnnnnnnnnnnnnnnnnnnnnnnnnnnnnnnnnnnnnnnnnnnnnnnnnnagctaaggcaggaacggatccaaattcagcagcttgggctgcttattatgctcactattatcaacagcaagcacagccaccaccagcagcccctgcaggtgcaccaactacaactcaaactaatggacaagnnnnnnnnnnnnnnnnnnnnnnnnnnnnnnnnnnnnnnnnnnnnnnnnnnnnnnnnnnnnnnnnnnnnnnnnnggtcaagcagttcctgctccgactggggctcctccaggtggtcagccagattatagtgcagcctgggctgagtattatagacaacaagcagcctattatgcccagacaagtccccagggaatgccacagcatcctccagcacctcag

SEQ ID NO: 19984 - DNA, 741 bp, Macaca Mulatta
  misc_feature (1)...(741): n = A,T,C or G
ggtattaaatgttttttgataagccttctgctcacatttttgtgaatgtctgaagtatatagtttgtgtatattgacagagctcttttataactaaagcaaatttaatttttttgtactagaaaaaaatttgaacattttagttcctggttattaaaatatgttaattcagaattagtttaatgcctcaattaaactaattaatagctttggacacttaaaagagctctaaatttgcttgtacataaaggcttaatttgttttccttgttagggtcaagggtgtccttcactctttaacagctgcgggacagacacattaaagcagctgtttgttattgataataaaatattataaaactnnnnnnnnnnnnnnnnnnnnnnnnnnnnnnnnnnnnnnnnnnnnnnnnnnnnnnnnnnnnnnnnnnnnnnnnnnnnnnnnnnncggccccctcgcccctcaaaaacttttcaaaacctttcttttggcccccggccccagaaggaaatgaaaatgggccatagctgttcccaaaaaaatccgggccaaaacaagggctggaatnnnnnnnnnnnnnnnnnnnnnnnggggaaaacccaagctttttgaaaaaattccaaaagggagtttctgaaagggcttttacggggattttatccaacgggagatccccaagcagaactctcaaaattacaaaatttccccccccaccccctgggcaaattatttcccacaaataaac

SEQ ID NO: 19985 - DNA, 807 bp, Macaca Mulatta
ggggggctcaataccccaagcaatacctgcaactgaggattcttcccggggagaccgcagcccatcggcatggctcaagagtttgtgaacggcaaaatccagcctgggaaggtggttgtgttcatcaagcccacctgcccatactgcaggagggcccaagagatcctcagtcaattgcccatcaaacaagggcttctggaatttgtcgatatcacagccaccaaccacactaacgagattcaagattatttgcaacagctcacgggagcaagaacggttcctcgagtctttatcggtaaagattgtataggcggatgcagtgatctagtctctatgcaacagagtggggaactgctgacgcggctaaagcagattggagctctgcagtaaccacagagcaggccccccatgctgacatctgtcctcaagagctggatggaattgcaaatgatgacagcacttcctggtggatgaatttgggggcacaaacagcttttttcctcttttggctctgtatttaaaagtgaatcaacttgctcttaaccacagggccaagaaggttgacgggccatcttggttttcttctggatgcgctctttggttttcagaagactgtgacagttctggccaggatttcctcactgaccctcagtctgacttagtccgccgttctacagtcacgtcactccagacatgtcccgcacactccgactgtgaaacagatagtttaagttccacctcccctaagcacgtcctgcatagagattagcgctgactattgtgcgtagcgagtgcacttagcacacg

SEQ ID NO: 19986 - DNA, 623 bp, Macaca Mulatta
  misc_feature (1)...(623): n = A,T,C or G
tgcacagctttcctccactgctgctgctgctgttctggggtgtggtgtctcacggcttcccagcgactctagaaacacaagagcaagatgtggacttcgtccagnnnnnnnnnnnnnnnnnnnnnnnnnnnnnnnnnnnnnnnnnnnnnnnnnnnnnnnnnnnnnnnnnnnnnnnnnnnnnnnnnnnnnnnnnnnnnnnnnnnnnnnnnnnnnnnnnnnnnnnnnnnnnnnnnnnnnnnnnnnnnnnnnnnnnnnnnnnnnnnnnnnnnnnnnnnnnnnnnnnnnnnnnnnnnnnnnnnnnnnnnnnnnnnnnnnnnnnnnnnnnnnnnnnnnnnnnnnnnnnnnnnnnnnnnnnnnnnnnnnnnnnnnnnnnnnnnnnnnnnnnnnnnnnnnnnnnnnnnnnnnnnnnnnnnnnnnnnnnnnnnnnnnnnnnnnnnnnnnnnnnnnnnnnnnnnnnnnnnnnnnnnnnnnnnnnnnnnnnnnnnnnnnnnnnnnnagatcatcgggacaattctccctttgatggccctggaggaaatcttgctcatgcttttcaaccaggcccaggtattgggggggatgctcattttgatgaagatgaaaggtggaccaacaatttcaga

SEQ ID NO: 19987 - DNA, 421 bp, Macaca Mulatta
taataacgcatatttaaaatcaataggatgtacatataaatttatttttgtctttctaggtagttggcaaaaaaggagaaagccactaaggtgcaaaagacactggacaaccatattgcaatcagatctacagctcctggataattgcttgattctcgccagagactgtcaatgtttcattcattgccattaccaataaatcattgcttttgttcagatggtatcactagtgtttccattgtaatcttgacacatgcaattgtaaataaaagtcactacttttgccaagcttaatttttgtcattctaaatcagtattttctctttccatgtatttgaaaattggtcaacttctgaaaatagaggagagttaaatgtctggtagtatattgattgaaagccagtttctttagaaaaggaga

SEQ ID NO: 19988 - DNA, 798 bp, Macaca Mulatta
  misc_feature (1)...(798): n = A,T,C or G
acctgtaccgactggaaggggaaggctttcccagcattcccttactcatcgaccacctactgagcacccagcagcccctcaccaagaagagcggtgtcgtcctgcacagggctgtgcccaaggnnnnnnnnnnnnnnnnnnnnnnnnnnnnnnnnnnnnnnnnnnnnnnnnnnnnnnnnnnnnnnnnnnnnnnnnnnnnnnnnnnnnnnnnnnnnnnnnnnnnnnnnnnnnnnnnnnnnnnnnnnnnnnnnnnnnnnnnnnnnnnnnnnnnnnnnnnnnnnnnnnnnnnnnnnaggatcctgaagcagtacagccaccccaacatcgtgcgtctcattggtgtctgcacccagaagcagcccatctacatcgtcatggagcttgtgcaggnnnnnnnnnnnnnnnnnnnnnnnnnnnnnnnnnnnnnnnnnnnnnnnnnnnnnnnnnnnnnnnnnnnnnnnnnnnnnnnnnnnnnnnnnnnnnnnnnnnnnnnnnnnnnnnnnnnnnnnnnnggacctggctgctcggaactgtctggtgacagagaagaatgtcctgaagatcagtgactttgggatgtcccgagaggaagctgatggggtctacgcggcctcagggggcctcagacaagtccccgtgaagtggaccgcacctgaggcccttaactacggnggccgctactcctccgagagtgacgtgtggagctttggcatcttgctctgggagaccttcagcctgggggcctccccctatcccaaccttagcaatcagcagacacgggagttcgtggagaagggn

SEQ ID NO: 19989 - DNA, 296 bp, Macaca Mulatta
accttgcagcccccatcccctccgttcgcttggagcctctttttgcaaataaagttggtgcagcttcgcggagagaagaggcgctgcagtctgtgctgggtccgtggggcggggaggaggccccaggagccggcctgaaaattccctccgtggtgaaggaggcgagaacggaggcggtgaaggagggcgagcggagccacacgcacttcatgccacaggagggtgggaatgagcggaggactgaggagaggaaagcgggaaagaatagggagacgaaaacgcccgggtctgctgct

SEQ ID NO: 19990 - DNA, 496 bp, Macaca Mulatta
agataacccagctgtgctccctggaaccttcaatttcaaggcctccctgcctctactaggcgccttagttcactatggggaaccacttgactgagatggcgcccactgcctcctccttcttgccccacttccaagccctgcatgtcgtggtcattgggctggactctgctgggaagacctccctcctttaccgcctcaagttcaaggagtttgtccagagtgtccccaccaaaggcttcaacaccgagaagatccgggtgcccctcgggggatcgcgtggcatcaccttccaagtgtgggacgtcggggggcaggagaagctgcgaccactgtggcgctcttacacccgccggacagacgggctggtgtttgtggtggacgctgcggaggccgagcggctggaggaggccaaggtggagttgcaccgaatcagccgggcctctgacaaccagggcgtgccagtgctggtgctggccaacaagcaggaccagcccgg

SEQ ID NO: 19991 - DNA, 778 bp, Macaca Mulatta
  misc_feature (1)...(778): n = A,T,C or G
gggtgagcagctgcagcggcagaggcagcatccagcggcggcgccagcagttccagcccgttgctttactttttccttcaccgacatagtcattatgccgaagagaaagtctccagagaatacagagggcaaagatggatccaaagtaactaaacaggagcccacaagacggtctgccagattgtcggcgaaacctgctccaccaaaacctgaacccaaaccaagaaaaacatctgctaagaaagaacctggagcaaagattagcagaggtgctaaagggaagaaggaggaaaagcaggaagctggaaaggaaggtactgcaccatctgaaaatggtgaaactaaagctgaagaggtacttttcataaatacctcccactgattgaatcagtgtctttaaagaaatttctcagtccttcagccggtgatagcacattcttaatgtctctttttattgcctgtaatgttattgcagatccacatctctcgctcaactgttaatgtctcaacctccagaggcaccccacccagcacactgtcagtaaaggggcagattgaaacagtgagagttaagggtacagtagaaaattctgcatgtttgcagtgactagaatcagatagtaatgtgggggggnnnnnnnnnnnnnnnnnnnnnnnnnnnnnnnnnnnnccatgaaaaagggggggaactttgccggggaaaagggtttccggggggttggtttgtgaaacccccaaaaaaggcaaataaattgggcagcaaaaaatggttttgggg

SEQ ID NO: 19992 - DNA, 4031 bp, Macaca Mulatta
  misc_feature (1)...(4031): n = A,T,C or G
gggaaatgttccactgcatccgagcgcccgtgtnnnnnnnnnnnnnnnnnnnnnnnnnnnnnnnnnnnnnnnnnnnnnnnnnnnnnnnnnnnnnnnnnnnnnnnnnnnnnnnnnnnnnnnnnnnnnnnnnnnnnnnnnnnnnnnnnnnnnnnnnnnnnnnnnnnnnnnnnnnnnnnnnnnnnnnnnnnnnnnnnnnnnnnnnnnnnnnnnnnnnnnnnnnnnnnnnnnnnnnnnnnnnnnnnnnnnnnnnnnnnnnnnnnnnnnnnnnnnnnnnnnnnnnnnnnnnnnnnnnnnnnnnnnnnnnnnnnnnnnnnnnnnnnnnnnnnnnnnnnnnnnnnnnnnnnnnnnnnnnnnnnnnnnnnnnnnnnnnnnnnnnnnnnnnnnnnnnnnnnnnnnnnnnnnnnnnnnnnnnnnnnnnnnnnnnnnnnnnnnnnnnnnnnnnnnnnnnnnnnnnnnnnnnnnnnnnnnnnnnnnnnnnnnnnnnnnnnnnnnnnnnnnnnnnnnnnnnnnnnnnnnnnnnnnnnnnnnnnnnnnnnnnnnnnnnnnnnnnnnnnnnnnnnnnnnnnnnnnnnnnnnnnnnnnnnnnnnnnnnnnnnnnnnnnnnnnnnnnnnnnnnnnnnnnnnnnnnnnnnnnnnnnnnnnnnnnnnnnnnnnnnnnnnnnnnnnnnnnnnnnnnnnnnnnnnnnnnnnnnnnnnnnnnnnnnnnnnnnnagggcttgctgtgatggaggtggccccctccttctccagtgtccgaaggactgnnnnnnnnnnnnnnnnnnnnnnnnnnnnnnnnnnnnnnnnnnnnnnnnnnnnnnnnnnnnnnnnnnnnnnnnnnnnnnnnnnnnnnnnnnnnnnnnnnnnnnnnnnnnnnnnnnnnnnnnnnnnnnnnnnnnnnnnnnnnnnnnnnnnnnnnnnnnnnnnnnnnnnnnnnnnnnnnnnnnnnnnnnnnnnnnnnnnnnnnnnnnnnnnnnnnnnnnnnnnnnnnnnnnnnnnnnnnnnnnnnnnnnnnnnnnnnnnnnnnnnnnnnnnnnnnnnnnnnnnnnnnnnnnnnnnnnnnnnnnnnnnnnnnnnnnnnnnnnnnnnnnnnnnnnnnnnnnnnnnnnnnnnnnnnnnnnnnnnnnnnnnnnnnnnnnnnnnnnnnnnnnnnnnnnnnnnnnnnnnnnnnnnnnnnnnnnnnnnnnnnnnnnnnnnnnnnnnnnnnnnnnnnnnnnnnnnnnnnnnnnnnnnnnnnnnnnnnnnnnnnnnnnnnnnnnnnnnnnnnnnnnnnnnnnnnnnnnnnnnnnnnnnnnnnnnnnnnnnnnnnnnnnnnnnnnnnnnnnnnnnnnnnnnnnnnnnnnnnnnnnnnnnnnnnnnnnnnnnnnnnnnnnnnnnnnnnnnnnnnnnnnnnnnnnnnnnnnnnnnnnnnnnnnnnnnnnnnnnnnnnnnnnnnnnnnnnnnnnnnnnnnnnnnnnnnnnnnnnnnnnnnnnnnnnnnnnnnnnnnnnnnnnnnnnnnnnnnnnnnnnnnnnnnnnnnnnnnnnnnnnnnnnnnnnnnnnnnnnnnnnnnnnnnnnnnnnnnnnnnnnnnnnnnnnnnnnnnnnnnnnnnnnnnnnnnnnnnnnnnnnnnnnnnnnnnnnnnnnnnnnnnnnnnnnnnnnnnnnnnnnnnnnnnnnnnnnnnnnnnnnnnnnnnnnnnnnnnnnnnnnnnnnnnnnnnnnnnnnnnnnnnnnnnnnnnnnnnnnnnnnnnnnnnnnnnnnnnnnnnnnnnnnnnnnnnnnnnnnnnnnnnnnnnnnnnnnnnnnnnnnnnnnnnnnnnnnnnnnnnnnnnnnnnnnnnnnnnnnnnnnnnnnnnnnnnnnnnnnnnnnnnnnnnnnnnnnnnnnnnnnnnnnnnnnnnnnnnnnnnnnnnnnnnnnnnnnnnnnnnnnnnnnnnnnnnnnnnnnnnnnnnnnnnnnnnnnnnnnnnnnnnnnnnnnnnnnnnnnnnnnnnnnnnnnnnnnnnnnnnnnnnnnnnnnnnnnnnnnnnnnnnnnnnnnnnnnnnnnnnnnnnnnnnnnnnnnnnnnnnnnnnnnnnnnnnnnnnnnnnnnnnnnnnnnnnnnnnnnnnnnnnnnnnnnnnnnnnnnnnnnnnnnnnnnnnnnnnnnnnnnnnnnnnnnnnnnnnnnnnnnnnnnnnnnnnnnnnnnnnnnnnnnnnnnnnnnnnnnnnnnnnnnnnnnnnnnnnnnnnnnnnnnnnnnnnnnnnnnnnnnnnnnnnnnnnnnnnnnnnnnnnnnnnnnnnnnnnnnnnnnnnnnnnnnnnnnnnnnnnnnnnnnnnnnnnnnnnnnnnnnnnnnnnnnnnnnnnnnnnnnnnnnnnnnnnnnnnnnnnnnnnnnnnnnnnnnnnnnnnnnnnnnnnnnnnnnnnnnnnnnnnnnnnnnnnnnnnnnnnnnnnnnnnnnnnnnnnnnnnnnnnnnnnnnnnnnnnnnnnnnnnnnnnnnnnnnnnnnnnnnnnnnnnnnnnnnnnnnnnnnnnnnnnnnnnnnnnnnnnnnnnnnnnnnnnnnnnnnnnnnnnnnnnnnnnnnnnnnnnnnnnnnnnnnnnnnnnnnnnnnnnnnnnnnnnnnnnnnnnnnnnnnnnnnnnnnnnnnnnnnnnnnnnnnnnnnnnnnnnnnnnnnnnnnnnnnnnnnnnnnnnnnnnnnnnnnnnnnnnnnnnnnnnnnnnnnnnnnnnnnnnnnnnnnnnnnnnnnnnnnnnnnnnnnnnnnnnnnnnnnnnnnnnnnnnnnnnnnnnnnnnnnnnnnnnnnnnnnnnnnnnnnnnnnnnnnnnnnnnnnnnnnnnnnnnnnnnnnnnnnnnnnnnnnnnnnnnnnnnnnnnnnnnnnnnnnnnnnnnnnnnnnnnnnnnnnnnnnnnnnnnnnnnnnnnnnnnnnnnnnnnnnnnnnnnnnnnnnnnnnnnnnnnnnnnnnnnnnnnnnnnnnnnnnnnnnnnnnnnnnnnnnnnnnnnnnnnnnnnnnnnnnnnnnnnnnnnnnnnnnnnnnnnnnnnnnnnnnnnnnnnnnnnnnnnnnnnnnnnnnnnnnnnnnnnnnnnnnnnnnnnnnnnnnnnnnnnnnnnnnnnnnnnnnnnnnnnnnnnnnnnnnnnnnnnnnnnnnnnnnnnnnnnnnnnnnnnnnnnnnnnnnnnnnnnnnnnnnnnnnnnnnnnnnnnnnnnnnnnnnnnnnnnnnnnnnnnnnnnnnnnnnnnnnnnnnnnnnnnnnnnnnnnnnnnnnnnnnnnnnnnnnnnnnnnnnnnnnnnnnnnnnnnnnnnnnnnnnnnnnnnnnnnnnnnnnnnnnnnnnnnnnnnnnnnnnnnnnnnnnnnnnnnnnnnnnnnnnnnnnnnnnnnnnnnnnnnnnnnnnnnnnnnnnnnnnnnnnnnnnnnnnnnnnnnnnnnnnnnnnnnnnnnnnnnnnnnnnnnnnnnnnnnnnnnnnnnnnnnnnnnnnnnnnnnnnnnnnnnnnnnnnnnnnnnnnnnnnnnnnnnnnnnnnnnnnnnnnnnnnnnnnnnnnnnnnnnnnnnnnnnnnnnnnnnnnnnnnnnnnnnnnnnnnnnnnnnnnnnnnnnnnnnnnnnnnnnnnnnnnnnnnnnnnnnnnnnnnnnnnnnnnnnnnnnnnnnnnnnnnnnnnnnnnnnnnnnnnnnnnnnnnnnnnnnnnnnnnnnnnnnnnnnnnnnnnnnnnnnnnnnnnnnnnnnnnnnnnnnnnnnnnnnnnnnnnnnnnnnnnnnnnnnnnnnnnnnnnnnnnnnnnnnnnnnnnnnnnnnnnnnnnnnnnnnnnnnnnnnnnnnnnnnnnnnnnnnnnnnnnnnnnnnnnnnnnnnnnnnnnnnnnnnnngtgtcaggaggtgagctgtttgagcgcatcattgacgaggacttcgagctgacggagcgcgagtgcatcaagtacatgcggcagatctcggagggggtggagtacatccacaagcagggcatcgtgcacctggacctcaagccggagaacatcatgtgtgtcaacaagacgggcaccaggatcaagctcatcgactttggtctggccaggaggctgg

SEQ ID NO: 19993 - DNA, 585 bp, Macaca Mulatta
  misc_feature (1)...(585): n = A,T,C or G
caggactgatccgtgacacaccctccgtctcagtgcggccgggccccatggtggcctcaggagagaacgtgaccctgttgtgtcaatcatggcacaacatagacactttatttttgaccaaggagggtgcggcccatcccccgctgcgtctaaagtcaaagtaccagtcttatacataccaggctgaattctccatgagtcctgtgacctcagcccagggtggaacctaccgatgctacagcgcaatcaggtcctacccctacctgctgtcaagccctagttaccccctggagctcgtggtctcagnnnnnnnnnnnnnnnnnnnnnnnnnnnnnnnnnnnnnnnnnnnnnnnnnnnnnnnnnnnnnnnnnnnnnnnnnnnnnnnnnnnnnnnnnnnnnnnnnnnnnnnnnnnnnnnnnnnnnnnnnnnnnnnnnnnnnnnnnnnnnnnnnnnnnnnnnnnnnnnnnnnnnnnnnnnnnnnnnnnnnnnnnnnnnnnnnnnnnnnnnnnnnnnnnnnnnngcccatttctaccgtcctgcaggggctgcggggccagagcccaaggaccaggtcctgcagaggag

SEQ ID NO: 19994 - DNA, 3596 bp, Macaca Mulatta
  misc_feature (1)...(3596): n = A,T,C or G
agggggccgaaactccactgattgtacacttatcctgactgagggagactcagccaaaactttggctgtttcaggccttggtgtggttgggagagacaaatatggggttttccctctgagaggaaaaatgctcaatgttcgagaagcttctnnnnnnnnnnnnnnnnnnnnnnnnnnnnnnnnnnnnnnnnnnnnnnnnnnnnnnnnnnnnnnnnnnnnnnnnnnnnnnnnnnnnnnnnnnnnnnnnnnnnnnnnnnnnnnnnnnnnnnnnnnnnnnnnnnnnnnnnnnnnnnnnnnnnnnnnnnnnnnnnnnnnnnnnnnnnnnnnnnnnnnnnnnnnnnnnnnnnnnnnnnnnnnnnnnnnnnnnnnnnnnnnnnnnnnnnnnnnnnnnnnnnnnnnnnnnnnnnnnnnnnnnnnnnnnnnnnnnnnnnnnnnnnnnnnnnnnnnnnnnnnnnnnnnnnnnnnnnnnnnnnnnnnnnnnnnnnnnnnnnnnnnnnnnnnnnnnnnnnnnnnnnnnnnnnnnnnnnnnnnnnnnnnnnnnnnnnnnnnnnnnnnnnnnnnnnnnnnnnnnnnnnnnnnnnnnnnnnnnnnnnnnnnnnnnnnnnnnnnnnnnnnnnnnnnnnnnnnnnnnnnnnnnnnnnnnnnnnnnnnnnnnnnnnnnnnnnnnnnnnnnnnnnnnnnnnnnnnnnnnnnnnnnnnnnnnnnnnnnnnnnnnnnnnnnnnnnnnnnnnnnnnnnnnnnnnnnnnnnnnnnnnnnnnnnnnnnnnnnnnnnnnnnnnnnnnnnnnnnnnnnnnnnnnnnnnnnnnnnnnnnnnnnnnnnnnnnnnnnnnnnnnnnnnnnnnnnnnnnnnnnnnnnnnnnnnnnnnnnnnnnnnnnnnnnnnnnnnnnnnnnnnnnnnnnnnnnnnnnnnnnnnnnnnnnnnnnnnnnnnnnnnnnnnnnnnnnnnnnnnnnnnnnnnnnnnnnnnnnnnnnnnnnnnnnnnnnnnnnnnnnnnnnnnnnnnnnnnnnnnnnnnnnnnnnnnnnnnnnnnnnnnnnnnnnnnnnnnnnnnnnnnnnnnnnnnnnnnnnnnnnnnnnnnnnnnnnnnnnnagctctttggctcggttgtatttccaccaaaagatgatcacacattgaagtttttatatgacgacaaccagcgtgttgagcctgaatggtacattcctattattcccatggtgctgataaatggtgctgaaggaattggtaccgggtggtcctgcaaaatccccaactttgatgtacgtgaagttgtaaataacatcaggcgtttgatggatggagaagaacctttgccaatnnnnnnnnnnnnnnnnnnnnnnnnnnnnnnnnnnnnnnnnnnnnnnnnnnnnnnnnnnnnnnnnnnnnnnnnnnnnnnnnnnnnnnnnnnnnnnnnnnnnnnnnnnnnnnnnnnnnnnnnnnnnnnnnnnnnnnnnnnnnnnnnnnnnnnnnnnnnnnnnnnnnnnnnnnnnnnnnnnnnnnnnnnnnnnnnnnnnnnnnnnnnnnnnnnnnnnnnnnnnnnnnnnnnnnnnnnnnnnnnnnnnnnnnnnnnnnnnnnnnnnnnnnnnnnnnnnnnnnnnnnnnnnnnnnnnnnnnnnnnnnnnnnnnnnnnnnnnnnnnnnnnnnnnnnnnnnngtgctttttgaccacgtaggctgtttaaagaaatatgacacggtgttggatattctaagagacttttttgaactcagacttaaatattatggattaagaaaagaatggctcctaggaatgcttggtgctgaatctgctaaactgaataatcaggctcgctttatcttagagaaaatagatggcaaaataatcattgnnnnnnnnnnnnnnnnnnnnnnnnnnnnnnnnnnnnnnnnnnnnnnnnnnnnnnnnnnnnnnnnnnnnnnnnnnnnnnnnnnnnnnnnnnnnnnnnnnnnnnnnnnnnnnnnnnnnnnnnnnnnnnnnnnnnnnnnnnnnnnnnnnnnnnnnnnnnnnnnnnnnnnnnnnnnnnnnnnnnnnnnnnnnnnnnnnnnnnnnnnnnnnnnnnnnnnnnnnnnnnnnnnnnnnnnnnnnnnnnnnnnnnnnnnnnnnnnnnnnnnnnnnnnnnnnnnnnnnnnnnnnnnnnnnnnnnnnnnnnnnnnnnnnnnnnnnnnnnnnnnnnnnnnnnnnnnnnnnnnnnnnnnnnnnnnnnnnnnnnnnnnnnnnnnnnnnnnnnnnnnnnnnnnnnnnnnnnnnnnnnnnnnnnnnnnnnnnnnnnnnnnnnnnnnnnnnnnnnnnnnnnnnnnnnnnnnnnnnnnnnnnnnnnnnnnnnnnnnnnnnnnnnnnnnnnnnnnnnnnnnnnnnnnnnnnnnnnnnnnnnnnnnnnnnnnnnnnnnnnnnnnnnnnnnnnnnnnnnnnnnnnnnnnnnnnnnnnnnnnnnnnnnnnnnnnnnnnnnnnnnnnnnnnnnnnnaggtacaaagacaaagaaacaaactacattgccatttaagccaatcaaaaaaggaaagaagagaaatccctggtctgattcagaatcagataggagcagtgacgaaagtaattttgatgtccctccacgagaaacagagccacgaagagcagcannnnnnnnnnnnnnnnnnnnnnnnnnnnnnnnnnnnnnnnnnnnnnnnnnnnnnnnnnnnnnnnnnnnnnnnnnnnnnnnnnnnnnnnnnnnnnnnnnnnnnnnnnnnnnnnnnnnnnnnnnnnnnnnnnnnnnnnnnnnnnnnnnnnnnnnnnnnnnnnnnnnnnnnnnnnnnnnnnnnnnnnnnnnnnnnnnnnnnnnnnnnnnnnnnnnnnnnnnnnnnnnnnnnnnnnnnnnnnnnnnnnnnnnnnnnnnnnnnnnnnnnnnnnnnnnnnnnnnnnnnnnnnnnnnnnnnnnnnnnnnnnnnnnnnnnnnnnnnnnnnnnnnnnnnnnnnnnnnnnnnnnnnnnnnnnnnnnnnnnnnnnnnnnnnnnnnnnnnnnnnnnnnnnnnnnnnnnnnnnnnnnnnnnnnnnnnnnnnnnnnnnnnnnnnnnnnnnnnnnnnnnnnnnnnnnnnnnnnnnnnnnnnnnnnnnnnnnnnnnnnnnnnnnnnnnnnnnnnnnnnnnnnnnnnnnnnnnnnnnnnnnnnnnnnnnnnnnnnnnnnnagagtgatgacttccatatggactttgactcagctgtggcttctcgggcaaaatctgtgcgggcaaagaaacctataaagtacctggaagagtcagatgaagatgatctgttttaaaacgtgagttgattattttaagtaattatcttactgagcccaagacgggttttaaagttacctgaagctcttaacttcctcccctctgaatttagtttggttaaggtgtttttagtacaagaccatgaaagtgaagtaaagcccaagtgttctttagctttttataatactgtctaaatagtgaccatctcatgggcattgttttcttctctgctttgtcagtgttttgagtctgctttctttggtctttaaaacctgattttaagttattctgaactgtagaaatagttatctggtcaaatcagcataaagcagtg

SEQ ID NO: 19995 - DNA, 467 bp, Macaca Mulatta
  misc_feature (1)...(467): n = A,T,C or G
ggggaatcatgctgtggttgcacggaaagataaggcagattgtgtccaaacgctgttacttgaccagcagcgcatgtttggaagtagtgtaactgactgctcgagcaacttttgtttgtttgagtccaaaaccaaggaccttctgttcagagatgacacagtatgtttggccaaacttcatgacagaaacacatatgaaaaatacttaggagaagaatatgtcaaggctgtcgctaacctgagaaaatgctccacctcaccactcctggaagcctgcactttccatagagcttaaaatctgagaggtggggctgccaccaaggtgaagatgggagcgcagatgatccatgagtttgccctggtttcagtggcccgagtggtttgtgctaaccacgtctgtcttcacagctctgtgttgccatgtgtgctgaacnnnnnnnnnnnnnnnnnnnnnnnnnnnnnnnnnn

SEQ ID NO: 19996 - DNA, 735 bp, Macaca Mulatta
caacagcggcacctccgtgggccccaacgcagtgtcaccttccagcggcccctcgcttacggcggactccatgtggaggccgtggcggaactgagggggctcaggccacccctcctcttaaactccccaaccgacctctcttccctctggactgtaaacaggaacttgaatactgggagagaaaaggacttttttgattaagtggttactttgtgtttttttaatttctaaaaagttactttttgtagagagagctgtattaagtgactgaccatgcactatatttgtatatattttatatgttcatattggattgcgcctttgtataaaagctcagatgacatttcgttttttacacgagatttctttttatgtgatgccaaagatgtttgaaaatgctcttaaaatatcttcctttggggaagtttatttgagaaaatataataaaagaaaaaagtaaaggcttttatgtcttagaactgactcttccaggatatgtaaaaaggctcttagtggaatttgaattacatgtaattagtcaattcaagaattgactcttttgttattaaaagaacatttttaaaaatccatcaaacctttcaccaatcctccgtgaactaaaaagactaaattccatttactttacaagcagccatctggtaaggcttccctgataaacttgtggtcagtctcttaaaggatttccaaaaacttgtttttaagttgcagtcgggt

SEQ ID NO: 19997 - DNA, 125 bp, Macaca Mulatta
cagatgacaccgtacatgagtcagccgagccatcccgcggcgagaacgcggcacaaacaccaaggatacccagccgccttttggcaatcctactgttcctcctggcgatgcttttgacattatag

SEQ ID NO: 19998 - DNA, 1287 bp, Macaca Mulatta
  misc_feature (1)...(1287): n = A,T,C or G
gggcctttccgcgctacctacagaagggtccatacggcgttgttcctggattcccgtcgtaacttaaagggaaactttcacaatgtccggagcccttgatgtcctgcaaatgaaggaggaggatgtccgttaagttccttgcagcaggaacccacttaggtggcaccaatcttgacttccagatggaacagtacatctataaaaggaaaagtgatggcatctacatcataaatctgaagaggacctgggagaagcttctgctggcggctcgtgccattgttgccattgaaaaccctgctgatgtcagtgttatatcctccaggaatactggccagagggccgtgctgaagtttgctgctgccactggagccactccaattgctggccgcttcactcctggaaccttcactaaccagatccaggcagccttccgggagccacggcttcttgtggttactgaccccagggctgaccaccagcctctcacggaggcatcttatgttaacctacctaccattgctctgtgtaacacagattctcctctgcgctatgtggacattgccatcccatgcaacaacaagggagctcactcagtgggtttgatgtggtggatgctggctcgggaagttctgcgcatgcgtggcaccatttcccgtgaacacccgtgggaggtcatgcctgatctctacttctacagagatcctgaagagattgaaaaagaagagcaggctgctgctgaaaaggcagtgaccaaggaggaatttcagggtgaatggactgctccagctcctgagttcactgctactcagcctgaggttgcagactggtctgaaggtgtgcaggtgccctctgtgcctattcagcagttccctactgaagactggagtgctcagcctgccacggaagactggtctgcagctcccactgctcaggccactgaatgggtaggagcaaccactgaatggtcttaagctgttcttgcacgggctcttaagcaacatggaaaaatggttgatagaaaataaacatcagtttttcttctcataccaacacactcgcctacatcccatttcttatatataaaaaaaacctttgttagtcactcttgggnnnnnnnnnnnnnnnnnnnnnnnnnnnnttcttttttgggcgccgcggggccccctttagggaaaagtaaaaatggggcataaactcttttcccttaaagaaatccctggtcaaagaaataataccatcgggatacccccccccaacaaaaaaaaaaccacgggggggaataaacaa

SEQ ID NO: 19999 - DNA, 828 bp, Macaca Mulatta
gcaccgctgagagtgctggggaataaaaagggggtcttcactcggcagagacaaccaaaaagtgcagcgttccttttgcgagagagatactggaagattgccaatgaaaccaggtatccctactcaatagccaagtcacagtgtttggaaaacagcccgtttacttgagcaagactgacaccacctgtgtgtcccttcctcccagagtcagggtgacctacagcagcagaacaagtgcctcttggactgttcatggcagaccagaacatttctggcctgggttttatggtcatctgtgctagcagggaacacaaggtggaaataaaagattttctagtatggaaataaagagttggcatgaaagtggctactgaaaagcatctgaaatcatttctgtgcgtcgcgctgttttcagagccttaactatgtgtggactttggagaaactgctgctccaacacccccaccatgttcagagcagctggttccagagggcatctgcagaaatagccccatggtcctagggccgccgtgtttgtgtagcaaaccgggccagcctcaacagggagtgagtagaagactttcacagctgctgttcgactcctcagacgagctaaagtcccacatgtaccaacaaattcatagaaacgctgtcatgctgcagcacttagcagggtctgtgagccagtttccacatagttaagctggcagtgtctgaactggaaggttagaggtaactggttctctctcccaggacatcgttctgacctcagccatagggtcttgacagaaatgggcagatgagtgtaaacgcccattggctttatca

SEQ ID NO: 20000 - DNA, 855 bp, Macaca Mulatta
gctgagctaccttcagagtcccatcacgacctctcccagctgctgaaaggctgtgggaggtgaggctcttcacatcccactgggactccaggctccttgagaggagaaatgcagtaactctgggaggggctcgagaggggtggtctttatttatttaacttcacccgagttccactgggttcctaagcagtcgttgtgatgacttagcgtcaagacatctgctgaactcagcacattcgggaccaatatgtagtgggtacatcaagtccctctgacaaaatggggcagaagagaaaggactcagtgtgtgagccagtttctttttgctcgctcctgttttttgtagaatctcttcatgcttgacatacctaccagtattatcattcccgacgacacatatacatatgagaatataccttatttatttttgtggaggtgtctgcctccacaaatgtcattgtctactcctagaagaaccaaatacctcaatttttgtttttgagtactgtactatcctgtaaatatatcgtaagcaggtttgttttcagcactgatggaaaataccagtgttggggtttttttttagttgccaacagttgtatgtttgctgattatttatgacctgaaataatatatttcttcttctaagaagacattttgttacataaggataacttttttatacaatggaataaattacggcatttctattgaaatttcaatgcttttatttctttggcaaccacacccagtccctctcccactagtgaactagggaagaatttcgacaagggcctgcagaatgtgttgagatctgatccctgtggtggcccattggtccaatgaatggctggg

SEQ ID NO: 20001 - DNA, 710 bp, Macaca Mulatta
  misc_feature (1)...(710): n = A,T,C or G
gtggcaatcaaggtttgacagtagtaattcaaggacaaggtcaaactactggacagttgcagttgatacctcaaggggtgactgtactcccagnnnnnnnnnnnnnnnnnnnnnnnnnnnnnnnnnnnnnnnnnnnnnnnnnnnnnnnnnnnnnnnnnnnnnnnnnnnnnnnnnnnnnnnnnnnnnnnnnnnnnnnnnnnnnnnnnnnnnnnnnnnnnncaggtacaggtgaacaaagacagagtaaactgtcaccccagacgcaggtacatcaagacaaaaccctgccagcagctcagtcgtcaagtgtgggtccggcagaagcccagccacagactgctcagcctnnnnnnnnnnnnnnnnnnnnnnnnnnnnnnnnnnnnnnnnnnnnnntgaagttcagactcagcctgaagttcagacgcaaacaactgtttcatcccatgtcccttctgaagcacaacccacccaagcacagtcatccaaaccccaagtcgcagcacagtctcagcctcaaagtaatgtccaaggacagtctcctgttcgtgtccaaagtccatcacaggctcgaatacgtccatcaactccatcccaactgtctcctggacaacaatcccaggttcagactacaacctcacaaccgattccaattcaaccacatacatctcttcagataccttcccaaggccagccacaatcacaaccccagg

SEQ ID NO: 20002 - DNA, 773 bp, Macaca Mulatta
ccttccggggaggcccccaggactgcagggcacagaccaaagacatgggtgcccaggccccttgggtgccggaggcgggaccttgagtgggccaggccactcccccgagctccagctgccttagaggagtcacagcatacactggaacaggagctgggccagcctctgcagctgcctcagtttccccagggaccccacccccgctttgggggtcaggaacactacactgcacaggaagccttcacactggatggggggcctgcgcccccatacctgaaacctcccagctcacctgccctactggggcccgacactgtacccagctggttgggaggaccagagcctgtctcagggaattgcccgcaggggtgatgcagggaggaggggaggtgcagggaagaggggccggcctcagctgtcaccagcacttttgaccaagtcctgctactgcggcccctgccctagggcttagagcatgggcctcctgccctgggggtcatctggggccagggctctctgggtgccttcctgctgccccagccagggttggagtattagcctcgggatccaatgaagccagaagccaaataaactcaaaagctgtctcgccacatgtagcctgtcacctttcttggacgtaaccaggtgacccaacctatcatgcaaccatggtgtcctgatgccccaacaataggcagttccttgccttgcactgcatccctctcctgggaccagatccaccagccttggtgagtcattcaaggcttttctct

SEQ ID NO: 20003 - DNA, 525 bp, Macaca Mulatta
ccaaggacatgaagggtcccagcaatgaggcaggaaagcgagaacacacagcaggtctcaccacccatcttcgttctgtacctaacaggtggtccacaaagctgtgctgcaactcagtgaggagggtgtggacacagctggctccactggggtcagcctaaacctgacgtccaagcctatcatcctgcgtttcaaccagcccttcatcatcatgatcttcgaccacttcacctggagcagccttttcctggccagggttgtgaacccagcgtaagagaccgctcacccagagcctcagcactatctgactttgggcaccagggacaccacggaaatgttttggagagtgggaggtttcccccaatctcctccaagttctcctccctccaaccagagttgtgtctacctttaggcatcttgtaataaatgtcattgcgactctgatgacgagcgtggttaaagggaagggcaggggggttctggaggttaccgtgataaagtggtgtttgcaaatccccgggcctg

SEQ ID NO: 20004 - DNA, 3365 bp, Macaca Mulatta
  misc_feature (1)...(3365): n = A,T,C or G
aaggatacctacaaattaccgcacagattaatagaaaagaaaagaagagaccgaattaatgaatgcattgctcagctgaaagatttactgcctgaacatctgaaattgacnactctggggcatctggagaaagccgtagtcttggaattaactctgaaacacctaaaagctttaaccgccttaaccgagcaacagcatcagaagataattgctttacagaatgngggagcgatctctgaaatcgcccattcagtccgacttggatgcgttccactcgggatttcaaacatgcgccaaagaagtcttgcaatacctctcccggtttgagagctggacacccagggagccgcggtgtgtccagctgatcaaccacttgcacgccgtggccacccagttcttgcccaccccgcagctgttgactcaacaggtccctctgagcaaaggcaccggcgctccctcggccgccgggtccgcggccgccccctgcctggagcgcgcgcggcataaactggagcccctcgcctactgcgtgccggtcatccagcggactcagcccagcgccgaactcgccgcctagaatcacacggaacccgattgcggctacggcggcgaagccgaggcccgggcggaccgcgagaaaggcaaagggcggggggcgagccgcgtcaccatcaagcaggaggctcccggggaaggacttgccggccgcccagaaggatgaagctggattcccgcggcggcggcagnnnnnnnnnnnnnnnnnnnnnnnnnnnnnnnnnnnnnnnnnnnnnnnnnnnnnnnnnnnnnnnnnnnnnnnnnnnnnnnnnnnnnnnnnnnnnnnnnnnnnnnnnnnnnnnnnnnnnnnnnnnnnnnnnnnnnnnnnnnnnnnnnnnnnnnnnnnnnnnnnnnnnnnnnnnnnnnnnnnnnnnnnnnnnnnnnnnnnnnnnnnnnnnnnnnnnnnnnnnnnnnnnnnnnnnnnnnnnnnnnnnnnnnnnnnnnnnnnnnnnnnnnnnnnnnnnnnnnnnnnnnnnnnnnnnnnnnnnnnnnnnnnnnnnnnnnnnnnnnnnnnnnnnnnnnnnnnnnnnnnnnnnnnnnnnnnnnnnnnnnnnnnnnnnnnnnnnnnnnnnnnnnnnnnnnnnnnnnnnnnnnnnnnnnnnnnnnnnnnnnnnnnnnnnnnnnnnnnnnnnnnnnnnnnnnnnnnnnnnnnnnnnnnnnnnnnnnnnnnnnnnnnnnnnnnnnnnnnnnnnnnnnnnnnnnnnnnnnnnnnnnnnnnnnnnnnnnnnnnnnnnnnnnnnnnnnnnnnnnnnnnnnnnnnnnnnnnnnnnnnnnnnnnnnnnnnnnnnnnnnnnnnnnnnnnnnnnnnnnnnnnnnnnnnnnnnnnnnnnnnnnnnnnnnnnnnnnnnnnnnnnnnnnnnnnnnnnnnnnnnnnnnnnnnnnnnnnnnnnnnnnnnnnnnnnnnnnnnnnnnnnnnnnnnnnnnnnnnnnnnnnnnnnnnnnnnnnnnnnnnnnnnnnnnnnnnnnnnnnnnnnnnnnnnnnnnnnnnnnnnnnnnnnnnnnnnnnnnnnnnnnnnnnnnnnnnnnnnnnnnnnnnnnnnnnnnnnnnnnnnnnnnnnnnnnnnnnnnnnnnnnnnnnnnnnnnnnnnnnnnnnnnnnnnnnnnnnnnnnnnnnnnnnnnnnnnnnnnnnnnnnnnnnnnnnnnnnnnnnnnnnnnnnnnnnnnnnnnnnnnnnnnnnnnnnnnnnnnnnnnnnnnnnnnnnnnnnnnnnnnnnnnnnnnnnnnnnnnnnnnnnnnnnnnnnnnnnnnnnnnnnnnnnnnnnnnnnnnnnnnnnnnnnnnnnnnnnnnnnnnnnnnnnnnnnnnnnnnnnnnnnnnnnnnnnnnnnnnnnnnnnnnnnnnnnnnnnnnnnnnnnnnnnnnnnnnnnnnnnnnnnnnnnnnnnnnnnnnnnnnnnnnnnnnnnnnnnnnnnnnnnnnnnnnnnnnnnnnnnnnnnnnnnnnnnnnnnnnnnnnnnnnnnnnnnnnnnnnnnnnnnnnnnnnnnnnnnnnnnnnnnnnnnnnnnnnnnnnnnnnnnnnnnnnnnnnnnnnnnnnnnnnnnnnnnnnnnnnnnnnnnnnnnnnnnnnnnnnnnnnnnnnnnnnnnnnnnnnnnnnnnnnnnnnnnnnnnnnnnnnnnnnnnnnnnnnnnnnnnnnnnnnnnnnnnnnnnnnnnnnnnnnnnnnnnnnnnnnnnnnnnnnnnnnnnnnnnnnnnnnnnnnnnnnnnnnnnnnnnnnnnnnnnnnnnnnnnnnnnnnnnnnnnnnnnnnnnnnnnnnnnnnnnnnnnnnnnnnnnnnnnnnnnnnnnnnnnnnnnnnnnnnnnnnnnnnnnnnnnnnnnnnnnnnnnnnnnnnnnnnnnnnnnnnnnnnnnnnnnnnnnnnnnnnnnnnnnnnnnnnnnnnnnnnnnnnnnnnnnnnnnnnnnnnnnnnnnnnnnnnnnnnnnnnnnnnnnnnnnnnnnnnnnnnnnnnnnnnnnnnnnnnnnnnnnnnnnnnnnnnnnnnnnnnnnnnnnnnnnnnnnnnnnnnnnnnnnnnnnnnnnnnnnnnnnnnnnnnnnnnnnnnnnnnnnnnnnnnnnnnnnnnnnnnnnnnnnnnnnnnnnnnnnnnnnnnnnnnnnnnnnnnnnnnnnnnnnnnnnnnnnnnnnnnnnnnnnnnnnnnnnnnnnnnnnnnnnnnnnnnnnnnnnnnnnnnnnnnnnnnnnnnnnnnnnnnnnnnnnnnnnnnnnnnnnnnnnnnnnnnnnnnnnnnnnnnnnnnnnnnnnnnnnnnnnnnnnnnnnnnnnnnnnnnnnnnnnnnnnnnnnnnnnnnnnnnnnnnnnnnnnnnnnnnnnnnnnnnnnnnnnnnnnnnnnnnnnnnnnnnnnnnnnnnnnnnnnnnnnnnnnnnnnnnnnnnnnnnnnnnnnnnnnnnnnnnnnnnnnnnnnnnnnnnnnnnnnnnnnnnnnnnnnnnnnnnnnnnnnnnnnnnnnnnnnnnnnnnnnnnnnnnntaaactagaaattatctttatattctagtattttcagcactccataaattctattacctaaatattgccacactattttgtgatttaaaaattcttactaaggaataaaaactttaatatacagtatgatattgtctaataattaaaaaagacaatggatgctcaattaggtttgagatatctatgactgtagggatacaaatcactgaggttctcagatatacagctttttttgtcattggcttgatgtcacacatttccaatctcttgcaagcctccaggctctggctgtgtctacctgcttgtttccaatgtatcttaatgaaaagtgcaaaagaaaaacctaccaatta

SEQ ID NO: 20005 - DNA, 2795 bp, Macaca Mulatta
  misc_feature (1)...(2795): n = A,T,C or G
cctcccctgccatcctgccccggactccggctccggctccggctccgattgcagtttgcaacctccgctgcgccgcagcagccaccaattcgcctgcggttcaggtggctcttgcctggatgtcctagtctaggggcccccgggccggactcggctgggctcccttcaccctccgcggagtcatgagggcgaacggcgctctgcaggtgctgggcttgcttttcaacctggcccggggctccgaggtgggcaactctcnnnnnnnnnnnnnnnnnnnnnnnnnnnnnnnnnnnnnnnnnnnnnnnnnnnnnnnnnnnnnnnnnnnnnnnnnnnnnnnnnnnnnnnnnnnnnnnnnnnnnnnnnnnnnnnnnnnnnnnnnnnnnnnnnnnnnnnnnnnnnnnnnnnnnnnnnnnnnnnnnnnnnnnnnnnnnnnnnnnnnnnnnnnnnnnnnnnnnnnnnnnnnnnnnnnnnnnnnnnnnnnnnnnnnnnnnnnnnnnnnnnnnnnnnnnnnnnnnnnnnnnnnnnnnnnnnnnnnnnnnnnnnnnnnnnnnnnnnnnnnnnnnnnnnnnnnnnnnnnnnnnnnnnnnnnnnnnnnnnnnnnnnnnnnnnnnnnnnnnnnnnnnnnnnnnnnnnnnnnnnnnnnnnnnnnnnnnnnnnnnnnnnnnnnnnnnnnnnnnnnnnnnnnnnnnnnnnnnnnnnnnnnnnnnnnnnnnnnnnnnnnnnnnnnnnnnnnnnnnnnnnnnnnnnnnnnnnnnnnnnnnnnnnnnnnnnnnnnnnnnnnnnnnnnnnnnnnnngaccaagaccatctgtgctcctcagtgtaatggtcactgctttgggcccaaccccaaccagtgctgccatgatgagtgtgccgggggctgctcaggccctcaggacacagactgctttgnnnnnnnnnnnnnnnnnnnnnnnnnnnnnnnnnnnnnnnnnnnnnnnnnnnnnnnnnnnnnnnnnnnnnnnnnnnnnnnnnnnnnnnnnnnnnnnnnnnnnnnnnnnnnnnnnnnnnnnnnnnnnnnnnnnnnnnnnnnnnnnnnnnnnnnnnnnnnnnnnnnnnnnnnnnnnnnnnnnnnnnnnnnnnnnnnnnnnnnnnnnnnnnnnnnnnnnnnnnnnnnnnnnnnnnnnnnnnnnnnnnnnnnnnnnnnnnnnnnnnnnnnnnnnnnnnnnnnnnnnnnnnnnnnnnnnnnnnnnnnnnnnnnnnnnnnnnnnnnnnnnnnnnnnnnnnnnnnnnnnnnnnnnnnnnnnnnnnnnnnnnnnnnnnnnnnnnnnnnnnnnnnnnnnnnnnnnnnnnnnnnnnnnnnnnnnnnnnnnnnnnnnnnnnnnnnnnnnnnnnnnnnnnnnnnnnnnnnnnnnnnnnnnnnnnnnnnnnnnnnnnnnnnnnnnnnnnnnnnnnnnnnnnnnnnnnnnnnnnnnnnnnnnnnnnnnnnnnnnnnnccggggcttctcattgttgatcatgaagaacttgaatgtcacatctctgggcttccgatccctgaaggaaattagtgctgggcgtatctatataagtgccaataggcagctctgctaccaccactctttgaactggaccaaggtgcttcgggggcctacagaagagcgactagacatcaagcataatcgtccgcgtagagactgcnnnnnnnnnnnnnnnnnnnnnnnnnnnnnnnnnnnnnnnnnnnnnnnnnnnnnnnnnnnnnnnnnnnnnnnnnnnnnnnnnnnnnnnnnnnnnnnnnnnnnnnnnnnnnnnnnnnnnnnnnnnnnnnnnnnnnnnnnnnnnnnnnnnnnnnnnnnnnnnnnnnnnnnnnnnnnnnnnnnnnnnnnnnnnnnnnnnnnnnnnnnnnnnnnnnnnnnnnnnnnnnnnnnnnnnnnnnnnnnnnnnnnnnnnnnnnnnnnnnnnnnnnnnnnnnnnnnnnnnnnnnnnnnnnnnnnnnnnnnnnnnnnnnnnnnnnnnnnnnnnnnnnnnnnnnnnnnnnnnnnnnnnnnnnnnnnnnnnnnnnnnnnnnnnnnnnnnnnnnnnnnnnnnnnnnnnnnnnnnnnnnnnnnnnnnnnnnnnnnnnnnnnnnnnnnnnnnnnnnnnnnnnnnnnnnnnnnnnnnnnnnnnnnnnnnnnnnnnnnnnnnnnnnnnnnnnnnnnnnnnnnnnnnnnnnnnnnnnnnnnnnnnnnnnnnnnnnnnnnnnnnnnnnnnnnnnnnnnnnnnnnnnnnnnnnnnagagcatagagcctctggaccccagtgagaaggctaacaaagtcttggccagaatcttcaaagagacagagttaaggaagcttaaagtgcttggctcgggtgtctttggaactgtgcacaaannnnnnnnnnnnnnnnnnnnnnnnnnnnnnnnnnnnnnnnnnnnnnnnnnnnnnnnnnnnnnnnnnnnnnnnnnnnnnnnnnnnnnnnnnnnnnnnnnnnnnnnnnnnnnnnnnnnnnnnnnnnnnnnnnnnnnnnnnnnnnnnnnnnnnnnnnnnnnnnnnnnnnnnnnnnnnnnnnnnnnnnnnnnnnnnnnnnnnnnnnnnnnnnnnnnnnnnnnnnnnnnnnnnnnnnnnnnnnnnnnnnnnnnnnnnnnnnnnnnnnnnnnnnnnnnnnnnnnnnnngggtatgtactaccttgaagaacatggtatggtgcatagaaacctggctgcccgaaatgtgctactcaagtcacccagtcaggttcaggtggcagattttggtgtggctgacctgctgcctcctgatgataagcagctgctatacagtgaggccaag

SEQ ID NO: 20006 - DNA, 411 bp, Macaca Mulatta
  misc_feature (1)...(411): n = A,T,C or G
ggagaccccagcaagcagaactcactgctctggagagcgaactcggaccgtgccttcctccaggatggtttctccttgagcaacaattctctcctggtccccaccagtggcatctacttcgtctactcccaggtggtcttctctgggaaagcctactctcctaaggccacccccaccccactctacctggcccatgaggtccagctcttctcctcccagtaccccttccacgtgcctcttctcagctcccagaagatggtgtatccagggctgcaggaaccctggctgcactcgatgtaccacggggctgcgttccagctcacccagggagaccagctatccacccacacagatggctcgccccaaatagtcctctgccctngtnctgtcttctttggngccttcgctctg

SEQ ID NO: 20007 - DNA, 1475 bp, Macaca Mulatta
  misc_feature (1)...(1475): n = A,T,C or G
caggcgcccactcccaggtggtccaggtgaatgactccatgtatggcttcatcggcacagacgtggttctgcactgcagctttgccaacccgctgccaagcgtgaagatcacccaggtcacgtggcagaagnccaccaacggctccaagcagaacgtggccatctacaacccatccatgggcgtgtccgtgctggctccctaccgcgagcgcgtggaattcctgcggccctccttcaccgatggcaccatccgcctctcccgcctggagctggaggatgagggtgtctacatctgcgagtttgctaccttccctacgggcaatcgggaaagcagctcaatctcacnnnnnnnnnnnnnnnnnnnnnnnnnnnnnnnnnnnnnnnnnnnnnnnnnnnnnnnnnnnnnnnnnnnnnnnnnnnnnnnnnnnnnggccacctgcacctcagccaatgggaagcctcccagtgtggtatcttgggaaactcggctaaaaggcgaggcagagtatcaagagatccggaaccccaacggcacggtgacggtcattagccgctaccgcctggtgcccagcagggaagcccaccagcagtccttggcctgcatcgtcaactaccacatggaccgcttcaaggaaagcctcactctcaatgtgcagtgtgagnnnnnnnnnnnnnnnnnnnnnnnnnnnnnnnnnnnnnnnnnnnnnnnnnnnnnnnnnnnnnnnnnnnnnnnnnnnnnnnnnnnnnnnnnnnnnnnnnnnnnnnnnnnnnnnnnnnnnnnnnnnnnnnnnnnnnnnnnnnnnnnnnnnnnnnnnnnnnnnnnnnnnnnnnnnnnnnnnnnnnnnnnnnnnnnnnnnnnnnnnnnnnnnnnnnnnnnnnnnnnnnnnnnnnnnnnnnnnnnnnnnnnnnnnnnnnnnnnnnnnnnnnnnnnnnnnnnnnnnnnnnnnnnnnnnnnnnnnnnnnnnnnnnnnnnnnnnnnnnnnnnnnnnnnnnnnnnnnnnnnnnnnnnnnnnnnnnnnnnnnnnnnnngtggtcggcgggatcgtcgtcgccctgcggcggcgccggcacaccttcaagggtgactacttcaccaagaagcacgtgtatggcaacggctacagcaaggcaggcatccctcagcaccacccgccgatggcgcataacctgcagtaccctgacgactcggacgacgagaagaaggccggcccgctgggtggaagcagctannnnnnnnnnnnnnnnnnnnnnnnnnnnnnnnnnnnnnnnnnnnnnnnnnnnnnnnnnnnnnnnnnnnnnatgacgaggacgccnagcggccctacttcaccgtggatgaggccgaggcccgtcaggacggctacggggaccggactctgggctaccagtacgaccctgagcagctggacttggctgagaacatggtttctcagaatgacgggtctttcatttccaagaaggagtggtacgtgtag

SEQ ID NO: 20008 - DNA, 123 bp, Macaca Mulatta
gcacaacctgctcccccagcctcctcggagcaaatacatacacccagatgatgaactggtcttagaagatgaactgcagcgtatcaaactaaaaggcaccattgatgtgtcaaagctggttac

SEQ ID NO: 20009 - DNA, 317 bp, Macaca Mulatta
gctggtgatggcctccctgcaccacatctatgtggccctggaggaggagattgagcgcaacaaggagagcccagtcttcgcccctgtctacttcccagaagagctgcaccgcaaggccaccctggagcaggacctggccttctggtacgggccccgctggcaggaagtcatcccctacacactggcaatgcagcgctatgtgaagcggctccacgaggtggggcgcacagagcccgagctgctggtggcccacgcctacacccgctacctggctgacctgtctgggggccagatgctcaagaagattgctcagaaag

SEQ ID NO: 20010 - DNA, 1413 bp, Macaca Mulatta
  misc_feature (1)...(1413): n = A,T,C or G
gggaaattgaatctctnnnnnnnnnnnnnnnnnnnnncaggaaaaaaatagattacattcatattggtaaatttttgttttactgtttttccaatgtagattaaagagtctattgttggggaaatcagacgggaaattgtaagtggacttttggcagcagtatcttcaagtaaagcatctaattctaagcaagataatcattaaatggaaattataggttggcatggatcctattagctgtgtaatactggaattatcaatgatatgcactggtggaggtgttacttgtgctttagaagatacttgctgctgagctgggctactgtatacagtgtacaatgtgtatttcttcagccgtatatttttttaaaaacgtacatagaatcttaggcactttgctatttcttttctaaactatcaaaaactctagcagtttgaaaagcctaatatttatttgtatgtcaatatttttcatttgattccctattagaattaattataaaacttgaaaacttccagacttatccaacttataaataacatatttcttcagactagcttcttaaaacactgacctctatgaggtatttactgtgcaataataactgattcattttttgagagcttgaagcaaccaatgatttttccctccactgctgttaattaatgtcacttccaagaagaaaaactgttctgttgtaaaaaatatagttgctcttaattcttgagaggttactaatagcagtaggatagaattatatgaggttacctacaactacttaatgttcttacactgtaagccttgttgctttacccaagacaaatgtaattttatcattgcttatgtagtagttttcttttggaaatgtgccttatgttaaacactatgtacttttactttctgcattgtccagacttctttattatatgaagatgtttctttttctgtcttttaaactaaatagagtatcatccaaataatggggcctatgacttgaatgaatagaaatgaataagctggtgttttttcaaaatggaagtaatttagatttgttctcctcatacataaaatgattttagttcagttttaaccagtgaaaactttgtttttatgaaaaaaaggagaacggtttcctatttggttttatatgtgttaaataaatgtgtaaagtaacaccaaatgttattagaatattcttcagcatttaactcttttcactctatgtgtatcttggtgggntcncnaagagtagctacagaaacgtnnnnnnnnnnnnnnnnnnnnnnnnnnnnnnnnnnnnnnnnnnnnnnnnnnnnnnnnnnnnnnnnnnnnnnnnnnnnnnnnnnnnnnnnnnnnnnnnnnnnnnnnnnnnnnnnnnnnnnnnannannnnaaanaaacaccaaacactcc

SEQ ID NO: 20011 - DNA, 468 bp, Macaca Mulatta
atgtggagtcgaccggggccgacagcgggcaggtgctgctgctagagggctctggactagtgcctgttacccaggacacccaggccatgcccctggctgggcagcctggcacaagtgaaggaggtggtgggaaaactgggtgtatctcaaggcagcaggctgagcccagagcagaggacccagttgttacaaggccctgggagagggtgggcagctcccactgccccagagcagcgctcagagcacccaggttgcccacggaaaatccaataaacagaaacgaatgggaatccacatagccctgaggtgcacatggtatgggcctttgtaacggcaggcaaggcgggggtgagctcgtgggtggggctgccattagggggccaaggaggtggacctgaacgccaccaccccgagagcaggcctaaagcaaaccccagcctctgcccctgtgtaggcagcctctgacat

SEQ ID NO: 20012 - DNA, 424 bp, Macaca Mulatta
  misc_feature (1)...(424): n = A,T,C or G
gggagtgcactttccaactgcctggctgcgtttttgccttaccggtgggagctccagcatctccttggctcgaaatggaccccaactgctcctgcgccactggtggttcctgcacgtgcgccggctcctgcaagtgcaaagagtgcaaatgcacctcctgcaagaagagctgctgctcctgctgccccgtgggctgtgccaagtgtgcccagggctgtgtctgcaaaggggcgtcggagaagtgcagctgctgtgcctgatgtggggacagctctgctcccagatgtaaatacagcaacctgcacaacctnnnnnnnnnnnnnnnnnncaaccctgagccattttctgcatttctttttatattaaatatgtgattgttttattgcccccaaaaataataaaattagaaaagaaaaatcttgtc

SEQ ID NO: 20013 - DNA, 710 bp, Macaca Mulatta
atctctcacaaagtcatactcaaatggtgaacagtgtataggaagaagcagcaggagctctgactaaagttgacataatagtccacctcccattactttgacatctgatcaaatgtatcttggctttgtttttgtgttattaggaaattctgatgagcattactattcactgatgcagaaagacgttctttggcataaaatactttttaacactttggatttctctgaaatatttagaagtgctcatttctggcccagccccaacaggaattctatagtaaggaggaggcgaaggggcctccttccctctccttgaatgacgttatgggcacatgccttttaaaagttctttaagcaacacagagctgagtcctctttgccatacctttggatttagtttcatcatctatttttagttataaacattttgttaaaatagatattggtttaaataatatagtattctaggtatttgatttaagactatgatttacctatatattacatatattttataaagacactaaaccagcataaccttactctgccagaatagtgaagctaattaaacatgtttgatttctgaataaattgaactaaatccaaactactacctaaaatcacaggacattaaggaccaatagcatctgtgccagatatttactgttattagctgggaagaacaattcgaaacagcaattacagtctga

SEQ ID NO: 20014 - DNA, 2785 bp, Macaca Mulatta
  misc_feature (1)...(2785): n = A,T,C or G
gggcctgggttccaataaataattgctacctcatgtctaaagaaattcctttttctgtgaaaaagactaagagcatcttcaacagtgccatgcaagagatggaggtttacgtggagaacatccgcaggaagtttggggtttttaattactctccattcaggacaccctacacacccaacagccagtaccaaatgctgctcgatcccaccaaccccagtgccggcactgccaagatagacaagcaggagaaggtcaagctcaactttgacatgacggcgtcccccaagatcctgatgagcaagcccgtgctgagtgggggcacaggccgccggatttccttgtcggatatgccgcgctcccccatgagcacaaactcttccgtgcacacaggctctgatgtggagcaggatgccgagaagaaggccacatccagccacttcagcgcgagtgaggagtccatggacttcctggataagagcacagnnnnnnnnnnnnnnnnnnnnnnnnnnnnnnnnnnnnnnnnnnnnnnnnnnnnnnnnnnnnnnnnnnnnnnnnnnnnnnnnnnnnnnnnnnnnnnnnnnnnnnnnnnnnnnnnnnnnnnnnnnnnnnnnnnnnnnnnnnnnnnnnnnnnnnnnnnnnnnnnnnnnnnnnnnnnnnnnnnnnnnnnnnnnnnnnnnnnnnnnnnnnnnnnnnnnnnnnnnnnnnnnnnnnnnnnnnnnnnnnnnnnnnnnnnnnnnnnnnnnnnnnnnnnnnnnnnnnnnnnnnnnnnnnnntaggcataaatgaaatctcggaagatgtttatacggccgtagagcacagcgattcggaggattctgagaagtcagatagtagcgatagtgagtatatcagtgatgatgagcagaagtccaagaacgagccagaagacacagaggacaaagagggttgtcggatggacaaagagccatctgctgttaaaaaaaagcccaagcctacaaacccagtggagattaaagaggagctgaaaagcacatcaccagccagcgagaagacagaccctggagcagtcaaggacaaggccagccctgagcctgagaaggacttttctgaaaaggcaaaaccttcacctcaccccacaaaggataaactgaagggaaaagatgagacggattccccaacagtccatttgggcctggactccgattcagagagtgaacttgtcatagatttaggagaagaccattctgggcgggagggtcgaaaaaataagaaggaacccaaagaaccgtctcccaaacaggatgnnnnnnnnnnnnnnnnnnnnnnnnnnnnnnnnnnnnnnnnnnnnnnnnnnnnnnnnnnnnnnnnnnnnnnnnnnnnnnnnnnnnnnnnnnnnnnnnnnnnnnnnnnnnnnnnnnnnnnnnnnnnnnnnnnnnnnnnnnnnnnnnnnnnnnnnnnnnnnnnnnnnnnnnnnnnnnnnnnnnnnnnnnnnnnnnnnnnnnnnnnnnnnnnnnnnnnnnnnnnnnnnnnnnnnnnnnnnnnnnnnnnnnnnnnnnnnnnnnnnnnnnnnnnnnnnnnnnnnnnnnnnnnnnnnnnnnnnnnnnnnnnnnnnnnnnnnnnnnnnnnnnnnnnnnnnnnnnnnnnnnnnnnnnnnnnnnnnnnnnnnnnnnnnnnnnnnnnnnnnnnnnnnnnnnnnnnnnnnnnnnnnnnnnnnnnnnnnnnnnnnnnnnnnnnnnnnnnnnnnnnnnnnnnnnnnnnnnnnnnnnnnnnnnnnnnnnnnnnnnnnnnnnnnnnnnnnnnnnnnnnnnnnnnnnnnnnnnnnnnnnnnnnnnnnnnnnnnnnnnnnnnnnnnnnnnnnnnnnnnnnnnnnnnnnnnnnnnnnnnnnnnnnnnnnnnnnnnnnnnnnnnnnnnnnnnnnnnnnnnnnnnnnnnnnnnnnnnnnnnnnnnnnnnnnnnnnnnnnnnnnnnnnnnnnnnnnnnnnnnnnnnnnnnnnnnnnnnnnnnnnnnnnnnnnnnnnnnnnnnnnnnnnnnnnnnnnnnnnnnnnnnnnnnnnnnnnnnnnnnnnnnnnnnnnnnnnnnnnnnnnnnnnnnnnnnnnnnnnnnnnnnnnnnnnnnnnnnnnnnnnnnnnnnnnnagctactgctcctcagcaggaagcggatgctgaggtgaacacagaaacactaaataagtcatcccaggggagttcctcgagcacacagtcagcaccttcagaaacggccagcgcctccaaagagaaggagacatccactgagaaaagcaaggacagtggctcgngacccttgacctttctggctccagagagacgccctcctccattctcttaggctccaaccaaggctctnnnnnnnnnnnnnnnnnnnnnnnnnnnnnnnnnnnnnnnnnnnnnnnnnnnnnnnnnnnnnnnnnnnnnnnnnnnnnnnnnnnnnnnnnnnnnnnnnnnnnnnnnnnnnnnnnnnnnnnnnnnnnnnnnnnnnnnnnnnnnnnnnnnnnnnnnnnnnnnnnnnnnnnnnnnnnnnnnnnnnnnnnnnnnnnnnnnnnnnnnnnnnnnnnnnnnnnnnnnnnnnnnnnnnnnnnnnnnnnnnnnnnnnnnnnnnnnnnnnnnnnnnnnnnnnnnnnnnnnnnnnnnnnnnnnnnnnnnnnnnnnnnngcatcggctttgactgcgaactgttcacccatacgagccctgtgctttaggtgtaaataatgtataatttgtggatgtcattgaaacctagaggaccttcccctttttatatttgtattaactttaactta

SEQ ID NO: 20015 - DNA, 560 bp, Macaca Mulatta
atcccagcagtgcccgtgcagcaggagcgcagtggatgaccttgcgtccctcgggcatgacaaaggaggagggctgctccaggagaagggcctcctgctggccagagtgaggagggccgagcggcttggttctccccgctggcccctggagagaagggagtgttcttagacccctgggtgcttgtctgcacagagctctggtctgtgccaccttggccaggccggctgtgggagagggtctggtcccacgctgcctctgctcagaccactgtgtggggggtgcacagcacagcctgcgggtgaaatgtgagagctcaccatcgagctcacgagacagttattaaaccattcaaatctctgtggtcagtggcatccatttgattccaggttgcctgcggcttccagccttggcagtggtgaccctctgcgggtcctcctggcctcctctcctctcacagacccctccccacagggtgcctggcccctgcctgcttctctagctagtcaagctgttccctctgttccttaccttctgtaagctctctcttctggagccttgg

SEQ ID NO: 20016 - DNA, 234 bp, Macaca Mulatta
gattttacttctagagatagtacataaaagtggtatgtgtgtgtatagctactacaaaacagttaactaaattaacatttggaaatcttatattccatatattatcatttaatccaatatctttttaagcttatttaattaaaaaatttccagtgagcttatctggctgtctttacatggggtttacaattttttatcatctattattccctgtacaatatttaaaatttattg

SEQ ID NO: 20017 - DNA, 1707 bp, Macaca Mulatta
  misc_feature (1)...(1707): n = A,T,C or G
tgtcaggggttctggaacaagatagagtgcagaatttgaaggacaagaatgagggaacagtatctacaagaaagatggcaaaagnnnnnnnnnnnnnnnnnnnnnnnnnnnnnnnnnnnnnnnnnnnnnnnnnnnnnnnnnnnnnnnnnnnnnnnnnnnnnnnnnnnnnnnnnnnnnnnnnnnnnnnnnnnnnnnnnnnnnnnnnnnnnnnnnnnnnnnnnnnnnnnnnnnnnnnnnnnnnnnnnnnnnnnnnnnnnnnnnnnnnnnnnnnnnnnnnnnnnnnnnnnnnnnnnnnnnnnnnnnnnnnnnnnnnnnnnnnnnnnnnnnnnnnnnnnnnnnnnnnnnnnnnnnnnnnnnnnnnnnnnnnnnnnnnnnnnnnnnnnnnnnnnnnnnnnnnnnnnnnnnnnnnnnnnnnnnnnnnnnnnnnnnnnnnnnnnnnnnnnnnnnnnnnnnnnnnnnnnnnnnnnnnnnnnnnnnnnnnnnnnnnnnnnnnnnnnnnnnnnnnnnnnnnnnnnnnnnnnnnnnnnnnnnnnnnnnnnnnnnnnnnnnnnnnnnnnnnnnnnnnnnnnnnnnnnnnnnnnnnnnnnnnnnnnnnnnnnnnnnnnnnnnnnnnnnnnnnnnnnnnnnnnnnnnnnnnnnnnnnnnnnnnnnnnnnnnnnnnnnnnnnnnnnnnnnnnnnnnnnnnnnnnnnnnnnnnnnnnnnnnnnnnnnnnnnnnnnnnnnnnnnnnnnnnnnnnnnnnnnnnnnnnnnnnnnnnnnnnnnnnnnnnnnnnnnnnnnnnnnnnnnnnnnnnnnnnnnnnnnnnnnnnnnnnnnnnnnnnnnnnnnnnnnnnnnnnnnnnnnnnnnnnnnnnnnnnnnnnnnnnnnnnnnnnnnnnnnnnnnnnnnnnnnnnnnnnnnnnnnnnnnnnnnnnnnnnnnnnnnnnnnnnnnnnnnnnnnnnnnntaacaggatctctctcgtcatggcattttcataaagcttctcccacagagaccccttgagaatttgtcactttctgaattgatggcagaaacaattgatgtagacaactctcagattaggaaagagtcctttgaggtcagtttatctgaagtgaggtctcctggaatagattcaaatattgatcttagtgtccttataaaaaacccagattttgttccaaagcctatagtagaccaatccattggtccatcatcacgaactaaagttctaaattcaaagctagggaagaattccaatcttgctaaggataataaaaaaaacaataaaggctgtctgaccaggaaaccacctttttctctctcttggaccaaggcccttgctgctagaccttcagcttttgcctcaacactgtgtcttcgttacccactgaaaagctgcaagcgacgcacccttgacctctataagacttttctttatagtagacaagttcaagatgtaaaggacaaagaaataagtcctcttgtagcgataacaccatttgacttcaaatcagcatcacctgatgacattgtaaaagctaatcaaaaaaaagcatttactagagaatagtaacaaaagaaaaacttgattgctgttgtagagctttttatttttaattaaagtcttcagaggatcactttatattatgggattcaaattgtgatttttatgaaaattgtcctaggtcagttgattagttgatacttatttttgcactgaattt

SEQ ID NO: 20018 - DNA, 474 bp, Macaca Mulatta
agcatggagaggagctggttctggtggaagctgtaggacgaagctcaacagaaaacctacagcacatttttcctcaaagaaccaaacatacccacgcagggatacgtggtgttctctgtctcactgtaaactagtgttctctaaacttcctaacgttgttagcatcaataaaattctatttttatgtcatttgatttgtgctaacaaatttttacatctctctcacccttctcctttctatgatcgttgtattcttatccggagagttttccatttcgggaaattgagatttggtttaggtaccagaaaaactaaggtgccttttttggttctctctgacatgtaatgggagagatgtggaaaacaacccaaagagagggagaacgtgacttaaatgaaatggaagtttacaagaatctcatatttttagaactcacagatgaaaaaatcagtattgttaggaatgtagtgtag

SEQ ID NO: 20019 - DNA, 3966 bp, Macaca Mulatta
  misc_feature (1)...(3966): n = A,T,C or G
agatcctggctctgcagagagaacagcccagaaaagaaagttccccagccctccacattcttccaatggccactcgccgcaggacacatcaacaagccccattaaaaagaaaaagaaacctggcttactgaacagtaacaataaggagcagncagtcagaactaagacatggtccgttttactatatgaagcagccactcaccacagaccctgttgatgttgtaccgcaggatggacgaaatgatttctactgctgggtttgtcaccgggaaggccaagtcctttgctgtgagctctgtccccgggtttatcacgctaagtgtctgagactgacatcggaaccagagggggactggttttgtcctgaatgtgagnnnnnnnnnnnnnnnnnnnnnnnnnnnnnnnnnnnnnnnnnnnnnnnnnnnnnnnnnnnnnnnnnnnnnnnnnnnnnnnnnnnnnnnnnnnnnnnnnnnnnnnnnnnnnnnnnnnnnnnnnnnnnnnnnnnnnnnnnnnnnnnnnnnnnnnnnnnnnnnnnnnnnnnnnnnnnnnnnnnnnnnnnnnnnnnnnnnnnnnnnnnnnnnnnnnnnnnnnnnnnnnnnnnnnnnnnnnnnnnnnnnnnnnnnnnnnnnnnnnnnnnnnnnnnnnnnnnnnnnnnnnnnnnnnnnnnnggaaatcacaaattgacgcaaatagcgaaagtagtcatcaaaatctgtgaacatgagnnnnnnnnnnnnnnnnnnnnnnnnnnnnnnnnnnnnnnnnnnnnnnnnnnnnnnnnnnnnnnnnnnnnnnnnnnnnnnnnnnatccacatccttggtctggcccaactgaagggtttccattctgcctgcaaagctctgagggataaagatgggcaggtcgatgcccgattctttggacaacatgacaggnnnnnnnnnnnnnnnnnnnnnnnnnnnnnnnnnnnnnnnnnnnnnnnnnnnnnnnnnnnnnnnnnnnnnnnnnnnnnnnnnnnnnnnnnnnnnnnnnnnnnnnnnnnnnnnnnnnnnnnnnnnnnnnnnnnnnnnnnnnnnnnnnnnnnnnnnnnnnnnnnnnnnnnnnnnnnnnnnnnnnnnnnnnnnnnnnnnnnnnnnnnnnnnnnnnnnnnnnnnnnnnnnnnnnnnnnnnnnnnnnnnnnnnnnnnnnnnnnnnnnnnnnnnnnnnnnnnnnnnnnnnnnnnnnnnnnnnnnnnnnnnnnnnnnnnnnnnnnnnnnnnnnnnnnnnnnnnnnnnnnnnnnnnnnnnnnnnnnnnnnnnnnnnnnnnnnnnnnnnnnnnnnnnnnnnnnnnnnnnnnnnnnnnnnnnnnnnnnnnnnnnnnnnnnnnnnnnnnnnnnnnnnnnnnnnnnnnnnnnnnnnnnnnnnnnnnnnnnnnnnnnnnnnnnnnnnnnnnnnnnnnnnnnnnnnnnnnnnnnnnnnnnnnnnnnnnnnnnnnnnnnnnnnnnnnnnnnnnnnnnnnnnnnnnnnnnnnnnnnnnnnnnnnnnnnnnnnnnnnnnnnnnnnnnnnnnnnnnnnnngatcgaagcaaagccgaaatggatttgaaggagctgagcgagtcggtccagcaacagtccacccctgttcctctcatctctcccaagcgccagattcgtagcaggttccagctgaatcttgacaagaccatagagagttgcaaagcacaattaggnttaggcataaatgaaatctcggaagatgtttatacggccgtagagcacagcgattcggaggattctgagaagtcagatagtagcgatagtgagtatatcagtgatgatgagcagaagtccaagaacgagccagaagacacagaggacaaagagggttgtcggatggacaaagagccatctgctgttaaaaaaaagcccaagcctacaaacccagtggagattaaagaggagctgaaaagcacatcaccagccagcgagaagacagaccctggagcagtcaaggacaaggccagccctgagcctgagaaggacttttctgaaaaggcaaaaccttcacctcaccccacaaaggataaactgaagggaaaagatgagacggattccccaacagtccatttgggcctggactccgattcagagagtgaacttgtcatagatttaggagaagaccatttctgggcgggagggtcgaaaaataagaaaggaacccaaagaaccgtctcccaaacaggatgngttgtaggtaaagctccaccatccacgacggcgggcagccagtctcccccggaaacgccggtgctcacccgctcttccgcccaaactcccgcggctggcgccacagctaccaccagcacgtcctccacggtcaccgtcacggccccggcccccgccaccacaggaagcccggtgaaaaagcagaggccgcttttaccgaaggagactgccccggccgtgcagcgggtcgtgtggaactcatcaagtaagtttcaaacgtcctcccaaaagtggcacatgcagaagatnnnnnnnnnnnnnnnnnnnnnnnnnnnnnnnnnnnnnnnnnnnnnnnnnnnnnccaccagcacgtcctccacggtcaccgtcacggccccggcccccgccaccacaggaagcccggtgaaaaagcagaggccgcttttaccgaaggagactgcccccggccgtgcagcgggtcgtgtggaactcatcaagtaagtttcaaacgtcctcccaaaagtggcacatgcagaagatnnnnnnnnnnnnnnnnnnnnnnnnnnnnnnnnnnnnnnnnnnnnnnnnnnnnnnnnnnnnnnnnnnnnnnnnnnnnnnnnnnnnnnnnnnnnnnnnnnnnnnnnnnnnnnnnnnnnnnnnnnnnnnnnnnnnnnnnnnnnnnnnnnnnnnnnnnnnnnnnnnnnnnnnnnnnnnnnnnnnnnnnnnnnnnnnnnnnnnnnnnnnnnnnnnnnnnnnnnnnnnnnnnnnnnnnnnnnnnatgatggacgcaataaaaggaacaatgacagaaatatacaacgatctttctaaaaacactactggaagcacaatagctgagnnnnnnnnnnnnnnnnnnnnnnnnnnnnnnnnnnnnnnnnnnnnnnnnnnnnnnnnnnnnnnnnnnnnnnnnnnnnnagagctgaccatggcggagatgcggcagagcctggagcaggagcgggaccggctcatcgccgaggtgaagaagcagctggagctggagaagcagcaggcagtggatgagaccaagaagaagcagtggtgtgccaactgcaagaaggaggccatcttttactgctgttggaacaccagctactgtgactacccctgccagcaagcccactggcctgagcacatgaagtcctgcacccagtcagnnnnnnnnnnnnnnnnnnnnnnnnnnnnnnnnnnnnnnnnnnnnnnnnnnnnnnnnnnnnnnnnnnnnnnnnnnnnnnnnnnnnnnnnnnnnnnnnnnnnnnnnnnnnnngcctccaaagagaaggagacatccattgagaaaagcaaggacagtggctcgnngaccattcccggagtagtaaatccagttggagcagcagcgatgagaagaggggatcgacacgtgccgagcacaacagcagtaccagcacgaagagcctcctcccgaaagagtctcggctggacaccttctgggactagcagcgagtcgggacacaaaccacccaccccactggagaaaaacccagacgccaggaaaagaagaaacaacaaagggaggagaacagccactttcagacttgagaatgacaaaaccctcagttgagcctgagcccccggcgcaggggctgctacactacaggacacccggcatcggctttgactgcgaactgttcacccatacgagccctgtgctttaggtgtaaataatgtataatttgtggatgtcattgaaacctagaggaccttcccctttttatatttgtattaactttaacttat

SEQ ID NO: 20020 - DNA, 2282 bp, Macaca Mulatta
  misc_feature (1)...(2282): n = A,T,C or G
ggcaacaagagccgcctcacttttttccatgtcagtggccgtggagttccgcgactacctgggcgacttcatcgagcactacgcgcagctgggccccagccagccgccggacctggcccaggcacaggacgagccgcgccgggcgctcaagagcgagttcctggtgcgcgagaaccgcaagtactacatggatctcaaggagaaccagcgcggccgcttcctgcgcatccgccagacggtcaaccgggggcctggcctgggctccacgcagggccagaccattgcgctgcccgcgcaggggctcatcgagttccgtgacgctctggccaagctcatcgacgactacggagtggaggaggagccggccgagctgccccgggggcacctccttgacctgtggacaccaagcgcttactttttggatgtgggctccaacaaatacggggtggttttgggagtgagcgaggtgagccccacctaccgcaactcccatcaccgtgccctacaagggtgtgggccaagttcggacacaccttctgcaagtactcggaggagatgaagaagattcaagagaagcagagggagaagcgggctgcctgtgagcagctccaccagcagcaacagcagcagcaggaggagaccgccgctgccaccctgctactgcaagggtgaggaagaaggggaagaagattgatcaaactgaatgaaacccnnnnnnnnnnnnnnnnnnnnnnnnnnnnnnnnnnnnnnnnnnnnnnnnnnnnnnnnnnnnnnnnnnnnnnnnnnnnnnnnnnnnnnnnnnnnnnnnnnnnnnnnnnnncctgttaactccaagggagcaccacccacagaacctccaccaactgacagtttctcttcttgacttgccacccatcgctggatgttgtccactttatccaccatataaaacagtaagcagctgctnnnnnnnnnnnnnntacaaaaagtaataacattatatgaactgtgtttcctacttgattaaaaaatataaagaactgagtgtttatttccctaattaaccaagaacttttgtacacgtttaagctattattattaaaaagtgtttgcaaaatggtcaagattataatattgctgaattatataaaagtccttttcatgttgagctaacatttgactttagcacaaaaaagagatattttagaacacgtaaaataatatttttagtttttctcattttgttaccaaatttcaaaccttacatggaggttattatagtatatttgacacccatatatacctagtgattagaagatgtgtatatatatgagggctaggcatgctgnnnnnnnnnnnnnnnnnnnnnnnnnnnnnnnnnnnnnnnnnnnnnnnnnnnnnnnnnnnnnnnnnnnnnnnnnnnnnnnnnnnnnnnnnnnnnnnnnnnnnnnnnnnnnnnnnnnnnnnnnnnnnnnnnnnnnnnnnnnnnnnnnnnnnnnnnnnnnnnnnnnnnnnnnnnnnnnnnnnnnnnnnnnnnnnnnnnnnnnnnnnnnnnnnnnnnnnnnnnnnnnnnnnnnnnnnnnnnnnnnnnnnnnnnnnnnnnnnnnnnnnnnnnnnnnnnnnnnnnnnnnnnnnnnnnnnnnnnnnnnnnnnnnnnnnnnnnnnnnnnnnnnnnnnnnnnnnnnnnnnnnnnnnnnnnnnnnnnnnnnnnnnnnnnnnnnnnnnnnnnnnnnnnnnnnnnnnnnnnnnnnnnnnnnnnnnnnnnnnnnnnnnnnnnnnnnnnnnnnnnnnnnnnnnnnnnnnnnnnnnnnnnnnnnnnnnnnnnnnnnnnnnnnnnnnnnnnnnnnnnnnnnnnnnnnnnnnnnnnnnnnnnnnnnnnnnnnnnnnnnnnnnnnnnnnnnnnnnnnnnnnnnnnnnnnnnnnnnnnnnnnnnnnnnnnnnnnnnnnnttgttttaaaagtaaaagccaagttggtgtatgtaaaggattccatgtagctggggtgctagttattactggctacattatatgctaagtgtattgttgtcccccaagtgtacaagccttctatcaaaagtatgttctataactcatatattcaaggtgtagggtatgaaaatgcaaagtttaggagagcactttaccaagctggtgtcctccaaactgaaattgtttgtaacgatagtcttttacaggttttcatttaaagatgtttgtgtgcttttaattgacaactaacttcttgctgctgtatagtaaaatattaatatatttttatcattaaactgctgcatgactatca

SEQ ID NO: 20021 - DNA, 1855 bp, Macaca Mulatta
  misc_feature (1)...(1855): n = A,T,C or G
agttctacctgcgggaggaggacatcggtaaaaaccgggccgaggtatcacagccccgcctcgctgagctcaacagctatgtgcctgtcactgcctacactggacccctcgttgaggacttccttagtggtttccaggtnnnnnnnnnnnnnnnnnnnnnnnnnnnnnnnnnnnnnnnnnnnnnnnnnnnnnnnnnnnnnnnnnnnnnnnnnnnnnnnnnnnnnnnnnnnnnnnnnnnnnnnnnnnnnnnnnnnnnnnnnnnnnnnnnnnnnnnnnnnnnnnnnnnnnnnnnnnnnnnnnnnnnnnnnnnnnnnnnnnnnnnnnnnnnnnnnnnnnnnnnnnnnnnnnnnnnnnnnnnnnnnnnnnnnnnnnnnnnnnnnnnnnnnnnnnnnnnnnnnnnnnnnnnnnnnnnnnnnnnnnnnnnnnnnnnnnnnnnnnnnnnnnnnnnnnnnnnnnnnnnnnnnnnnnnnnnnnnnnnnnnnnnnnnnnnnnnnnnnnnnnnnnnnnnnnnnnnnnnnnnnnnnnnnnnnnnnnnnnnnnnnnnnnnnnnnnnnnnnnnnnnnnnnnnnnnnnnnnnnnnnnnnnnnnnnnnnnnnnnnnnnnnnnnnnnnnnnnnnnnnnnnnnnnnnnnnnnnnnnnnnnnnnnnnnnnnnnnnnnnnnnnnnnnnnnnnnnnnnnnnnnnnnnnnnnnnnnnnnnnnnnnnnnnnnnnnaggaggatgcaacagaactggtggccttagcacaggctgtgaatgctcgagccctgccagcagtgcagcaagagaacctggacgaggacctcatccggaagttggcatatgtggctgctggggatctggcacccataaacgccttcattgggggcctgactgcccaggaagtcatgaagnnnnnnnnnnnnnnnnnnnnnnnnnnnnnnnnnnnnnnnnnnnnnnnnnnnnnnnnnnnnnnnnnnnnnnnnnnnnnnnnnnnnnnnnnnnnnnnnnnnnnnnnnnnnnnnnnnnnnnnnnnnnnnnnnnnnnnnnnnnnnnnnnnnnnnnnnnnnnnnnnnnnnnnnnnnnnnnnnnnnnnnnnnnnnnnnnnnnnnnnnnnnnnnnnnnnnnnnnnnnnnnnnnnnnnnnnnnnnnnnnnnnnnnnnnnnnnnnnnnnnnnnnnnnnnnnnnnnnnnnnnnnnnnnnnnnnnnnnnnnnnnnnnnnnnnnnnnnnnnnnnnnnnnnnnnnnnnnnnnnnnnnnnnnnnnnnnnnnnnnnnnnnnnnnnnnnnnnnnnnnnnnnnnnnnnnnnnnnnnnnnnnnnnnnnnnnnnnnnnnnnnnnnnnnnnnnnnnnnnnnnnnnnnnnnnnnnnnnnnnnnnnnnnnnnnnnnnnnnnnnnnnnnnnnnnnnnnnnnnnnnnnnnnnnnnnnnnnnnnnnnnnnnnnnnnnnnnnnnnnnnnnnnnnnnnnnnnnnnnnnnnnnnnnnnnnnnnnnnnnnnnnnnnnnnnnnnnnnnnnnnnnnnnnnnnnnnnnnnnnnnnnnnnnnnnnnnnnnnnnnnnnnnnnnnnnnnnnnnnnnnnnnnnnnnnnnnnnnnnnnnnnnnnnnnnnnnnnnnnnnnnnnnnnnnnnnnnnnnnnnnnnnnnnnnnnnnnnnnnnnnnnnnnnnnnnnnnnnnnnnnnnnnnnnagaccccaagtttgtggagcgaacactacggttggcaggcacccagcccttggaggtgctggaggctgtgcagcgcagcctggtgctgcagcgaccacagacctgggctgactgtgtgacctgggcctgccaccactggcacacccagtactcaaacaacatccggcagctgctgcacaacttccctcctgacca

SEQ ID NO: 20022 - DNA, 856 bp, Macaca Mulatta
  misc_feature (1)...(856): n = A,T,C or G
ggcagctcacactccctccactgggaaggatggcttctgcctagtacctatccttgtgttactgatgcagtggtagcattggttcaagttctctcctgctgtggtcagagttgcttcgatgttggccaagtgcttttcttcttgggctcccttctgacctgcaggacagttttcctggagccatttggtatgaggtattaatttagcttaactaaattacaggggaatcagaggccgtgctcctgactgatcgagacactattattgnnnnnnnnnnnnnnnnnnnnnnnnnatggtgtgcatgtgcaggagatgacaaatttgtatgtcagattatacaaggatgtattcttaaactgcatgactattcagatggctactgagttatcagtggccatttatcatcatcatatttatttgtattttctcaatagttttggccagacctcaacagatgttaaggtacaactatgtttttctcgattatctaataaccgtagtacttaaattgaacagttgcaaagatgtcttaattgtgtaaagacttggtgtagtcatgactttagctgatacttttatgtacgagatctgtctctgctgtttaacttcattggattaatcagctggtttcaactctactgcggaaacaaaaatagctccttaaaagtactgttctccttcagtggcatgtagttatctaatcaagacacctcattcaaacaaaacctgccttaggaaaatttaannnnnnnnnnnnnnnnnnnnnnnnnnnntacaaccatcttattctttagctttccttaatcgggtgctttatgggaggcccagtggtaacatttacatgaactttgtttga

SEQ ID NO: 20023 - DNA, 936 bp, Macaca Mulatta
ctcaccattggtcatgaatgaatgaacaaaacattttcagccagcaactcgatattgggctcatttttatcgaaaagcaagtactataatttagttaagagtttttaaaacttccccattaaagtttctcaaatttcttccagccttaatgaaaagttatttcctcttttaatctttatgtgttgctctcaggactcacatttgtatatatcaagtagtgtatattctgtcagacctgttgtctgtatgattagacttccaaaggacacagtgaacttaactgactgcctgaatgtttatatggaaacaaagtgtagtgtactctggtcacgttgctgctggtcacactgctatatcgaaaacaaattagtaaggctaaatagggaatgagtttaggtcaaaacatattataacagagaggggaagtctagagggataaactttcgttttaagataaaagcaacagtcggtggatctgatatatttagaggagcatttctccatttttccccttataccacacctgtggagtttagccataattgaatttcaatgtggagtcttttggaaaactaataaaaatttcagaatgaaatttgtcataactctgtgccaatagggagaaacaaataagatttataatggtaggtaatataaataattatccctgattaaataaaccagaaatgcacattcctgatagagggccaggattgatactcgcaatatttgtgtggtttgctaccacctgagacatagtatcttggccttctttacaaacagaatggcttttttttcagggcttgtcttataagtcggtgtgggtaaagacattaaacttcaaaggttaatttatagcaatttcttcattttattttcttctaggtacagtaacttgtgtgtgaaataacttatccactcaatgtcagtttttaa

SEQ ID NO: 20024 - DNA, 916 bp, Macaca Mulatta
ggggggcgttttgttcttgcctgttttgttcttccgtggtgttgatctgtgagttgtgttaggactgctaataggaagatgtcttcaggaaatgctaaaattgggcaccctgcccccaacttcaaagccacagccgttatgccagatggtcagtttaaagatatcagcctgtctgactacaaaggaaaatatgttgtgttcttcttttatcctcttgacttcacctttgtgtgccctacggagatcattgctttcagtgatagggcagaagaatttaagaaactcaactgccaagtgattggtgcttctgtggattctcacttctgtcatctagcatggatcaacacacctaagaaacaaggaggactgggacccatgaacattcctttggtatcagacccgtaagcgcaccattgctccagattatggggtcttaaaggctgatgaatgcatttcattcaggggcctcctttatcattgatgataaggggtatttcttcggcaagatcacttgtaaatgaacctcccctgtttggccgccttctgtgggatgaagacttttttaaacctagtttcaagggcctttccagtttcccttgaacaaacattggggggaaattgttgtcccatgcctggcttggaaaccctggtgcagtggataaccatttcaagtccctggattgttcctaaaagaagcgaaagaaatttttttccttcccaaccacaaaatgtgaaagcgcctggggccttgttttttatattgccccaggcctcgtctatgtggggcacatccctttgagaaaacaaataaacctcctcttccggaggaaattttcttttgtttttttctcccgcggaagagtattaaaaacccgaagtatcttttgccgtaatttatcgccgctatatattgttg

SEQ ID NO: 20025 - DNA, 772 bp, Macaca Mulatta
  misc_feature (1)...(772): n = A,T,C or G
gggataagaattataaggccaccattggagtggacttcgagatggaacgatttgaggtgctgggtatccccttcagtttgcagctttgggataccgctggacaggagaggttcaaatgcattgcgtcaacctactatcgaggagctcaagccatcatcgttgtcttcaacctgaatgatgtggcatctctggaacataccaagcagtggctggctgatgccctgaaggagaatgacccttccagtgtgctgcttttcctcgtaggttccaagaaggatctgagtacccctgctcagtatgcgctgatggagaaagacgccctccaggtggcccaggagatgaaggctgagtactgggcagtctcatctctcactggtgagaatgtccgagaattcttcttccgcgtggcagcactgacttttgaggccaatgtgctggctgagctggagaaatcgggggcccgacgcattggggatgttgtccgcatcaacagtgatgacagcaacctctacctaactgccagcaagaagaagcccacatgttgcccatgaggggtgaggagactgttcanggactgccagccctggggcactgtgccaccctcattcctccagagcttgacccctgaacatttgcactgactgtatccagaccaaagagctgcctcttggtggcagtattcccacagagggggtagctggggaccattgctagtcactttcctgctcccaggcactgtggcaaaagactgggatgccccccttactctttc

SEQ ID NO: 20026 - DNA, 546 bp, Macaca Mulatta
tgaatatgtggaacaaagcatcaccaacatttatttttttcaggatgaggtgatggacaaaaccatcatagagaaattgaggcaaatagtacatataaaacaatactttgggtgagtccacccatcccaaaggtatatcaaagaagtgactgcagattggagcccaaagtctttggttcctcagtttccaaatggattctcactaggtgggatcatgagtttgctttggacaccccaaattctagctatttattttgtttctcacatcctttccttctttcccagccccttcccctcatgttacacctcttgctagtttgagctgtcagtcaccactgagaaagaattaaaccagtattttgagctggcaaaattcttagcctagtacaattccttcaattaaactgtagctcaacaatagtgttctctaaaaatacgatttaattttctatctagcaactcagaatattttccataactcctccagggcagagtggattatgttggcatgttaggagggagagaaggaagaaaatgaattgagat

SEQ ID NO: 20027 - DNA, 1214 bp, Macaca Mulatta
  misc_feature (1)...(1214): n = A,T,C or G
tgctggctttctgcttgctcctttggagatgcagcgtctgttgactccagtgaagcacattctgcaannnnnnnnnnnnnnnnnnnnnnnnnnnnnnnnnnnnnnnnnnnnnnnnnnnnnnnnnnnnnnnnnnnnnnnnnnnnnnnnnnnnnnnnnnnnnnnnnnnnnnnnnnnnnnnnnnnnnnnnnnnnnnnnnnnnnnnnnnnnnnnnnnnnnnnnnnnnnnnnnnnnnnnnnnnnnnnnnnnnnnnnnnnnnnnnnnnnnnnnnnnnnnnnnnnnnnnnnnnnnnnnnnnnnnnnnnnnnnnnnnnnnnnnnnnnnnnnnnnnnnnnnnnnnnnnnnnnnnnnnnnnnnnnnnnnnnnnnnnnnnnnnnnnnnnnnnnnnnnnnnnnnnnnnnnnnnnnnnnnnnnnnnnnnnnnnnnnnnnnnnnnnnnnnnnnnnnnnnnnnnnnnnnnnnnnnnnnnnnnnnnnnnnnnnnnnnnnnnnnnnnnnnnnnnnnnnnnnnnnnnnnnnnnnnnnnnnnnnnnnnnnnnnnnnnnnnnnnnnnnnnnnnnnnnnnnnnnnnnnnnnnnnnnnnnnnnnnnnnnnnnnnnnnnnnnnnnnnnnnnnnnnnnnnnnnnnnnnnnnnnnnnnnnnnnnnnnnnnnnnnnnnnnnnnnnnnnnnnnnnnnnnnnnnnnnnnnnnnnnnnnnnnnnnnnnnnnnnnnnnnnnnnnntgaggggaacccatatggagaatgtgtatgacttctacaaacaaatttggcctcggagtacccagtggtggatggggagctttccatccagtgctacttgcnggnccttggatcgatgttacacctcataccgtaaaagatccagaatcagtggaagcaagnagctggcagtgatcgacccttcacccttgacgatttacagtacatgatctttcacacacccttttgcaagatggtccagaagtctctggctcgcctgatgttcaatgacttcctgtcagccagcagtgacacacaaaccagcttatacaaggggctggaggctttngggggctaaagctggaagacacctacaccaacaaggacctggataaagcacttctaaaggcctctcaggacatattcgacaagaaaaccaaggcctccctttacctctccacgcacaatgggaacatgtacacctcatccctgtacgggtgcctggcctcacttctgtccc

SEQ ID NO: 20028 - DNA, 300 bp, Macaca Mulatta
  misc_feature (1)...(300): n = A,T,C or G
gggaggatacccttgacaaatactgtgaccgggagtatgccgtgaagacccaccaccactcatgttgccgccaccctcccagccctattcgggatgagtgctttgcccgtcgggctccgtaccccaactatgaccgggacatcttggccatcgacatcagccgagtcacccccaacctcatgggccacctctgtggaaaccaaagagttctcaccaagcantaaacatattcctgggctgattcacaacatgaccgcccgctgctgtgacctgccatttccagaacaggcctgctgtgca

SEQ ID NO: 20029 - DNA, 985 bp, Macaca Mulatta
  misc_feature (1)...(985): n = A,T,C or G
gggttgcccctgaagagcatcccaccctgctcacggaggcgccactgaaccccaaggccaatcgggaaaaaatgacccagattatgtttgagactttcaatgtcccagccatgtattgtgaagcagctccagctatgtgctgtccctctacgcctctggacgcacaactggcatcgtgctggactctggagatggtgtcacccacaatgtccccatctacgaaggttatgccttgccccatgccatcatgcgtctggatctggctggccgagatctcnnnnnnnnnnnnnnnnnnnnnnngactgagcgtggctattccttcgttactaccgctgagcgtgagattgtccgggacatcaaggagaaactgtgttatgtagctctggactttgaaaatgagatggccactgccgcatcctcctcctcccttgagaagagttacgagctgcctgatgggcaagtgatcaccatcggaaatgaacgcttccgctgcccagagaccctgttccagccatccttcatcgggatggagtctgcaggcatccatgaaaccacctacaacagcatcatgaagtgtgatattgacatcaggaaggacctctacgctaacaatgtcctatcaggaggcaccactatgtaccctggcattgccgaccgaatgcagaaggagatcacggccctagcgcccagcaccatgaagatcaagatcattgcccctccggagcgcaaatactctgtctggatcggtggctccatcctggcctctctgtccacctttccagcagatgtggatcagcaaacaggaatacgatgaagcccgggccttcccatttgtcccaccgcaaatgctttctaaaacacctttcccgcctctttctctgttcttctagccacaacaactggtggaatgtttcctgtgggaaatttggtgcccttcgagtttctttttaccaagttccatttccctaacccccaaaaggtttct

SEQ ID NO: 20030 - DNA, 797 bp, Macaca Mulatta
  misc_feature (1)...(797): n = A,T,C or G
cagggactttaactgcacttcggatgtgttaccaaggttatggttaccctttgatgctgtttctggaagaaggaggagtggtaacagtctgcaaaatcaatacgcaggaacctgaggagaccttggattttgatttctgcagcaccaatgttattaataaaattattctgcagtcagaggggctccgtgaagcattttctgaattggatatgacnnnnnnnnnnnnnnnnnnnnnnnnnnnnnnnnnnnnnnnnnnnnnnnnnnnnnnnnnnnnnnnnnnnnnnnnnnnnnnnnnnnnnnnnnnnnnnnnnnnnnnnnnnnnnnnnnnnnnnnnnnnnnnnnnnnnnnnnnnnnnnnacagatacaagatttctttactgaaaccctctacaaaggcattagtcctatcttgtaaggtatcaattcggacagataacagaggcttcctttcattacagtatatgattagaaatgaagatggacaaatatgttttgtggaatattactgctgccctgatgaagaagttcctgaatcttgagtcttgagtatgacaattcactgatatttatgtgtacatttatgacagatgaagttcttattctgagtacagtactctttataatttcatattggattttctatagagaagaagcactatggggaagataggagcaaggtcgtgtacctaatagttactgtgttttctaaatacattttgtagagggcatgtaaataaatgttttcatgtagtcatagattattaagggctgttctttagttctgtcttttgaactca

SEQ ID NO: 20031 - DNA, 193 bp, Macaca Mulatta
ccagctgaggtgggtgtcctggttggcaaagaccggtcaagtttttacgtcaatgggctgacacttgggggccagaaatgttcggtgatccgggactcactgctgcaggatggggagtttagcatggatcttcgtaccaagagcaccggtggggcccccaccttcaatgtcactgtcaccaagactgacaaga

SEQ ID NO: 20032 - DNA, 959 bp, Macaca Mulatta
ttaactcctggtctgcgtggaggccgacgactccgtggcagactacggacctgtctgggtctcagccgctaaagaccccgtccggtaggaagtactagccggacatcatgagtggctgtcgagtattcatcgggagactaaatccagcggccagggagaaggacgtggaaagattcttcaagggatatggacggataagagatattgatctgaaaagaggctttggttttgtggaatttgaggatccgagggatgcagatgatgctgtgtatgagcttgatggaaaagaactctgtagtgaaagggttactattgaacatgctagggctcggtcacgaggtggaagaggtagaggacgatactctgaccgttttagtagtcgcagacctcgaaatgatagacgaaatgctccacctgtaagaacagaaaatcggcttatagttgagaatttatcctcaagagtcagctggcaggatctcaaagatttcatgagacaagctggggaagtaacgtttgcggatgcacaccgacctaaattaaatgaaggggtggttgagtttgcctcttatggtgacttaaagaatgctattgaaaaactttctggaaaggaaataaatgggagaaaaatcaaattaattgaaggccgcaaaaggcacagtaggtcaagaagtacgtctccgatccggacccgaagttgctctagggctcgcaggcgatcccgctcccgaatcgcgaaatcccaacgccgggccaagaatcaggaacccgaacccgaatactgccgccagtctcaggtcctgtcccatatggcccctccctgccctgcatacaccccccatagaacgcgccgcccctctaggtgccaccttatggtcctgcccccccccttgcggcggtcccctgtttcccccccccctaggtgtcctgcctctccatggcgccctcgtacgtttccttcc

SEQ ID NO: 20033 - DNA, 301 bp, Macaca Mulatta
cctcagattccacctagagctagatgtgtcttaccaggtctaatattgactgcctctgcctgtcgcatgagaacattaacaaaagcaattgtattacttcctctgttcgtgactagttggctctgagatactaataggtgtgtgaggctccggatgtttctggaattgatattgaatgatgtgatacaaattgatagtcaatatcaagcagtgaaatgataataaaggcatttcaaagtctcacttttattgataaaataaaaatcattctactgaacagtcccatcttctttatacaatg

SEQ ID NO: 20034 - DNA, 405 bp, Macaca Mulatta
  misc_feature (1)...(405): n = A,T,C or G
ccggcggggcccggcaggcgccgaggaggaagagcccggacggcgcctctcgtacgagtgtgggcgcgaggcannnnnnnnnnnnnnnnnnnnnnnnnnnnnnnnnnnnnnnnnnnnnnnnnnnnnnnnnnnnnnnnnnnnnnnnnnnnnnnnnnnnnnnnnnnnnnnnnnnnnnnnnnnnnnnnnnnnnnnnnnnnnnnnnnnnnnnnnnnnnnnnnnnnnnnnnnnnnnnnnnnnnnnnnnnnnnnnnnnnnnnnnnnnnnnnnnnnnnnnnnnnnnnnnnnnnnngacttgatcatcttccctgacgactgtgagttcaagcgggtgccgcagtgccccagcgggagggtctacgtgctgaagttcaaggcagggtccaagcggcttttcttctggatgcag

SEQ ID NO: 20035 - DNA, 847 bp, Macaca Mulatta
  misc_feature (1)...(847): n = A,T,C or G
gttttggctcatgcctatgcccctgggccagggattaatggagatgctcactttgatgatgatgaacaatggacaaaagatacaacaggnnnncaatttattcctcgttgctgctcatgaacttggccattccctgggtctctttcactcagccaacactgaagctttgatgtacccactctaccactcactcacagacctgactcggttccgcctgtctcaagatgatataaatggcattcagtccctctatgnnnnnnnnnnnnnnnnnnnnnnnnnnnnnnnnnnnnnnnnnnnnnnnnnnnnnnnnnnnnnnnnnnnnnnnnnnnnnnnnnnnnnnnnnnnnnnnnnnnnnnnnnnnnnnnnnnnnnnnnnnnnnnnnnnnnnnnnnnnnnnaggcacttttggcgcaaatctctcaggaagcttgagcctgacttgtatttgatctcttcattttggccgtctcttccttcaggcgtggatgccacatatgaagttactagcaaggatcttgttttcatttttaaagnnnnnnnnnnnnnnnnnnnnnnnnnnnnnnnnnnnnnnnnnnnnnnnnnnnnnnnnnnnnnnnnnnnnnnnnnnnnnnnnnnnnnnnnnnnnnnnnnnnnnnnnnnnnnnnnnnnnnnnnnnnnnnnnnnnnnnnnnnnnnnnnnnnnnnnnnnnnnagatntgatgagaagagaaattccatggagccaggctntcccaagcaaatagctgaagactttccaggaattgactcaaagattgatgctgtttntgaagaatttgnnnnnnnntttcttcactggatcttcacaattggagtttgacccaaatgcaa

SEQ ID NO: 20036 - DNA, 638 bp, Macaca Mulatta
  misc_feature (1)...(638): n = A,T,C or G
ttaacaacgctgtgttctgcgcccatcacctgcacaagctagcatctgacacgtaccagaagtttgaagaagcctatatcccaaaggaacagaagtattcattcctgcgcaaccccgagacctccacatctccctgctgctcatccagtcgtggctggagcccgtgcagttactcaggagtgtgtttaccaacaacctggtgtatggcacctcgaacttcaacgtctatctctacctaaagaacctagaggaaggcatccaaacgctgatgtggaggctggaagacggcagcccccggactgggcagatcttcaagcagacctacagcaagtttgacacaaactcgcacaacgatgacacactgctcaagaactacaggctgctctactgcttcaggaaggacatgaacaaggtcgagacattcctgcgcaccgtgcggtgccgcgctgtggagggcagctgtggcttctagatgcctgggtggcatcccttgtgacccctcccaattgccactcctggccatggaaggtgccactccagtgtccaacagccttgtcctaataaaattaagttgcatcannnnnnnnnnnnnnnnnnnnnnnnnnnnnnnnnnnnnnnnnnnnnnnngcctatagtga

SEQ ID NO: 20037 - DNA, 814 bp, Macaca Mulatta
gaggtgttggctcaccacagacttattctttaatggaattttggaaaggcctcactccagtgactccttggatctttcttctctaagtagatgggaagcctgtaagaagagacttggaggcaaagcaaagggaatcagcacttaaccttcacccaaagggcccaagagaatctttattaactggaggtagagcagactggagcctttacggggcatctccccatattggataattcagtttttgttttggaaatcttataatgtctttggagaggctttaaataattttgtttttcttagcaatgttatgctctattttgagacatggattttttttttcttctagtgtttctctcctgaggcaaagcccaacacacctgtcttttgtccacttctccagcaaattagatttgtctctgggaatgtgtttgtaacataccaacctactgcagaccagcagagggagctcccatgttgaatttgttagctatctttccccgctttcgcaaaaactatttcttgacgacctttgagagatttcaataaaaattttaatcagagcaaaaatgatctcaagtagactgcagcgttttgttttcatggtgatgcaatgttggagcaaaggtgttactctctgactgaggttttgggagaattgggcctgtgacaccaagtctattttacatagaacgactcagaacgagcttgctggagaggccaggtcctggagccgaggtcacaccactgctgcttctctctgcctgggctcccggaagagccaccaagagctgcatgttggaagcatctcatccac

SEQ ID NO: 20038 - DNA, 205 bp, Macaca Mulatta
agcgcgcacggtgttgcatgttgcgcagtactagcagcatgggtcgcggcagcgccctgagcaccgccatgatggcctcgaagtgctcgcgagccatgtccaccatgtaggctgcctcctcgcggctcagtaggtgtgagccccacagctgccccaggcgcacggggcgctgcatgagcatctcggagaacaggaggtagtctga

SEQ ID NO: 20039 - DNA, 790 bp, Macaca Mulatta
  misc_feature (1)...(790): n = A,T,C or G
aggtcattaaggagtccaagcaggagcacaaggatgtgatgtgaggcaggacccacctggtggcctctgccccatctcatgaggagcccgagcagaagcaggatagttgctccgcctctgctggtgcatttccccacacctgagctccccgccaccccagctgctcccctccctcctctatccctaggccagcttgctgccctaggctccgtcagtattaggcctgccagacggcacccacccagcacccagaaactccaactaacaagaaactcacccccaaggggcagtctggaggggcatagccagcagcttgggttagaatgaggaggaaggagagaaggggaggagggtggggggggacctactacatcgccctccacatccctgatacctgttgttatggaaactgttgccagagctggaggttctctcagggtatctgggaactgtgcctttgagtttcctcaggctgctggaggaaaactgagactcagacaggaaagggaaggccccacagacaaggtatctttggccagaggcttnnnnnnnnnnnnnnnnnnnnnnnnnnnnnnnnncctatgctgcccaggctgaccttgaactcctgggctcaagcagtcttcccacctcagcctcctgtgtagctgggattacaggctcgagccaccatgcccagctcagagggttgctcttctagactgaccctgatcagtctaagatgggtggggatgtcctgccacatggggcagtcacctgcccagatcccagagggacctcctgagtgatg

SEQ ID NO: 20040 - DNA, 853 bp, Macaca Mulatta
  misc_feature (1)...(853): n = A,T,C or G
ggtgtttaatttgagatttttacatatagagttgttcataggtgtattttaaagctattttaaaacattgtttttattcattattgagtagttacttaggtgcatttttaacacattaaattaacttattgtatgcaatgtgtatctaatgccgattactgttgtcatcacagattctgctgtctacatcaatacacctgaatagttggacagaaaattgaaatcttttaactaattctgactatgaagcacagtgaaatagaaagttaggctgtaagaagtaaggctcttctgtgtgtgtcatcagcttggttccatttgcccaactgatacatttatgtggacaatctcatatgtgtcttctgtcatcacaggtgcagagtccagtggtgacatggatgttctcctgacccatcccagcttcacttcggaatcaaccaaacagccaaaactgttacatcaggttgtggagcagttacagaaggttcgttttatcacagataccctgtcgaagggtgagacaaagttcatgggtgtttgccagcttcccagtaaaaatgatgaaaaaagaatatcccacacagaaagaattgatatcagggttgataccccaaagatcaagttattactggtgggtggttctctaatttttcactggggaagtgaatattttttcaattaaggaaataatgagggggcttcaatggcccctagaaaaaaaggngtttttcaccaattcaaaatgaaggtaacaccaattcccggtcccccttgggggaaggtcaccttggagaagatttggccttgggaaaaaaacccttccctggcccaaagttgggatataaggatgaac

SEQ ID NO: 20041 - DNA, 758 bp, Macaca Mulatta
  misc_feature (1)...(758): n = A,T,C or G
gggaaaagggcagattgttcctggctctgtcacagttggccaactgagacataaacaggcagcatcttaaacgcacagtgtcccactgtcggaacaaagttaaaccctcagcacttgcccacttaccctatgacgtttccaacagattttgccctatctcacttgtttctctaatccacagacatcatttggtgtgagggatgtgctttctgaaaatcaatgcacatttatcaagaaaaacaaactccaatttcgttcttgtcctgtacacctgcattgccctgtcttcttgtacagtgagagactgttcagctcctgatgtgactctgttttccccacagcctcctccacgttctcctggggcattgtgctggccccacttgcactggccttcttggttttggggggaatatggatgcacatacggtgcaaacacagaactggaaaagccgatggtctgactgtgctacggccccgtcatcaagattttcaatccttatcccaagtaaaataaaacagaatggaaataattccaaaaatctaattatcatatattatgtaaaaattatattagaagtataggcatatagcgccgctaccttcaaaattaacagtataactaaaaagaatatatttttgttaaggtcccgccttcatcccctattggaaaaacattttgttataagaaacatctccctatttttgaagagcacctgatgcctccataaatagagagagagactactgaantatatcct

SEQ ID NO: 20042 - DNA, 301 bp, Macaca Mulatta
aatggcaattctttgacctcaatctgtgatgaggggaggaaactcacctgctggcccctcacctgggcacctggggagtgggacagagtctgagtgtatttattttcctccccagcacgtggggaggggctttgggggctggcaagtatgttttagcatgtgtttggttctggggccccttttttctccccttgtgctgagatggaacccttttggccccccaactgggggccacgagctccagacccccagcatccctcctgtcatctcccctccttgcctcctgtgtaatcatttcttg

SEQ ID NO: 20043 - DNA, 2835 bp, Macaca Mulatta
  misc_feature (1)...(2835): n = A,T,C or G
nggtatcactcctccttgtttcaatctcttcgccctcttcgatgctcaggcccaagtctggttgcccccaaaccacatcctagagatccccagagatgcaagcctgatgctgtatttccgcatgaggnnnnnnnnnnnnnnnnnnnnnnnnnnnnnnnnnnnnnnnnnnnnnnnnnnnnnnnnnnnnnnnnnnnnnnnnnnnnnnnnnnnnnnnnnnnnnnnnnnnnnnnnnnnnnnnnnnnnnnnnnnnnnnnnnnnnnnnnnnnnnnnnnnnnnnnnnnnnnnnnnnnnnnnnnnnnnnnnnnnnnnnnnnnnnnnnnnnnnnnnnnnnnnnnnnnnnnnnnnnnnnnnnnnnnnnnnnnnnnnnnnnnnnnnnnnnnnnnnnnnnnnnnnnnnnnnnnnnnnnnnnnnnnnnnnnnnnnnnnnnnnnnnnccagcttcaaggactgtatcccgctctccttccgtcggcagatccggcagcacagcgccctgacccggctgcgccttcggaacgtcttccgcaggttcctgcaggacttccagccggacagactctcccagcagatggtcatggtcaaatacctggccacactcgaacggctggcaccccgctttggcacagagcgtgtgcccgtgtgccacctgaggctgctggcccaggcagagggagagccctgctacatccgggacagtggggaggcccctacagaccctggccctgagtctgctgctagacccccaacccatgaggtgctggtgacaggcactggtggcatccagtggtggccagtacaggaggaggtgaacaaggaggagnnnnnnnnnnnnnnnnnnnnnnnnnnnnnnnnnnnnnnnnnnnnnnnnnnnnnnnnnnnnnnnnnnnnnnnnnnnnnnnnnnnnnnnnnnnnnnnnnnnnnnnnnnnnnnnnnnnnnnnnnnnnnnnnnnnnnnnnnnnnnnnnnnnnnnnnnnnnnnnnnnnnnnnnnnnnnnnnnnnnnnnnnnnnnnnnnnnnnnnnnnnnnnnnnnnnnnnnnnnnnnnnnnnnnnnnnnnnnnnnnnnnnnnnnnnnnnnnnnnnnnnnnnnnnnnnnnnnnnnnnnnnnnnnnnnnnnnnnnnnnnnnnnnnnnnnnnnnnnnnnnnnnnnnnnnnnnnnnnnnnnnnnnnnnnnnnnnnnnnnnnnnnnnnnnnnnnnnnnnnnnnnnnnnnnnnnnnnnnnnnnnnnnnnnnnnnnnnnnnnnnnnnnnnnnnnnnnnnnnnnnnnnnnnnnnnnnnnnnnnnnnnnnnnnnnnnnnnnnnnnnnnnnnnnnnnnnnnnnnnnnnnnnnnnnnnnnnnnnnnnnnnnnnnnnnnnnnnnnnnnnnnnnnnnnnnnnnnnnnnnnnnnnnnnnnnnnnnnnnnnnnnnnnnnnnnnnnnnnnnnnnnnnnnnnnnnnnnnnnnnnnnnnnnnnnnnnnnnnnnnnnnnnnnnnnnnnnnnnnnnnnnnnnnnnnnnnnnnnnnnnnnnnnnnnnnnnnnnnnnnnnnnnnnnnnnnnnnnnnnnnnnnnnnnnnnnnnnnnnnnnnnnnnnnnnnnnnnnnnnnnnnnnnnnnnnnnnnnnnnnnnnnnnnnnnnnnnnnnnnnnnnnnnnnnnnnnnnnnnnnnnnnnnnnnnnnnnnnnnnnnnnnnnnnnnnnnnnnnnnnnnnnnnnnnnnnnnnnnnnnnnnnnnnnnnnnnnnnnnnnnnnnnnnnnnnnnnnnnnnnnnnnnnnnnnnnnnnnnnnnnnnnnnnnnnnnnnnnnnnnnnnnnnnnnnnnnnnnnnnnnnnnnnnnnnnnnnnnnnnnnnnnnnnnnnnnnnnnnnnnnnnnnnnnnnnnnnnnnnnnnnnnnnnnnnnnnnnnnnnnnnnnnnnnnnnnnnnnnnnnnnnnnnnnnnnnnnnnnnnnnnnnnnnnnnnnnnnnnnnnnnnnnnnnnnnnnnnnnnnnnnnnnnnnnnnnnnnnnnnnngagaactagaacctggtacatggtaatgtgtgtggccggaacatcctgctggctcggctggggctggcagagggcacgagccccttcatcaagctgagtgatcccggcgtgggcctcggcgccctctccagggaggngagcgggtggagcggatcccctggatggcccccgaatgcctcccaggtgggcccaacagcctaagcattgccatggacaagtgggggtttggtgccaccctcctggagatctgctttgatggagaggccccgctgcagagccgcagctcctccgagnnnnnnnnnnnnnnnnnnnnnnnnnnnnnnnnnnnnnnnnnnnnnnnnnnnnnnnnnnnnnnnnnnnnnnnnnnnnnnnnnnnnnnnnnnnnnnnnnnnnnnnnnnnnnnnnnnnnnnnnnnnnnnnnnnnnnnnnnnnnnnnnnnnnnnnnnnnnnnnnnnnnnnnnnnnnnnnnnnnnnnnnnnnnnnnnnnnnnnnnnnnnnnnnnnnnnnnnnnnnnnnnnnnnnnnnnnnnnnnnnnnnnnnnnnnnnnnnnnnnnnnnnnnnnnnnnnnnnnnnnnnnnnnnnnnnnnnnnnnnnnnnnnnnnnnnnnnnnnnnnnnnnnnnnnnnnnnnnnnnnnnnnnnnnnnnnnnnnnnnnnnnnnnnnnnnnnnnnnnnnnnnnnnnnnnnnnnnnnnnnnnnnnnnnnnnnnnnnnnnnnnnnnnnnnnnnnnnnnnnggcgagaagtcgctgcagctggtcatggagtacgtgcccctgggcagcctccgagactacctgccccggcacagcgtcgggctggcccagctgctgctcttcgcccagcagatctgcgagg

SEQ ID NO: 20044 - DNA, 805 bp, Macaca Mulatta
gggtattaaattcaattaatgctgaatatgaagagtaaagtatttatctgaaagaagttactgggttaggagaagtaatgaatgtatccatttgtacatggtttacatgttgtggatgctttgtaaacattttcctatatgtttaaattgtgtttcagcaggatgtaattgcccttgtgtatagttaaaatgagtcatcatctggtcctgtgtgaaatggaattcatggtattttctgtaacattttcctgaagctgtttctggagagccacacgtttaaatacagacagctttcctgatcatttgatttattgtgcacctgatttttggtttaaaaggaattattgccacaatatattttatttattctttagattttagccttgtaagttaaagtgctttacatgatgatgtgaaaagctgtttgtccctttactgggtttggggggctcgccccaagatacggaatgccgaatgcccaccgggttaccggccaaactggtccacccccgatgcacccgggcaccgacagccctgctgcgggtggatgacgggctggatccggccgcggaagcggacatgaagcgcagtggagtgccccatcccccaattgccccccgtgtgtgcccaagccctcccccgcctctcctgttccgcccgccgcgggcgcttgcaggaatggttctagcgcacccaccctttttgggccgccccgtgtcccccgaacgccggccgtgcaactgcgtatgttttcgcccgggtatcgcctacgccgggcagaccgcggcccgccccattagtgcgt

SEQ ID NO: 20045 - DNA, 615 bp, Macaca Mulatta
ggcccgcgctacacgcagctgcagtacatcggcgagggcgcgtacggcatggtcagctcggcctatgaccacgtgcgcaagactcgcgtggccatcaagaagatcagccccttcgagcatcagacctactgccagcgcacgctccgggagatccagatcctgctgcgcttccgccatgagaatgtcatcggcatccgagacattctgcgtgcgtccaccctggaagccatgagggatgtctacattgtgcaggacctgatggagactgacctgtacaagttgctgaaaagccagcaactgagcaatgaccacatctgctacttcctctaccagatcctgcggggcctcaagtacatccactccgctaatgtgctccaccgggatctaaagccctccaacctgctcatcaacaccacctgcgaccttaagatttgcgatttcggcctggcccggattgctgatcctgagcatgaccacaccggcttcctgacggagtatgtggctacacgctggtaccgggccccagagatcatgctgaactccaagggctataccaagtccatcgacatctggtctgtgggctgcattctggctgagatgctctctaaccggccc

SEQ ID NO: 20046 - DNA, 665 bp, Macaca Mulatta
atcggcacgaggctgcagcgaatattcccgatccagatgacaatggccccgatgggatggagcccgaaggcgtcatcgagagtaactggaatgagattgttgacagctttgatgacatgaacctttcagagtctcttctccgtggcatctacgcctatggttttgagaagccgtctgccatccagcagcgagccattctaccttgtatcaagggttacgatgtgatcgctcaagcccaatctgggactgggaaaacggccacatttgccatatcaattctgcagcagatcgaattagatctaaaagccacccaggccttggtcctggcacccactcgagaattggctcagcagatacagaaggtggtcatggcactaggagactacatgggtgcctcctgtcatgcctgtattgggggcaccaacgtgcgtgctgaggtgcagaaactgcagatggaagccccccacataatcgtggggacccctggccgagtgtttgatatgcttaaccggagatacctgtctcccaaatacatcaagatgtttgtactggacgaagctgacgaaatgttaagccgtggattcaaggaccagatctatgacatattccaaaagctcaacagcaacacccaggtagttttgctgtcagctacaatggcttctgat

SEQ ID NO: 20047 - DNA, 652 bp, Macaca Mulatta
  misc_feature (1)...(652): n = A,T,C or G
gtgttagcntgatgcaggcaaatggggctggggagccacaattcttcaattaaatgtgggagggctccnnccacgttgcctctactttatcaattaactgggtagctctcctgactnttaattaagtcattgttaaaatacagttctgtcatattttaagcagctaaattttctgaaacagcataagtgaaaatcttataacaggtttatgaatatatttaagcaacatttttttcacctgcaaaatctgttctaacatgtaattgcaaatagctttgactttcttctgaatattttatctttacttggcttttcccttgcttccccttttaccaatttcaacatccaacttgaagactttgtttttaaaatggtttgtcctgatgcttcttttgcctaattaaaacactttcaaaacaggacaacatttttctgtgattttcctacctctagaacccgtacacaacttgtcacttgttaaggagaactgtactaaaagttattgatgtcttaagtctttacactagaaaaggcagaccaactggaaaactagacacactctcttgatgattcagttattgttttcatcctttacccatgtccattccaccttggtgcctagtatttctgctttaaaacaaaacaaggacaa

SEQ ID NO: 20048 - DNA, 650 bp, Macaca Mulatta
  misc_feature (1)...(650): n = A,T,C or G
gtctagagagcctggtgctgacctatgtcaatgccatcagcagtggcgatctgccctgcatggagaacgcagtcctggccttggcccagatagagaactcagctgcagtgcaaaaggctgttgcccactacgaacagcagatgggccagaaggtgcagctgcccacggaaaccctccaggagctgctggacctgcacagggacagtgagagagaggccattgaagtcttcatcaggagttccttcaaagatgtggaccatctatttcaaaaagagttagcgnnnnnnnnnnnnnnnncgggatgacttttgtaaacagaatcaggaagcatcatcaggtcgttgctcagctttacttcaggacattttcagccctctagaagaggaagtgaagatgggaatttattcaaaaccagggggctatcgtctctttattcagaagctacaagacctgaagaaaaagtaccatgaggaaccaaggaaggggatacaggnaggctgaagagattctgcagacatacttgaaatccaaggagtctatgactgatgcaattctacagacagaccagactctcacagaaaaggaaaaggagattgaagnagtggaacgtgtgaaagctgagtctgcacaggcttcagcaaaaatgttgc

SEQ ID NO: 20049 - DNA, 130 bp, Macaca Mulatta
agatgtgaatttggacattggctctggacatgacacatgtggagaaacatcttcagagagttacagttctccatctagtccccgacacgatggaagagaaagttttgaaagtgaagaagagaaagacaga

SEQ ID NO: 20050 - DNA, 685 bp, Macaca Mulatta
  misc_feature (1)...(685): n = A,T,C or G
attggaaagattaccgactctactacagcaaggacgactttgggggcaaagaaattcagcgagtcgcttcagaactcgtgtggctgccagagattgttctggaaaacaannnnnnnnnnnnnnnnnnnnnnnnnnnnnnnnnnnnnnnnnnnnnnnnnnnnnnnnnnnnnnnnnnnnnnnnnnnnnnnnnnnnnnnnnnnnnnnnnnnnnnnnnnnnnnnnnnnnnnnnnnnnnnnnnnnnnnnnnnnnnnnnnnnnnnnnnnnnnnnnnnnnnnnnnnnnnnnnnnnnnnnnnnnnnnnnnnnnnnnnnnnnnnnnnnnnnnnnnnnnnnnnnnnnnnnnnnnnnnnnnnnnnnnnnnnnnnnnagaacggcgagtgggccatcgattactgcccgggggtgatccgccgccacgacagtggcgccaccgacggcccaggggagactgacgtcgtctactcgctcatcatccgccggaagccgctcttctacgtcattaacatcatcgtgccctgtgtgctcatctcgggcctggtgcttctcgcctacttcctgccggcgcaggngccggcggccagaaatgcacggtctccatcaacgtcctgctcgcccagaccgtcttcttgttcctcattgcccagaaaatcccagagacgtctctgagcgtgccgctcctgggcaggt

SEQ ID NO: 20051 - DNA, 813 bp, Macaca Mulatta
  misc_feature (1)...(813): n = A,T,C or G
ggtgaaatagttgatctccacaggccatggggaaaaattcagagagttaggaaggaagaaccaatagctttaaaacctgtgtgccattttaagagttacttaatgtttggtaacttttaagccttcactttacaaattcaagccttaggtataagaaccgagcaattttctgctaaaaagtccttgatttagcactatttacataaaggccatactttgcaaagtatttgctgaatggggacctttcaagttgaannnnnnnnnnnnnnnnnnnnnnnnnnnngttaatgtctggtgctttttatcacctcttctaatcttttaatgtatttggtttggcaattttggggtaagaacttttttttatgagtaccttttttctttgaaagtttagcggggccagtttgccttttttaatgaaacttgggaaattggaaaccgggggctatgcaacaagtttcttcccctatggcgaagttcttacggccgaaattaaggggcccataaccaaaacccccgggaatgggtacactcccccactggggtttgaaattgccccccaccttgggtttcccaaaccgagagccccccattccctggggttttaaaaggggcgccttttaggggttttaaccacggttcccccctttttcttaaccgggggctatttttcacccgggacgatttttttttctatttaaaaaaaagtggcnnnnnnnnnnnnnnnnnnntcaaatctccgcaaacctcgtggtactcgtcgtcggcatcccccatcacccgtggagcccccctctttatgagggcgcccct

SEQ ID NO: 20052 - DNA, 1783 bp, Macaca Mulatta
  misc_feature (1)...(1783): n = A,T,C or G
gtctgtggctcaggatatccccaagctgcagaaactaggcatcacccatgttctgaacgcggctgagggcaggtccttcatgcacgtcaacaccaatgccaacttctacaaggactccggcatcacatacctgggcatcaaggccaacgacacacaggagttcaacctcagcgcttactttgaaagggctgctgacttcatcgaccaggctttggctcaaaagaatggnnnnnnnnnnnnnnnnnnnnnnnnnnnnnnnnnnnnnnnnnnnnnnnnnnnnnnnnnnnnnnnnnnnnnnnnnnnnnnnnnnnnnnnnnnnnnnnnnnnnnnnnnnnnnnnnnnnnnnnnnnnnnnnnnnnnnnnnnnnnnnnnnnnnnnnnnnnnnnnnnnnnnnnnnnnnnnnnnnnnnnnnnnnnnnnnnnnnnnnnnnnnnnnnnnnnnnnnnnnnnnnnnnnnnnnnnnnnnnnnnnnnnnnnnnnnnnnnnnnnnnnnnnnnnnnnnnnnnnnnnnnnnnnnnnnnnggccgtgggcaacgatgtcccgagctgccatgttaaggaaacacactgtaccctgctcccaacatcacaaggcacttgtctacaagtctgtctcaacacagtcctgggccactttccccaccctggggagtacacaaagaagctgccaaaggggggcgtcctcgctccccagttgtcctgtttctgtaactttcgatgtcttttccctaggatgggggctcagagggggaaggcctgtggcctgcatgcttcccgatggcccagggcaggaggtgtgtggaagcgtaaggcctaggatgctcatagaggtccctcatgacctcccttcccctactcccaaatcctctcttgagtggggacctcaacaccttgagctctagtaaaggaactatgcaaatgcaggccactctccccgccacgtctgtgccccccactgtccccacagccttccacaccctgtacataggcagagctctcacgtcttgaggtccggagctggggcaggggtgtctgtcagtcattagtggatggagattcccatagcaaggctgcattgaatgatttccttaggaagaatggtccctacacaaagaggccttgtgtgggcaaacctggagaaccctcctaaatccacagagttttcaaaatgtgaatctttggaagccttgagttcagaatctgctgctctggaatatttcgctttgaccttatctcagtcacttcatttttgagaagagcgatgccttgggcatgcnnnnnnnnnnnnnnnnnnnagaaaacagggtgttgaagtccaacctatttaaaaaccccaccatttggagaattacaagggttttgtcctgaattacagcgctggcaagcccaagccactcgtgctaactgctttttgtcttggttgctattccaagaacagaaggaggaagttggccaattacagcatgtgtgcatgggtgtgtgtggggggtgcctctcagaaatgcggccagaagacagcagggaagtgaaaagtcccaggcacacaccctgcccattgcaggtggctcttagagctctctggtgccagcatgggattcctgaagtgactcagccaggtagacacaagacatggcggagtatccaaatggatcctttactggtggtagagcaaaaaaacccaaacgcagtcagcctttcaaaagactttctaaggatgatattggaatgcactacccctcacatgtgtatgcacatttgccagaatataagagttttgttttaaa

SEQ ID NO: 20053 - DNA, 1309 bp, Macaca Mulatta
  misc_feature (1)...(1309): n = A,T,C or G
gtgagtacggctccacagcagaaacctnnnnnnnnnnnnnnnnnnnnnnnnnnnnnnnnnnnnnnnnnnnnncagaagaggcaggctgagttattggagaaacgcctgcaggagatagaagaattggagcgagaagctgaaaggaaaataatagaagaaaacatcacctcagctgcaccttccggagaccaggatggcgaatactgcccagaggagaaactnnnnnnnnnnnnnnnnnnnnnnnnnnnnnnnnnnnnnnnnnnnnnnnnnnnnnnnnnnnnnnnnnnnnnnnnnnnnnnnnnnnnnnnnnnnnnnnnnnnnnnnnnnnnnnnnnnnnnnnnnnnnnnnaggaacttgcgaacatagaccctacgtggatagaatcacctaaaaccaatggccatattgagaatggcccattctcactggagcagcaactggacgatgaagaggatgacgaagaagactgcccaaatcctgaggaatataatcttgatgagccaaatgcagaaagtgattacacatatagcagctcctatgaacaattcaatggtgaattgccaaatggacgacataaaattcccgagtcacagttcccagagttttccacctcgttgttctctggatccttagaacctgtggcctgcggctctgtgctttctgagggatcaccacttactgagcaagaggagagcagtccatcccatgacagaagcaggacggtttcagcctccagtactggggatttgccaaaannnnnnnnnnnnnnnnnnnnnnnnnnnnnnnnnnnnnnnnnnnnnnnnnnnnnnnnnnnnnnnnnnnnnnnnnnnnnnnnnnnnnnnnnnnnnnnnnnnnnnnnnnnnnnnnnnnnnnnnnnnnnnnnnnnnnnnnnnnnnnnnnnnnnnnnnnnnnnnnnnnnnnnnnnnnnnnnnnnnnnnnnnnnnnnnnnnnnnnnnnnnnnnnnnnnnnnnnnnnnnnnnnnnnnnnnnnnnnnnnnnnnnnnnnnnnnnnnnnnnnnnnnnnnnnnnnnnngaccacatagcccacatcatagagctgctaggcagtattccaaggcactttgctctatctggaaaatattctcgggaattcttcaatcgcagaggnnnnnnnnnnnnnnnnnnnnnnnnnnnnnnnnnnnnnnnnnnnnnnnncttgtggaaaagatggctggcctcatgaagatgctgcacagtttacagatttcctgatcccgatgttagaaatggttccagaaaaacgagcctcagctggcgaatgccttcggcatccttggttgaattcttag

SEQ ID NO: 20054 - DNA, 3103 bp, Macaca Mulatta
  misc_feature (1)...(3103): n = A,T,C or G
ggattgacccaggaggcttcagtggacctcaagaacactggcaggaacgaattcctcacagccttcctgcagaactatcagctggcctacaacagggcctacccccgcctccttatctccagtctgtcagaaaggcctgcttctgtcnnnnnnnnnnnnnnnnnnnnnnnnnnnnnnnnnnnnnnnnnnnnnnnnnnnnnnnnnnnnnnnnnnnnnnnnnnnnnnnnnnnnnnnnnnnnnnnnnnnnnnnnnnnnnnnnnnnnnnnnnnnnnnnnnnnnnnnnnnnnnnnnnnnnnnnnnnnnnnnnnnnnnnnnnnnnnnnnnnnnnnnnnnnnnnnnnnnnnnnnnnnnnnnnnnnnnnnnnnnnnnnnnnnnnnnnnnnnnnnnnnnnnnnnnnnnnnnnnnnnnnnnnnnnnnnnnnnnnnnnnnnnnnnnnnnnnnnnnnnnnnnnnnnnnnnnnnnnnnnnnnnnnnnnnnnnnnnnnnnnnnnnnnnnnnnnnnnnnnnnnnnnnnnnnnnnnnnnnnnnnnnnnnnnnnnnnnnnnnnnnnnnnnnnnnnnnnnnnnnnnnnnnnnnnnnnnnnnnnnnnnnnnnnnnnnnnnnnnnnnnnnnnnnnnnnnnnnnnnnnnnnnnnnnnnnnnnnnnnnnnnnnnnnnnnnnnnnnnnnnnnnnnnnnnnnnnnnnnnnnnnnnnnnnnnnnnnnnnnnnnnnnnnnnnnnnnnnnnnnnnnnnnnnnnnnnnnnnnnnnnnnnnnnnnnnnnnnnnnnnnnnnnnnnnnnnnnnnnnnnnnnnnnnnnnnnnnnnnnnnnnnnnnnnnnnnnnnnnnnnnnnnnnnnnnnnnnnnnnnnnnnnnnnnnnnnnnnnnnnnnnnnnnnnnnnnnnnnnnnnnnnnnnnnnnnnnnnnnnnnnnnnnnnnnnnnnnnnnnnnnnnnnnnnnnnnnnnnnnnnnnnnnnnnnnnnnnnnnnnnnnnnnnnnnnnnnnnnnnnnnnnnnnnnnnnnnnnnnnnnnnnnnnnnnnnnnnnnnnnnnnnnnnnnnnnnnnnnnnnnnnnnnnnnnnnnnnnnnnnnnnnnnnnnnnnnnnnnnnnnnnnnnnnnnnnnnnnnnnnnnnnnnnnnnnnnnnnnnnnnnnnnnnnnnnnnnnnnnnnnnnnnnnnnnnnnnnnnnnnnnnnnnnnnnnnnnnnnnnnnnnnnnnnnnnnnnnnnnnnnnnnnnnnnnnnnnnnnnnnnnnnnnnnnnnnnnnnnnnnnnnnnnnnnnnnnnnnnnnnnnnnnnnnnnnnnnnnnnnnnnnnnnnnnnnnnnnnnnnnnnnnnnnnnnnnnnnnnnnnnnnnnnnnnnnnnnnnnnnnnnnnnnnnnnnnnnnnnnnnnnnnnnnnnnnnnnnnnnnnnnnnnnnnnnnnnnnnnnnnnnnnnnnnnnnnnnnnnnnnnnnnnnnnnnnnnnnnnnnnnnnnnnnnnnnnnnnnnnnnnnnnnnnnnnnnnnnnnnnnnnnnnnnnnnnnnnnnnnnnnnnnnnnnnnnnnnnnnnnnnnnnnnnnnnnnnnnnnnnnnnnnnnnnnnnnnnnnnnnnnnnnnnnnnnnnnnnnnnnnnnnnnnnnnnngttgacaaacagcgctcgcgcctgccagtctccctgagcgagggccgcctgcgtgtgtaccagagcggaccacgggccgtggtggagctggtctttgggctggtggtcacttatgactgggactgccagctggcactcagcctgcccgcgcgcttccaagaccaggtgtgcgggctgtgtggcaactataatggtgacccagcagacgacttcctcctgcctgacggggttctggctcctgaccctgtggagttcgcaagtagctggaagctggatgatggggactacctgtgtgaggatggctgccagaacaactgtcccgcctgcaccccaggccaggcccaacactatgagggcgacagactctgtggcatgctgaccaagcttgatggccccttcgctgtctgccatggcaccctggaccccaggtccttcctggagcagtgtgtatatgacctgtgtgtggtcggtggggagcggctcagcctgnnnnnnnnnnnnnnnnnnnnnnnnnnnnnnnnnnnnnnnnnnnnnnnnnnnnnnnnnnnnnnnnnnnnnnnnnnnnnnnnnnnnnnnnnnnnnnnnnnnnnnnnnnnnnnnnnnnnnnnnnnnnnnnnnnnnnnnnnnnnnnnnnnnnnnnnnnnnnnnnnnnnnnnnnnnnnnnnnnnnnnnnnnnnnnnnnnnnnnnnnnnnnnnnnnnnnnnnnnnnnnnnnnnnnnnnnnnnnnnnnnnnnnnnnnnnnnnnnnnnnnnnnnnnnnnnnnnnnnnnnnnnnnnnnnnnnnnnnnnnnnnnnnnnnnnnnnnnnnnnnnnnnnnnnnnnnnnnnnnnnnnnnnnnnnnnnnnnnnnnnnnnnnnnnnnnnnnnnnnnnnnnnnnnnnnnnnnnnnnnnnnnnnnnnnnnnnnnnnnnnnnnnnnnnnnnnnnnnnnnnnnnnnnnnnnnnnnnnnnnnnnnnnnnnnnnnnnnnnnnnnnnnnnnnnnnnnnnnnnnnnnnnnnnnnnnnnnnnnnnnnnnnnnnnnnnnnnnnnnnnnnnnnnnnnnnnnnnnnnnnnnnnnnnnnnnnnnnnnnnnnnnnnnnnnnnnnnnnnnnnnnnnnnnnnnnnnnnnnnnnnnnnnnnnnnnnnnnnnnnnnnnnnnnnnnnnnnnnnnnnnnnnnnnnnnnnnnnnnnnnnnnnngtggatgacgtccttcagtacctgcccttccaagcagcagatgggcaggtgcaggtgttccgccagggcagggacgccgtcgtgcgcacggactttggtctgactgtcacctacaactgggatgcacgagtgactgccaaggtgcccagtagctatgctgaggccctgtgtggactctgtgggaacttcaacggggacccagctgacgacctggctctgcggggtgggggtcaagctgccaatgcactggcttttgggaacagctggcaagaagagacgaggtccggctgtggagcaactgaacctggtgattgtcccaagctggactccc

SEQ ID NO: 20055 - DNA, 766 bp, Macaca Mulatta
  misc_feature (1)...(766): n = A,T,C or G
agattcacaatgttgaaagcccttttcctaactatgctgactctggcgctcgtcaagtcacaggacaccgaagaaaccatcacgtacacnnnnnnnnnnnnnnnnnnnnnnnnnnnnnnnnnnnnnnnnnnnnnnngatattgatgaatgtgacattgtcccagacgcttgtaaaggtggaatgaaatgtgtcaaccactatggaggatacctctgccttccgaaaacagcccagattattgtcaataatgaacagcctcagcaggaaacaccaccagcagaaggaacctcaggggcaaccaccggggttgtagctgccagcagcatggcaaccagtggagtgttgcccgggggtggttttgtggccagtgctgctgcagtcgcaggccctgaagtgcaggctggccgaaataactttgtcatccggcggaacccagctgaccctcagcgcattccctccaacccttcccaccgtatccaatgtgcagcaggctacgagcaaagcgaacacaacgtgtgccaagnnnnnnnnnnnnnnnnnnnnnnnnnnnnnnnnnnnnnnnnnnnnnnnnnnnnnnnnnnnnnnnnnnnnnnnnnnnnnnnnnnnnnnnnnnnnnnnnnnnnnnnnnnnnnnnnnnnnnnnntagacatagatgaatgtaccatccctccatattgccaccaaagatgtgtgaatacaccaggctcattttattgccagtgcagtcctgggtttcagttggcagcaaacaactatacctgcgta

SEQ ID NO: 20056 - DNA, 835 bp, Macaca Mulatta
gggatttccggtctttccgacgctgacgctgtcttcctgtctttgcggctccggaaaggcatttgggatgcccacgatgaggctgctggcgtttgtggtgttggctctatttgctgtcactcaagcagaggaaggagccaggcttttggcttccaaatcactgctgaacagatatgccgtggagggacgagacctgaccttgcagtacaatatctacaatgtcggctcaagtgctgcattagacgtggaactatctgatgattccttccctccagaagactttggcattgtgtctggaatgctcaatgtcaaatgggaccggattgcgcctgctagcaatgtctcccacactgtggtcctgcgccctctcaaggctggttatttcaacttcacctcggcgacaattacttacctggcccaggaggatgggcccgttgtgattggctctaccagtgcacctggacagggaggaatcctggctcagcgggagtttgacaggcgattctcccctcattttctggactgggcagcctttggggtcatgacccttccctccatcggcatccccctgctattgtggtactccagcaagaggaaatatgacactcccaaaacgaagaagaactgagtggggcttccacagccctcctctcccaagaaatccaggcttctctcccaaagaaatccaggtgctttccagactccagagggtatcttaatggcaatctcttctctcttagcccttgggcactttctcctggatcctggcctggtctcagccatagtgaaggaccaggcctaggagtctgtgagagcctcctttggtccatgtgaa

SEQ ID NO: 20057 - DNA, 833 bp, Macaca Mulatta
  misc_feature (1)...(833): n = A,T,C or G
gggggtggttttatcaaaagacttttattattagattaggacccccttaaaacctaaaaatcaagttattaccttttataatacttttcttctccacggaatgaatggaatcaatttgtgagttttttcctttaatgataactaaaatccctctaatttctcatttatgcttttgtcttttttatgaaatatttcttttaaaagccccagtctcacctacgaaatatgaagagcaaacgttgattttgcttacttgttaaactgtttggagagctctgtagagtatggttccagtgaggccaagattgaaatttgatactaaaaaggccacctagctttttgcagataacaaacaagaaagctattatggtgccagctgtctctcacgtgtgtattatgcttcaccagggggaactggcaagagtgtgtgtggggagggaaagggagtgtgagtggttctgggcaaataactacagggtgcccattaccattcaagaagacacttcacgtattctggtatcaaattcagtcatcttaaacaatttgtgtagaagtccacaggcatctttcaaacttttaggctgcatatggattgcccagtcagcatatgatgaattaaannnnnnnnnnnnnnnnnnnnttttagatgccannnnnnnnnnnnnntnnnnnnnnnnnnnnnnnncggngaacgaaacaacgagnnnnnnnnnnnnnnnnnngttgggcccgcccttcgggcccttcagagaaagcttttttataaaacccatttcctnnnnnnnnnnnnnnnnnnnnnnnnctttgtggggtataatgtgaaacattgggtc

SEQ ID NO: 20058 - DNA, 299 bp, Macaca Mulatta
  misc_feature (1)...(299): n = A,T,C or G
cccactcctcagcctcccctccccgaagctgcagccgggaccgcagccatgagnnnnnnnnnnnnnnnnnnnnnnnnnnnnnnnnnnnnnnnnnnnnnngtcggactccttccctgaacggcgagcccctaggaaagggaatactctctatgtatacggagaagacatgacgcctacccttctccgtggggccttctctccttttggaaacatcattgacctctccatggacccacccagaaanctgtgccttcgtcacctatgaaaagatggagtcagcagatcaggccgttgctgag

SEQ ID NO: 20059 - DNA, 164 bp, Macaca Mulatta
caggctcccggacatccctgctcctggtttttgccctcctctgcctgccttggcttcaagaggctggtagggtctcaagcgtacccttatccaggctttttgacaacattatgatccaagcccatcgcctgcaccaactggcctttgacacctaccaggagttt

SEQ ID NO: 20060 - DNA, 194 bp, Macaca Mulatta
aagaaggccccggccgcgcaggaggagcccgggacgccgccctcctcgccgctgagtgctgagcagttggaccggatccagaggaacaaggccgcggccctgctcagacttgcggcccgcaacgtgcccgtgggctttggggagagctggaagaagcacctcagcggggagttcggaaaaccgtattttatcaa

SEQ ID NO: 20061 - DNA, 777 bp, Macaca Mulatta
  misc_feature (1)...(777): n = A,T,C or G
ggcaggctggagtgcggtggtgtgatctcggctcactgtagcctcaacgtcccannnnnnnnnnnnnnncgnnnnnnnnnnnnnnnnnnnngnnnnnnnnnnnnngtccaacactacacccagctaattttcaagttttttggagagatgagggctccctatgttgcccaggttgatctagaactcctggactttatcctnnnnnnnnnnnnnnnnnnnnnnttgggattataggagtgagtcaccgcaccggccaagacacttttcaaactgatacagctgacaatgggagcctcataaagatggcttttgtttcttcccttcaaggtcatttacttgtacgagacagaaaaagatagcaatggggacatgggatgcgggagggaggggaatagtggaagtttctttccatgggaaactttcccttttgtaagctgagggccaggggtagggatattttttagtttgtgattttacatttatctgtacatactttttcaagattgggcgtttttataaccatgggttttcctgaaatcctcaattcatcaatatgaaaggaaatgaacgagatagacttttatgcaataaagtaacgtgcaagtgaggcataacctttaacgtgatgttccgacggaaacatttttggatttccaagttttggtatggatgtnagtttttttaaatcccttacattttttcaacaatggggttccaaaaactaaacggcagtttgttttaaaagcctttttccccccacacattttttcgtcctcc

SEQ ID NO: 20062 - DNA, 658 bp, Macaca Mulatta
  misc_feature (1)...(658): n = A,T,C or G
attcttaaagctgaaacattgaaaatacacgcagctgtatttggatattagagaggactcagaattgtttcttattattccaacaatgnccactgtatttctaatcactgatggcaaaacagccatactcatttaaggaattcctatccattttatgaaaatcttttattttgccaaaaagagttgtgattcccttcacttgataagcttttctttttagtctattttaattaaagtgaggttttgtaaatatggagttcaaaaattaaaatacagtatttggaaattcggtctgaaatcttatttctgattcagtatagttgttactgccttaaacgtcagtgagaattttcagatataaatcttattttttaaaaattcaaatatgtacctcatttatctttttaaaactatactgaatcctatctgaagtgttttgacgttttaaaaatagtataagttctatggacacgtacaagatgttctgagatatgtataacatatcctcttgtaaattaatatgaagttttaggacaccacttttgaaagtttgattattgaattcagtgagttttaatctgtgctttttagatgctccataaacttagttggcaaaaagtaactatctgctatctctgcataatcctcagctttaaat

SEQ ID NO: 20063 - DNA, 352 bp, Macaca Mulatta
ttcctgtgtcccatccccatgtgactgtgcaagggaggacacgtaccagttggtcactcaggccataggcagcctggaagttaaagggaagagccgagtcgggaacaacggcgtcctggagcagcgtccctgcaaccacgatcctgatgggtgttgggaagagagagcaggttcccctgtcacccatgggcctggctcagggctcacaggaactaaactaagagccctgggacctgacagtgcaggtctgtgggcgcccaaaactgcacaccctggcctgtgcccctcagagtggaaaccacgtgacagcctcatgtgtctgcctctcctcttatccccaaacgtgcttttc

SEQ ID NO: 20064 - DNA, 555 bp, Macaca Mulatta
  misc_feature (1)...(555): n = A,T,C or G
ctgagagcgggaccgacctcagctccaactcagcctccactgtgattaaaaataaaaattgctagagcagccctcactcaccacatctactttgngatagctggctatttggaatttaaaggatatttgactttttctaacctcccatgaggctgtaagnnnnnnnnnnnnnnnnnnnnnnnnnnnnnnnnnnnnnnnnnnnnnnnnnnnnnnnnnnnnnnnnnnnnnnnnnnnnnnnnnnnnnnnnnnnnnnnnnnnnnnnnnnnnnnnnnnnnnnnnnnnnnncttatcttaagcaaccgccttacgcagtcaatgggctgagtctgaccacttcgggtatggacttgctgcacccctccgtgggctacccggngggccctgggcttcttgtcccgcagccaccccccggaaacagcgccgggagaggacgacgttcactcgggcgcagctagatgtgctggaagcactgtttgccaagacccggtacccagacatcttcatgcgagaggaggtggcactgaaaatcaacttgcccgagtccagggtgcaggt

SEQ ID NO: 20065 - DNA, 1793 bp, Macaca Mulatta
  misc_feature (1)...(1793): n = A,T,C or G
ctctacgccctctgggcgcacactancattgtcatggactctggcgacggggtcacccacacggtgcccatctacgagggctacgccctcccccacgccatcctgcgtctggacctggctggccgggacctgnnnnnnnnnnnnnnnnnnnnnnnnnnnnccaccgagcgtggctacagcttcaccaccacggccgagcgggaaattgtgcgcgacatcaaggagaagctgtgctacgtcgccctggacttcgagcaggagatggccaccgccgcatcgtcctcttccctggagaagagctacgagctgcctgatggccaggtcatcaccatcggcaatgagcggttccggtgtccggaggcgctgttccagccgtctttcctgggcatggaatcttgtggcatccatgagaccacctttaactccatcatgaagtgtgacgtggacatccgcaaagacctgtatgccaacacggtgctgtctggtggcaccaccatgtacccaggcattgccgacaggatgcagaaggagatcaccgccctggcacccagcaccatgaagatcaagatcatcgcacccccagagcgcaagtactcagtgtggatcggtggctccatcttggcctcactgtccaccttccagcagatgtggattagcaagcaggagtacgacgagtcgggcccctccatcgtccatcgcaaatgcttctaaatggactgagcagatgcgtagcatttgctgcatgggttaattcagaagtataaatttgcccttggcaaatgcatacacctcatgctagcctcacgaaactggaataagcctttgaaaagaaattgtccttgaagcttgtatctgatatcagcactggattgtagaacttgttgctgattttgaccgtgtattcaagttaactgttccccttggtgtttgtttaataccctgtacatatctttgagttcaacctttagtacatgtggcttggtcgtttcgtggctgaggtcagaacgtgcttgtggaagacaagtctggtttggtgagtctgcgtggccagcagtctccgatctgtgcagggtattcatgtgtcagggcttgagtgttctgggatttctctagaggctggcaagggctcctgaaccagtttctgccctgccagtctgtcagggttggaaagtccaagccataggacccagttttcttagctgacgttttctgccagaacaccgtgggctgttacttgccttgagttggaagcggtttgcatttacacctgtaaatgtattcatccttttaatttatggtaaggtttttttgtacgcaattctcaatttctttaaggagatgaccaacaaattttgggttttctaactgttatggtgagaacattaggccccagcaacacgtcattgtgtaaggaaaaataaaagtgctgccgtaaaaaananannnnnntacaaaacaacccaaaaccccattatacctcattttaattatattttgttctgccacctccgggccctcctccacctttgaacaaaaaattatattatagaatttgtgtggggggcggcccaggggccaaaaaagaaacttttttttgaacaccccttcttttgttgtgccggcgcgcgggccaccccgagaggtggagaggaatagaaacaacggggtgataaagaaaacatttttttctcccgaacggagaaaacacaccagtggggccttttatacaaataaatagcgagtgccgtcgtggaatatatccctccccaccccncccaccagaataagaaacc

SEQ ID NO: 20066 - DNA, 751 bp, Macaca Mulatta
  misc_feature (1)...(751): n = A,T,C or G
ggaatattatcattcttgcctctacctttgtcacagtgttgtgaagatcagatacatatgaatgtagtcaaataaactgaaaactaggaaagtgttaactatcattgcccaccgaatttgaggtagcaaaaaaaagtgttcttgtataagaacagactgagaagcagcctttcgagatccctgaagctagtttcctatctagactaaaaatagcctcgaaagaatagtagcaaacagtatgcagtgctcctgtgttctaagttattttatgttttagtttaccctcacaacagccataatgttaagtcattatgagctccatcttaaagataagaaaactgaggcaaggggagattaacctactgccaaatttcaaacagttagtatatgtatttgacaccagtagtatggctctaatcttacccttagccctcccaaccattatgctatactctctacccataaatacctccaggacacatttccctcttggtcatttgtccttctatagaagcttcaaagattaaaccaaattaannnnnnnnnnnnnnnnnnnnngaaatgttattttcccgggggataagaggatggacttcccaggttcaccaaaggctgggttatattcaccccccccaaagtggaattaattctgagtccgctaagggagtcacctctactggggggttgtacctaccgtagagggggaaaaattaacctggcaaagggagggttgggggtttggcagaaagct

SEQ ID NO: 20067 - DNA, 1001 bp, Macaca Mulatta
  misc_feature (1)...(1001): n = A,T,C or G
ccactccgctacntgcggcgctaggccccccggtcccggtcatggccacgctcagggtccagcccgaggcccaagccaaggtggatgtgtttcgtgaagacctctgtaccaagacagagaacctgctcgggagctatttccccaagaagatttctgagctggatgcatttttaaaggagccagctctcaatgaagccaacctgagcaatctgaaggccccgttggacatcccagtgcctgatccagtcaaggagaaagagaaagaggaacggaagaaacagcaggagaaggaagacaaggatgaaaagaagaagggggaggatgaagacaaaggtcctccctgtggtccagtgaactgcaatgaaaagatcttggtccttctgcagcgcttgaagcctgagatcaaggatgtcattgagcagctcaacctggtcaccacctggttgcagctgcagatacctcggattgaggatggtaacaattttggagtggctgtccaggagaaggtgtttgagctgatgaccagcctccacaccaagctagaaggcttccacacccaaatctctaagtatttctctgagcgtggtgatgcagtgactaaagcagccaagcagccccatgtgggtgattatcggcagctggtgcacgagctggatgaggcagagtaccgggacatccggctgatggtcatggagatccgcaatgcttatgctgtgttatatgacatcgtcctgaagaaattcgagaagctcaagaagcccatgggagaaacaaaggggatgatctattgagagacgtctctcccatctgggaatggtcagagagacttctactctactgggactcaaattcccgactgttagtgagattttctcatttttcccggcaaaatatgttgatataaaaacaaacgtgggggggccacaccagagagtaaacggcgttcgtgtgaacgcgctatcacaaaatatctaataccagaaacaagagttgacgtacaa

SEQ ID NO: 20068 - DNA, 202 bp, Macaca Mulatta
  misc_feature (1)...(202): n = A,T,C or G
ctcctgactatgacagaagccagtggctgaatgaaaaattcaagctgggcctggactttcccaatnctgccctacttgattgatgggactcacaagatcacccagagcaacgccatcctgcgctacattgcccgcaagcacaacctgtgtgngtggggagacagaagaagagaagattcttgtggacattttggagaaccag

SEQ ID NO: 20069 - DNA, 327 bp, Macaca Mulatta
gtgatagcctcatcaagggtaagaaatgagccttgtcaccaagaactccacccccagaggaagtggatctgcttctccagtttttgaggagccagccaggggtccagcacagccctaccccaccccagtatcatgcgatggtcccccacaccggtcccctgaacccctcttggattaaggaagactgaagaccagcccgttttctggggaattactttcctcctccctgtgttaactggggctgttgggacagtgtgtgatttctcagtgattccctacagtgttgttccctccctcaaggctgggaggagataaccaccaacccag

SEQ ID NO: 20070 - DNA, 118 bp, Macaca Mulatta
attatgcaatgatgcctgtcactgggaacacccctgggtacaggacatagaaatttccactattacatacagtttccactattacaactaaataagcatctattgcgtgaaaacagac

SEQ ID NO: 20071 - DNA, 814 bp, Macaca Mulatta
  misc_feature (1)...(814): n = A,T,C or G
ggcgcannnnnnnnnnnnnnnnnnnnnnnnnnnnnnnnnnnnnnnnnngggaggatggtttccgctcaggagtttaagaccaacctgggcaatatagtgaaacctnnnnnnnnnnnnnnnnnnnnnnnnnnnnagccgggcatagtagcatgtgcttgtagtctcagctatctgggaggctgaggtaggaggattgctcgaacccaggagatcgaggctgcaagtttgctaggatgacgccactgaactccagccttggtgacagagtgagatcctgtctcnnnnnnnnnnnnnnnnnnnnnnnnnnnnnnnnnnnnnnnnnaaccattactcaaaaaatggcacagtaaatacttgtgctatttactcagatgatggaactggtagaaaaggagttttggagtgagggaatcaataattggtgttttattgtggaaaatttgaaatgctttctgacaacaaaatgaacatgtcaaggagacaatatattagtctggagttcagggggagaattttcaaatggaaatataagattggaagttatcaatgtacatagagtatttgcaaccatgaacatggatggaacaatancagagtcagaatagttagaaaggagaaggattcccgtgactaagggctgggacagccctatttttagattgagaaaatgaaggagggctctaacttagaaaaactgagaaaaaaaaattgccttgaaattaggaaggaaaactggtgaccccctggaaatggaagtaaagaaacggttttccaacccaaaggcacgggggggtccccgccttgggcgtctccc

SEQ ID NO: 20072 - DNA, 652 bp, Macaca Mulatta
  misc_feature (1)...(652): n = A,T,C or G
gtcaatggttcaacgtcagaaatggattggattataaatcgaaatgacaccaaagaagatgtatttgtacatcagactgccatcaagaagaataacccacggaaatatctgcgcagtgtaggagatggagaaactgtagagtttgatgtggttgaaggagagaagggtgcagaagctgccaatgtgactggcccggatggagttcctgtggaagggagtcgttacgctgctgatcggcgccgttacagacgtggctactatggaaggcgccgtggccctccccggaatgctggtgagattggagagatgaaggatggagtcccagagggagcacagcttcagggaccggttcatcgaaatccaacttaccgcccaaggtaccgtagcagaggacctcctcgcccacgacctgccccagcagttggagaggctgaagataaagaaaatcagcaagcctccagtggtccaaaccagccgtcaattcgccgtggataccggcgtccctacaattaccggcgtcgcccgcgtcttcctaacgctccttcacaagatggcaaagaggccaaggcaggtgaagcaccaactgagaaccccgntccanccacccagcagagcagtgctgagtaacacaggctccccaggcaccttcacc

SEQ ID NO: 20073 - DNA, 803 bp, Macaca Mulatta
ggggcggcgtagtctcctgcagcgtttgcggtcagtctcgcaatattcggaagcaggaccgcggcgtggcctagcaagtcatggcgatgaaggccgtgtgcgtgttgaagggcgacagcccagtgcagggcaccatcaatttcgagcagaaggaaagtaatggaccagtgaaggtgtggggaagcattacaggattgactgaaggcctgcatggattccatgttcatcagtttggagataatacacaaggctgtaccagtgcaggtcctcactttaatcctctatccagacaacacggtgggccaaaggatgaagagaggcatgttggagacctgggcaatgtgactgctggcaaagatggtgtggccaaggtgtctttcgaagattctgtgatctcgctctcaggagaccattccatcattggccgcacattggtggtccatgaaaaagcagatgacttgggcaaaggtggaaatgaagaaagtaaaaagacaggaaacgctggaggtcgtctggcttgtggtgtaattgggatcgcccaataaacattccctttgggatgtagtctgagggccaattaactcattctgttaatcctgcttagctgtagaaaaatgtatctttgaataaaacaatttaaacacttggtaattctttaaagaagtggtaaatttgttgtggaacgtttttggccttaattaaacctgttaaattgaagaaaacctgggtttggaatggatccactttggggacaggaaattttgtgtatcaacgtctttttaataaaaacctcaaatttaaaa

SEQ ID NO: 20074 - DNA, 638 bp, Macaca Mulatta
gggcctggagtccgacgtggaagttgctggctgagtgggcttgcgaggaaaccgcctcggagctgcagccgaaggccaaggaatcactgaagatcggcgagggaggacaggcggttcatcatgggtggctttttctcaagtatattttccagtctgtttggaactcgggaaatgaggattttaattttgggattagatggagcaggaaaaaccacaattttgtacagattacaagttggagaagttgttactactatacctaccattggatttaatgtagagacggtgacatacaaaaaccttaaattccaagtctgggatttaggaggacagacaagtatcaggccatactggagatgttactattcaaacacagatgcagtcatttatgtagtagacagttgtgaccgagaccgaattggcatttccaaatcggagttagttgccatgctggaggaagaagagctgagaaaagccattttagtggtgtttgcaaataaacaggacatggaacaggccatgacttcctcagagatggcaattcacttgggttcctggcctgaagacgaaatgcaatattaaactcagcacaaggctgctgagcagagttactaacacatcctctccgaaaacagctt

SEQ ID NO: 20075 - DNA, 249 bp, Macaca Mulatta
aggaatacttggacctcagccaacctctcgaacagtattcacctagttaccctgacacaagaagttcttgttcttcaggagatgattctgttttttctccagaccccatgccttacgaaccatgccttcctcagtatccacacataaatggcagtgttaaaacatgaatgactgtgtctgcctgtccccaaacaggacagcaccgggaacctagctacactgagcagggagaccatgcctcccagagct

SEQ ID NO: 20076 - DNA, 907 bp, Macaca Mulatta
  misc_feature (1)...(907): n = A,T,C or G
gatggcagtggtactggcacatcctgcctgtgcagccagcccgccgtcacacggactgtacagaaggatgggcccaacaaggggcgccagttccacacgtgtgccaagccgagagagcagcagtgtggcttcttccagtgggtcgatgagaacaccgctccagnnnnnnnnnnnnnnnnnnnnnnnnnnnnnnnnnnnnnnnnnnnnnnnnnnnnnnnnnnnnnnnnnnnnnnnnnnnnnnnnnnnnnnnnnnnnnnnnnnnnnnnnnnnnnnnnnnnnnnnnnnnnnnnnnnnnnnnnnnnnnnnnnnnnnnnnnnnnnnnnnnnnnnnnnnnnnnnnnnnnnnnnnnnnnnnnnnnnnnnnnnnnnnnnnnnnnnnnnnnnnnnnnnnnnnnnnnnnnnnnnnnnnnnnnnnnnnnnnnnnnnnnnnnnnnnnnnnnnnnnnnnnnnnnnnnnnnnnnnnnnnnnnnnnnnnnnnnnnnnnnnnnnnnnnnnnnnnnnnnnnnnnnnnnnnnnnnnnnnnnnnnnnnnnnnnnnnnnnnnnnnnnnnnnnntcagaagtgaccatagccactgctgaaaagtcacgcagatgctccctcggaccccccaagggtggttgctgttagcagaggattggtgcagtccttagctgaagcccactgtgtgccaaaggaagaagctcccaggactgcttccttcacctccagaaagccccaggtgagccggcagcactcatggggcaggccatgtccaagctgcccaggacttctctcatagatgtcctgagaaggacggtgtaatacaaggaagtggctgtggtaacactgatccggcagaagaagcttcattccctctttagttaagccaggacacccagaattcattgccttaataaagaacccagg

SEQ ID NO: 20077 - DNA, 1279 bp, Macaca Mulatta
  misc_feature (1)...(1279): n = A,T,C or G
gggggggtaggtccaagggcttggtgatagaattatttctcaattgacttcttgagtgcagtttgaactgtaacatttgcttagtcacctttagtggagtagtccactgggcttgtttctatgtttatataaagcagccaaatccttcatgtaatattgaagtccatttttgcaatgttgttccgcatttggagccattttgcatcccatagaggttagtcctgcatagccagtaatgtgctcagttcatccaaaagctgggggccaaagtctaaatagggctcggtatcccccatctcttacctctgcctccttcctcctccttcccagcctatcatcaatcttgagtattctacacaacgtgaattcaagtgcctgattaattgaggtggcaacatagttgagaagagagcagagaacaggaagagacatagctagaagcaatgggtgcaaaaagcaatgtgtacaagactttcagcaagcatagagagagttcacctctactctgccctcctcatagtcataatgtaacatgtaaagaatgaaaatggattctgtacaatacgctaaaaaccaacataatgtctttctttaaaacctgtgtggaaaaaataaatgttccatctatagggatagggaaaaagtaaccaaaagagagaaagagaagggaatgctggtttatctttgtagattgtaatcaaatggagaaattttcaatattttagccattgttaggaatttttttttggtaaaaggaagactgactttgttcaaatgctttcatgaacctggtttgagatgataggaaagcaacaaaatggggaacctggtgactaagggcctggtgcaaggtcttgggaaatgtcattgacaatagatggtggggttttcccccctttagaaatgttggatattaagtgatataaacacttctaactctgaaaatcttctgagaaatccccaaattcatggtattcttggacaactgggattttctaggaagatactgaatggcctagacatcaaagttggtgtgaaccaaaatagagtcagctgacccagcatgagaccatcagtcatgctctgggttggaaaatgtttgcctgttggaattaatttaagcttaagtatatatcaacattattttattgtgcaatttaaaaacataaaaatttcaagtttttttaaagttaaaaattctaaccactgtaacaacaatttttgggttattttccggaattaaaatcttgttgcatgcatttgaattcatcagnatgca

SEQ ID NO: 20078 - DNA, 893 bp, Macaca Mulatta
cgaggccgatgtttactgctatgtggaggaccccacgggaacaccatctacagagaaaccaagaagcagtacgacagcttcacataccgggccgaggtcaagggcgtttatcagttttgcttcagtaatgagttttccaccttctctcacaagaccgtctactttgactttcaagtgggttaataaccttccaattctcccagacatggggaacagggtcacggctctcacccagatggagtccgcctgcgtgaccatccatgaggctctgaagacggtgattgactcccagacgcattaccggctgcgggaggcccaggaccgggcccgagcggaagaccttaatagccgagtctcttactggtctatcggcgagacgattgccctgttcgtggtcagcttcagtcaggtgctactgttgaaaagcttcttcacagaaaaacgacccatcagcagggcagtccactcctagccctggcatcctgctctagggcccctcatgtcccagcctggagcagctctcctaggtctcctaggcgcatagcccagggtggaggcagaacgatgctgccgtggtagccctttgcctttcatgcccatgcttgattcttgcacctcagcagctgaaggtctcagagaccagtaatcagaaggcatccgactgcattatgtgtgcagcactgaaaagatgtttacaactaggctagggattagccactgtgggacggtgggcacgcaagggttcaacgggctggctggtacaagaactcaagtgccaaggctttgggcagtaaggcctgctctgttcagatgctgggcattggctgggtgtcaccagtgggaaacggggtcagcaggccgcgcgctgggccgtgcaaagaaagcggatatga

SEQ ID NO: 20079 - DNA, 1123 bp, Macaca Mulatta
  misc_feature (1)...(1123): n = A,T,C or G
gttttgttttataacatgagtttggatgtgaacagaaagacagagtctccaccaagattctatttttcttctaatggaacttctgacgtgattacaggaagcatacaagtgtccagcggagtagctaactgtagaacacatcaagcatttatgcgnnnnnnnnnnnnnnnnnnnnnnnnnnnnnnnnnnnnnnnnnnnnnnnnnnnnnnnnnnnnnnnnnnnnnnnnnnnnnnnnnnnnnnnnnnnnnnnnnnnnnnnnnnnnnnnnnnnnnnnnnnnnnnnnnnnnnnnnnnnnnnnnnnnnnnnnnnnnnnnnnnnnnnnnnnnnnnnnnnnnnnnnnnnnnnnnnnnnnnnnnnnnnnnnnnnnnnnnnnnnnnnnnnnnnnnnnnnnnnnnnnnnnnnnnnnnnnnnnnnnnnnnnnnnnnnnnnnnnnnnnnnnnnnnnnnnnnnnnnnnnnnnnnnnnnnnnnnnnnnnnnnnnnnnnnnnnnnnnnnnnnnnnnnnnnnnnnnnnnnnnnnnnnnnnnnnnnnnnnnnnnnnnnnnnnnnnnnnnnnnnnnnnnnnnnnnnnnnnnnnnnnnnnnnnnnnnnnnnnnnnnnnnnnnnnnnnnnnnnnnnnnnnnnnnnnnnnnnnnnnnnnnnnnnnnnnnnnnnnnnnnnnnnnnnnnnnnnnnnnnnnnnnnnnnnnnnnnnnnnnnnnnnnnnnnnnnnnnnnnnnnnnnnnnnnnnnnnnnnnnnnnnnnnnnnnnnnnnnnnnnnnnnnnnnnnnnnnnnnnnnnnnnnnnnnnnnnnnnnnnnnnnnnnnnnnnnnnnnnnnnnnnnnnnnnnnnnnnnnnnnnnnnnnnnnnnnnnnnnnnnnnnnnnnnnnnnnnnnnnnnnnnnnnnnnnnnnnnnnnnnnnnnnnnnnnnnnnnnnnnnnnnnnnnnnnnnnnnnnnnnnnnnnnnnnnnnnnnnnnnnnnnnnnnnnnnnnnnnnnnnnnnnnnnnnnnnnnnnnnnngactactactggagaatgccactttgaaaattatcaaagagtatgtgcattagagcagcaaaagagtgcaatgcacaccttgaaaggcatgttccagttcttgtccaagactgataagaggctattg

SEQ ID NO: 20080 - DNA, 817 bp, Macaca Mulatta
  misc_feature (1)...(817): n = A,T,C or G
gccctcgccctgcggcgagcacgtctcctgtgctgagtgcctgaagttcgacaaaggccctttcgggaagaactgcagcgcggcgtgtgggcgcctgcagctgtcgaacaaccccgtgaagggcaggacctgcaaggagagggactcagagggctgctgggtgacgtacatgctggagcagcaggacgggtgggatcactacatcatctatgtggatgagagccgagagtgcgtggcgggccccaacatcgctgccatcgtcgggggcactgtggcaggcatcgtgctgatcggcgtcctcctgctggtcatctggaaggccctgacccacctgagcgacctccgggagtacaggcgttttgagaaggagaagctcaagtctcagtggaacaacgataatccccttttcaagagtgccaccacgacggtcatgaaccccaagtttgctgagagttaggagcacttggtgaagacaaggccatcgggcccaccacgtctgccccgtcacgcggccgagacatggcttgcaacagctctcgaggatgtcaccaattaaccagaaatccagttattttctgccctcaaaatgacagccatggccagccaggtgcttcgaggggctcatcaggggggacagccctgctttgacctgcccgggtctttgcatggagacgtgagaagggagggcttgaggttgctgaggtgaggagtgtgtctcctgtgcaagtcaggacagtctggttaaaggtggtgcctattgattaacgatttaatgaatgggatgtcattaatcgcctgcctcgtgccgantcctcgc

SEQ ID NO: 20081 - DNA, 3206 bp, Macaca Mulatta
  misc_feature (1)...(3206): n = A,T,C or G
agagtgtgagaacttcctggatgttggactgggcagagagtgtacctcaagacaaggtgtacttaaaagagaacctgggagtgattctgacctctttcactcacccagtgatgacatggacagcatcatcttcccaaagnnnnnnnnnnnnnnnnnnnnnnnnnnnnnnnnnnnnnnnnnnnnnnnnnnnnnnnnnnnnnnnnnnnnnnnnnnnnnnnnnnnnnnnnnnnnnnnnnnnnnnnnnnnnnnnnnnnnnnnnnnnnnnnnnnnnnnnnnnnnnnnnnnnnnnnnnnnnnnnnnnnnnnnnnnnnnnnnnnnnnnnnnnnnnnnnnnnnnnnnnnnnnnnnnnnnnnnnnnnnnnnnnnnnnnnnnnnnnnnnnnnnnnnnnnnnnnnnnnnnnnnnnnnnnnnnnnnnnnnnnnnnnnnnnnnnnnnnnnnnnnnnnnnnnnnnnnnnnnnnnnnnnnnnnnnnnnnnnnnnnnnnnnnnnnnnnnnnnnnnnnnnnnnnnnnnnnnnnnnnnnnnnnnnnnnnnnnnnnnnnnnnnnnnnnnnnnnnnnnnnnnnnnnnnnnnnnnnnnnnnnnnnnnnnnnnnnnnnnnnnnnnnnnnnnnnnnnnnnnnnnnnnnnnnnnnnnnnnnnnnnnnnnnnnnnnnnnnnnnnnnnnnnnnnnnnnnnnnnnnnnnnnnnnnnnnnnnnnnnnnnnnnnnnnnnnnnnnnnnnnnnnnnnnnnnnnnnnnnnnnnnnnnnnnnnnnnnnnnnnnnnnnnnnnnnnnnnnnnnnnnnnnnnnnnnnnnnnnnnnnnnnnnnnnnnnnnnnnnnnnnnnnnnnnnnnnnnnnnnnnnnnnnnnnnnnnnnnnnnnnnnnnnnnnnnnnnnnnnnnnnnnnnnnnnnnnnnnnnnnnnnnnnnnnnnnnnnnnnnnnnnnnnnnnnnnnnnnnnnnnnnnnnnnnnnnnnnnnnnnnnnnnnnnnnnnnnnnnnnnnnnnnnnnnnnnnnnnnnnnnnnnnnnnnnnnnnnnnnnnnnnnnnnnnnnnnnnnnnnnnnnnnnnnnnnnnnnnnnnnnnnnnnnnnnnnnnnnnnnnnnnnnnnnnnnnnnnnnnnnnnnnnnnnnnnnnnnnnnnnnnnnnnnnnnnnnnnnnnnnnnnnnnnnnnnnnnnnnnnnnnnnnnnnnnnnnnnnnnnnnnnnnnnnnnnnnnnnnnnnnnnnnnnnnnnnnnnnnnnnnnnnnnnnnnnnnnnnnnnnnnnnnnnnnnnnnnnnnnnnnnnnnnnnnnnnnnnnnnnnnnnnnnnnnnnnnnnnnnnnnnnnnnnnnnnnnnnnnnnnnnnnnnnnnnnnnnnnnnnnnnnnnnnnnnnnnnnnnnnnnnnnnnnnnnnnnnnnnnnnnnnnnnnnnnnnnnnnnnnnnnnnnnnnnnnnnnnnnnnnnnnnnnnnnnnnnnnnnnnnnnnnnnnnnnnnnnnnnnnnnnnnnnnnnnnnnnnnnnnnnnnnnnnnnnnnnnnnnnnnnnnnnnnnnnnnnnnnnnnnnnnnnnnnnnnnnnnnnnnnnnnnnnnnnnnnnnnnnnnnnnnnnnnnnnnnnnnnnnnnnnnnnnnnnnnnnnnnnnnnnnnnnnnnnnnnnnnnnnnnnnnnnnnnnnnnnnnnnnnnnnnnnnnnnnnnnnnnnnnnnnnnnnnnnnnnnnnnnnnnnnnnnnnnnttggagtcgaataatagacagcaagtttctaaaacagcaaaagaaagatgtggtcaaacggcaagaagtaatatatgnnnnnnnnnnnnnnnnnnnnnnnnnnnnnnnnnnnnnnnnnnnnnnnnnnnnnnnnnnnnnnnnnnnnnnnnnnnnnnnnnnnnnnnnnnnnnnnnnnnnnnnnnnnnnnnnnnnnnnnnnnnnnnnnnnnnnnnnnnnnnnnnnnnnnnnnnnnnnnnnnnnnnnnnnnnnnnnnnnnnnnnnnnnnnnnnnnnnnnnnnnnnnnnnnnnnnnnnnnnnnnnnnnnnnnnnnnnnnnnnnnnnnnnnnnnnnnnnnnnnnnnnnnnnnnnnnnnnnnnnnnnnnnnnnnnnnnnnnnnnnnnnnnnnnnnnnnnnnnnnnnnnnnnnnnnnnnnnnnnnnnnnnnnnnnnnnnnnnnnnnnnnnnnnnnnnnnnnnnnnnnnnnnnnnnnnnnnnnnnnnnnnnnnnnnnnnnnnnnnnnnnnnnnnnnnnnnnnnnnnnnnnnnnnnnnnnnnnnnnnnnnnnnnnnnnnnnnnnnnnnnnnnnnnnnnnaagacaatgaagtggagcaggaagatctagcacagtccttgagcctggtgaaggatgtgattggagctgtagacagcaaagtggcaagttatgaaaagaaagtgcgtctcaatgagatttatacaaagacagatagcaagtcaatcatgaggatgaagagtggtcagattttgccaannnnnnnnnnnnnnnnnnnnnnnnnnnnnnnnnnnnnnnnnnnnnnnnnnnnnnnnnnnnnnnnnnnnnnnnnnnnnnnnnnnnnnnnnnnnnnnnnnnnnnnnnnnnnnnnnnnnnnnnnnnnnnnnnnnnnnnnnnnnnnnnnnnnnnnnnnnnnnnnnnnnnnnnnnnnnnnnnnnnnnnnnnnnnnnnnnnnnnnnnnnnnnnnnnnnnnnnnnnnnnnnnnnnnnnnnnnnnnnnnnnnnnnnnnnnnnnnnnnnnnnnnnnnnnnnnnnnnnnnnnnnnnnnnnnnnnnnnnnnnnnnnnnnnnnnnnnnnnnnnnnnnnnnnnnnnnnnnnnnnnnnnnnnnnnnnnnnnnnnnnnnnnnnnnnnnnnnnnnnnnnnnnnnnnnnnnnnnnnnnnnnnnnnnnnnnnnnnnnnnnnnnnnnnnnnnnnnnnnnnnnnnnnnnnnnnnnnnnnnnnnnnnnnnnnnnnnnnnnnnnnnnnnnnnnnnnnnnnnnnnnnnnnnnnnnnnnnnnnnnnnnnnnnnnnnnnnnnnnnnnnnnnnnnnnnnnnnnnnnnnnnnnnnnnnnnnnnnnnnnnnnnnnnnnnnnnnnnnnnnnnnnnnnngtggagatccttcagggcttggtgagtggaaatctgggaggcacacttgggccaactgtcagcagccccattgagcaagaaggtgcggtcggtcctgtttccctgccccggagagcagaaacctttggaggatttgacagccatcagatgaatgcttcaaaag

SEQ ID NO: 20082 - DNA, 750 bp, Macaca Mulatta
agaggtggatgcctggcctggccagcgagagcgcgtcaccgccatcctgctggcctgccgccacctgcccctctccttcctctcctccccgggccagcgggcagtgctcctggccgaggctgcccgcaccctggagaaggtgggtgaccggcgctcctgcaacgactgccagcagatgattgtcaagctgggtggtggcactgctattgccgcctcctgaccaccaggctcagcccacccctccacttctctctcggttcctctctcccccagcatcctcccactgagagaggtggggaggagccttgtcatcttagctgtcacctgccgaggcttctgggccacctcaggccagcaggcccctgggcagagccccttaaagctgctgtcactagatgcccatggtccagggcctggtgggcataagaggaaaggtagcagggcagaaactgggcagctctgacttgatagcagcagggggagctcccaagctgccaagcccctgcctccagccttcctgagtttctctctcctgaaccctactctctcctttttgcttcctcagtttttatcaggcttcctctgggggacagcagtctctgagcaccagggagcagttgccctcaggcccgtgcccggcatgccctcccccctttttataccaatgttttctaccagtgtgcttgggtttgccatgatgcgaggctgagttgctgtagcgtcttgattctctccctgggtctacgttcc

SEQ ID NO: 20083 - DNA, 3047 bp, Macaca Mulatta
  misc_feature (1)...(3047): n = A,T,C or G
catggcggcgactgcggcaaagcgagagcctcggagacgccgctgctgccagcacagccggagacctgagccgacactgggggctgtccgcgggtcccgcactctctcaatgagtcggagaaatcccgnnnnnnnnnnnnnnnnnnnnnnnnnnnnnnnnnnnnnnnnnnnnnnnnnnnnnnnnnnnnnnnnnnnnnnnnnnnnnnnnnnnnnnnnnnnnnnnnnnnnnnnnnnnnnnnnnnnnnnnnnnnnnnnnnnnnnnnnnnnnnnnnnnnnnnnnnnnnnnnnnnnnnnnnnnnnnnnnnnnnnnnnnnnnnnnnnnnnnnnnnnnnnnnnnnnnnnnnnnnnnnnnnnnnnnnnnnnnnnnnnnnnnnnnnnnnnnnnnnnnnnnnnnnnnnnnnnnnnnnnnnnnnnnnnnnnnnnnnnnnnnnnnnnnnnnnnnnnnnnnnnnnnnnnnnnnnnnnnnnnnnnnnnnnnnnnnnnnnnnnnnnnnnnnnnnnnnnnnnnnnnnnnnnnnnnnnnnnnnnnnnnnnnnnnnnnnnnnnnnnnnnnnnnnnnnnnnnnnnnnnnnnnnnnnnnnnnnnnnnnnnnnnnnnnnnnnnnnnnnnnnnnnnnnnnnnnnnnnnnnnnnnnnnnnnnnnnnnnnnnnnnnnnnnnnnnnnnnnnnnnnnnnnnnnnnnnnnnnnnnnnnnnnnnnnnnnnnnnnnnnnnnnnnnnnnnnnnnnnnnnnnnnnnnnnnnnnnnnnnnnnnnnnnnnnnnnnnnnnnnnnnnnnnnnnnnnnnnnnnnnnnnnnnnnnnnnnnnnnnnnnnnnnnnnnnnnnnnnnnnnnnnnnnnnnnnnnnnnnnnnnnnnnnnnnnnnnnnnnnnnnnnnnnnnnnnnnnnnnnnnnnnnnnnnnnnnnnnnnnnnnnnnnnnnnnnnnnnnnnnnnnnnnnnnnnnnnnnnnnnnnnnnnnnnnnnnnnnnnnnnnnnnnnnnnnnnnnnnnnnnnnnnnnnnnnnnnnnnnnnnnnnnnnnnnnnnnnnnnnnnnnnnnnnnnnnnnnnnnnnnnnnnnnnnnnnnnnnnnnnnnnnnnnnnnnnnnnnnnnnnnnnnnnnnnnnnnnnnnnnnnnnnnnnnnnnnnnnnnnnnnnnnnnnnnnnnnnnnnnnnnnnnnnnnnnnnnnnnnnnnnnnnnnnnnnnnnnnnnnnnnnnnnnnnnnnnnnnnnnnnnnnnnnnnnnnnnnnnnnnnnnnnnnnnnnnnnnnnnnnnnnnnnnnnnnnnnnnnnnnnnnnnnnnnnnnnnnnnnnnnnnnnnnnnnnnnnnnnnnnnnnnnnnnnnnnnnnnnnnnnnnnnnnnnnnnnnnnnnnnnnnnnnnnnnnnnnnnnnnnnnnnnnnnnnnnnnnnnnnnnnnnnnnnnnnnnnnnnnnnnnnnnnnnnnnnnnnnnnnnnnnnnnnnnnnnnnnnnnnnnnnnnncaggtgcacatgaacttgaacagatgcagctgattttagaatatattcctgttgtacatgaggaagatcgtcaggagcttctcagcgtaattccagtttacattagaaatgacatgactgagccacacaaacctttaactcagctgcttccaggaattagtcgagaannnnnnnnnnnnnnnnnnnnnnnnnnnnnnnnnnnnnnnnnnnnnnnnnnnnnnnnnnnnnnnnnnnnnnnnnnnnnnnnnnnnnnnnnnnnnnnnnnnnnnnnnnnnnnnnnnnnnnnnnnnnnnnnnnnnnnnnnnnnnnnnnnnnnnnnnnnnnnnnnnnnnnnnnnnnnnnnnnnnnnnnnnnnnnnnnnnnnnnnnnnnnnnnnnnnnnnnnnnnnnnnnnnnnnnnnnnnnnnnnnnnnnnnnnnnnnnnnnnnnnnnnnnnnnnnnnnnnnnnnnnnnnnnnnnnnnnnnnnnnnnnnnnnnnnnnnnnnnnnnnnnnnnnnnnnnnnnnnnnnnnnnnnnnnnnnnnnnnnnnnnnnnnnnnnnnnnnnnnnnnnnnnnnnnnnnnnnnnnnnnnnnnnnnnnnnnnnnnnnnnnnnnnnnnnnnnnnnnnnnnnnnnnnnnnnnnnnnnnnnnnnnnnnnnnnnnnnnnnnnnnnnnnnnnnnnnnnnnnnnnnnnnnnnnnnnnnnnnnnnnnnnnnnnnnnnnnnnnnnnnnnnnnnnnnnnnnnnnnaaagaatcagggatttgaatttgattcctttattgcaggaactattcaacttagttcccaagatgagcctgctgatgttattgataaattaaatgacttgaagagctcagtgtcccaactagaattgaaaagtttgatatcaaagtcagtaagctgagaaaaacaggaaaaaggaatggcaaatctggctcaattagaagccttgtaccactcttcttgggacagccagtttgtgagtggtggggaggactattatctcatcaatcagttgtgtgaggtaaggaaggatgaacaacttgagaaggaaaacacactagttacttggacaagttctctagcaggaaagaagatactgaaatgctagaaactgagccagtagaagatgggaggcttggggagaaaggacatgaggaaggatttctgaacaacagtggggagttcctctttaacaagcagctcgagtccatagacatcccacagtttcacagtccagttgggtcaccacttaagtcaatacagtccacataccttctgctatgaaatcttcccctcaaattcctcataaaacatacagcagcattctgatacatctgaactaaaacactcagcagacatttatctttgtattcttcaggaaatgtgttttgtcttcttttattactagtgtttaagtcattttttacttgaatcagatggtgtcatttagtaaggattttatgagttattggtttttaaaatccaaactttctttttctacatgtgagacagttttcattttaactggcatgtcatttgcacacaaaaataaagactagagcaaaataacgtaacgcaggaggagaaaagaaatgcactaagtaaagaaca

SEQ ID NO: 20084 - DNA, 1527 bp, Macaca Mulatta
  misc_feature (1)...(1527): n = A,T,C or G
caggattgttagcaaagaaagctgtggatgctggcctgaacgtgatgccttacatcaaaactagcctgtctcctgggagcggcgtggtcacctactacctacaagaaagcggagtcatgccttatctgtctcagcttgggnnnnnnnnnnnnnnnnnnnnnnnnnnnnnnnnnnnnnnnnnnnnnnnnnnnnnnnnnnnnnnnnnnnnnnnnnnnnnnnnnnnnnnnnnnnnnnnnnnnnnnnnnnnnnnnnnnnnnnnnnnnnnnnnnnnnnnnnnnnnnnnnnnnnnnnnnnnnnnnnnnnnnnnnnnnnnnnnnnnnnnnnnnnnnnnnnnnnnnnnnnnnnnnnnnnnnnnnnnnnnnnnnnnnnnnnnnnnnnnnnnnnnnnnnnnnnnnnnnnnnnnnnnnnnnnnnnnnnnnnnnnnnnnnnnnnnnnnnnnnnnnnnnnnnnnnnnnnnnnnnnnnnnnnnnnnnnnnnnnnnnnnnnnnnnnnnnnnnnnnnnnnnnnnnnnnnnnnnnnnnnnnnnnnnnnnnnnnnnnnnnnnnnnnnnnnnnnnnnnnnnnnnnnnnnnnnnnnnnnnnnnnnnnnnnnnnnnnnnnnnnnnnnnnnnnnnnnnnnnnnnnnnnnnnnnnnnnnnnnnnnnnnnnnnnnnnnnnnnnnnnnnnnnnnnnnnnnnnnnnnnnnnnnnnnnnnnnnnnnnnnnnnnnnnnnnnnnnnnnnnnnnnnnnnnnnnnnnnnnnnnnnnnnnnnnncctaactccacgagaatttaactcctatggctcccgccgaggtaatgacgnnnnnnnnnnnnnnnnnnnnnnnnnnnnnnnnnnnnnnnnnnnnnnnnnnnnnnnnnnnnnnnnnnnnnnnnnnnnnnnnnnnnnnnnnnnnnnnnnnnnnnnnnnnnnnnnnnnnnnnnnnnnnnnnnnnnnnnnnnnnnnnnnnnnnnnnnnnnnnnnnnnnnnnnnnnnnnnnnnnnnnnnnnnnnnnnnnnnnnnnnnnnnnnnnnnnnnnnnnnnggaatcaaagctgtcctggccgagagctatgagcgcattcaccgnnnnnnnnnnnnnnnnnnnnnnnnnnnnnnnnnnnnnnnnnnnnnnnnnnnnnnnnnnnnnnnnnnnnnnnnnnnnnnnnnnnnnnnnnnnnnnnnnnnnnnnnnnnnnnnnnnnnnnnnnnnnnnnnnnnnnnnnnnnnagctggatactggaaagactttccaggttgtcatgaggttcgacactgatgtggagctcacttatttcctcaaagggggcatcctcaactacatgatccgcaagatggccaagtaggagacctgcacttggtgctgcgcccagggaggaagtcgcaccaccagccagcccaggccctggtggagaggcctccccggctgcctctgggaggggtgctgccttgtagatggagcaagtgagcaccagggttttggtgccaatcctgcaggcacaaaaccagaagtttctacattctctatttttgttaatcttctctttttcc

SEQ ID NO: 20085 - DNA, 773 bp, Macaca Mulatta
  misc_feature (1)...(773): n = A,T,C or G
ttatgaaaaaataagatcactaataacatactttttctctatgagataattttaattgaaaatcgtaaccactttcttttcttatattctccctcttgtcttctgcagatgggcctctgggtccccgaggattagctgaagctacagagatgtgcactcaagagtgcttggttttgggtcactctgataattgctggatgcctcctggcttgggtccatatcaacaccccaaatctcctctctcaacctttgtaccccagaaagaatgggtgaagaaggacaagcttgtgaatgggcacaccctgaccagggcctggaaagaagacagcaacaggaaccagttcaatgaccgtaagcagtatggctccaacgaaggccatttcaacaatggcagccacatgacagacattcctctggcaaatctgaagtcttataagcaagcaggaggtgctattgagagtcctaaggagcaccaactctaagaaaaggctatatgggacctaataactttaatctaaatagacatgctaataccgtgtgtgtcagagctttatgtattcaatagatctctacaactatgccccttctagcagggatacttataactttgtgttagcaccatggagaatacaatattttgcaacatatgagagaagatagttgtagtcatgcaatcttgtttactagaattgattanactctccagagatctctccattgtgcaaatttttttttattattgcattttattttgaccctgaactgctgctatg

SEQ ID NO: 20086 - DNA, 97 bp, Macaca Mulatta
cacgccacgtcgcccagcggcatcgtggaaagaggattctgcccaagcaaaccccggagccagaggggaagggggagcgccattctgcgccccctac

SEQ ID NO: 20087 - DNA, 901 bp, Macaca Mulatta
gggagactgcagataataagatgtaaacattaacacctcgtgaatacaatttaacttccatttagctatagctttactcagcatgactgtagataaggatagcagcaaacaatcattggagcttaatgaacatttttaaaaataagtaccaaggcctcccttctacttgtgagttttgaaatcgttctttttattttcagggataccgtttaatttaattatatgatttgcctgcactcagtttattccctactcaaatctcagccccatgttgttctttgttattgtcagaacctggtgagttgttttgaacagaactgtttttttctcccttcctgtaagatgatgtgactgcacaagagcactgcagtgtttttcataataaacttgtgaactaagaactgagaaggtcagattttaattgtatcaatgggcaagactggtgctgtttattaaagaagttaaatcaattgagtgaattttagaatttgtagacttgtagataagatgaaaatcaagggcactacataacctctgggtaactccttgacattcttcagaattaacttcagggtttatttggtatttgacatattacgagtttggtcacatttgttggtgttggccactttggtgggtgtccttcctggcttatataacttgggttgtgtaagaagaggaaatcgtgtgcgtgcgttcagtaaaagagttaagattgtaaaaccatataacttgagatttaagtctttgggttttgttttaataaaacagcatgttttcaggtagagcttaacaaactaaatgatgtgtttacttagtgcagtttctggttatgaatattatattgctatgtaattaatggccttaatgtgcatgattactctgacatatcaacgtgaat

SEQ ID NO: 20088 - DNA, 185 bp, Macaca Mulatta
  misc_feature (1)...(185): n = A,T,C or G
gaacaccatggaggcgctgcccgcctgcctgctccgagacgcggcccaggaggccctgggcgtggctgtcataggcatcgacgaggggcagtttnttccctgacatcgtggagttctgcgaggtcatggccaacgctgggaagactgtaattgtggctgcactggatgggacgttccagaggaag

SEQ ID NO: 20089 - DNA, 897 bp, Macaca Mulatta
  misc_feature (1)...(897): n = A,T,C or G
aggaactgaaacatttgatcttggaggcagcagatggctttctgcttattgtctcatgtgagacaggcaggnnnnnnnnnnnnnnnnnnnnnnnnnnnnnnnnnnnnnnnnnnnnnnnnnnnnnnnnnnnnnnnnnnnnnnnnnnnnnnnnnnnnnnnnnnnnnnnnnnnnnnnnnnnnnnnnnnnnnnnnnnnnnnnnnnnnnnnnnnnnnncagggcgtatcctggatctaaagactggaacaatgaaaaaggaaggtcaacagnnnnnnnnnnnnnnnnnnnnnnnnnnnnnnnnnnnnnnnnnnnnnnnnnnnnnnnnnnnnnnnnnnnnnnnnnnnnnnnnnnnnnnnnnnnnnnnnnnnnnnnnnnnnnnnnnnnnnnnnnnnnnnnnnnnnnnnnnnnnnnnnnnnnnnnnnnnnnnnnnnnnnnnnnnnnnnnnnnnnnnnnnnnnnnnnnnnnnnnnnnnnnnnnnnnnnnnnnnnnnnnnnnnnnnnnnnnnnnnnnnnnnnnnnnnnnnnnnnnnnnnnnnnnnnnnnnnnnnnnnnnnnnnnnnnnnnnnnnnnnnnnnnnnnnnnnnnnnnnnnnnnnnnnnnnnnnnnnnnnnnnnnnnnnnnnnnnnnnnnnnnnnnnnnnnnnnnnnnnnnnnnnnnnnnnnnnnnnnnnnnnnnnnnnnnnnnnnnnnnnnnnnnnnnnnnnnnnnnnnnnnnnnnnnnnnnnnnnnnnnnnnnnnnnnnnnnnnaggtggtgaaattaaaaggccaagtgctgtctgtcatgttccggttccggtctaagaaccaagaatggctctggatgagaaccagctcctttactttccagaacccttactcagatgaaattgagtacatcatctgtaccaacaccaatgtgaag

SEQ ID NO: 20090 - DNA, 766 bp, Macaca Mulatta
  misc_feature (1)...(766): n = A,T,C or G
gggttggagatgtcaacaactttgttgttgggagtgaagaaggttctgtgtacacagcatgccgccatggcagcaaagctggaatcagtgagatgtttgaagggcatcaaggaccaatcactggcatccattgtcatgcagctgttggagcagtagacttctcacatctttttgtcacttcatcatttgactggacagtaaagctttggacaactaagaataacaagcctttgtattcatttgaagataatgcagactatgtttatgatgttatgtggtcacctacccacccagccctgtttgcctgtgtggatggcatggggagattggatttgtggaatctcaataatgacacagaggtaccaactgccagcatttctgtggagggtaatcctgctcttaatcgtgtgagatggacccattctggcagagagattgctgtgggtgattctgaaggacagattgttatatacgatgtgggagagattgctgttccccgcaatgatgaatgggcacggtttggccgaacacttgcagaaataaatgcaaaccgagctgatgcagaggaggaagcagctacccgaatacctgcttagttcctgaanaggggagtgtaactagtggatttgggaaaggttcttaagtagatcccaagattatttgcatgcttctatctaaatgataattaaaaggaaatttcatggattaaaccatgggnttttatgcagtaaggcaacttancatgtccnntttatatataacatgn

SEQ ID NO: 20091 - DNA, 1263 bp, Macaca Mulatta
  misc_feature (1)...(1263): n = A,T,C or G
agactgtgccctgtccacagcgcctcctgcatgtcctgctgccctgagctgtcccgagctaggtgacagcgtgccacgctgccaccatgaacgaggtgtctgtcatcaaagaaggctggctccacaagcgnggtgaatacatcaagacctggaggccacggtacttcctgctgaagagcgacggctccttcattgggtacaaggagaggcccgaggcccctgatcagacccttccccccttaaacaacttctctgtagcagnnnnnnnnnnnnnnnnnnnnnnnnnnnnnnnnnnnnnnnnnnnnnnnnnnnnnnnnnnnnnnnnnnnnnnnnnnnnnnnnnnnnnnnnnnnnnnnnnnnnnnnnnnnnnnnnnnnnnnnnnnnnnnnnnnnnnnnnnnnnnnnnnnnnnnnnnnnnnnnnnnnnnnnnnnnnnnnnnnnnnnnnnnnnnnnnnnnnnnnnnnnnnnnnnnnnnnnnnnnnnnnnnnnnnnnnnnnnnnnnnnnnnnnnnnnnnnnnnnnnnnnnnnngaccatgaatgatttcgactatctcaaactccttggcaagggaacctttggcaaagtcatcctggtgcgggagaaggccactggccgctattacgccatgaagatcctgcggaaggaagtcatcattgccaagnnnnnnnnnnnnnnnnnnnnnnnnnnnnnnnnnnnnnnnnnnnnnnnnnnnnnnnnnnnnnnnnnnnnnnnnnnnnnnnnnnnnnnnnnnnnnnnnnnnnnnnnnnnnnnnnnnnnnnnnnnnnnnnnnnnnnnnnnnnnnnnnnnnnnnnnnnnnnnnnnnnnnnnnnnnnnnnnnnnnnnnnnnnnnnnnnnnnnnnnnnnnnnnnnnnnnnnnnnnnnnnnnnnnnnnnnnnnnnnnnnnnnnnnnnnnnnnnnnnnnnnnnnnnnnnnnnnnnnnnnnnnnnnnnnnnnnnnnnnnnnnnnnnnnnnnnnnnnnnnnnnnnnnnnnnnnnnnnnnnnnnnnnnnnnnnnnnnnnnnnnnnnnnnnnnnnnnnnnnnnnnnnaggtgctggaggacaatgactatggccgggccgtggactggtgggggctgggtgtggtcatgtacgagatgatgtgcggccgcctgcctttctacaaccaggaccacgagcgcctcttcgagctcatcctcatggaagagatccgcttcccgcgcacgctcagccccgaggccaagtccctgcttgccgggctgcttaagaaggaccccaagcagag

SEQ ID NO: 20092 - DNA, 91 bp, Macaca Mulatta
tgagattcacaatgttgaaagcccttttcctaactatgctgactctggcgctcgtcaagtcacaggacaccgaagaaaccatcacgtacac

SEQ ID NO: 20093 - DNA, 3859 bp, Macaca Mulatta
  misc_feature (1)...(3859): n = A,T,C or G
cttcagccgccatctgtataaagggctcgtgactgaaaattgtgaggcaggnnnnnnnnnnnnnnnnnnnnnnnnnnnnnnnnnnnnnnnnnnnnnnnnnnnnnnnnnnnnnnnnnnnnnnnnnnnnnnnnnnnnnnnnnnnnnnnnnnnnnnnnnnnnnnnnnnnnnnnnnnnnnnnnnnnnnnnnnnnnnnnnnnnnnnnnnnnnnnnnnnnnnnnnnnnnnnnnnnnnnnnnnnnnnnnnnnnnnnnnnnnnnnnnnnnnnnnnnnnnnnnnnnnnnnnnnnnnnnnnnnnnnnnnnnnnnnnnnnnnnnnnnnnnnnnnnnnnnnnnnnnnnnnnnnnnnnnnnnnnnnnnnnnnnnnnnnnnnnnncaggtttttgctaccgacctggacagcggtttgaatggcctgattgagtattctattctctctggcaaccaagaagaagcattccagattgatgcgctaagtggtgtgataacaacaaaagcgattctagattacgagcacaccagctcctacagnnnnnnnnnnnnnnnnnnnnnnnnnnnnnnnnnnnnnnnnnnnnnnnnnnnnnnnnnnnnnnnnnnnnnnnnnnnnnnnnnnnnnnnnnnnnnnnnnnnnnnnnnnnnnnnnnnnnnnnnnnnnnnnnnnnnnnnnnnnnnnnnnnnnnnnnnnnnnnnnnnnnnnnnnnnnnnnnnnnnnnnnnnnnnnnnnnnnnnnnnnnnnnnnnnnnnnnnnnnnnnnnnnnnnnnnnnnnnnnnnnnnnnnnnnnnnnnnnnnnnnnnnnnnnnnnnnnnnnnnnnnnnnnnnnnnnnnnnnnnnnnnnnnnnnnnnnnnnnnnnnnnnnnnnnnnnnnnnnnnnnnnnnnnnnnnnnnnnnnnnnnnnnnnnnnnnnnnnnnnnnnnnnnnnnnnnnnnnnnnnnnnnnnnnnnnnncaggtcacagttcctgaatcaacacctgtgggctattcagtgctgactgtgtcagctacagacttagaaagtaatgagaacatttcttacagaattatatcctcttctaaggaattctccattgatcctaagaatggnnnnnnnnnnnnnnnnnnnnnnnnnnnnnnnnnnnnnnnnnnnnnnnnnnnnnnnnnnnnnnnnnnnnnnnnnnnnnnnnnnnnnnnnnnnnnnnnnnnnnnnnnnnnnnnnnnnnnnnnnnnnnnnnnnnnnnnnnnnnnnnnnnnnnnnnnnnnnnnnnnnnnnnnnnnnnnnnnnnnnnnnnnnnnnnnnnnnnnnnnnnnnnnnnnnnnnnnnnnnnnnnnnnnnnnnnnnnnnnnnnnnnnnnnnnnnnnnnnnnnnnnnnnnnnnnnnnnnnnnnnnnnnnnnnnnnnnnnnnnnnnnnnnnnnnnnnnnnnnnnnnnnnnnnnnnnnnnnnnnnnnnnnnnnnnnnnnnnnnnnnnnnnnnnnnnnnnnnnnnnnnnnnnnnnnnnnnnnnnnnnnnnnnnnnnnnnnnnnnnnnnnnnnnnnnnnnnnnnnnnnnnnnnnnnnnnnnnnnnnnnnnnnnnnnnnnnnnnnnnnnnnnnnnnnnnnnnnnnnnnnnnnnnnnnnnnnnnnnnnnnnnnnnnnnnnnnnnnnnnnnnnnnnnnnnnnnnnnnnnnnnnnnnnnnnnnnnnnnnnnnnnnnnnnnnnnnnnnnnnnnnnnnnnnnnnnnnnnnnnnnnnnnnnnnnnnnnnnnnnnnnnnnnnnnnnnnnnnnnnnnnnnnnnnnnnnnnnnnnnnnnnnnnnnnnnnnnnnnnnnnnnnnnnnnnnnnnnnnnnnnnnnnnnnnnnnnnnnnnnnnnnnnnnnnnnnnnnnnnnnnnnnnnnnnnnnnnnnnnnnnnnnnnnnnnnnnnnnnnnnnnnnnnnnnnnnnnnnnnnnnnnnnnnnnnnnnnnnnnnnnnnnnnnnnnnnnnnnnnnnnnnnnnnnnnnnnnnnnnnnnnnnnnnnnnnnnnnnnnnnnnnnnnnnnnnnnnnnnnnnnnnnnnnnnnnnnnnnnnnnnnnnnnnnnnnnnnnnnnnnnnnnnnnnnnnnnnnnnnnnnnnnnnnnnnnnnnnnnnnnnnnnnnnnnnnnnnnnnnnnnnnnnnnnnnnnnnnnnnnnnnnnnnnnnnnnnnnnnnnnnnnnnnnnnnnnnnnnnnnnnnnnnnnnnnnnnnnnnnnnnnnnnnnnnnnnnnnnnnnnnnnnnnnnnnnnnnnnnnnnnnnnnnnnnnnnnnnnnnnnnnnnnnnnnnnnnnnnnnnnnnnnnnnnnnnnnnnnnnnnnnnnnnnnnnnnnnnnnnnnnnnnnnnnnnnnnnnnnnnnnnnnnnnnnnnnnnnnnnnnnnnnnnnnnnnnnnnnnnnnnnnnnnnnnnnnnnnnnnnnnnnnnnnnnnnnnnnnnnnnnnnnnnnnnnnnnnnnnnnnnnnnnnnnnnnnnnnnnnnnnnnnnnnnnnnnnnnnnnnnnnnnnnnnnnnnnnnnnnnnnnnnnnnnnnnnnnnnnnnnnnnnnnnnnnnnnnnnnnnnnnnnnnnnnnnnnnnnnnnnnnnnnnnnnnnnnnnnnnnnnnnnnnnnnnnnnnnnnnnnnnnnnnnnnnnnnnnnnnnnnnnnnnnnnnnnnnnnnnnnnnnnnnnnnnnnnnnnnnnnnnnnnnnnnnnnnnnnnnnnnnnnnnnnnnnnnnnnnnnnnnnnnnnnnnnnnnnnnnnnnnnnnnnnnnnnnnnnnnnnnnnnnnnnnnnnnnnnnnnnnnnnnnnnnnnnnnnnnnnnnnnnnnnnnnnnnnnnnnnnnnnnnnnnnnnnnnnnnnnnnnnnnnnnnnnnnnnnnnnnnnaaggacattgtcaatcagcacagacactcaaactccagtggccactgttctgtggaaggagaaactgcggaagataaagaaatccagaggataaatgagcatccctacagaaagggctcagactcagctctgagtgaccgcgagtccagggtgccagactcgggtatcccgagggactcagaccagctctcctgcctatctggggaaaccgaggtgatggtgactgctgaaacagcagaagccagccaaacatttggggaaggagatcaaggggaaggctgcagcaccacctgtgctcaaaataatgtgttaccccagacagttcagaagagagaagcaaaagagagcatcctggctgatgttagaaaagagtctgtctttatttcaggtgatcaggaagtaaggtgtgcagctctttcaactcagacaacctctgatcatgatggaagaggcaactatcactggaattatcttctcagttgggaacccaagtttcaacctcttgcctcagtgtttaatgatatcgcaaaactaaaggatgaatatttgcatattcctggcattccanaagagaaganatattttgtttttccaccccctttgataacagcagtagcccagcctgggattaaagcagtcccaccaagaatgccggcagtaaccctgnnnnnnnnnnnnnnnnnnnnnnnnnnnnnnnnnnnnnnnnnnnnnnnnnnnnnnnnnnnnnnnnnnnnnnnnnnnnnnnnnnnnnnnnnnnnnnnnnnnnnnnnnnnnnnnnnnnnnnnnnnnnnnnnnnnnnnnnnnnnnnnnnnnnnnnnnnnnnnnnnnnnnnnnnnnnnnnnnnnnnnnnnnnnnnnnnnnnnnnnnnnnnnnnnnnnnnnnnnnnnnnnnnnnnnnnnnnnnctcaccattggtcatgaatgaatgaacaaaacattttcagccagcaactcgatattgggctcatttttatcgaaaagcaagtactataatttagttaagagtttttaaaacttccccattaaagtttctcaaattt

SEQ ID NO: 20094 - DNA, 400 bp, Macaca Mulatta
  misc_feature (1)...(400): n = A,T,C or G
ggttccaccagccttacctttacctacacaccagaaccagggccgcggccacattgcagtgcagcaggagcaatccttcgagccaattcaagccaggtgccccctaatgaatcaaacacaaacagcgagggaagttacacaaacgccagcacaaattcaaccagtgtcacatcatctacagccacagtggtatcctaactaccgtctttttgctaggacttaaactgacttgagtgtggcaaaaagtcaaaaaaggagaaaaaatgaacaatcttttgtggtttcttgggaacttttcataccaggtgatactattcaaaaaccccgttatctctctgcaagtgctgatttgaaatgcagaagccnnnnnannnannnnaannnnaaanaaaaccttgtc

SEQ ID NO: 20095 - DNA, 585 bp, Macaca Mulatta
  misc_feature (1)...(585): n = A,T,C or G
aagtcatgtttctttaattgttcaagaaccatgttgccaccatgaggctggtctggaactaggggagggtaaaagacaggagcctcggtattacctaccctggacagagcagagcactggcctgagagctgagagcctgggcgtggagcttcgattggcaggcagaagagatgcccaaaggaggcagcgagaacttggaattgtatctcctgtggccctggattcttagaaaaatcatggcttcccaactggaagggcaacaggacttggggtgaagtaaatggtagactgcccagggccgggtgacacagaacaagaacatgaatgtactttaaacatttttcctactccaggaacaattgggattccaatagggaggaggctggaggagtctcagttactagttccttctagttcccccaattcaccagtctagctgcttgcctagaagtattttcctctccattccactgtagaatttgattcaggaaaatggcggcatgtgggnnnnnnnnnnnnnnnnnnnnaaacacaatgtacacatattacagcctacacatgacacaagatttagcaaaataatgt

SEQ ID NO: 20096 - DNA, 690 bp, Macaca Mulatta
tactttggttgcatgaaggctgcccccatgaaagaagcaaacatccgaggacaaggtggcttggcctacccaggtgtgcggacccatgggactctggagagcgtgaatgggcccaaggcaggttcaagaggcctgacatcattggctgacacttttgaacacgtgatagaagagctgttggatgaggaccagaaagttcggcccaatgaagaaaacaataaggacgcagacttgtacacgtccagggtgatgctcagtagtcaagtgcctttggagcctcctcttctctttctgctggaggaatacaaaaattacctggatgctgcaaacatgtccatgagggtccggcgccactctgaccctgcccgccgaggggagctgagcgtgtgtgacagtattagcgagtgggtaacggcggcagacaaaaagactgcagtggacatgtcgggcgggacggtcacagtccttgaaaaggtccctgtatcgaaaggccaactgaagcaatacttctacgagaccaagtgcaatcccatgggttacacgaaggaaggctgcaggggcatagacaaaaggcattggaactcccagtgccgaactacccagtcgtatgtgcgggcccttaccatggatagcaaaaagagaattggctggcgattcataaggatagacacttcttgtgtatgtacattg

SEQ ID NO: 20097 - DNA, 666 bp, Macaca Mulatta
ccgccgattcctcctccctggtcgccgcgtccttggctggcgtcagaaaaatggctacaaacttcctagtacatgagaagatctggtttgacaagttcaaatatgacgatgcagaaaggagattctacgagcagatgaacgggcctgtggccggtgcctcccgccaggagaatggcgccagcgtgatccttcgtgacattgcgagagccagagagaacatccagaaatccctggccggaacctcaggccccggggcctccagcggccccagcggagaccacagcgagcttgtcgtccggatcgccagtctggaagtggagaaccagagcctgcgtggcgtggtacaggagctgcagcaggccatctccaagctggaggcccggctgaacgtgctggagaagagctcgcctggccaccgggccacggccccacagacccagcacgtgtctcccatgcgccaagtggagcccccggccaagaagccagccacaccagcagaggatgacgaggatgatgacattgacctgtttggcagcgacaatgaggaggaggacaaggaggcggcacagctgcgggaggagcggctgcggcagtacgcggagaagaaggccaagaagcctgcactggtggccaagtcctccatcctgctggatgtcaagccttggg

SEQ ID NO: 20098 - DNA, 595 bp, Macaca Mulatta
ttctaagtgtaacctcagtatttatgtaatttgtacaggtgccatgccccaaccccctcctcgcgctttggggtagacttgagggtgggccagcataggggggagggtcttttaccctgtgtcagagcctaccttcaccacctatatccagaaagggagctttttcagaaacggggcagcagtggggtgaaattttcttaaccccaagactgccttcagtaggaacaagctggcttctgtgattaggtgaaggggtgggggaagattttacgcacagactagttatcaaggggatgatttgccgacatgtttgagaaccccctaacctctaaccctcattgctgtcttgccccagtttggggtgccaagatggaagtcacctttctgggctttctcctggagatagctggggcttatgggtggctttcaaggctggggcatggcaaatcaggcgccagagagcaggcgagcttgggactcaggtctgtaactgcccagccccttttctctgctcttgtatcactccaccaacactcactcactcactactcccccagccatgggaggagacctttgatgaattcttcctctcctt

SEQ ID NO: 20099 - DNA, 1788 bp, Macaca Mulatta
  misc_feature (1)...(1788): n = A,T,C or G
tgtaaacagtttatttagaaacagataggtacctgtttgcattgcagaatataaaacttggtttacactataaaaaataaccaatatccaaattcaagagagctagcattcacagaacacacaatatgggtgtgtagctactgttcaccagcctcaggcttgatttnnnnnnnnnnnnnnnnnnaaagggatcattcaagattaccgtacaatgcctcctgctgtcttagcagattaaggtttgcttttcaagtgcgtgattttaacataaagtctgggctctctgcacctagtgaggtgtgaggctctctcgccacacagttcacactcacttaactaagccagagttggtaggttattaaattatcactggtcttcttaacagtaaaaatggggaatccagagggcaggagattgcgccgctccggctgcaccgcgctcgctccgagtttcgggctcctgctaagctagcgccgccgtcgtctcccttcagtcgccgtcatgattatctaccgggacctcatcagccacgatgagatgttctccgacatctacaagatccgggagatcgcggacgggctgtgcctggaggtggaggggaagatggtcagtaggacagaaggtaacattgatgactcgctcattggtggaaatgcctccgctgaaggcccagagggcgaaggtaccgaaagcacagtaatcactggtgtcgatattgtcatgaaccatcacctgcaggaaacaagtttcacgaaagaagcctacaagaagtacatcaaagattacatgaaatcaatcaaaggcaaacttgaagaacagagaccagaaagagtaaaaccttttatgacaggggctgcagaacaaatcaagcacatccttgctaatttcaaaaactaccagttctttattggtgaaaacatgaatccagatggcatggttgctctattggactaccgtgaggatggtgtgaccccatatatgattttctttaaggatggtttagaaatggaaaaatgttaacaaatttggcaattactttggatctatcacctgtcatcataactggcttctgcttgtcatccacacaacaccaggacttaaaagacaaatgggactgatgtcatcttgagctcttcatttattttgaccgtgatttatttggagtggaggcattgtttttaagaaaaacatgtcatgtaggttgtctaaaaataaaatgcatttaaactcaaatatttgagagaatgcctttttagtttaatgcatagttaaattcatcctgtagtgttccctggaaggaactagaagcctgggttgtaggcctactactcatcaatttaacttctacagttggaagactactactgggaactgggaattttaaaaaagaatccaaggtttttgaattgtgaagtttgcaaataaaaggggaaagaccatgctcatagcagtgccaacatctgaagtgtggagccttacccatttcatcacctacaactgtaagtagttaactgggaagagattacccagtaaaataaaaagaagactcattcannnnnnnnnnnnnnnnnnnnggttagtcaaattcgcacccctatctcaaataatccacaaatattgctacaaactttaaacagcaaaaaaaaaatcaatacaatgtagcacgaaaaaatacctccccactcaacaagccaaaaatctaaagcagtggggggtggtggggccgtttatagctactaaagaaaattttcttcaacaacttttttgtgggggcgccgcccccaaaaa

SEQ ID NO: 20100 - DNA, 254 bp, Macaca Mulatta
cacaggatcccagcaatgaactgttctagggcaagtggcttcctgcccaaactggatgggacacgtggggagtggggtggggggagttatttccgaggcccctccctgtttccccagcaattaaaacggactcatctctggccccatggccttggtctcagcacacagcactcttgactcattagtctgttgtaccaagatggaattcatctaaaaagaggactgcctgaaaagaggaaggatggagggggtgt

SEQ ID NO: 20101 - DNA, 405 bp, Macaca Mulatta
ggggctgctgtttcgatgacagcgttcgtgggttcccctggtgcttccatcctaacgccatcgacatccctccagaaggtacgacctttttataccatgggttctgaagatttagaattagttagaaaagccacataatactgcagaggctctgatcggcatcaccatctgtgcctttccccggagtcgtgtccgcaggtggtggcgcaatggggtagcctgagtcaggctgcattcaggtccgggaatagaaagacagggctgaggggcttgggaagaaacctgatttttccccggcttctcttcacatctctaaccacaagcctgtgaagagccactattggtaatgttttccagcttgcctaggatagagggagaaggcatgacaaaatttgaagacagttc

SEQ ID NO: 20102 - DNA, 787 bp, Macaca Mulatta
ctcgacgaggcactccaccaccactgtgtcaacttccccgtctccatccctgtccactccacgaacagtgcgctgagctaccttcagagtcccatcacgacctctcccagctgctgaaaggctgtgggaggtgaggctcttcacatcccactgggactccaggctccttgagaggagaaatgcagtaactctgggaggggctcgagaggggtggtctttatttatttaacttcacccgagttccactgggttcctaagcagtcgttgtgatgacttagcgtcaagacatctgctgaactcagcacattcgggaccaatatgtagtgggtacatcaagtccctctgacaaaatggggcagaagagaaaggactcagtgtgtgagccagtttctttttgctcgctcctgttttttgtagaatctcttcatgcttgacatacctaccagtattatcattcccgacgacacatatacatatgagaatataccttatttatttttgtggaggtgtctgcctccacaaatgtcattgtctactcctagaagaaccaaatacctcaatttttgtttttgagtactgtactatcctgtaaatatatcgtaagcaggtttgttttcagcactgatggaaaataccagtgttggggtttttttttagttgccaacagttgtatgtttgctgattatttatgacctgaaataatatatttcttcttctaagaagacattttgttacataaggataacttttttatacaatggaataaattacggcatttctattgaaa

SEQ ID NO: 20103 - DNA, 519 bp, Macaca Mulatta
caggctcacgcagacgctggccacaccatccacctggccgcctccgtggaccctcggtggcttttgtaaattaatttttgatgacattttcagttttaagatttctgaccagcagtctcttacctgtatatttgtaaatatatcatgtttctgtgaaaatgtattatgaaataaaatgggaggaaacaccttttctagctagaccctggcgtggtttcttccttctctccttggttggcttctgggtctgtttgactgtttgtcatctattatacgtgtggtcatggaggtgtggcggggacagatgggcagcgctgggcctccctgtcctgggcccccagccctctgacagcagccgctggactcccttccccatcccatgcctcctgcgatcaccgcacgccccttcccaggccgtcagctccccgtgggcgtgtgtccctgccggcacccatgctgcagctgctggacaggccctccctgcgcggtggcacacagcaggggagcagcccggccccg

SEQ ID NO: 20104 - DNA, 1807 bp, Macaca Mulatta
  misc_feature (1)...(1807): n = A,T,C or G
gcagagggagcgagcgggcgggccggcgagggtggaagatccgggcgagcagagctgcacctcgggcgtcgtgggaagggagatacggagcgaaaagggggcttcgcctccggcccagccctcccgctgaccccccagacagcggtccgcaacccttgccgcatccacgaaactttgcccatagcagggggcgggcactttgcactggaacttacaacaccctagcaaggacgctactctcccgacgcggggaggctattctgcctatttggggacacttccccgccgctgccaggacccgctcctctgaaaggctctccttgnnnnnnnnnnnnnnnnnnnnnnnnnnnnnnnnnnnnnnnnnnnnnnnnnnnnnnnnnnnnnnnnnnnnnnnnnnnnnnnnnnnnnnnnnnnnnnnnnnnnnnnnnnnnnnnnnnnnnnnnnnnnnnnnnnnnnnnnnnnnnnnnnnnnnnnnnnnnnnnnnnnnnnnnnnnnnnnnnnnnnnnnnnnnnnnnnnnnnnnnnnnnnnnnnnnnnnnnnnnnnnnnnnnnnnnnnnnnnnnnnnnnnnnnnnnnnnnnnnnnnnnnnnnnnnnnnnnnnnnnnnnnnnnnnnnnnnnnnnnnnnnnnnnnnnnnnnnnnnnnnnnnnnnnnnnnnnnnnnnnnnnnnnnnnnnnnnnnnnnnnnnnnnnnnnnnnnnnnnnnnnnnnnnnnnnnnnnnnnnnnnnnnnnnnnnnnnnnnnnnnnnnnnnnnnnnnnnnnnnnnnnnnnnnnnnnnnnnnnnnnnnnnnnnnnnnnnnnnnnnnnnnnnnnnnnnnnnnnnnnnnnnnnnnnnnnnnnnnnnnnnnnnnnnnnnnnnnnnnnnnnnnnnnnnnnnnnnnnnnnnnnnnnnnnnnnnnnnnnnnnnnnnnnnnnnnnnnnnnnnnnnnnnnnnnnnnnnnnnnnnnnnnnnnnnnnnnnnnnnnnnnnnnnnnnnnnnnnnnnnnnnnnnnnnnnnnnnnnnnnnnnnnnnnnnnnnnnnnnnnnnnnnnnnnnnnnnnnnnnnnnnnnnnnnnnnnnnnnnnnnnnnnnnnnnnnnnnnnnnnnnnnnnnnnnnnnnnnnnnnnnnnnnnnnnnnnnnnnnnnnnnnnnnnnnnnnngaggaggaacaagaagaggaggaagaaatcgatgttgtttctgtgaaaagaggcaggcccctggcaaaaggtcagagtcgggatcaccttctgctggaggccacagcaaacctcctcacagcccactggtcctcaagaggtgccacgtctccacacatcagcacaactacgcggcgcctccctccactcggaaggactatcctgctgccaagagggtcaagttggacagtgtcagagtcctgagacagatcagcaacaaccgaaaatgcaccagccccaggtcctcggacaccgaggagaatgacaagaggcgaacacacaacgtcttggagcgccagaggaggaacgagctaaaacggagcttttttgccctgcgtgaccagatcccggagttggaaaacaatgaaaaggcccccaaggtagttatccttaaaaaagccacagcatacatcctgtccgtccaagcagaggagcaaaagctcatttctgaaaaggatttgttgcggaaacgacgagaacagttgaaacacaaacttgaacagctacggaactcttgtgcataaggaaaaggaaggaaaaagattctttctaacagagctggtcccaatcagtcacctatgaacttgtttcaaatgcatgatcaaatgcaacctcgcaaccttggctgagt

SEQ ID NO: 20105 - DNA, 166 bp, Macaca Mulatta
caggtccatcatgcggtctctgctggaagcagtgagctttctccatgccaacaacattgtgcatcgagatctgaagcccgagaatattctcctagatgacaatatgcagatccgactttcagatttcgggttctcctgccacttggaacctggcgagaagcttcga

SEQ ID NO: 20106 - DNA, 712 bp, Macaca Mulatta
  misc_feature (1)...(712): n = A,T,C or G
ggctgcccagggattgccaggagctgtttgaagatggggagaggcagagtggactatttgagatccagcctcaggggtctccgccatttttggtgaactgcaagatgacctcannnnnnnnnnnnnnnnnnnnnnnnnnnnnnnnnnnnnnnnnnnnnnnnnnnnnnnnnnnnnnnnnnnnnnnnnnnnnnnnnnnnnnnnnnnnnnnnnnnnnnnnnnnnnnnnnnnnnnnnnnnnnnnnnnnnnnnnnnnnnnnnnnnnnnnnnnnnnnnnnnnnnnnnnnnnnnnnnnnnnnnnnnnnnnnnnnnnnnnnnnnnnnnnnnnnnnnnnnnnnnnnnnnnnnnnnnnnnnnnnnnnnnnnnnnnnnnnnnnnnnnnnnnnnnnnnnnnnnnnnnnnnnnnnnnnnnnnnnnnnnnnnnnnnnnnnnnnnnnnnnnnnnnnnnnnnnnnnnnnnnnnnnnnnnnnnnnnnnnnnnnnnnnnnnnnnnnnnggaggctggtggtttggcacctgcagccattccaacctcaatggccagtacttccgctccattccacagcagcggcaggagcttaagaaaggaatcttctggaagacttggcggggccgctactacccgctgcaggccaccaccatgttgatccagcccacggcggcagaggcagcctcctagcctcctggttgggcctggtcccaagcgcacgaaggacgg

SEQ ID NO: 20107 - DNA, 2107 bp, Macaca Mulatta
  misc_feature (1)...(2107): n = A,T,C or G
ggagtggactgactacaggctgagctgggaccctgcggagcacgaaggcatcgatttgctccgcatcacggcggaatccgtgtggctccctgacgtggtgctnctgaacannnnnnnnnnnnnnnnnnnnnnnnnnnnnnnnnnnnnnnnnnnnnnnnnnnnnnnnnnnnnnnnnnnnnnnnnnnnnnnnnnnnnnnnnnnnnnnnnnnnnnnnnnnnnnnnnnnnnnnnnnnnnnnnnnnnnnnnnnnnnnnnnnnnnnnnnnnnnnnnnnnnnnnnnnnnnnnnnnnnnnnnnnnnnnnnnnnnnnnnnnnnnnnnnnnnnnnnnnnnnnnnnnnnnnnnnnnnnnnnnnnnnnnnnnnnnnnnnnnnnnnnnnnnnnnnnnnnnnnnnnnnnnnnnnnnnnnnnnnnnnnnnnnnnnnnnnnnnnnnnnnnnnnnnnnnnnnnnnnnnnnnnnnnnnnnnnnnnnnnnnnnnnnnnnnnnnnnnnnnnnnnnnnnnnnnnnnnnnnnnnnnnnnnnnnnnnnnnnnnnnnnnnnnnnnnnnnnnnnnnnnnnnnnnnnnnnnnnnnnnnnnnggagagaagatggggctctcaatctttgccctgctgacccttactgtgttcctgctgctactggccgacaaagtacctgagacctccctatcggtacccattattatcaagtacctcatgtttaccatggtcctcgtcaccttctcagtcatccttagtgtcgtggttctcaacctgcaccaccgctcaccccacacccaccaaatgcccctttgggtccgtcagnnnnnnnnattcacaaactgccgccgtactgggtttaaaaaggcccaagcccgagagagaactgatgccggagccccctcactgttcttctccaggaagtggctgggtcgggggaacagatgaatatntcatccggaagccgccaagtgattttctcttccccaaacccaacaggnnnnnnnnnnnnnnnnnnnnnnnnnnnnnnnnnnnnnnnnnnnnnnnnnnnnnnnnnnnnnnnnnnnnnnnnnnnnnnnnnnnnnnnnnnnnnnnnnnnnnnnnnnnnnnnnnnnnnnnnnnnnnnnnnnnnnnnnnnnnnnnnngctgaaggaggactggcagtttgtggccatggtagtggaccgcctcttcctgtggactttcatcatcttcaccagcgttggaaccctagtcattttcctggacgccacgtaccacttgccccctccagacccctttccttgaagactggagggtcgagacccaggccctctaccagttgaagtgagagtttggtgatactgtcaagccatatccttctctgcctcttaactccttcactaggaatccgggcctcttatttcgtttctggggactgcattggactgagggctgggtaggcaggtgtcttggacccacctgaaatgcactatcatctgatttcctctttgggatcttgaagaagctcttttgggtatcaacacctaggttgccagtgaaatagaacaaagaacaggaactagattgtaagccttatgaggtcaagaaatgtgtcttnnnnnngcggtggctctcgcctgcaatcccagcactttgggannnnnnnnnnnnnnnnnnnnnnnnnnnnnnnnnnnnnnnnnnnnnnnnnnnnnnnnnnnnnnnnnnnnnnnnnnnnnnnnnnnnnnnnnnnnnnnnnnnnnnnnnnnnnnnnnnnnnnnnnnnnnnnnnnnnnnnnnnnnnnnnnnnnnnnnnnnnnnnnnnnnnnnnnnnnnnnnnnnnnnnnnnnnnnnnnnnnnnnnnnnnnnnnnnnnnnnnnnnnnnnnnnnnnnnnnnnnnnnnnnnnnnnnnngtgtcttgttcactgtaacatccccagtgccatgcacaggtcctgacctatagtaagtgcttaacatttgttgaataggggaaataaatttctggaagtaaatacagcaattaataatgtttataagctgggcatggtcgctcaggccagtaatcccagtgacttgggaggctgaggtgggaggattacttgaaccccacagtttgagaccagcctgggcaacatagtgagactctgtctc

SEQ ID NO: 20108 - DNA, 255 bp, Macaca Mulatta
atatcccctatttaacagggtctctagtgctgtgaaaaaaaaaatgctgaacattgcatataacttatattgtaagaaatactgtacaatgactttattgcatctgggtagctgtaaggcatgaaggatgccaagaagtttaaggaatatgggagaaatagagtgtggaaattaagaagaaactaggtctgatattcaaaaggacaaactgccagttttgtttcctttcactggccacagttgtttgatgcatta

SEQ ID NO: 20109 - DNA, 703 bp, Macaca Mulatta
tcattcttcagggccttgatggacctgtttttactcaacccaaatatataactattttgaaggaaggagaacccattggcacaaatgtgatatcaatagaagcagctagccccagaggatctgaggccccagtggagtattacattgtttcagttcgttgtgaagaaaaaactgttggacgcctctttactattggacgacatactggtataattcagactgcagccattctggaccgggagcaaggagcatgtctttacctggtggatgtttatgccatagaaaaatcaactgcttttcccagaacacagagagcagaggtaatgattttgtagtcatttattatttgttgatgtgctttttagaaaggtcattttctttctatttactctctataattgtttaccttcattgtttattgttaaatttatgaacaggaacacctaaaaatgttctgtcacaaagactaacagagaattacataaactttagttttaatcttggttgcaactaaataataaactttcttttccctatatatttttctttatagcaatcaaatgtataaggctaaggagaaatatttagccatttcagagtggaaaaaatccatttttctaagctaaattgctgaggtaatctaaataccagtcagtaaggaggtctactagaagatgggcactttcagaattaagaagaacta

SEQ ID NO: 20110 - DNA, 379 bp, Macaca Mulatta
agtcccccttcaatctcgtttagtgccaatgttgtgtgttgcactcaagttgtttaactgtgcatgtgcgtggaagtgttcctgtctcaatagctccaagctgttaaagatatttttattcaaactacctatattccttgtgtaattaatgctgttgtagaggtgacttgatgagacacaacctgttcgacgtgtagtgaatagtgactctgtgatgaaaactgtgactccaagcggtgtgtccctgcgtgcctttgtaggaccctttgcacgaactctggaagtggctcttataagcgcagcttcagtgatgtatgtttttgtgaacaaagttacaaatattgtccaagtctgtctgttttaagcaaactgtgatcag

SEQ ID NO: 20111 - DNA, 522 bp, Macaca Mulatta
  misc_feature (1)...(522): n = A,T,C or G
atgctactcatcacatcagtgttggtcttatggatgcaattgtcacaggtgaatggacaacaaataatgcaaattcctcagtaccagcatgtacaagaaggagaggacttcaccacgtactgcaattcctcaactactttaagcaatatacagtggtataagcaaaggcctgggggacatcctgtttttttgataatgttagtgaagagtggagaagtgaagaagcagaaaagactgacatttcagtctggagaagcaaaaaagaacagctccctgcacatcacagccacccagactacagatgtaggaacctacttctgcgcagggcgaagagctggtggtgatggctatggaaagctgatatttggaggtgggactcatcttgactgtctatccannnnnnnnnnnnnnnnnnnnnnnnnnnnnccagctgagaggctctaaatccaatgacacctctgtctgcctatttactgattttgattctgtaatgaatgtgtcacaaagcaaggattctgacgt

SEQ ID NO: 20112 - DNA, 778 bp, Macaca Mulatta
ggggttggcgctgcagtggcgtttccgactgtgggaacaaattcttcgtttggccaatgagagatttgctgttccagaaatactctttaatccttctgatataggcattcaagaaatgggaattccagaagctattgtctattcaattcagaatctacctgaagaaatgcagccgcatttttttaagaacattgtcttgacaggaggaaattcccttttcccaggatttagggatcgggtttactcagaagttcgatgtcttactccaacagattatgatgtttctgttgtgctgcctgaaaaccctattacttatgcctgggaaggtggaaaattgatatcagagaacgatgattttgaagatatggtggtaacaagagaagattatgaagaaaatggacatagtgtctgtgaagagaaatttgatatttaagcaacattttgaatgaaagtcttgactagttgtgaccgtaaggtttaatttcaaagttccttttaaaagaggttaaggaactgtgttacctttcatcctaagaaaaaggcttgaatttataaatactttgattgattgctaattttcaaaggcttttttatgtaggttattatagtaaactgtaactcagtccacatttttcatttaggagctagacccaacataacaatgccttatgctgttttccaaggggaaggttattttttcatttaaaggaagaaagaatgaaagcattttaaagttttaattccctccttaggtgaaaaaccccaaatttaaactgcc

SEQ ID NO: 20113 - DNA, 1004 bp, Macaca Mulatta
  misc_feature (1)...(1004): n = A,T,C or G
gcagggtgccatttgccgtgcctgacaaagtgctgtggccacagctgtgtgaggcgctcaacatgaaattcaaggccgaagtgcagagcaaccggggcctgaccaaggagaaccttgtgttcctggcgcagaaactgttcaacaacagcagcagccacctggaggactacagcggcctgtccgtgtcctggtcccagttcaacagggnggagaatttaccaggacggaattacactttctggcagtggtttgacggtgtgatggaagtgttaaaaaaacatctcaagcctcattggaatgatgggngggccattttggggtttgtaaacaagcaacaggcccatgacctactcattaacaagccagatgggaccttcctgctgagattcagtgactcagaaattggcggcatcaccattgcttggaagtttgattctcnnnnnnnnnnnnnnnnnnnnnnnnnnnnnnnnnnnnnnnnnnnnnnnnnnnnnnnnnnnnnnnnnnnnnnnnnnnnnnnnnnnnnnnnnnnnnnnnnnnnnnnnnnnnnnnnnnnnnnnnnnnnnnnnnnnnnnnnnnnnnnnnnnnnnnnnnnnnnnnnnnnnnnnnnnnnnnnnnnnnnnnnnnnnnnnnnnnnnnnnnnnnnnnnnnnnnnnnnnnnnnnnnnnnnnnnnnnnnnnnnnnnnnnnnnnnnnnnnnnnnnnnnnnnnnnnnnnnnnnnnnnnnnnnnnnnnnnnnnnnnnnnnnnnnnnnnnnnnnnnnnnnnnnnnnnccctgattcagtccttgacaccgatggggatttcgatctggaggacacaatggacgtggcacggcgtgtggaggagctcctgggccggccaatggacagtcagtggatcccacacgcacagtcgtgaccccgcgacctctccgtcttcagcttcttcatcctcaccagaggaaaagtcttgggatgttttaattccatgaatcgcttctcttagagacaatactcataatgtgaa

SEQ ID NO: 20114 - DNA, 167 bp, Macaca Mulatta
caggtggatgaaactcagtttaagaagatcctcggctacatcaacactgggaaacaagagggggcgaagctgctgtgtggtgggggcattgctgctgaccgtggttacttcatccagcccaccgtgtttggagatgtgcaggatggcatgaccatcgccaaggagga

SEQ ID NO: 20115 - DNA, 2763 bp, Macaca Mulatta
  misc_feature (1)...(2763): n = A,T,C or G
gagctgggggagatcacaaacttgagagtcaacttcaccaggctggcccctgtgccccaaaggggctaccaccctcccagcgcctactatgccgtgtcccagctccgtctgcaggggagctgcttctgtcacggccatgctgaccgctgcgcccccaagcctggggcctctgctggcccctccaccaccgtgcaggtnnnnnnnnnnnnnnnnnnnnnnnnnnnnnnnnnnnnnnnnnnnnnnnnnnnnnnnnnnnnnnnnnnnnnnnnnnnnnnnnnnnnnnnnnnnnnnnnnnnnnnnnnnnnnnnnnnnnnnnnnnnnnnnnnnnnnnnnnnnnnnnnnnnnnnnnnnnnnnnnnnnnnnnnnnnnnnnnnnnnnnnnnnnnnnnnnnnnnnnnnnnnnnnnnnnnnnnnnnnnnnnnnnnnnnnnnnnnnnnnnnnnnnnnnnnnnnnnnnnnnnnnnnnnnnnnnnnnnnnnnnnnnnnnnnnnnnnnnnnnnnnnnnnnnnnnnnnnnnnnnnnnnnnnnnnnnnnnnnnnnnnnnnnnnnnnnnnnnnnnnnnnnnnnnnnnnnnnnnnnnnnnnnnnnnnnnnnnnnnnnnnnnnnnnnnnnnnnnnnnnnnnnnnnnnnnnnnnnnnnnnnnnnnnnnnnnnnnnnnnnnnnnnnnnnnnnnnnnnnnnnnnnnnnnnnnnnnnnnnnnnnnnnnnnnnnnnnnnnnnnnnnnnnnnnnnnnnnnnnnnnnnnnnnnnnnnnnnnnnnnnnnnnnnnnnnnnnnnnnnnnnnnnnnnnnnnnnnnnnnnnnnnnnnnnnnnnnnnnnnnnnnnnnnnnnnnnnnnnnnnnnnnnnnnnnnnnnnnnnnnnnnnnnnnnnnnnnnnnnnnnnnnnnnnnnnnnnnnnnnnnnnnnnnnnnnnnnnnnnnnnnnnnnnnnnnnnnnnnnnnnnnnnnnnnnnnnnnnnnnnnnnnnnnnnnnnnnnnnnnnnnnnnnnnnnnnnnnnnnnnnnnnnnnnnnnnnnnnnnnnnnnnnnnnnnnnnnnnnnnnnnnnnnnnnnnnnnnnnnnnnnnnnnnnnnnnnnnnnnnnnnnnnnnnnnnnnnnnnnnnnnnnnnnnnnnnnnnnnnnnnnnnnnnnnnnnnnnnnnnnnnnnnnnnnnnnnnnnnnnnnnnnnnnnnnnnnnnnnnnnnnnnnnnnnnnnnnnnnnnnnnnnnnnnnnnnnnnnnnnnnnnnnnnnnnnnnnnnnnnnnnnnnnnnnnnnnnnnnnnnnnnnnnnnnnnnnnnnnnnnnnnnnnnnnnnnnnnnnnnnnnnnnnnnnnnnnnnnnnnnnnnnnnnnnnnnnnnnnnnnnnnnnnnnnnnnnnnnnnnnnnnnnnnnnnnnnnnnnnnnnnnnnnnnnnnnnnnnnnnnnnnnnnnnnnnnnnnnnnnnnnnnnnnnnnnnnnnnnnnnnnnnnnnnnnnnnnnnnnnnnnnnnnnnnnnnnnnnnnnnnnnnnnnnnnnnnnnnnnnnnnnnnnnnnnnnnnnnnnnnnnnnnnnnnnnnnnnnnnnnnnnnnnnnnnnnnnnnnnnnnnnnnnnnnnnnnnnnnnnnnnnnnnnnnnnnnnnnnnnnnnnnnnnnnnnnnnnnnnnnnnnnnnnnnnnnnnnnnnnnnnnnnnnnnnnnnnnnnnnnnnnnnnnnnnnnnnnnnnnnnnnnnnnnnnnnnnnnnnnnnnnnnnnnnnnnnnnnnnnnnnnnnnnnnnnnnnnnnnnnnnnnnnnnnnnnnnnnnnnnnnnnnnnnnnnnnnnnnnnnnnnnnnnnnnnnnnnnnnnnnnnnnnnnnnnnnnnnnnnnnnnnnnnnnnnnnnnnnnnnnncagggctggtggggccttctggacggcagggcaggtggctgagcagctgcggggcttcaatgcccagctccagcagaccaggcagatgngattagggcagccgaggaatcagcctcgcagattcaatccaatgcccagcgcctggagacccaggtgagcaccagccgctcccagatggaggaagatgtcagacgcacgcggctcctcatccagcaggtccgggatttcctaacagnnnnnnnnnnnnnnnnnnnnnnnnnnnnnnnnnnnnnnnnnnnnnnnnnnnnnnnnnnnnnnnnnnnnnnnnnnnnnnnnnnnnnnnnnnnnnnnnnnnnnnnnnnnnnnnnnnnnnnnnnnnnnnnnnnnnnnnnnnnnnnnnnnnnnnnnnnnnnnnnnnnnnnnnnnnnnnnnnnnnnnnnnnnnnnnnnnnnnnnnnnnnnnnnagccgagcccatgcagtggagggccaggtggaggatgtggttgggaacctgcggcagggcacagtggcactgcaggaagctcaggacaccatgcaaggcaccagccgctcccttaggcttatccaggatagggttgctgaggtnaggttcagcaggtactgcagccagcagaaaagctggtgacaagcatgaccaagcagctgggtgacttctggacacggatggaggagctccgccgccaagcccggcagcagcgggcacaggcagtccaggcccagcagcttgcagaaggtgccagcgagcaggcactgagtgcccaagagnnagggatttgagagaataaaacaaaagtatgctgagttgaaggaccggttgggtcagagtcccacgctgggtgaacagggtgcccggatccagagtgtgaagacagaggcagaggagctatttggggagaccatggagatgatggacaggatgaaa

SEQ ID NO: 20116 - DNA, 808 bp, Macaca Mulatta
ggtgccctggtgtacagcaccttcctgctccacaacccccgccctgtgggaaacctgtccatcgtgaggactaaccgtgcagagattcccattgagtgccgctaccccaggcagggcaatgtgagcagccaggccatcctgcccacctggttgcccttcaggaccacggtattctcggaggagaagctgactttctctctgcgtctgatggaggagaactggaacgctgagaagaggtcccctaccttccacctgggagatgcagcccacctccaggcagaaatccacactggcagccacgtgccactgcggttgtttgtggaccactgcgtggccacaccaacaccagaccagaatgcctccccttatcacaccatcgtggacttccatggctgtcttgttgatggtctcactgatgcctcttctgcgttcaaagttcctcgacccgggccagatacactccagttcacagtggatgtcttccactttgctaatgactccagaaacatgatatacatcacctgccacctgaaggccatcccagctgagcaggaaccagacgaactcaacaaagcctgttccttcagcaagtcttccaacagctggttcccagtggaaagcccagctgacatctgtcaatgctgtagcaagggtgactgtggcactccaagcccattccagaaggcagccccattgtcctgagccagttggtcaaaggtctgctttctcgtaaaccgcaggccattgtgaaaaaaagaagccaaattttccccgtgggggccactggattctttcctgggaaaaggag

SEQ ID NO: 20117 - DNA, 234 bp, Macaca Mulatta
gcagagctggggaagtcccaaagtaacaaaagatggtgtgactgttgcaaagtcaattgacttaaaggataaatataaaaacattggagctaaacttgttcaagatgttgccaataacacaaatgaagaggctggggatggcactaccactgctactgtactggcacgctctatagccaaggaaggcttcgagaagattagcaaaggtgctaatcccgtggaaatcaggagagg

SEQ ID NO: 20118 - DNA, 2357 bp, Macaca Mulatta
  misc_feature (1)...(2357): n = A,T,C or G
ttaatagtcctaggatggatctgactcttgctgaacttcaggaaatggcatctcgccagcagcaacagattgaagcccagcaacaattgctggcaactaaggnnaggaacagcgcttaaagtttttgaaacaacaagatcagcgacaacagcaacaagttgctgagcaggagaagcttaaaaggctaaaagaaatagctgagaatcaggaagctaagctaaaaaaagtgagagcacttaaaggccacgtggaacagaagagactaagcaatgggaaacttgtggaggaaattgaacagatgaatagtttgttccagcaaaaacagagggagctcgtcctggctgtgtcaaaagtagaagaactgaccaggcagctcgagatgctcaagaacggcaggattgacggccaccatgacaatcagtctgcggtggctgagcttgatcgcctctataaggagctgcanncagctaagaaacaaattgaatcaagaacagaatgccaagctacaacaacagagggagtgtttgaataagcgtaattcagaagtggcagtcatggataagcgtgttaatgagctgagggaccggctgtggaagaagaaggcagctctacagcaaaaagaaaatctaccagnnnnnnnnnnnnnnnnnnnnnnnnnnnnnnnnnnnnnnnnnnnnnnnnnnnnnnnnnnnnnnnnnnnnnnnnnnnnnnnnnnnnnnnnnnnnnnnnnnnnnnnnnnnnnnnnnnnnnnnnnnnnnnnnnnnnnnnnnnnnnnnnnnnnnnnnnnnnnnnnnnnnnnnnnnnnnnnnnnnnnnnnnnnnnnnnnnnnnnnnnnnnnnnnnnnnnnnnnnnnnnnnnnnnnnnnnnnnnnnnnnnnnnnnnnnnnnnnnnnnnnnnnnnnnnnnnnnnnnnnnnnnnnnnnnnnnnnnnnnnnnnnnnnnnnnnnnnnnnnnnnnnnnnnnnnnnnnnagttgatgatggagaggttccactgagggagaaagagaagaaggtgcgtccgttctcaatgtttgatgcagtagaccagtccactgccccaccttcctttggtactctgaggaagaaccagagcagtgaagatatcttgcgggatgctcaggnnnnnnnnnnnnnnnnnnnnnnnnnnnnnnnnnnnnnnnnnnnnnnnnnnnnnnnnnnnnnnnnnnnnnnnnnnnnnnnnnnnnnnnnnnnnnnnnnnnnnnnnnnnnnnnnnnnnnnnnnnnnnnnnnnnnnnnnnnnnnnnnnnnnnnnnnnnnnnnnnnnnnnnnnnnnnnnnnnnnnnnnnnnnnnnnnnnnnnnnnnnnnnnnnnnnnnnnnnnnnnnnnnnnnnnnnnnnnnnnnnnnnnnnnnnnnnnnnnnnnnnnnnnnnnnnnnnnnnnnnnnnnnnnnnnnnnnnnnnnnnnnnnnnnnnnnnnnnnnnnnnnnnnnnnnnnnnnnnnnnnnnnnnnnnnnnnnnnnnnnnnnnnnnnnnnnnnnnnnnnnnnnnnnnnnnnnnnnnnnnnnnnnnnnnnnnnnnnnnnnnnnnnnnnnnnnnnnnnnnnnnnnnnnnnnnnnnnnnnngtatatggtaagcctgtaattgctgctgcccagaatcaacagcagcacccagagaacatttattccaatagccagggcaagcctggcagtccagaacctgaaacagagcctgtttcttcagttcaggagaaccatgaaaacgaaagaattcctcggccactcagcccaactaaattactgccttttttannnnnnnnnnnnnnnnnnnnnnnnnnnnnnnnnnnnnnnnnnnnnnnnnnnnnnnnnnnnnnnnnnnnnnnnnnnnnnnnnnnnnnnnnnnnnnnnnnnnnnnnnnnnnnnnnnnnnnnnnnnnnnnnnnnnnnnnnnnnnnnnnnnnnnnnnnnnnnnnnnnnnnnnnnnnnnnnnnnnnnnnnnnnnnnnnnnnnnnnnnnnnnnnnnnnnnnnnnnnnnnnnnnnnnnnnnnnnnnnnnnnnnnnnnnnnnnnnnnnnnnnnnnnnnnnnnnnnnnnnnnnnnnnnnnnnnnnnnnnnnnnnnnnnnnnnnnnnnnnnnnnnnnnnnnnnnnnnnnnnnnnnnnnnnnnnnnnnnnnnnnnnnnnnnnnnnnnnnnnnnnnnnnnnnnnnnnnnnnnnnnnnnnnnnnnnnnnnnnnnnnnnnnnnnnnnnnnnnnnnnnnnnnnnnnnnnnnnnnnnnnnnnnnnnnnnnnnnnnnnnnnnnnnnnnnnnnnnnnnnnnnnnnnngggagcctgaagggccaggagaagactcagtgagcatgcgcccgcctgaaatcaccgggcaggtctctctgcctcctg

SEQ ID NO: 20119 - DNA, 787 bp, Macaca Mulatta
  misc_feature (1)...(787): n = A,T,C or G
ggtctgtgtacttttcaaagagtcctaaggagttaaatcttccaggtattttccacttagtattgcagccaaagaatatttaaataaatgtctttgctgcgctcacatccatgcccagccaatatacaactgtaaagcaaatatagaaagtcagctgttgatagttgtctgttatcgaacacattcagtgataaagctgggttactcctgcttttggtgctctcaccttatctggaagatctgcaaacattacctaaatagactggcaagataaacactttctgaaacccaagacttggccataaagataatgctgcatttttctgtcagaatcacatatgatgtgtgttctgtagaggttatttctgcatggaaactcaacttcttggattagccgtcccagtgaaaatcctcactgttggagtgtaaaccaaatacgaagccctcttgcaaagtagcctctttcatcccgtactcagaatacccagtttagcaagaaactgagatttaagtctttcgggccctaagaggtttttcatctttgctccctccaatcttgagattgggttttgctttagtgcaagtataataattccgtatgatagatggggcctggacacccatctcaacagggtcacttggtaattaacaatagccatataaatgcnggatacagggttactaccctcacccttttaccttcctcaggtaaatagtcgaagataccannnnnnnnnnnnnnnnnnnnnnggctttttggcccagtanctaaaagtgcaagaattga

SEQ ID NO: 20120 - DNA, 713 bp, Macaca Mulatta
  misc_feature (1)...(713): n = A,T,C or G
gggtccagattctgttccaatctttgtcttcctaaacaagtgcagatggcagctacccatatagcccgtaaagctgtggaattggacttggttcctgggaggagccccatctctgtggcagcggcagccatttacatggcctcacaggcatcagctgaaaagaggacccaaaaagaaattggcgatattgctggtgttgctgatgttacaatcagacagtcctatagacttatctatcctcgagccccggatctgtttcctacagacttcaaatttgacaccccagtggacaaactaccacagctataaattgaggcagctaacgtcaaattcttgaatacagaactttgcctgttgtacatagcctatacaaaatgctgggttgagcctttcatgaggaaaaacaacagacatggtacgcattccagggctgaatactattgcttggcattctgtatgtatatataccagtgaaacatatttaatgatttaaatttcttatcaaatttcttttgtagcaatctaggaaactgtattttggaagatatttgaaattatgtaattcttgaataaaacatttttcaaaactaaagtttttgttataattatatgttacatttaacttatacataattataaataatgcaaatcattgcagctaataaagctttatttnnnnnnnnnnnnnnnnnnnnnnnnnnnnnnnnnnnnnn

SEQ ID NO: 20121 - DNA, 760 bp, Macaca Mulatta
  misc_feature (1)...(760): n = A,T,C or G
gggagtcagtctgcaatttctactatatgcattgagatcagttagattattgaaatattatagagagttatgaacacttaaattatgatagtggtatgacattggatagaacatgggataccttagaagtagaattgacagggcatattaattgatgaaatggagtcatttgagtctgttaatagccatgtatcataattaccgagtgaagctggtggaacatatggtctccattttacagttaaggaatataatggacagattaatattggtctctgtcatgcccacaatccctttctaagactgccctacctatagcaatttttatatttgtcaatttatgaatataatgaatgagaattctggtacctcctatctttacaaatattggtggtgtcagtatttttccttttaaccattccaatgggtgtgtagtgatgtttcattttggttttaatttgtatatccctgataactataattgggtcatagaaattctttatacattctagatgcaagtctcttgtcagatgtatgtattgagaatattacacctagtctgtggcttgactattttctttatgtcttttgatgaatagaagttttaatttttgaaagtcaannnnnnnnnnnnnnnnnnatgttttataattttttcccctccaatttaaaccccaaggatttcaaggtatttctgccttttatttatataaaacnnnnnnnnnnnnnnnnnnnnnggggatccaattctttgaaattt

SEQ ID NO: 20122 - DNA, 562 bp, Macaca Mulatta
ggcagttggggtgtcgggcagaatgtgacgtgtggcctcaccatggacttgaatgggacttggctggccgcaggatcttgtgcctggaaatagcctgaggtggctcaggaggcagagaaagggcgccagaccattctctggcggggaccagggcccaaggccccagggctggaaggagaccaaggggcagccgccctggagggacatcagtgcttcctcttccacccaacttcccgtgcggttccacgttttcccaccagcctgtcggttgctgccccagcattcggtacctgcttcttccagagaaataaagttagtttctattttatgttacttacttgcacctgcctgttcctttgcctgttggtcagcaagctccagccccaagtgaggctccccgggccaccagcatcagctccgggcggctggcctcgtggcaccacctggaggcagcgggagggcgtgcagccccggacaccgggaggcgtctccccttacacagccggcagccgggccagagtccccaccggtctggtcagtgactttcacagggcctggattt

SEQ ID NO: 20123 - DNA, 106 bp, Macaca Mulatta
tgaggtatgaggagtctcagactgttatttgctgttcgaattggtcttcccagcataataaccagtaaatattctggcacagatctattggtcgcttaatgtcctg

SEQ ID NO: 20124 - DNA, 1788 bp, Macaca Mulatta
  misc_feature (1)...(1788): n = A,T,C or G
cagccaagcccaacaactctggggaagccccctcaagccccacccctaagagaagtctgtcttcaagcaaatgtgaccccaagcataaggactgtctgctacgggagtttcgaaagttataagccatggtggccgataatcctagctacaacacgaagacccagatcatccaggacttcctgcggaaaggctcagcaggannnnnnnnnnnnnnnnnnnnnnnnnnnnnnnnnnnnnnnnnnnnnnnnnnnnnnnnnnnnnnnnnnnnnnnnnnnnnnnnnnnnnnnnnnnnnnnnnnnnnnnnnnnnnnnnnnnnnnnnnnnnnnnnnnnnnnnnnnnnnnnnnnnnnnnnnnnnnnnnnnnnnnnnnnnnnnnnnnnnnnnnnnnnnnnnnnnnnnnnnnnnnnnnnnnnnnnnnnnnnnnnnnnnnnnnnnnnnnnnnnnnnnnnnnnnnnnnnnnnnnnnnnnnnnnnnnnnnnnnnnnnnnnnnnnnnnnnnnnnnnnnnnnnnnnnnnnnnnnnnnnnnnnnnnnnnnnnnnnnnnnnnnnnnnnnnnnnnnnnnnnnnnnnnnnnnnnnnnnnnnnnnnnnnnnnnnnnnnnnnnnnnnnnnnnnnnnnnnnnnnnnnnnnnnnnnnnnnnnnnnnnnnnnnnnnnnnnnnnnnnnnnnnnnnnnnnnnnnnnnnnnnnnnnnnnnnnnnnnnnnnnnnnnnnnnnnnnnnnnnnnnnnnnnnnnnnnnnnnnnnnnnnnnnnnnnnnnnnnnnnnnnnnnnnnnnnnnnnnnnnnnnnnnnnnnnnnnnnnnnnnnnnnnnnnnnnnnnnnnnnnnnnnnnnnnnnnnnnnnnnnnnnnnnnnnnnnnnnnnnnnnnnnnnnnnnnnnnnnnnnnnnnnnnnnnnnnnnnnnnnnnnnnnnnnnnnnnnnnnnnnnnnnnnnnnnnnnnnnnnnnnnnnnnnnnnnnnnnnnnnnnnnnnnnnnnnnnnnnnnnnnnnnnnnnnnnnnnnnnnnnnnnnnnnnnnnnnnnnnnnnnnnnnnnnnnnnnnnnnnnnnnnnnnnnnnnnnnnnnnnnnnnnnnnnnnnnnnnnnnnnnnnnnnnnnnnnnnnnnnnnnnnnnnnnnnnnnnnnnnnnnnnnnnnnnnnnnnnnnnnnnnnnnnnnnnnnnnnnnnnnnnnnnnnnnnnnnnnnnnnnnnnnnnnnnnnnnnnnnnnnnnnnnnnnnnnnnnnnnnnnnnnnnnnnnnnnnnnnnnnnnnnnnnnnnnnnnnnnnnnnnnnnnnnnnnnnnnnnnnnnnnnnnnnnnnnnnnnnnnnnnnnnnnnnnnnnnnnnnnnnnnnnnnnnnnnnnnnnnnnnnnnnnnnnnnnnnnnnnnnnnnnnnnnnnnnnnnnnnnnnnnnnnnnnnnnnnnnnnnnnnnnnnnnnnnnnnnnnnnnnnnnnnnnnnnnnnnnnnnnnnnnnnnnnnnnnnnnnnnnnnnnnnnnnnnnnnnnnnnnnnnnnnnnnnnnnnnnnnnnnnnnnnnnnnnnnnnnnnnnnnnnnnnnnnnnnnnnnnnnnnnnnnnnnnnnnnnnnnnnnnnaggaccccagcaaaatacctagctggctgaaagtcaacaagatctactatcctgacttcatcgtcccagacccaaannnnnnnnnnnnngggagatcgcaggggctgaattctgcaaatcggaggctcacacagctgatgggatctccatccgattccctcgctgcacccgaatccgagaaaataaggactggaaatctgccactaaccttccccaactcaag

SEQ ID NO: 20125 - DNA, 977 bp, Macaca Mulatta
  misc_feature (1)...(977): n = A,T,C or G
gtcacgtatgagccacctccgacagcccccaccctgctcacggtgctggtctactcactgctgcccattgggggcctttccctcatcgtcctgnnnnnnnnnnnnnnnnnnnnnnnnnnnnnnnnnnnnnnnnnnnnnnnnnnnnnnnnnnnnnnnnnnnnnnnnnnnnnnnnnnnnnnnnnnnnnnnnnnnnnnnnnnnnnnnnnnnnnnnnnnnnnnnnnnnnnnnnnnnnnnnnnnnnnnnnnnnnnnnnnnnnnnnnnnnnnnnnnnnnnnnnnnnnnnnnnnnnnnnnnnnnnnnnnnnnnnnnnnnnnnnnnnnnnnnnnnnnnnnnnnnnnnnnnnnnnnnnnnnnnnnnnnnnnnnnnnnnnnnnnnnnnnnnnnnnnnnnnnnnnnnnnnnnnnnnnnnnnnnnnnnnnnnnnnnnnnnnnnnnnnnnnnagggatccctcacggattacctcaaggggaacatcatcacatggaacgaactgtgtcatgtagcagagacgatgtcgcgaggcctctcatacctgcatgaggacgtgccctggtgccgtggcgagggccacaagccgtctattgcccacagnnnnnnnnnnnnnnnnnnnnnnnnnnnnnnnnnnnnnnnnnnnnnnnnnnnnnnnnnnnnnnnnnnnnnnnnnnnnnnnnnnnnnnnnnnnnnnnnnnnnnnnnnnnnnnnnggtaggcacgagacggtacatggctcctgaggtgctcgagggagccatcaacttccagagagatgccttcctgcgcattgacatgtatgccatggggctggtgctgtgggagcttgtgtctcgctgcaaggctgcagacggnggacccgtggatgagtacatgctgccctttgaggaagagattggccagcacccttcgttggaggagctgcaggaggtggtggtgcacaagaagatgaggcccaccattaaagatcactggttgaaacacccgg

SEQ ID NO: 20126 - DNA, 1445 bp, Macaca Mulatta
  misc_feature (1)...(1445): n = A,T,C or G
gacaaaattcttctaagcagcggacgagatgcctctcttatggtaaccaatgatggtgccactattctgaaaaacattggtgttgacaatccagcagctaaagttttagttgngatatgtcaagggttcaagatgatgaagttggtgatggcactacctctgttaccgttttagcagcagaattattaagggnggaagcagaatctttaattgcaaaaaagattcatccacagaccatcatagcgggttggagagaagccacaaaggctgcaagagaggcactgttgagttctgcagtcgatcatggnnnnnnnnnnnnnnnnnnnnnnnnnnnnnnnnnnnnnnnnnnnnnnnnnnnnnnnnnnnnnnnnnnnnnnnnnnnnnnnnnnnnnnnnnnnnnnnnnnnnnnnnnnnnnnnnnnnnnnnnnnnnnnnnnnnnnnnnnnnnnnnnnnnnnnnnnnnnnnnnnnnnnnnnnnnnnnnnnnnnnnnnnnnnnnnnnnnnnnnnnnnnnnnnnnnnnnnnnnnnnnnnnnnnnnnnnnnnnnnnnnnnnnnnnnnnnnnnnnnnnnnnnnnnnnnnnnnnnnnnnnnnnnnnnnnnnnnnnnnnnnnnnnnnnnnnnnnnnnnnnnnnnnnnnnnnnnnnnnnnnnnnnnnnnnnnnnnnnnnnnnnnnnnnnnnnnnnnnnnnnnnnnnnnnnnnnnnnnnnnnnnnnnnnnnnnnnnnnnnnnnnnnnnnnnnnnnnnnnnnnnnnnnnnnnnnnnnnnnnnnnnnnnnnnnnnnnnnnnnnnnnnnnnnnnnnnnnnnnnnnnnnnnnnnnnnnnnnnnnnnnnnnnnnnnnnnnnggtggtgaaattgcctctacctttgatcacccagaactggtgaagcttggaagttgcaaacttatcgaggaagtcatgattggagaagacaaactcattcacttttctggggttgcccttggtgagnggtgaggcttgtaccattgttttgcgtggtgccactcaacaaattttagatgaagcagaaagatctttgcatgacgctctttgtgttcttgcgcaaactgtaaaggactctagaacagtnnnnnnnnnnnnnnnnnnnnnnnnnnnnnnnnnnnnnnnnnnnnnnnnnnnnnnnnnnnnnnnnnnnnnnnnnnnnnnnnnnnnnnnnnnnnnnnnnnnnnnnnnnnnnnnnnnnnnnnnnnnnnnnnnnnnnnnnnnnnnnnnnnnnnnnnnnnnnnnnnnnnnnnnnnnnnnnnnnnnnnnnnnnnnnnnnnnnnnnnnnnnnnnnnnnnnngatatgagggaaggcaccattggcgatatggctatcctgggtataacagaaagttttcaagtgaagcgacaggttcttctgagtgcagctgaagcagcagaggtgattctgcgtgtggacaacatcatcaaagcagcacccag

SEQ ID NO: 20127 - DNA, 561 bp, Macaca Mulatta
  misc_feature (1)...(561): n = A,T,C or G
agggagaagctcggcaacgtggagtcggtttatgtcatcgaccctgaagatgtggcccttctctttaagtccgagggccccaacccagaacgattcctcatcccgccctgggtcgcctatcaccaatattaccagagacccataggagtcctgttgaagnnnnnnnnnnnnnnnnnnnnnnnnnnnnnnnnnnnnnnnnnnnnnnnnnnnnnnnnnnnnnnnnnnnnnnnnnnnnnnnnnnnnnnnnnnnnnnnnnnnnnnnnnnnnnnnnnnnnnnnnnnnnnnnnnnnnnnnnnnnnnnnnnnnnnnnnnnnnnnnnnnnnnnnnnnnnnnnnnnnnnnnnnnnnnnnnnnnnnnncatcactaatgtcatttttggggagcgccaggggatgctggaggaagtagtgaaccccgaggcccagcggttcattgatgccatctaccagatgttccacaccagcgtccccatgctcaaccttcccccagacctattccgtctgttcaggaccaagacctggaaggaccatgtggccgcatgggacgtgattttcagcaaag

SEQ ID NO: 20128 - DNA, 2070 bp, Macaca Mulatta
  misc_feature (1)...(2070): n = A,T,C or G
ggccgttgagaatggcaccgtctgccgaggnnnnnnnnnnnnnnnnnnnnnnnnnnnnnnnnnnnnnnnnnnnnnnnnnnnnnnnnnnnnnnnnnnnnnnnnnnnnnnnnnnnnnnnnnnnnnnnnnnnnnnnnnnnnnnnnnnnnnnnnnnnnnnnnnnnnnnnnnnnnnnnnnnnnnnnnnnnnnnnnnnnnnnnnnnnnnnnnnnnnnnnnnnnnnnnnnnnnnnnnnnnnnnnnnnnnnnnnnnnnnnnnnnnnnnnnnnnnnnnnnnnnnnnnnnnnnnnnnnnnnnnnnnnnnnnnnnnnnnnnnnnnnnnnnnnnnnnnnnnnnnnnnnnnnnnnnnnnnnnnnnnnnnnnnnnnnnnnnnnnnnnnnnnnnnnnnnnnnnnnnnnnnnnnnnnnnnnnnnnnnnnnnnnnnnnnnnnnnnnnnnnnnnnnnnnnnnnnnnnnnnnnnnnnnnnnnnnnnnnnnnnnnnnnnnnnnnnnnnnnnnnnnnnnnnnnnnnnnnnnnnnnnnncagctccgtcggccgtgtccatcatgcatcaggtgagccgcaccgtggacagcattaccctgtcgtggtcccagccagaccagcccaatggcgtgattctggactatgagctgcagtactatgagaagnnnnnnnnnnnnnnnnnnnnnnnnnnnnnnnnnnnnnnnnnnnnnnnnnnnnnnnnnnnnnnnnnnnnnnnnnnnnnnnnnnnnnnnnnnnnnnnnnnnnnnnnnnnnnnnnnnnnnnnnnnnnnnnnnnnnnnnnnnnnnnnnnnnnnnnnnnnnnnnnnnnnnnnnnnnnnnnnnnnnnnnnnnnnnnnnnnnnnnnnnnnnnnnnnnnnnnnnnnnnnnnnnnnnnnnnnnnnnnnnnnnnnnnnnnnnnnnnnnnnnnnnnnnnnnnnnnacgggggtttgagcgtgccgactcggagtannnnnnnnnnnnnnnnnnnnnnnnnnnnnnnnnnnnnnnnnnnnnnnnnnnnnnnnnnnnnnnnnnnnnnnnnnnnnnnnnnnnnnnnnnnnnnnnnnnnnnnnnnnnnnnnnnnnnnnnnnnnnnnnnnnnnnnnnnnnnnnnnnnnnnnnnnnnnnnnnnnnnnnnnnnnnnnnnnnnnnnnnnnnnnnnnnnnnnnnnnnnnnnnnnnnnnnnnnnnnnnnnnnnnnnnnnnnnnnnnnnnnnnnnnnnnnnnnnnnnnnnnnnnnnnnnnnnnnnnnnnnnnnnnnnnnnnnnnnnnnnnnnnnnnnnnnnnnnnnnnnnnnnnnnnnnnnnnnnnnnnnnnnnnnnnnnnnnnnnnnnnnnnnnnnnnnnnnnnnnnnnnnnnnnnnnnnnnnnnnnnnnnnnnnnnnnnnnnnnnnnnnnnnnnnnnnnnnnnnnnnnnnnnnnnnnnnnnnnnnnnnnnnnnnnnnnnnnnnnnnnnnnnnnnnnnnnnnnnnnnnnnnnnnnnnnnnnnnnnnnnnnnnnnnnnnnnnnnnnnnnnnnnnnnnnnnnnnnnnnnnnnnnnnnnnnnnnnnnnnnnnnnnnnnnnnnnnnnnnnnnnnnnnnnnnnnnnnnnnnnnnnnnnnnnnnnnnnnnnnnnnnnnnnnnnnnnnnnnnnnnnnnnnnnnnnnnnnnnnnnnnnnnnnnnnnnnnnnnnnnnnnnnnnnnnnnnnnnnnnnnnnnnnnnnnnnnnnnnnnnnnnnnnnnnnnnnnnnnnnnnnnnnnnnnnnnnnnnnnnnnnnnnnnnnnnnnnnnnnnnnnnnnnnnnnnnnnnnnnnnnnnnnnnnnnnnnnnnnnnnnnnnnnnnnnnnnnnnnnnnnnnnnnnnnnnnnnnnnnnnnnnnnnnnnnnnnnnnnnnnnnnnnnnnnnnnnnnnnnnnnnnnnnnnnnnnnnnnnnnnnnnnnnnnnnnnnnnnnnnnnngcatcaacctgccgctgctggaccgcacgatccccgactacaccagctttaacacggtgaaagaaaggctggaggccatcaagatggggcagtacaaggagagcttcgccaatgctggcttcacctcctttgacgtcgtgtctcagatgatgatgga

SEQ ID NO: 20129 - DNA, 1206 bp, Macaca Mulatta
  misc_feature (1)...(1206): n = A,T,C or G
gcaaatccttgctgttcctacccatgtcaaaaccgaggtgtatgtatgagtgtgggatttgaccaatataagtgcgattgtacccggacaggattctatggtgaaaactgctcaacacnnnnnnnnnnnnnnnnnnnnnnnnnnnnnnnnnnnnnnnnnnnnnnnnnnnnnnnnnnnnnnnnnnnnnnnnnnnnnnnnnnnnnnnnnnnnnnnnnnnnnnnnnnnnnnnnnnnnnnnnnnnnnnnnnnnnnnnnnnnnnnnnnnnnnnnnnnnnnnnnnnnnnnnnnnnnnnnnnnnnnnnnnnnnnnnnnnnnnnnnnnnnnnnnnnnnnnnnnnnnnnnnnnnnnnnnnnnnnnnnnnnnnnnnnnnnnnnnnnnnnnnnnnnnnnnnnnnnnnnnnnnnnnggtaagaagcagcttcctgattcaaatgagattgtggaaaaatttcttctaagaagaaagttcatccctgatccccagggcacaaacatgatgtttgcattctttgcccagcacttcacgcatcagtttttcaagacagatcataagcgagggccagctttcaccaaagggctgggccatggggtnnnnnnnnnnnnnnnnnnnnnnnnnnnnnnnnnnnnnnnnnnnnnnnnnnnnnnnnnnnnnnnnnnnnnnnnnnnnnnnnnnnnnnnnnnnnnnnnnnnnnnnnnnnnnnnnnnnnnnnnnnnnnnnnnnnnnnnnnnnnnnnnnnnnnnnnnnnnnnnnnnnnnnnnnnnnnnnnnnnnnnnnnnnnnnnnnnnnnnnnnnnnnnnnnnnnnnnnnnnnnnnnnnnnnnnnnnnnnnnnnnnnnnnnnnnnnnnnnnnnnnnnnnnnnnnnnnnnnnnnnnnnnnnnnnnnnnnnnnnnnnnnnnnnnnnnnnnnnnnnnnnnnataggagagactattaagattgtgattgaagattatgtacaacacttgagtggctatcacttcaaactgaaatttgacccagaactacttttcaacaaacaattccagtaccaaaatcgtattgctgctgagtttaacaccctctatcactggcatccccttctgcctgacaactttcaaattcatgaccagaaatacaactatcaacagtttatctacaacaactctatattactggaacatggaattacccagtttgttgaatcattcaccaggcaaattgctggcaggg

SEQ ID NO: 20130 - DNA, 2773 bp, Macaca Mulatta
  misc_feature (1)...(2773): n = A,T,C or G
agaatctggtgttacgtgtaggaagatctggttctccattcctgagaagaatcgatctttaaaggatagaattaatttagttctcagcagagaactcaagggacctccacaaggagctcattctcttgccagaagtctggatgatatcctaaaacttacagaacaaccagaattagcaaataaagtagagattatttggatagttggtggcagttctgtttataaggaagccatgaatcacccaggccatcttaaactatttgtgacaaggatcatgcgggactttgaaaatgacannnnnnnncagaaattgatttggagaaatgtaaacttctgctagaatacccaggtgttctctctgatgtccaggaggagaaagacattaagttcaaatttgaagtatatgagaagaatgattaatatgaaggtattttctggtttnnnnnnnnnnnnnnnnnnnnnnnnnnnnnnnnnnnnnnnnnnnnnnnnnnnnnnnnttgttgactttagatctatgaataattatttctaagcaacgtgtatttattccgcattaatcttgaatatatcagataccatttatgaaacactcttgctataacaaagtgcctctccaagaccccaactgagtccccgcacctgctacagtgagctgccattccacnnnnnnnnnnnnnnnnnnnnnnnnnnnnnnnnnnnnnnnnnnnnnnnnnnnnnnnnnnnnnnnnnnnnnnnnnnnnnnnnnnnnnnnnnnnnnnnnnnnnnnnnnnnnnnnnnnnnnnnnnnnnnnnnnnnnnnnnnnnnnnnnnnnnnnnnnnnnnnnnnnnnnnnnnnnnnnnnnnnnnnnnnnnnnnnnnnnnnnnnnnnnnnnnnnnnnnnnnnnnnnnnnnnnnnnnnnnnnnnnnnnnnnnnnnnnnnnnnnnnnnnnnnnnnnnnnnnnnnnnnnnnnnnnnnnnnnnnnnnnnnnnnnnnnnnnnnnnnnnnnnnnnnnnnnnnnnnnnnnnnnnnnnnnnnnnnnnnnnnnnnnnnnnnnnnnnnnnnnnnnnnnnnnnnnnnnnnnnnnnnnnnnnnnnnnnnnnnnnnnnnnnnnnnnnnnnnnnnnnnnnnnnnnnnnnnnnnnnnnnnnnnnnnnnnnnnnnnnnnnnnnnnnnnnnnnnnnnnnnnnnnnnnnnnnnnnnnnnnnnnnnnnnnnnnnnnnnnnnnnnnnnnnnnnnnnnnnnnnnnnnnnnnnnnnnnnnnnnnnnnnnnnnnnnnnnnnnnnnnnnnnnnnnnnnnnnnnnnnnnnnnnnnnnnnnnnnnnnnnnnnnnnnnnnnnnnnnnnnnnnnnnnnnnnnnnnnnnnnnnnnnnnnnnnnnnnnnnnnnnnnnnnnnnnnnnnnnnnnnnnnnnnnnnnnnnnnnnnnnnnnnnnnnnnnnnnnnnnnnnnnnnnnnnnnnnnnnnnnnnnnnnnnnnnnnnnnnnnnnnnnnnnnnnnnnnnnnnnnnnnnnnnnnnnnnnnnnnnnnnnnnnnnnnnnnnnnnnnnnnnnnnnnnnnnnnnnnnnnnnnnnnnnnnnnnnnnnnnnnnnnnnnnnnnnnnnnnnnnnnnnnnnnnnnnnnnnnnnnnnnnnnnnnnnnnnnnnnnnnnnnnnnnnnnnnnnnnnnnnnnnnnnnnnnnnnnnnnnnnnnnnnnnnnnnnnnnnnnnnnnnnnnnnnnnnnnnnnnnnnnnnnnnnnnnnnnnnnnnnnnnnnnnnnnnnnnnnnnnnnnnnnnnnnnnnnnnnnnnnnnnnnnnnnnnnnnnnnnnnnnnnnnnnnnnnnnnnnnnnnnnnnnnnnnnnnnnnnnnnnnnnnnnnnnnnnnnnnnnnnnnnnnnnnnnnnnnnnnnnnnnnnnnnnnnnnnnnnnnnnnnnnnnnnnnnnnnnnnnnnnnnnnnnnnnnnnnnnnnnnnnnnnnnnnnnnnnnnnnnnnnnnnnnnnnnnnnnnnnnnnnnnnnnnnnnnnnnnnnnnnnnnnnnnnnnnnnnnnnnnnnnnnnnnnnnnnnnnnnnnnnnnnnnnnnnnnnnagatggagggatcaattgagccagcgagttcaaggctgcagtgagtcgtgattatgccactgcactccagcctgggtgacagaagagaccctgtttcaaaaaagaatttgaaaacaatggaaccatgccttcagaattctagaaagttattttcaactgatcaatctatattcagccaaataatcaagagtgaaggtaaaataatacatgtttagacaagcaaagactcaggggttacatgtacccttttttgggaagttattggagaaaatactccagcaaaattaaggagtacacaaaccagagaatgacatggatccagcaaataggatttaacacagacaatattccagctatggagctagctttaaaaagaaacagtaaaaatattaataggttagctgggtggaatggcccatgcctgtagtcccagctattcaggaggttaagcaaaaggatggcttgaacccaagcgttccagaccagcctggccaccacagtgagatccctttttttaaaaataataggttattgccagattggggcatttggaaagaaatgcattgaagataaagcaaaagnnnnnnnnnnnnnnnnnnnnnnnnnnnnnnnnnnnnggttggttaggcaataattaattctagggcaggaagaagtacaggataggaagagcatcaaacgctgtttttctcaacaatgagcaatatgtacatagtaaaagtgatgtggtgact

SEQ ID NO: 20131 - DNA, 130 bp, Macaca Mulatta
agctcagaagataaaataacagtccactttataaaccgtgatggtgaaacattaacaaccaaaggaaaagttggtgattctctgctagatgttgtggttgaaaataatctagatattgatggctttggtg

SEQ ID NO: 20132 - DNA, 2238 bp, Macaca Mulatta
  misc_feature (1)...(2238): n = A,T,C or G
atctaataagactgaagagatagcagaagaggaagaaactgtttcccccaaagctaaacaagttaaaaagaaagcagagccttctgaagttgacatgaattctcctaaatccaaaaaggcaaaaaagaaagacgagccgtctcaaaatgacatttctcctaaaaccaaatgtttgagaaagaaaaaggagcccattgaaaagaaagaggtttcttcnnnnnnnnnnnnnnnnnnnnnnntgaggagccttctgaggaagaaatagatgctcctaagccgaagaagatgaagaaggaaaaggaagtgaatggagaaactggagataaaagccccaaactgaagaatggatttcctcatcctgaacttgactgtaaccccggtaaagctgccagtgaagaaagtaacggtgatatagatcagnnnnnnnnnnnnnnnnnnnnnnnnnnnnnnnnnnnnnnnnnnnnnnnnnnnnnnnnnnnnnnnnnnnnnnnnnnnnnnnnnnnnnnnnnnnnnnnnnnnnnnnnnnnnnnnnnnnnnnnnnnnnnnnnnnnnnnnnnnnnnnnnnnnnnnnnnnnnnnnnnnnnnnnnnnnnnnnnnnnnnnnnnnnnnnnnnnnnnnnnnnnnnnaacttcatggggaactgcaagacaggaagagaggccgtccccctcaggtannnnnnnnnnnnnnnnnnnnnnnnnnnnnnnnnnnnnnnnnnnnnnnnnnnnnnnnnnnnnnnnnnnnnnnnnnnnnnnnnnnnnnnnnnnnnnnnnnnnnnnnnnnnnnnnnnnnnnnnnnnnnnnnnnnnnnnnnnnnnnnnnnnnnnnnnnnnnnnnnnnnnnnnnnnnnnnnnnnnnnnnnnnnnnnnnnnnnnnnnnnnnnnnnnnnnnnnnnnnnnnnnnnnnnnnnnnnnnnnnnnnnnnnnnnnnnnnnnnnnnnnnnnnnnnnnnnnnnnnnnnnnnnnnnnnnnnnnaagattctgaagacaatccccaaacattgcttttttctgcaacttgccctcattgggtatttaatgttgccaagaaatacatgaaatctacatatgaacaggtggacctgattggtaaaaagactcaaaaaacggcaataactgtggagnnnnnnnnnnnnnnnnnnnnnnnnnnnnnnnnnnnnnnnnnnnnnnnnnnnnnnnnnnnnnnnnnnnnnnnnnnnnnnnnnnnnnnnnnnnnnnnnnnnnnnnnnnnnnnnnnnnnnnnnnnnnnnnnnnnnnnnnnnnnnnnnnnnnnnnnnnnnnnnnnnnnnnnnnnnnnnnnnnnnnnnnnnnnnnnnnnnnnnnnnnnnnnnnnnnnnnnnnnnnnnnnnnnnnnnnnnnnnnnnnnnnnnnnnnnnnnnnnnnnnnnnnnnnnnnnnnnnnnnnnnnnnnnnnnnnnnnnnnnnnnnnnnnnnnaggatgtagagtcctacattcatcgatccgggcggactggcagagctggaaggacgggggtgtgcatctgcttttatcaacacaaggaagaatatcaattagtacaagtggagcaaaaagcgngggaattaagttcaaacgaataggtgttccttctgcaacagaaataataaaagcttccagcaaagatgccatcagnnnnnnnnnnnnnnnnnnnnnnnnnnnnnnnnnnnnnnnnnnnnnnnnnnnnnnnnnnnnnnnnnnnnnnnnnnnnnnnnnnnnnnnnnnnnnnnnnnnnnnnnnnnnnnnnnnnnnnnnnnnnnnnnnnnnnnnnnnnnnnnnnnnnnnnnnnnnnnnnnnnnnnnnnnnnnnnnnnnnnnnnnnnnnnnnnnnnnnnnnnnnnnnnnnnnnnnnnnnnnnnnnnnnnnnnnnnnnnnnnnnnnnnnnnnnnnnnnnnnnnnnnnnnnnnnnnnnnnnnnnnnnnnnnnnnnnnnnnnnnnnnnnnnnnnnnnnnnnnnnnnnnnnnnnnnnnnacaggagaaatggcatgattcacgacgctggcagctctctgtggccacagagcaaccagagctggaaggaccacgggaaggatatggaggcttcaggggtcaacgggaaggcagtcgaggcttcagaggacagcgggatggaaacagaagattcagaggacagcgggaaggcagtagaggcccgagaggacagcgatcaggaggtggcaacaaaagtaacagatcccaaaacaaaggccagaagcggagtttcagtaaagcatttggtcaata

SEQ ID NO: 20133 - DNA, 2599 bp, Macaca Mulatta
  misc_feature (1)...(2599): n = A,T,C or G
gaattcaacaagcgtctactgagtggacccagcacatgagaggacagtgctaagcagagaagtcaaatgtccactgggctgggcatggccaggtcccatgctgtgcctgacgtcctcctgctggtataattattttaaaatgacaggacagggaagggtgccatnnnnnnnnnnnnnnnnnnnnnnannnnnnnnnnnnnnttgggcannnnnnnnnnnnnnnnnnnnnggagaccagtttggccaatatggtgaaaccccgtcactaccnnnnnnnnnnnnnnnnnntgagcctggtcgcgcatgcctggatcccaactattcggagannnnnnnnnnnnnnnnnnnnnnnnnnnnnnnnnnnnnnnnnnnnnnnnntaagatggccagtgcacttcagcctggttcccaatagacccgtgggtaatacgaggtcgtcttcccaacctgccccttgctccatattaccatcgtattggtccataacattatagaaggacacctagtcagacaaaatgatgcaacttaattttattaggacaaggctgttggacactggagtggcaccttccatggccaggagtggcaattgggaggggtcacaagggatgccacccaggcatctagaagccacagctgccctccacagcgcggcaccgcacggtgcgcaggaatgtctcgaccttgttcatgtccttcctgaagcagtagagcagcctgtagttcttgagcagtgtgtcatcgttgtgcgagtttgtgtcatacttgctgtaggtctccttgaagatctgcccagtccgggggctgccgtcttccagcctccccatcagcgtttggatgagaaggagaggctgagcgcttggtcactgttgcctccctcccgctctcattcattcgttttcctccctccccttcagggtgtagagagaggcctggaggattcacgagaggaaatgaagactaaggtgagttctcttaggtcagagcctgactgctaaaaagagggcagcagtttctctgcctcacccctcgaagccagtgggttccaggattgggaaccctgggtcaccctcacccccatcagcgtttggatgccttcctctagtttctttaggtagagatagatgtcgaagttcgagttggtatgcaccaggtggttggcaaacacactcctgaggaactgcacgggctccagccacgactggatgagcagcagggagatgtggagcagctctaggttctgcagaggaaggaccagcggttgctgtgctgcctgggggctctgaccaccggcctccccatccccgcctggggagaaggcatccactcacggatttctgctgtgtttcctccttgttggagggtgtcggaatagactctgagaagcagagggaggtctgggggttgcgcaggaatgaatacttctgttcctttgggatataggtttcttcctaggagaaggaccacccaccaaggtctaccctgcagaccagctcccgttgttacttttctgggaacctcactcagcgtacggtcatctgcctgcatttctgcttcaggaaacaaatctgagctccttattctctcccaggacttcccagcgagggaaagtcaccccttcttgccacccctgatgtgcacccattccccaagagcttacaaacttctggtacgtgtcagatgctagcttgtgcaggtgatgggcgcggaacacagcgttgttaaaaagccaggataagggaatggttgggaaggcactgccctcttgaagccaaggtaggcagagcagggcaatagccagaattaggcatgtccaggagcctggggagaaaccggaggcaacagagggaatggagagcaagatgccagtgctctccctgctccaggagnnnnnnnnnnnnnnnnnnntccctccaggaccaggaacattctgagattgttcaaatatctgggctgagatgccccgtcccatctacagggctccgctctcccctcaggacacatcgtgcagaaatggattttaggggcgcttacctgcagccattgcagctaggtgggctgtccacaggaccctgagtggttcggggagtcgggccttgggatcctggagctggtctcttgtgggccctttttataccctggccccttatctcttgctgcttgaccccacctatttctctgtacgtttacacatggggccactgatgtacctgtgctaatggctaatttagaagctcctcccacacatgctgggatcatgccccctggcttgtcatctttcccttctcaccgttaccagcatcgtaagagttgtgcacagagtgtcggccagagataccacccaacttgtcctctctttaaggagcaggtgggtgccctctggcagcacatcatggtggccaacctgaacacggggaaggatgtcaggatagccagtcctcgagacccctacagaccccatcccactctctatcctatccctttcctcctcctcacatgtctcccctccacccagcagagagaatgtgtgtgttgcgaaaaggcaccaaacacagccaatagattgtgggggttctgggcaggattcagtcctgaattc

SEQ ID NO: 20134 - DNA, 122 bp, Macaca Mulatta
aaaatcagttcgaggaaagggaaaggggcaaaaacgaaagcgcaagaaatcccggtataagtcctggagcgtgtacgttggtgcccgctgctgtctaattccctggagcctccctggccccc

SEQ ID NO: 20135 - DNA, 404 bp, Macaca Mulatta
  misc_feature (1)...(404): n = A,T,C or G
gcgtgagagtcttccatcatcatcgtggcantgaacttcgcagctttctatgcaaagttctgncaggatacgcgggaagctggtggaaatagatatagatgatgtcttccatcaccttgcacaaatggtgaacctgtcacaatntagtgggaggattttcatgcagctgcccagatgctttcactggtagggcctgtgagagagatataaatgagtgcntgcagagtccttgcaagaatggtgctgtctgccagaatttccnaggaagcttcaactgtgtttgcaaaactggatacacaggtatgacaatgtttgtacttttctcattaagactttagccatgtcaagtataatagaaaggaaataattttatcattttccaatgatttccatataaatgagca

SEQ ID NO: 20136 - DNA, 800 bp, Macaca Mulatta
  misc_feature (1)...(800): n = A,T,C or G
ggaattcaggtgccactgaaagccagatttatagtattccatctttaatatgtgggactaacagcagtgtagattgttaccttaatattttttgctgggaccatctacctgccttatactatacttaggaaaaagtattacatatggtttattttgaaacttcaagtattattgccttaatgtctcttaaccctgttacacgctgcttgtagacatgttaatatagtaatacttttatgatatattgagtttaaggactactctttttctgttttatcatgtatgcattattttgtatatgtacagggcaagtaggtatataatttgataaagttgcaatcgaaatattattaacagaagatgtaagaaatttctgcatggtctaaatctttgtgtactttatttgtaaattatttgccctggagttttagaaaatagtttctgaattttaaacttgctggattcatgcagccagctttgcaggttatcagagatcaaagattgtaataataatacattttgtaaattgtaagcaaagttatttttatattatatacggtctaattgttcatcctaattgttcttgttttcatctagtcagagattcagtaagtgccttggaacaatattgaattctcctagcttgtgtgtgtttctttaatatttgaactcaactgggattagaagactatcaaaatacatgtatgtttcaggatatttgacctgccattaaaaaaacaaaacatttttacagccgaaanannnnntaaatannnnnnnnnnnnnnnnnnnnnnnnnat

SEQ ID NO: 20137 - DNA, 307 bp, Macaca Mulatta
  misc_feature (1)...(307): n = A,T,C or G
gtggggacagggaggaagcggagtccggcgttccgctccgctccagctcggtttcatgtcccgccaggcgaaggatgacttcctgcggcactacacagtgtcggaccccaggacgcaccccaagggctacaccgagtacaaagtaaccgcgcannnnnnnnnnnnnnnnnnnnnnnnnnnnnnnnnnggtggtggtctggaagcggtacagcgacttccgcaagctgcatggagacctggcctacacccaccgcaacctcttccgccgccttgaggagttccctgcgttcccccgggcccaggtgtt

SEQ ID NO: 20138 - DNA, 2731 bp, Macaca Mulatta
  misc_feature (1)...(2731): n = A,T,C or G
ggcctggcctcgccctgtggacgatgatggccttgcccccgtgagctacaacctggccctcagcacccgcccaccttcagccagcaggatgcggctgtggaaggcggtggtggtgactttggccttcatgagtgtggacatctgcgtgaccacggccatctatgtcttcagtcacctggaccgcagccttctggaggacatccgccacttcaacatctttgactcggtgctggacctctgggcagcctgcctgtaccgcagctgcctgctgctgggggccaccattggtgtggccaagaacagtgcgctggggccccggcggctgcgggcctcgtggctggtcatcaccctcgtgtgcctcttcgtgggcatctacgccatggtgaagctgctgctcttctcagaggtgcgcaggcccatccgggacccctggttctgggccctgttcgtgtggacgtacatttcacttggcgcatccttcctgctctggtggctgctgtccaccgtgcgaccaagcacccaggccctggagccaggggcggccactgaggccgagggcttccctgggagtggcctgccaccgcccgagcaggcgtctggggccacgctgcagaagctgctctcctacactaagcccgacgtggccttcctcgtggccgcctctttcttcctcatcgtggcagctctgggnnnnnnnnnnnnnnnnnnnnnnnnnnnnnnnnnnnnnnnnnnnnnnnnnnnnnnnnnnnnnnnnnnnnnnnnnnnnnnnnnnnnnnnnnnnnnnnnnnnnnnnnnnnnnnnnagctcatttgccgcaggtattcggggcggcatttttaccctcatatttgccagactgaacattcgccttcgaaactgtctcttccgctcactggtgtcccaggagacaagcttctttgatgagaatcgcacagnnnnnnnnnnnnnnnnnnnnnnnnnnnnnnnnnnnnnnnnnnnnnnnnnnnnnnnnnnnnnnnnnnnnnnnnnnnnnnnnnnnnnnnnnnnnnnnnnnnnnnnnnnnnnnnnnnnnnnnnnnnnnnnnnnnnnnnnnnnnnnnnnnnnnnnnnnnnnnnnnnnnnnnnnnnnnnnnnnnnnnnnnnnnnnnnnnnnnnnnnnnnnnnnnnnnnnnnnnnnnnnnnnnnnnnnnnnnnnnnnnnnnnnnnnnnnnnnnnnnnnnnnnnnnnnnnnnnnnnnnnnnnnnnnnnnnnnnnnnnnnnnnnnnnnnnnnnnnnnnnnnnnnnnnnnnnnnnnnnnnnnnnnnnnnnnnnnnnnnnnnnnnnnnnnnnnnnnnnnnnnnnnnnnnnnnnnnnnnnnnnnnnnnnnnnnnnnnnnnnnnnnnnnnnnnnnnnnnnnnnnnnnnnnnnnnnnnnnnnnnnnnnnnnnnnnnnnnnnnnnnnnnnnnnnnnnnnnnnnnnnnnnnnnnnnnnnnnnnnnnnnnnnnnnnnnnnnnnnnnnnnnnnnnnnnnnnnnnnnnnnnnnnnnnnnnnnnnnnnnnnnnnnnnnnnnnnnnnnnnnnnnnnnnnnnnnnnnnnnnnnnnnnnnnnnnnnnnnnnnnnnnnnnnnnnnnnnnnnnnnnnnnnnnnnnnnnnnnnnnnnnnnnnnnnnnnnnnnnnnnnnnnnnnnnnnnnnnnnnnnnnnnnnnnnnnnnnnnnnnnnnnnnnnnnnnnnnnnnnnnnnnnnnnnnnnnnnnnnnnnnnnnnnnnnnnnnnnnnnnnnnnnnnnnnnnnnnnnnnnnnnnnnnnnnnnnnnnnnnnnnnnnnnnnnnnnnnnnnnnnnnnnnnnnnnnnnnnnnnnnnnnnnnnnnnnnnnnnnnnnnnnnnnnnnnnnnnnnnnnnncagagacaggggagaagggcgcccagctgtcaggtggccagaagcagcgggtggccatggcccgggctctggttcggaaccccccggtcctcatcctggatgaagccaccagcgctttggatgccgagagcgagtatctgnnnnnnnnnnnnnnnnnnnnnnnnnnnnnnnnnnnnnnnnnnnnnnnnnnnnnnnnnnnnnnnnnnnnnnnnnnnnnnnnnnnnnnnnnnnnnnnnnnnnnnnnnnnnnnnnnnnnnnnnnnnnnnnnnnnnnnnnnnnnnnnnnnnnnnnnnnnnnnnnnnnnnnnnnnnnnnnnnnnnnnnnnnnnnnnnnnnnnnnnnnnnnnnnnnnnnnnnnnnnnnnnnnnnnnnnnnnnnnnnnnnnnnnnnnnnnnnnnnnnnnnnnnnnnnnnnnnnnnnnnnnnnnnnnnnnnnnnnnnnnnnnnnnnnnnnnnnnnnnnnnnnnnnnnnnnnnnnnnnnncctccaagcccaggcctccagcactggagggcgacttgccatgtcccatggatcaccacttcctgcatcttgcccctggtacacaccccatttccagggcactccctaaaaaaaatgccctgagccaacgccttcacggacctccccagcctcctaggcaaaggtagagctgcctttttaaacctagatcttaccagggtttttactgcttggtttgaggcaccccagtcaactcctagatttcaaacacctttttctaattgggagtaatggcgggcacattcaccaacatgttctagaaacttctgagccaggagtgaatggcccttacatagtagcctgggggatgtcaagagactaggcctctcctctttacccctccatagaaggggc

SEQ ID NO: 20139 - DNA, 750 bp, Macaca Mulatta
  misc_feature (1)...(750): n = A,T,C or G
tacaaagaggagcggccaattccatcagcagaaagtcacctgtctacatagcccaatgggagcaccaaggccaagcagacagaggggccatgggttgtgggatgaggancggattcgnccgactcacgtgacagcccattctttctttctgggtgatctggggatcacgccttgcccaagtgtgagattacctttcctattccttgcagttcacctcactttctgtcgtttgtagagcagtggtgtctccaatgaacttgtttcctggttttgcatcttgtgaaatgtttttttgtatttttgttgaaggttaaacatttgtataaattgtaaatatatttggtttattacagtaaaggctttagtaccaataagtggttttccttttctttctttattgttttttattacagctttgggatcatcaatgtgggttttgtaagcaaagattatacatttgtagaggaagttttgaattgcactgcttattttataaatatatttggtggtaggctcccgttgcattagaacctaatccttcacaagcctgagttgctgggagctcaagactaggaattgtgagtcattgaaggtttactaatgacagttttctttaggaaggtaaaattacttcatcaagatttgttcttttgttatgatactgttgtgattcaaggtcacaaattaaaactctgcttttttctggtgattcattggaaggcaaaatattcctttttctaggaaggccca

SEQ ID NO: 20140 - DNA, 226 bp, Macaca Mulatta
cgaggaaggagagcgggaagtggtatgttgtcttgtcttgacatttcagatctggtatttctccagctctactgatgaaaaaaccctggagttcaattaagttcattcgcttccccaacattataacagcaaaccagtgtgagccaagcctcaaagttggagtgctcgtcccctgtaccatggccccactgtgctgtggtgtcatctgtacctctcctcagtgctc

SEQ ID NO: 20141 - DNA, 1061 bp, Macaca Mulatta
  misc_feature (1)...(1061): n = A,T,C or G
tctagagagcctggtgctgacctatgtcaatgccatcagcagtggggatctgccctgcatggagaacnnnnnnnnnnnnnnnnnnnnnnnnnnnnnnnnnnnnnnnnnnnnnnnnnnnnnnnnnnnnnnnnnnnnnnnnnnnnnnnnnnnnnnnnnnnnnnnnnnnnnnnnnnnnnnnnnnnnnnnnnnnnnnnnnnnnnnnnnnnnnnnnnnnnnnnnnnnnnnnnnnnnnnnnnnnnnnnnnnnnnnnnnnnnnnnnnnnnnnnnnnnnnnnnnnnnnnnnnnnnnnnnnnnnnnnnnnnnnnnnnnnnnnnnnnnnnnnnnnnnnnnnnnnnnnnnnnnnnnnnnnnnnnnnnnnnnnnnnnnnnnnnnnnnnnnnnnnnnnnnnnnnnnnnnnnnnnnnnnnnnnnnnnnnnnnnnnnnnnnnnnnnnnnnnnnnnnnnnnnnnnnnnnnnnnnnnnnnnnnnnnnnnnnnnnnnnnnnnnnnnnnnnnnnnnnnnnnnnnnnnnnnnnnnnnnnnnnnnnnnnnnnnnnnnnnnnnnnnnnnnnnnnnnnnnnnnnnnnnnnnnnnnnnnnnnnnnnnnnnnnnnnnnnnnnnnnnnnnnnnnnnnnnnnnnnnnnnnnnnnnnnnnnnnnnnnnnnnnnnnnnnnnnnnnnnnnnnnnnnnnnnnnnnnnnnnnnnnnnnnnnnnnnnnnnnnnnnnnnnnnnnnnnnnnnnnnnnnnnnnnnnnnnnnnnnnnnnnnnnnnnnnnnnnnnnnnnnnnnnnnnnnnnnnnnnnnnnnnnnnnggaacaggaacgccttctcaaggagggattcaagaatgagagccagaggcttcagaaagagatacgggatatccagatgagaagcaaatcacagcaaccaatgtgtcacatactctaaaagtacaaggaacaaaatttgcctgtccagctccctcttcccaagaaacaagttgaatgagcaacttcagagtgtcaaacaactgccattaaacttaactcaaaatcatgatgcatacatttttcttgaaccataaagattgcaaagtaaaggtt

SEQ ID NO: 20142 - DNA, 696 bp, Macaca Mulatta
  misc_feature (1)...(696): n = A,T,C or G
cttttctcatctatgcaactcccattagtttttaaaatcatattttattcnattttctccctttagcaattttcattttatttctcataatttgaacagagacagttctcatacatgatcagatgctttttttcttcttaccatcatttatgcatgacataggtaaagtaatatggctaatttctccagttgattcaagaaactcattactttgccttaaattatatgtaaaatatttgttttacttacagttatcagaaagccaggtagtttttcttcttctattaaaagataacatattgtgaaagaaaataaaattcatgctattcattctttgctttgtttttataaatgaatttttcatacaatttacagtatattcaaaggaagaaggataaaattattggtcatcatttgtaccttagaagtacaagaatttaagtaaaagaaatgttcctttttgttttaaaacttgttttccatgtgaagtttttattgagccaactttcatacatatctcgctagcctaaagtctaaatatttgtgttggcatcagaaaaaccaattaggcagaattgctttgcgtggtcgatcttcagataaattgactgatcacatgtaatttttgtatcagtctatgtcatttaatttaggaaaaatcgtcaaggtgttttctcccctgattaatggtgatac

SEQ ID NO: 20143 - DNA, 2261 bp, Macaca Mulatta
  misc_feature (1)...(2261): n = A,T,C or G
cgcagcgcggcaccacagcggcccggccaggcccccggccgccccggcgcaggcagctcannnnnnnnnnnnnnnnnnnnnnnnnnnnnnnnnnnnnnnnnnnnnnnnnnnnnnnnnnnnnnnnnnnnnnnnnnnnnnnnnnnnnnnnnnnnnnnnnnnnnnnnnnnnnnnnnnnnnnnnnnnnnnnnnnnnnnnnnnnnnnnnnnnnnnnnnnnnnnnnnnnnnnnnnnnnnnnnnnnnnnnnnnnnnnnnnnnnnnnnnnnnnnnnnnnnnnnnnnnnnnnnnnnnnnnnnnnnnnnnnnnnnnnnnnnnnnnnnnnnnnnnnnnnnnnnnnnnnnnnnnnnnnnnnnnnnnnnnnnnnnnnnnnnnnnnnnnnnnnnnnnnnnnnnnnnnnnnnnnnnnnnnnnnnnnnnnnnnnnnnnnnnnnnnnnnnnnnnnnnnnnnnnnnnnnnnnnnnnnnnnnnnnnnnnnnnnnnnnnnnnnnnnnnnnnnnnnnnnnnnnnnnnnnnnnnnnnnnnnnnnnnnnnnnnnnnnnnnnnnnnnnnnnnnnnnnnnnnnnnnnnnnnnnnnnnnnnnnnnnnnnnnnnnnnnnnnnnnnnnnnnnnnnnnnnnnnnnnnnnnnnnnnnnnnnnnnnnnnnnnnnnnnnnnnnnnnnnnnnnnnnnnnnnnnnnnnnnnnnnnnnnnnnnnnnnnnnnnnnnnnnnnnnnnnnnnnnnnnnnnnnnnnnnnnnnnnnnnnnnnnnnnnnnnnnnnnnnnnnnnnnnnnnnnnnnnnnnnnnnnnnnnnnnnnnnnnnnnnnnnnnnnnnnnnnnnnnnnnnnnnnnnnnnnnnnnnnnnnnnnnnnnnnnnnnnnnnnnnnnnnnnnnnnnnnnnnnnnnnnnnnnnnnnnnnnnnnnnnnnnnnnnnnnnnnnnnnnnnnnnnnnnnnnnnnnnnnnnnnnnnnnnnnnnnnnnnnnnnnnnnnnnnnnnnnnnnnnnnnnnnnnnnnnnnnnnnnnnnnnnnnnnnnnnnnnnnnnnnnnnnnnnnnnnnnnnnnnnnnnnnnnnnnnnnnnnnnnnnnnnnnnnnnnnnnnnnnnnnnnnnnnnnnnnnnnnnnnnnnnnnnnnnnnnnnnnnnnnnnnnnnnnnnnnnnnnnnnnnnnnnnnnnnnnnnnnnnnnnnnnnnnnnnnnnnnnnnnnnnnnnnnnnnnnnnnnnnnnnnnnnnnnnnnnnnnnnnnnnnnnnnnnnnnnnnnnnnnnnnnnnnnnnnnnnnnnnnnnnnnnnnnnnnnnnnnnnnnnnnnnnnnnnnnnnnnnnnnnnnnnnnnnnnnnnnnnnnnnnnnnnnnnnnnnnnnnnnnnnnnnnnnnnnnnnnnnnnnnnnnnnnnnaagctaaaggacacgatagccattgaggacgacctcatgaaaacagaagatgaacatgagactctagaacgaaggtacgctaatgaaagagacaaagctcaatttttatctaaagagctggagcatgttaaaatggaacttactaagtacaaattagcagaaaagacagagaccagccatgaacaatggcttttcaaaaggcttcaagaagaagaagctaagtcagggcacctctcaagagaagtggatgcattaaaagagaaaattcatgaatacatggcaactgaagacctaatatgtcacctccagggagatcactcagtcctgcaaaaaaaactaaatcaacaagaaaacaggaacagagatttaggaagagagattgaaaacctcactaaggagttagagaggtaccggcatttcagtaagagcctcaggcctagtctcaatggaagaagaatttccgatactcaagtattttctaaagaagttcagacagaagcagtagacaatgaaccacctgattacaagagcctcattcctctggaacgtgcagtcatcaatggtcagttatatgaggagagtgaggatcaagacgaggaccctaatgatgagggatctgtgctgtccttcaaatgcagccagtctactccatgtcctgttaacagaaagctatggattccctggatgaaatccaaggagggccatcctcagaatggaaaaatacaaactaaacccaatgccaactttgtgcaacctggagatctagtcctaagccacacacctgggcagccacttcatataaaggttactccagaccatgtacaaaacacagccactcttgaaatcacaagcccgactacagagagtcctcactcttacacgagtactgcagtgat

SEQ ID NO: 20144 - DNA, 674 bp, Macaca Mulatta
  misc_feature (1)...(674): n = A,T,C or G
aacataaaaaggatgtatggtttttatcaactgtctccaaaataatctcttgttatgcagggagtacagttcttttcattcatacataagttcagtagttgcttccctaactgcaaaggcaatctcatttagttgagtagcttctgaaagcagctttgagttagaagtatgtgtgttacacccccacattagtgtgctgtgtggggcagttcaacacaaatgtaacaatgtatttttgtgaatgagagttggcatgtcaaatgcatcctctagaaaaataattagtgttatagtcttaagatttgttttctaaagttgatactgtgggttatttttgtgaacagcctgatgtttgggaccttttttcctcaaaataaacaagtccttattaaaccaggaattnnnnnnnnnnnnnnnnnngnnnnnnnnnnnnnnnnnnngttattgtttacttcaaactttgttttacagcgtcctccacaaaacctctagaatgtactagatacatttttcttggagtcataatcatgatacataccaacacaacactactcaaattatatttcattgagttgcatgttgcattgaggagtcaaataacttgacatacagtagcgattgtttttcaaaatggcttttacatcctaatgaaagttcagtgctttgtggtccaa

SEQ ID NO: 20145 - DNA, 1935 bp, Macaca Mulatta
  misc_feature (1)...(1935): n = A,T,C or G
atccccgcaggctgaccccgtcctccactgagacctgaaaaatggcttcgggacaaggcccaggtcctcccaggcaggaatgcggagagcctgccctgccctctgcttctgnnnnnnnnnnnnnnnnnnnnnnnnnnnnnnnnnnnnnnnnnnnnnnnnnnnnnnnnnnnnnnnnnnnnnnnnnnnnnnnnnnnnnnnnnnnnnnnnnnnnnnnnnnnnnnnnnnnnnnnnnnnnnnnnnnnnncagcaccatggggcaggtgggacggcagctcgccatcatcggggacgacatcaacagacgctatgactcagagttccagaccatgatgcagcacctgcagcccacggcagagaacgcctatgagtacttcaccaagattgcctccannnnnnnnnnnnnnnnnnnnnnnnnnnnnnnnnnnnnnnnnnnnnnnnnnnnnnnnnnnnnnnnnnnnnnnnnnnnnnnnnnnnnnnnnnnnnnnnnnnnnnnnnnnnnnnnnnnnnnnnnnnnnnnnnnnnnnnnnnnnnnnnnnnnnnnnnnnnnnnnnnnnnnnnnnnnnnnnnnnnnnnnnnnnnnnnnnnnnnnnnnnnnnnnnnnnnnnnnnnnnnnnnnnnnnnnnnnnnnnnnnnnnnnnnnnnnnnnnnnnnnnnnnnnnnnnnnnnnnnnnnnnnnnnnnnnnnnnnnnnnnnnnnnnnnnnnnnnnnnnnnnnnnnnnnnnnnnnnnnnnnnnnnnnnnnnnnnnnnnnnnnnnnnnnnnnnnnnnnnnnnnnnnnnnnnnnnnnnnnnnnnnnnnnnnnnnnnnnnnnnnnnnnnnnnnnnnnnnnnnnnnnnnnnnnnnnnnnnnnnnnnnnnnnnnnnnnnnnnnnnnnnnnnnnnnnnnnnnnnnnnnnnnnnnnnnnnnnnnnnnnnnnnnnnnnnnnnnnnnnnnnnnnnnnnnnnnnnnnnnnnnnnnnnnnnnnnnnnnnnnnnnnnnnnnnnnnnnnnnnnnnnnnnnnnnnnnnnnnnnnnnnnnnnnnnnnnnnnnnnnnnnnnnnnnnnnnnnnnnnnnnnnnnnnnnnnnnnnnnnnnnnnnnnnnnnnnnnnnnnnnnnnnnnnnnnnnnnnnntatgttccccaggattcagctgttatggaagatcagagcctaagagctgggactgtgacttgagcctggtcctggcactccctaagcatcgtgtgtcccaggagcaggacctactaggagaggggggccaaggtcctgcccaactctccccctgctcccattcctccctccgaccatactgcctttgcagttggactctcagggattctgggcttggggtgtggggtggggtggagtcgcagaccagagctgtctgaacttaggtgtcagaagcctccaagcctgcctctcaaggtcctctcagttctctcccttcctctcgccttatagacacttgtcccaacccattcactacaggtgaaggacctcacccccatccctgggggccttggttgagtggcctgctaaggcccctccttgcctcgactacagggcttaggacttggtttgttatttcagggaaaaggagtagggagttcatctagagggttttaagtgggaggactatcaacaccactaggaatcccagaggtgggatcctccctcatggctctggcacagtgtaatccaggggtgtagatgggggaactgtgaatacttgaactctgtcccctcaccctccatgctcctcacctgtttaggtctctcctcagggtaggggttagagtgccttctctactgggcacagnnnncacagcctagggtcttgtgggagaggggggagaagttcttgattcagccaaatgcggggagggggggggcagatggagctcataggccaccccctatcctctgagtgtttggaaataaactgtgcaatcccctc

SEQ ID NO: 20146 - DNA, 96 bp, Macaca Mulatta
ggagtgaagaccggccgctgcctgctgaaagagaactcggccagaggcacctgtgagatctttgcctggtgcccggtggagacaagctccaggccg

SEQ ID NO: 20147 - DNA, 676 bp, Macaca Mulatta
acccaggaaaacatctggatgagttactgggtaacatggtgttggccccactgccagatccaggacccccaagcctggctgtagcccctcagcacttgcagagccccagcttggacagtctcactcccttcccaaacctggagccctctgagaacccactgaagcggctgttggtgccgggggaagagtgggagttcgaggtgacagccttctaccggggccgccaagtcttccagcagaccatctcctgcccggagggcctgcggctggtggggtccgaagtgggcgacaggacgctgcctggatggccaatcacactgccagaccctggcatgtccctgacagacaggggagtgatgagctacgtgaggcacgtgctgagctccctgggtgggggactggctctgcggcgggccgggcagcggctctgggcccagcggctggggcactgccacacatactgggcagtgagcgaggagctgctcaacagcgggcatgggcctgatggcgaggtccccaaggacaaggaaggaggcgtgttcgacctggggcccttcattgtagatctgatcaccttcacagaaggaagtggacgctcaccacgctatgccctctggttctgtgtgggggagtcatggccccaggaccagccatggaccaagaggctcgtgatggt

SEQ ID NO: 20148 - DNA, 555 bp, Macaca Mulatta
  misc_feature (1)...(555): n = A,T,C or G
gcagaaaaactagatctgaagatgntcccaagctttccttgtaggctgttgctgaggaaaagcctcatgtgaaaccctatgtctctaagaccattcgtgatttagaagttgtggagggaagtgctgctagatttgactgcaagattgaaggatacccggaccccgaggttgtctggttcaaagatgaccagtcaatcagggagtcccgccacttccagatagactacgatgaggacgggaactgctctttaattattagtgatgtttgtggggatgatgatgccaagtacacctgcaaagctgtcaacagtcttggagaagccacctgcacagcagagctcattgtggaaacgatggaggaaggggaaggggaaggggaagaggaagaagagtgaaacaaagccagagaaaagcagcttctaagtcatattaaaaggactatttctctaaaactnnnnnnnnnnnnnnnnnnnnnnnnnntggggggcccggttannnnnnnnnnnnnnnnnnnnnnnnnnnnnnnnnnnnnnnnnnccgttttacaacgtcgtg

SEQ ID NO: 20149 - DNA, 74 bp, Macaca Mulatta
agggctgtagttcagatgcctcaaacctgcagggcaaggcatagactactcagaacaggcactggcctggcccg

SEQ ID NO: 20150 - DNA, 758 bp, Macaca Mulatta
  misc_feature (1)...(758): n = A,T,C or G
ggcaccagagcttgctccttctctctgccatgtggagacacagtgagaagaaggccatcaacaagccaagagagcccttaccagaaactcagtcctgtgacatcttgattttgaacttcttatcctccagaactggaagaaataattgttgtttaaaccacccagtctatgaaatttcattaaagcagcccaagcggactaatatagttcccaaagtgatacctaattgagcatttgattctatgctatcccatgatttttaaatttcctcatgagtgaaaatttgtccccttaaaggaatttcaaactccttaacccatttatgcctgatgttgtaaaaatttatctgtgtgaaaaatcagatcttggcaacgaccttaagcagtaggatataaataactcctacaagcttggtgttccaataatggaacactaggcataattaaaggcaaagacagttacgcctccagatgactgaactagagtctcactacaatttcaggtattcttggaatggtccaaagattcactcttttctggccttccctttcactcctggcatgcactgtacgatggtggctagtttaacagtataacctaggcctgggaaccatggccagactaggctgaactacttgaaaaattcaagactttagcctcattagtgtctcatgctaattaagtgagctaactagctccagatttaagaatacnaagataaagtcaatgatgaaacagcaacaagggaagatatcatt

SEQ ID NO: 20151 - DNA, 780 bp, Macaca Mulatta
gacacattacctgaatgagcaggtgaaagccatcaaagaattgggtgaccacgtgaccaacttgcgcaagatgggagcacccgaatctggcttggcagagtatctctttgacaagcacaccctgggagacagtgataatgaaagctaagcctcaggctaatttccctatagccatggggtgacttccctggtcaccaaggcagtgcatgcatgttggggtttcctttaccttttctataagttgtaccaaaacatccacttaagttctttgatttgtaccattccttcaaataaagacatttggtacccaggtgttgtctttgaggtcttgggatgaatcagaaatctatccagtctatcttccagattccttaagtgccgttgctcagttctaatcacactaatcaaaaagaaacagagtatttgtatttattaaacgccttagtttgggcagtatactgaggtatggctgtcttggattcagacaggattaagggttcctgactctcaatccagtgtctgagctaaatgtttccgatggttcagtctagctttcataatttttatgaatgaaaggcattaaaggctgaagtagtcctggactgctgattttatctattaaactaaccatttgattcaggctgtcataggacatgttcttcagtgtggacagctgtatggctgtgactggatcggtgtcctgctggtgtacacaccggagaggacctggctggcgaagcataaccgttgggaagcacgttaggaatgtgcttcatccct

SEQ ID NO: 20152 - DNA, 1622 bp, Macaca Mulatta
cagtgggcacttacttagtgcttcagatgacaccatctgcctgtgggacatcagtgccgttccaaaggagggaaaagtggtggatgcaaagaccatctttacagggcatactgcagtagtagaagatgttcctggcatctgctccatgagtctctgtttgggtcagttgctgatgatcagaaacttatgatttgggatactcgttcaaacaatacttccaaaccaagccactcagtcgacgctcacactgctgaagtgaactgcctttctttcaatccttatagtgagttcattcttgccacaggatcagctgacaagactgttgccttgtgggatctgagaaatctgaaacttaagttgcattcctttgagtcacataaggatgaaatattccaggttcagtggtcacctcacaatgagactattttggcttccagtggtactgatcgcagactgaatgtctgggatttaagtaaaattggagaagaacaatccccggaagatgcagaagacgggccaccagagttgttgtttattcatggtggtcacactgccaagatatctgatttctcctggaatcccaatgaaccttgggtgatttgttctgtatcagaagacaatatcatgcaagtgtggcaaatggcagagaacatttataatgatgaagaccctgaaggaagcgtggatccagaaggacaagggtcctagatatgtctttacttcttgtgattttagactccccttttttcttctcaaccctgagagtgatttaacactggttttgagacagactttgttcagctatccctctatataataggtaccaccaataatgctattagcccaaacagtgggtgttttctaaatattaatgggggggcttgattcagcaaagccacaaacttaacgttgaaattttcttcaggaattttctagtaacccaggtctaaagtagctacagaagggggaatattatgtgtgattatttttcttcttatgctatatatccccaagtttttcagactcatttaagtaaaagctagagtgagttaaggaatagagcccaaatgagggtaggtgtcttgaacccatgaaattttaaattactgaaaagatgtcacttttattcaggaaataggggagattcaagtcatatagattcctactcgaaaatcttgacacctgactttccaggatgcacattttcatatgtagaccagttttcctcttggtttcctcagttaagtcaaaactacatgttcctcctttccccatatattccatgtatttttgctcgttagtgtatttcttcagctgttttcatgttgtttctttcctgtctgtgaaatggtgtgtttatagttgtcgttgttttttttaacttgggaccaccaagttgtaaagacgtatgttattacctgacagttacaccacatgcagactgtcaagttgagaagagtgaatcaataacttgtatttgttttaaaaattaaattaatccttgataagagttacttttcttaggagttagtccttgaccactagtttgatgccatctccattttgggtgacctgtttcaccagcaggcctgttactctccatgactaactgtgtaagtgct

SEQ ID NO: 20153 - DNA, 195 bp, Macaca Mulatta
  misc_feature (1)...(195): n = A,T,C or G
agtgtgatttggatcatggccatttctaaagcctttgaactgggattagttgccggnnnnngccatcgggaatttgcacgtccatctcggggagacctggccttcagagatgacagcattcggccccaggaggagcctgcgattcggcctcggtcttcccagcatgtgtcgcccatggggatacagaacagtaag

SEQ ID NO: 20154 - DNA, 2257 bp, Macaca Mulatta
  misc_feature (1)...(2257): n = A,T,C or G
tttaccaacttatttttgtttgaagtgtggtagtttttcccttttcttcccaacctctcttgcaaaaaaagaagtgggtttctgccaatgaactgaacagacgtccaatgttgtatatgccttttgggctgagtagctcagtatttggatacttggtcatttgtttcattatgtaattgataaaatggtgtcatttattcatgttagttcaaccatatatgtatgctgtctggggatgggtggttatacttctgtgtgagaaataatttgtcagtcttcaacagtttgtaaaaacttagtggtgagagcttcaacatcgaaataaataatgaaatgcatttatcatnnnnnnnnnnnnnnnnnnnnnnnnnnnnnnnnnnnnnnnnnnnnnnnnnnnnnnnnnnnnnnnnnnnnnnnnnnnnnnnnnnnnnnnnnnnnnnnnnnnnnnnnnnnnnnnnnnnnnnnnnnnnnnnnnnnnnnnnnnnnnnnnnnnnnnnnnnnnnnnnnnnnnnnnnnnnnnnnnnnnnnnnnnnnnnnnnnnnnnnnnnnnnnnnnnnnnnnnnnnnnnnnnnnnnnnnnnnnnnnnnnnnnnnnnnnnnnnnnnnnnnnnnnnnnnnnnnnnnnnnnnnnnnnnnnnnnnnnnnnnnnnnnnnnnnnnnnnnnnnnnnnnnnnnnnnnnnnnnnnnnnnnnnnnnnnnnnnnnnnnnnnnnnnnnnnnnnnnnnnnnnnnnnnnnnnnnnnnnnnnnnnnnnnnnnnnnnnnnnnnnnnnnnnnnnnnnnnnnnnnnnnnnnnnnnnnnnnnnnnnnnnnnnnnnnnnnnnnnnnnnnnnnnnnnnnnnnnnnnnnnnnnnnnnnnnnnnnnnnnnnnnnnnnnnnnnnnnnnnnnnnnnnnnnnnnnnnnnnnnnnnnnnnnnnnnnnnnnnnnnnnnnnnnnnnnnnnnnnnnnnnnnnnnnnnnnnnnnnnnnnnnnnnnnnnnnnnnnnnnnnnnnnnnnnnnnnnnnnnnnnnnnnnnnnnnnnnnnnnnnnnnnnnnnnnnnnnnnnnnnnnnnnnnnnnnnnnnnnnnnnnnnnnnnnnnnnnnnnnnnnnnnnnnnnnnnnnnnnnnnnnnnnnnnnnnnnnnnnnnnnnnnnnnnnnnnnnnnnnnnnnnnnnnnnnnnnnnnnnnnnnnnnnnnnnnnnnnnnnnnnnnnnnnnnnnnnnnnnnnnnnnnnnnnnnnnnnnnnnnnnnnnnnnnnnnnnnnnnnnnnnnnnnnnnnnnnnnnnnnnnnnnnnnnnnnnnnnnnnnnnnnnnnnnnnnnnnnnnnnnnnnnnnnnnnnnnnnnnnnnnnnnnnnnnnnnnnnnnnnnnnnnnnnnnnnnnnnnnnnnnnnnnnnnnnnnnnnnnnnnnnnnnnnnnnnnnnnnnnnnnnnnnnnnnnnnnnnnnnnnnnnnnnnnnnnnnnnnnnnnnnnnnnnnnnnnnnnnnnnnnnnnnnnnnnnnnnnnnnnnnnnnnnnnnnnnnnnnnnnnnnnnnnnnnnnnnnnnnnnnnnnnnnnnnnnnnnnnnnnnnnnnnnnnnnnnnnnnnnnnnnnnnnnnnnnnnnnnnnnnnnnnnnnnnnnnnnnnnnnnnnnnnnnnnnnnnnnnnnnnnnnnnnnnnnnnnnnnnnnnnnnnnnnnnnnnnnnnnnnnnnnnnnnnnnnnnnnnnnnnnnnnnnnnnnnnnnnnnnnnnnnnnnnnnnnnnnnnnnnnnnnnnnnnnnnnnnnnnnnnnnnnnnnnnnnnnnnnnnnnnnnnnncagcccaggcatgcagtcacatttaatcacatcccctttctagagtgcttcaaaatgatgtagtccctcaacttggctagagaatctcaatctcttgaaatctattttttaaatgtcatattcatctggtaaatatttactgtttgccaggcatttaagagtatggcaaagaacatgaaagatggtgtcactagattttggtcaccaataagtaccccaccccttgccatgattaagagagaatgctttctattggagtttcaagaaatataatttgagaatactttaaagggaagtggaagtataagtggatatttttcttttacatgtaaacaatgaagttaattcaaagtaagttttaaaatacatgaagtaatgtctgccgtacatgtttatattctacattcttgcttccttaaattaatgtttgtgtgtatatatgtgcctcacacctgaattgaaaattaaagattggtttaaaagtg

SEQ ID NO: 20155 - DNA, 125 bp, Macaca Mulatta
gggcagctgtgcgcttctagtacccgagtggcatcctagtgacccctaccccagtgcctgtcctggccccggtaaggtgccactccagtgcccaccaaccttgtcctaataaaattaagttgtat

SEQ ID NO: 20156 - DNA, 294 bp, Macaca Mulatta
aaagggcacaaatttcctgctttcaccaattaaccactgaactgctattttttccttttggccacatagctaggtttctggttcccccacagtaggtgttttcacataagattagggtccttttggaaagaacagttgcaatatttatagggtagttgtggtaagaatctagtttattttgcatttggctaattggtctgtgttgcatggttatattctcctggattatagattaaaagtctctgtaggcatctctatgaagagcaagctatcattaaacatgtctgtttatca

SEQ ID NO: 20157 - DNA, 623 bp, Macaca Mulatta
tttcattactatgattagtatctttttctactcttattcaggatttgtgaagaccactgtgtcaaatggatgggaaattatcttttaatataaacaagtaaaatagcattgttttcacatgcagctttgaaatagtggggggcatatatgtttgtttccttttttacgtagacacagaggacttcatgccactcagaggcaagatccctgtaaagattgttgcacaaaagtctcactagccctcttcccataccacccattgctgatgtcctcatcagatgcggagaacaaatgtgaaggggataggatattgggtcagtgtccaaagcagggtctaggcgggactcagttccccagagtcttctatgaactatggacggtgctcccgccaggctaaggcgcggagctgcctgatgattccctcccctggagacagcatgggctatccttttccaagggccatggagagctgcagcctggttccctaacctctgagtcaccatcttaagagatgcctcattttagaaccaccaacaagcaagctcccacgggatgatgccccactctctaccaagctatcctggctccctggagatcaaggagaggaggcaacctttcttgtt

SEQ ID NO: 20158 - DNA, 503 bp, Macaca Mulatta
ttgtaagacgccgcgctcagctaccatcgctgggcggtcaacaagcgcgggcctggctcaacgcggcggggcgaggagaccacgaggcgaccgggagcggctgggctctcggctgcgcgcccttcggccaggccgggagccgcgccagtcggagcccccggcccagcgtggcccgcctccctctcggcgtccacctgtccggggtgctgccagcgggcatgaccgacccaccaggggcgccgccgccggcgctcgcaggccgcggatgaagaagaagacccggcgccgctcgacccggagcgaggaattgacccggagcgaggagttgaccctgagtgaggaggcaacgcggagcgaagaggcgacccagagtgaggaggcgactcggagcgaagagatgaatcggagccaggaggtgaccccggacgaggaggcgacccagagcgaggaggtgaccagggaggaaatggcggcacctgggctcaccgtgactgtcacccaca

SEQ ID NO: 20159 - DNA, 1328 bp, Macaca Mulatta
  misc_feature (1)...(1328): n = A,T,C or G
gatgagaagcccaaggtcaaccccaaactctannnnnnnnnnnnnnaggtctctcctgcggtaatgaggaccactgtgaaggccagcagtgcttttcctcactgagcatcaacgatggcttccacgtctaccagaaaggctgcttccaggtttatgagcagggaaagatgnnnnnnnnnnnnnnnnnnnnnnnnnnnnnnnnnnnnnnnnnnnnnnnnnnnnnnnnnnnnnnnnnnnnnnnnnnnnnnnnnnnnnnnnnnnnnnnnnnnnnnnnnnnnnnnnnnnnnnnnnnnnnnnnnnnnnnnnnnnnnnnnnnnnnnnnnnnnnnnnnnnnnnnnnnnnnnnnnnnnnnnnnnnnnnnnnnnnnnnnnnnnnnnnnnnnnnnnnnnnnnnnnnnnnnnnnnnnnnnnnnnnnnnnnnnnnnnnnnnnnnnnnnnnnnnnnnnnnnnnnnnnnnnnnnnnnnnnnnnnnnnnnnnnnnnnnnnnnnnnnnnnnnnnnnnnnnnnnnnnnnnnnnnnnnnnnnnnnnnnnnnnnnnnnnnnnnnnnnnnnnnnnnnnnnnnnnnnnnnnnnnnnnnnnnnnnnnnnnnnnnnnnnnnnnnnnnnnnnnnnnnnnnnnnnnnnnnnnnnnnnnnnnnnnnnnnnnnnnnnnnnnnnnnnnnnnnnnnnnnnnnnnnnnnnnnnnnnnnnnnnnnnnnnnnnnnnnnnnnnnnnnnnnnnnnnnnnnnnnnnnnnnnnnnnnnnnnnnnnnnnnnnnnnnnnnnnnnnnnnnnnnnnnnnnnnnnnnnnnnnnnnnnnnnnnnnnnnnnnnnnnnnnnnnnnnnnnnnnnnnnnnnnnnnnnnnnnnnnnnnnnnnnnnnnnnnnnnnnnnnnnnnnnnnnnnnnnnnnnnnnnnnnnnnnnnnnnnnnnnnnnnnnnnnnnnnnnnnnnnnnnnnnnnnnnnnnnnnnnnnnnnnnnnnnnnnnnnnnnnnnnnnnnnnnnnnnnnnnnnnnnnnnnnnnnnnnnnnnnnnnnnnnnnnnnnnnnnnnnnnnnnnnnnnnnnnnnnnnnnnnnnnnnnnnnnnnnnnnnnnnnnnnnnnnnnnnnnnnnnnnnnnnnnnnnnnnnnnnnnnnnnnnnnnnnnnnnnnnnnnnnnnnnnnnnnnnnnnnnnnnnnnnnnnnnnnnnnnnnnnnnnnnnnnnnnnnnnnnnnnnnnnngtatagtggaggattacaagccaccgttctacgacgtggttcccaatgacccaagttttgaagatatgaggaaagtagtctgtgtggatcaacaaaggccaaacatacccaacagatggttctcagacccgn

SEQ ID NO: 20160 - DNA, 1471 bp, Macaca Mulatta
  misc_feature (1)...(1471): n = A,T,C or G
ggggcttttcctgtagcagcatccggggtgagaggaacgtggttttctcctctctccgccatggcttgtgctcgcccactgatatcggtgtactccgaaaagggggagtcatctggcaaaaatgtcactttgcctgctgtattcaaggctcctattcgaccagatattgtgaactttgttcacaccaacctgcgcaaaaacaacagacagccctacgctgtcagtgaattagcaggtcatcagaccagtgctgagtcttggggtactggcagagctgtggctcgaattcccagagttcgaggtggtgggactcaccgctctggccagggtgcttttggaaacatgtgtcgtggaggccgaatgttttgcaccaaccaaaacctggcgccgttggcatcgtagagtgaacacaacccaaaaacgatatgccatctgttctgccctggctgcctcagccctaccagcactggtcatgtctaaaggtcatcgtattgaggaagttcctgaacttcctttggtagtggaagataaagttgaaggctacaagaagaccaaggaagctgttttgctccttaagaaacttaaagcctggaatgatatcaaaaaggtctatgcctctcagcgaatgagagctggcaaaggcaaaatgagaaaccgtcgccgtatccagcgcagggggccatgcatcatctataatgaggataatggtatcatcaaggccttcagaaacatccctggaattactctgcttaatgtaagcaaactgaacattttgaagcttgctcctggtgggcatgtgggacgtttctgcatttggactgagagtgctttccggaagttagatgaattgtatggcacttggcgtaaagccgcttccctcaagagtaactacaatcttcccatgcacaagatgattaatacagatcttagcagaatcttgaaaagcccagagatccaaagagcccttcgagcaccacgcaagaagattcatcgcagagtcctaaagaagaacccactgaaaaacctgagaatcatgttgaagctaaacccatatgcaaagaccatgcgccggaataaccattctttcgccaggccaaggaatcacaagctccggggtggataaggcagctgctgcagcagcagcactagaagccaaatcagatgagaaggcggcggttgcaggcaagaagcctgtggtaggtaagaaaggaaagaaggctgctgttggtgttaagaagcagaagaagcctctggtgggaaaaaaggcagcagctaccaagaaaccgggccctgaaaagaagtctgcagaaaagaaacctactacggaggaaaagaagcctgctgcatgaactcttaaatttgattattccataagggtcacattattttggacagcttctcttgaataaatacctgatcatacaggcagnnnnnnnnnnnnnnnnnnnnnnnnnnnnnnnnnncttgtcgg

SEQ ID NO: 20161 - DNA, 213 bp, Macaca Mulatta
aaccagcagattctcttgccacggacttcctgtatcatctcactcctgatgggcagcgcttctgcaggtcctgccgcctggtacatgacttcacagatgccgtcatccaggagcggcgccgaaccctccgcactcagggtattgatgatttcctcaagaacaaggcaaagtccaagactttggacttcattgatgtgcttctgctgagcaagg

SEQ ID NO: 20162 - DNA, 1312 bp, Macaca Mulatta
  misc_feature (1)...(1312): n = A,T,C or G
tggcatccgttgcagttgatccacaaccgngagtgtggtgactcgggtgatcaacctgcccttggtgagctccacgtatgacctcatgtcctcagcctatctcagtacaaaggaccaatatccctacctgaagtctgtgtgtgagatggcagagaagggcgtgaagaccatcacctccgtggccatgaccagtgctctgcccatcatccagaagctagagccgcaaattgcagttgccaatatctatgcctgtaaggggctagacaggattgaggagagactgcctattctgaatcagccatcaactcagattgttgccaatgccaaaggtgctgtgactggggcaaaagatgctgtgacgactaccgtgactggggccaaggattctgtggccagcacgatcacaggggtgatggacaagaccaaaggggcagtgactggcagtgtggagaagaccaagtctgtggtcagtggcagcattaagacagtattggggagtgggatgannnnnnnnnnnnagtggcgtagaaaatgcactcaccaaatcagagctgttggtagaacagtacctccctctcactgaggaagaactagaaaaagaagcaaaaaaagttgaaggatttgatctggttcagaagccaagttattatgttagactggtatccctatctaccaagcttcgctcccgtgcctaccagcaggctctcagcagggttaaannnnnnnnnnnnnnnnnnnnnnnnnnnnnnnnnnnnnnnnnnnnnnnnnnnnnnnnnnnnnnnnnnnnnnnnnnnnnnnnnnnnnnnnnnnnnnnnnnnnnnnnnnnnnnnnnnnnnnnnnnnnnnnnnnnnnnnnnnnnnnnnnnnnnnnnnnnnnnnnnnnnnnnnnnnnnnnnnnnnnnnnnnnnnngcacattgagtcacgtactcttgaaattgcccgcaacctgactcagcagctccagaccacgtgccacaacctgctgtccaacatccaaggtgtaccgcagaacatccaagatcaggccaagcacatgggggtgatggcaggcgacatctactcagtgttccgcagtgctgcctcctttaaggaagtgtctgacagcctcctcacttctagcaaggggcagctgcagaaaatgaaggaatctttagatgatgtgacggattatcttgttaacaacacgcccctcaactggctggtaggtcccttttatcctcagctgactgagtctcagaatgctcaggaccaaggtgcagagatggacaagagcagccaggagacccagcgatctgagcacaaaactcattaa

SEQ ID NO: 20163 - DNA, 148 bp, Macaca Mulatta
aaaagctggaaacacagctctgtgcagttctacattcactgattattgcagtgtgattttctatcagttttgtaaatacaggacttgccgtttcttttgatctcttgattgaagaaggatagggtattaaagtgcttttgtcatgagg

SEQ ID NO: 20164 - DNA, 674 bp, Macaca Mulatta
caggatgcctctctcccctgttacctggctagggctccaggagaaggaatagatgtcgcagagcccagatctgctgcccatccctgttcctccctgctctcctttcaggctgaggagccagaggctggcaagtcagaggcagaagacgacgaggacgaggtggacgacttgccaagctctcgccggccctggcggggccccatctctcgcaaggccagccagaccagcgtgtacctgcaggagtgggacatccccttcgagcaggtagagctgggtgagcccatcgggcagggccgctggggccgagtgcaccgcggccgctggcatggcgaggtggccattcgcctgctggagatggacggccacaaccaggaccacctgaagctcttcaagaaagaggtgatgaactaccggcagacgcggcacgagaacgtggtgctcttcatgggggcctgcatgaacccgccccacctggccattatcaccaggtaaccaagccccaggacctcatgctggatggccagctcagcctcccccttccccgggagccccatttgtgtggatgccctagaggatgtggaagttttaatagaggcataaagaagaaaaccaaaaatggggtataacttctaactcacagccccattgatactaaaaaagaaataaatatgggc

SEQ ID NO: 20165 - DNA, 765 bp, Macaca Mulatta
  misc_feature (1)...(765): n = A,T,C or G
cctacatgtgtgttgagtgtgggaagtgctttggccggagttctcacctccttctgcatcaacgtatccacactggagagaagccctatgtgtgcaatgtgtgtgggaaggccttcagccagagctcagtccttagtaaacacaggagaattcacacaggtgagaagccctatgagtgtaatgagtgtggaaaagcctttagagtgagctcagatcttgctcagcatcacaagatacatacgggagagaagcctcacgaatgtcttgagtgtcggaaagccttcactcagctctcacatctcattcagcaccagcggatccatacgggagaaaggccgtacgtgtgtccattgtgtgggaaagccttcaaccatagcactgtcctgcggagccaccagagggtacacactggggagaagcctcacaggtgcaatgagtgtgggaaaaccttcagtgtgaagaggacactgctgcagcaccaaaggatccacaccggggagaagccctacacgtgcagcgagtgtgggaaggccttcagcgaccgctcagtcctcattcagcaccacaacgtgcacaccggggagaagccctatgagtgcagtgagtgtgggaagaccttcagccaccggtccaccctgatgaatcacgagcggatccacaccgaggaaaagccctatgcatgctacgaatgcgggaaggccttcgttcagcactcacacctgatccagcaccannnnnccacactggagagaagccctatgtgtg

SEQ ID NO: 20166 - DNA, 114 bp, Macaca Mulatta
  misc_feature (1)...(114): n = A,T,C or G
cccctcaaagggagatccttctccagcctggagagctcactggaccggagnagtaactctctgtcctggtgtggtgaggaatcctacatccagaacatggagccaggggctaag

SEQ ID NO: 20167 - DNA, 350 bp, Macaca Mulatta
aaaggaggtgttttcctgaagaactattttttcagtcatttttaacctctagaatcactgatacacagaatataatcttatttatacctcattttgcatatttttttacaatatagaatgtagccctttttgtactgatataatttagttccacaaatggtaggtacgaaaagtcaagttcgtggcttatggattcatataagcccgagttgcaaagatcttttccagagtatacaactctgaccttgatcccagagagcagcttcagtgacaaacatatcttttcaagacagacagagacaggacacatgagtcttcactggaggaaaagcagctcaagaacacatgtg

SEQ ID NO: 20168 - DNA, 126 bp, Macaca Mulatta
ccctgtttccttaaatttgaataaagactatttttgcttgacaaaatttcatggtgcttgaattgaagttgtactttctgatatatcttggtatgtcttttcttagcataaaaagttcatgtgtag

SEQ ID NO: 20169 - DNA, 850 bp, Macaca Mulatta
gggccctttcccctggctggcagcgcggaggccgcacgatgcctggagttactgtaaaagacgtgaaccagcaggagttcgtcagagctctggcagccttcctcaaaaagtccgggaagctgaaagtccccgaatgggtcgacaccgtcaagctagccaagcacaaagagcttgctccctacgatgagaactggttctacacacgagctgcttccacagcgcggcacctgtacctccggggtggcgctggggttggctccatgaccaagatctatgggggacgtcagagaaacggcgtcatgcccagccacttcagccgaggctccaagagtgtggctcgtcgggtcctccaagccctggaggggctgaaaatggtggaaaaggaccaagatgggggccgcaaactgacacctcagggacagagagatctggacagaatcgccggacaggtggcagctgccaacaagaagcattagaacaaaccatgctggattaataaattgcctcattcgtcccccgcacgccttagcaacataattattccctacaataaataccccattgttccaggacaacccctccagcaccataaaaaataaactttttcactgagaacttaattccttttttggacagacccgggggccccaatttagggcaaaaggtgataacaatatgctcatatacactggtatttcccataagcaaaaatccccaggacccgtgacaccaagtgggctttgagaatttcatcccaccgcaatttaaaaaagaggactccggcgagggaaaataagtaaacggtgtttgtagaacaaaacttccaatatatgggagaagtttgtgtagg

SEQ ID NO: 20170 - DNA, 733 bp, Macaca Mulatta
  misc_feature (1)...(733): n = A,T,C or G
ccagagctgctcggcccgcagccacggggaccgccgccggtcagaggctcgcagtgctggcggcgagaagcagtcgggtttggagcgcttgggtcgtgttggtgcgcggtggaacgcgcccagggaccccggttcccgcgagcggctccgcgccgcnnnnnnnnnnnnnnnnnnnnnnnnnnnnnnnnnnnnnnnnnnnnnnnnnnnnnnnnnnnnnnnnnnnnnnnnnnnnnnnnnnnnnnnnnnnnnnnnnnnnnnnnnnnnnnnnnnnnnnnnnnnnnnnnnnnnnnnnnnnnnnnnnnnnnnnnnnnnnnnnnnnnnnnnnnnnnnnnnnnnnnnnnnnnnnnnnnnnnnnnnnnnnnnnnnnnngggaaatgggccttattccgttggttgtacagacttaatgtttgatcacactaaaaagnnnnnnnnnnnnnnnnnnnnnnnnnnnnnnnnnnnnnnnnnnnnnnnnnnnnnnnnnnnnnnnnnnnnnnnnnnnnnnnnnnnnnnnnnnnnnnnnnnnnnnnnnnnnnnnnnnnnnnnnnnnnnnnnnnnnnnnnnnnnnnnnnnnnnnnnnnnnnnnnnnnnnnnnnnnnnnnnnnnnnnnnnnnnnnnnnnnnnnnnnnnnnnnnnnnnnnnnnnnnnnnnnnnnnnnnnnnnaggacaatttattctgctattggcattgacctggcatctcatgggtttatagttgctgctgtagaacaca

SEQ ID NO: 20171 - DNA, 138 bp, Macaca Mulatta
gacactcatgaggaccatgatacttccactgagaatacagacgaatccaaccatgaccctcagtttgagccaatagtttctcttcctgagcaagaaattaaaacgctggaagaagatgaagaggaactttttaaaatg

SEQ ID NO: 20172 - DNA, 135 bp, Macaca Mulatta
acacggcaagccatgggcggggcagtgcctttcaaatctgctctcacagagcgcttagccctcatccagccctccagggagcaggtgcagagactcatagcagagcaccccccacacctgacccccggcataagg

SEQ ID NO: 20173 - DNA, 1285 bp, Macaca Mulatta
  misc_feature (1)...(1285): n = A,T,C or G
agattatattctgctgccttttgaagagatggacttcaacagaaatctttatgatattggggaacaactggacagtgaagagctggcctccctcaagttcctgagcctggactgcatcccacaaaggaagcaagaacccatcaaagatgccttgatgttattccagagactccaggaaaagagaatgttggaggaaaacaatctgtccttcctgaaggagctgctcttccgaattaatagactggatttgctcactacttacctaaacactagaaaggaggagatggaaagggaacttcaggcaccaggcagggctcagatttctgcctacagnnnnnnnnnnnnnnnnnnnnnnnnnnnnnnnnnnnnnnnnnnnnnnnnnnnnnnnnnnnnnnnnnnnnnnnnnnnnnnnnnnnnnnnnnnnnnnnnnnnnnnnnnnnnnnnnnnnnnnnnnnnnnnnnnnnnnnnnnnnnnnnnnnnnnnnnnnnnnnnnnnnnnnnnnnnnnnnnnnnnnnnnnnnnnnnnnnnnnnnnnnnnnnnnnnnnnnnnnnnnnnnnnnnnnnnnnnnnnnnnnnnnnnnnnnnnnnnnnnnnnnnnnnnnnnnnnnnnnnnnnnnnnnnnnnnnnnnnnnnnnnnnnnnnnnnnnnnnnnnnnnnnnnnnnnnnnnnnnnnnnnnnnnnnnnnnnnnnnnnnnnnnnnnnnnnnnnnnnnnnnnnnnnnnnnnnnnnnnnnnnnnnnnnnnnnnnnnnnnnnnnnnnnnnnnnnnnnnnnnnnnnnnnnnnnnngctttgaccgcgacctttgaagagcttcattttgagatccagcaccacaatgactgcacagtagagaaaatctataagattttgaaaacctaccaactcatggaccacagtaacaaggattgcttcatctgctgtatcctctcccatggagacaagggcatcatctatggcactgatggacaggaggcccccatctatgagctgacatctcagttcactggtttgaagtgcccttcccttgctggaaaacccaaagtgttttttattcaggcttgtcagggggataactaccagaaaggtatacctgttgagactgattcagaggagcaaccctatttggaaatggatttatcatcacctcaaacgagatatatcccggatgaggctgactttctgctggggatggccactgtgaataattgtgtttcctaccgaaaccctgcagagggaacctggtacatccagtcactttgccagagcctgagagaacgatgtcctcg

SEQ ID NO: 20174 - DNA, 1055 bp, Macaca Mulatta
attgttattgattacagtgttatttttatggtcataataaattatgtagaagtataaataaatccatgcattctgggtcctgataaatattttcaagttttctaatatttatttttgagcatgtttcctgtctgcctgcaaacacatgcagacttttagttttcatttacgtagagttaaatatatgttagtctaaagataaaccttaggtgtaagaaaattatagagtgagtttgtgtgtatgaatttatacctgttttcagaagacaaaagcaatattgaacaaaacaaatcattttaacaagatgactactagaaaactaaaaacctcaaaaatgctgaaagcaaatgtattctctgctttgtattaaatttattactgtacaatctatggctaatagttctgaatctccccatgaaaattctgtttatacttgcctggtactcatgatagacccctaattattttgtatctttttatataaatattttacagattacaaagtattcattatgtgagctggtctgtgattataagaataattgttataaaatttagtaatgcatacaaaatttttaaatgtaattccacaattagtgtattaagttacattttatttagttagaacacttcattttgtttttagttggagaactctatcactcttttgttattttttcttttcactttttataattcacataagtaaatttattgagtcaatttgttcagataagtactagggaagcttgataagtcgtgaggatgtttttatatttaaatgtagcaaacgtacataacagttcttactaacagatgttccataataagctgtaagtattcctgctaaagttagtttgtaacttcaattcagagatgaaaaatatcagttgtgaagaaataaaattgattcttcatgtggagaggacatattttccaggccacaatgctgaatcctgctgaatttaaagagaagttctgcatcttttatttcttaattatcttcagatttgtctggtattatgtgtatcccacctagtatgcagcacagccc

SEQ ID NO: 20175 - DNA, 686 bp, Macaca Mulatta
ggcactgaagtggactgcctgcgggcctgtcaggagcagatcgaagctgcactcagggagagcctcagggaagccgcccagaccagctccagcccagcgcccaaagccccccggggctccagcagccaagggcccagccagaccagcactcctacagatgtcacagccatacacctgtagccctggagaggccctctggagtggccactaagcagaggaggggccgctgccacccacctccctgcctccaggaacaaaccacaccacatctgaagcctgaaggggcgtctgttcccccttcacaaagcccaaggggtctggtcctacccatccccgcagtgtgcactaaggggcctggccagccacgtctgcatttcggtgggtagtcaagctcctcctccctgcatctgaccagcagcgcctttcccaactctagctgggggtggggcaggctgatgggacagaattggatacataacgccagcattccttttgagcgccccccacccctgggggctgttttcaactgccaaaatgctctagtgccttctaaaggtgttgccccttctagggttattgcatttggattggggtccctctgaaatttcatacatgatagacacatatgagggggaatagtctagatgactcctcagtactttggaggcccctatataatccatgct

SEQ ID NO: 20176 - DNA, 548 bp, Macaca Mulatta
tccgcaactgctcatgggtgacaccaaggagcagcgcatcctgcaccacgtgttgcagcatgcggagcctgggaatgcacagagcgtggtggaggccatcgacacctactgccagcagaaggagtgggccatgaacgtgggtgacaagaaaggcaagatcgtggacgccgtgattcaggagcaccagccctccatgctgctggagctgggggcctactgtggctactcagctgtgcgcatggcccgcctgctgtcaccgggtgcgaggttgctcaccatcgagatcaaccctgactacgccgccatcacccagcggatggtggatatcgctggcaatgcagggacaaggtcaccgttgtggtaggggcggtcccaggacatcatcccccagcttgacgaagaagtatgatgtggacacgctggacatggtcttcctcgaccactggagggaccggtacctgccaaaacacgcttctcctggaggaatgtggcctgctgaggaaggggggacagtgctactggctgacaaacgtgatctgcccaggtgc

SEQ ID NO: 20177 - DNA, 885 bp, Macaca Mulatta
  misc_feature (1)...(885): n = A,T,C or G
gggtcaacacccctgtgtggatgcctgtggaagannnnnnnnnnnnnnnnnnnnnnnnnnnnnnnnnnnnnnnggtgtgtgtgggtgtgtgtggcnnnnnnnnnnnnnnnnnnnnnnnnnnnnnnnnnnnttctgttacaatgtattccgtgttgcattattcatttagtgagttattccttgatcattttgggacaattgtgttcatctgaaattctgaagagcacttaccgtaacctgtcgctgtgtttaattttacttctctgcctctgacatttaatttagtgatcatagcatagtttattattgaaggaagccaaatttatcaaagcatagatgtcttggtagattaaatatagattagaaaaaattcctaagaatccgagtagaaataaaagtgaatgaaagattaaacacatgatcagaatttctagaaagattagcaaagtccttttcttccgttaaaaaaannnnnnnnnnnnnnnnnnnnnnnnnnnnnnnnnnaaaatttttaggaaagttttttctgtagatcattttaactaagtcatatttattttccctttcaaaaaagctgtatccttagggtggaaatttattttaccttaccctgtggtggggatactccctgaaaaaaacagctgaaaagccctctgtctgccaatttacggatttttttaaggtgcaccaataaataaatggtttgtataaatatccaggaatttttttagggaaagggcctcaattcctttccaaaactggaggaatgcaaaatacactttcttatttcatggtaaaaaaaatatgggcgcgttttaagaaggtccctgggcctcaaaattcggtgtctgggacttcagggggaccacgaaactttttaatttc

SEQ ID NO: 20178 - DNA, 640 bp, Macaca Mulatta
ccctgacccccaccctgctccacccaggcttggcgactgtgatatgagtgacagcagctgcagcagccttgccgcgaccctgttggccaaccatagcctgcgcgagctggacctcagcaacaactgcctgggggacgcgggcgtcctgcagctggtggagagtgtccggcagccgggctgcctcctggagcagctggtgtatgtggatgcgttgggcgggtggtgtggccagggctgcccagggaggaaggcgggggttggggaggacacagacccatgcctcccttctggcctctgtgcagcctgtacgacatttactggtccgaggcgatggaggaccggctgcaggccctggaggaggagaagccatccctgagggtcatctcctgaggcgcttcctgccgctgctctccctggacgaccggcttcgaggcacccctggggctgaccagcccctgccacgtcctcgccctgcatatcctaggtttgaagagaaatgctcagatccgcttatttttgccagtatattttggacactttataaaccattaaagcactttcttggcaggaggggctcttgtccttcctggggtccctgcgagttgtgctggcatcagagacgacaccacctcacgtggca

SEQ ID NO: 20179 - DNA, 838 bp, Macaca Mulatta
  misc_feature (1)...(838): n = A,T,C or G
gggcttttcgaggaagacgcggtcgtaggacttgcggatctttggttcgcacgctcctgctcctgactcaccgctgttcgctctcgccgaggaacaagtcggtcaggaagccgcgcagcaggcatggcttttaaggatactggaaaaacacccgtggagccggaggtggcaattcaccgaattcgaatcaccctaacgagccgcaacgttaaatccttggaaaaggtgtgtgctgacttgatcagaggcgcgaaggaaaagaacctgaaagtgaaaggaccagttcgaatgcctaccaagactttgagaatcactacaagaaaaactccttgtggtgaaggttctaagacatgggatcgtttccagatgagaatccacaagcgactcattgacttgcacagtccttctgagattgttaagcagattacttccatcagtattgagccaggagttgaggtggaagtcaccattgcagatgcttaagtcaactattttaataaattgattaccagttgtttnaaaagaaaacacggaaatcaagacttacctaccatttggctacaaccgcttcaacaaaaaaaatttttcttgtcgggcccccctcggccccttaaaaaaacttttctaaaccctttctttttgggccccgcggggcccccattagggtaaggggaaacagggcccaaaagctgttttccctaaggagaatcccggggccatgaactaaggcccttgggatttctccnnnnnnnnnnnnnnnnnnnnnnnnnnnnnnnnncgaaggcgnnnnnnnnnnnnnnnnnnnaatagggagtttctgaagggcccttactgtggg

SEQ ID NO: 20180 - DNA, 828 bp, Macaca Mulatta
  misc_feature (1)...(828): n = A,T,C or G
gggggagggagtccgagtggagcgagcgagctgactggttgtgtggtcgcgtctcggaaaccggtagcgcttgcagcatggctgaccaactgaccgaagagcagattgcagaattcaaagaagctttttcactatttgacaaagatggtgatggaactataacaacaaaggaattgggaactgtaatgaggtctcttgggcagaatcccacagaagcagagttacaggacatgattaatgaagtagatgctgatggtaatggcacaattgacttccctgaatttctgacaatgatggcaagaaaaatgaaagacacagacagtgaagaagaaattagagaagcattccgtgtgtttgataaggatggcaatggctatattagtgctgcagaacttcgccatgtgatgacaaaccttggagagaagttaacagatgaagaagttgatgaaatgatcagggaagcagatattgatggtgatggtcaagtaaactatgaagagtttgtacaaatgatgacagcaaagtgaagaccttgtacagaatgtgttaaatttcttgtacaaaattgtttatttgccttttctttgtttgtaacttatctgtaaaaggtttctccctactgtcaaaaaaatatgcatgtatagtaattagggacttcattcctccatgttttcttcccttatcttactgtcattgttcctgaaaacctattttagaaaattggatcagtaacatgttgcatgttggctatctgaaatcagctcgcctctattaatgatgtaagttagattcgtacttttagatctgagcccgnttaagggatactcg

SEQ ID NO: 20181 - DNA, 744 bp, Macaca Mulatta
tgaacacagctggtgcttatgccgaattatttgtgatgagtaaatatttagtttctttttcttcatatttataatgttgatctggcatcctcaggctgcagcttaattagcttataaattactcatctctgtctttaccagcaggctctgtattgttgatatttgcgacttgttttgcttttccattggtggaattgaagtaattagtttttaattacataagatgcctgtttgctatttggtggaagatagaagttcatattgaagcagttatatttgtactgtagttcaataaaagaaaaatgaagtattctgtagctatatttttcatagagctcatgagcatttactgtacttgctggatcttgccaagatcatatattctgctgtattgccaaagtgtcttcataccaaatttaaggtggttttaatatatgtttcatggaagttgtttataaaattcaaaggtatttcatttaggtgaaaagtcttatttattaaagtggtttgaataaagtagatcaaaacttccagagatcttaatggctatttaggaagaaatatcactcactataatttaaataaagaataaaaataaattttgtggtggcaaatgtttggtagaactgtaattagaaaaaaacaagtgtatttgggtgatggttacactagaagcccagacattacgactacacaatatattcatgtatctaaactgtacttgtaccccctaaatttattttt

SEQ ID NO: 20182 - DNA, 2368 bp, Macaca Mulatta
  misc_feature (1)...(2368): n = A,T,C or G
ggcgccgctcggcccagggcagggaccccgccaggacccggaccgcccggtcgggcctccgcccgcgcctctnnnnnnnnnnnnnnnnnnnnnnnnnnnnnnnnnnnnnnnnnnnnnnnnnnnnnnnnnnnnnnnnnnnnnnnnnnnnnnnnnnnnnnnnnnnnnnnnnnnnnnnnnnnnnnnnnnnnnnnnnnnnnnnnnnnnnnnnnnnnnnnnnngccggtctaattgaagccaacggagaactcaaggtcttcatagaccagaaccttagtcccggaaaagnnnnnnnnnnnnnnnnnnnnnnnnnnnnnnnnnnnnnnnnnnnnnnnnnnnnnnnnnnnnnnnnnnnnnnnnnnnnnnnnnnnnnnnnnnnnnnnnnnnnnnnnnggtaattggtacgcctcagagaccggcagcgtcaaacaccctggtggtaggaagcccacacacccccagcactcactttgcctctcagaaccagccttccgactcctcaccttggtctgccggaagcgcaacaggaaaggagagaagaatggcaagggcctgcggcatttctccatgaaggtctgcgagaaggtgcagaggaaagggaccacttcctacaacgaagtggcggacgagctggtcgcggagttcagtgctgccgacaaccacatcttaccaaacgagtcagncttatgaccagaagaacataagacggcgcgtctacgatgccttaaatgtgctgatggccatgaacatcatctccaaggagaagaaggagatcaagtggattggtctgcccaccaactcggctcaggaatgtcagaacttagaggtggnnnnnnnnnnnnnnnnnnnnnnnnnnnnnnnnnnnnnnnnnnnnnnnnnnnnnnnnnnnnnnnnagcaaattgccttcaagaacctggtgcagagaaaccggcatgcggagcagcaggccagccggccgccgccacccaactcagtcatccacctgcccttcatcatcgtcaacaccagcaagaagacggtcatcgactgcagcatctccaatgacannnnnnnnnnnnnnnnnnnnnnnnnnnnnnnnnnnnnnnnnnnnnnnnnnnnnnnnnnnnnnnnnnnnnnnnnnnnnnnnnnnnnnnnnnnnnnnnnnnnnnnnnnnnnnnnnnnnnnnnnnnnnnnnnnnnnnnnnnnnnnnnnnnnnnnnnnnnnnnnnnnnnnnnnnnnnnnnnnnnnnnnnnnnnnnnnnnnnnnnnnnnnnnnnnnnnnnnnnnnnnnnnnnnnnnnnnnnnnnnnnnnnnnnnnnnnnnnnnnnnnnnnnnnnnnnnnnnnnnnnnnnnnnnnnnnnnnnnnnnnnnnnnnnnnnnnnnnnnnnnnnnnnnnnnnnnnnnnnnnnnnnnnnnnnnnnnnnnnnnnnnnnnnnnnnnnnnnnnnnnnnnnnnnnnnnnnnnnnnnnnnnnnnnnnnnnnnnnnnnnnnnnnnnnnnnnnnnnnnnnnnnnnnnnnnnnnnnnnnnnnnnnnnnnnnnnnnnnnnnnnnnnnnnnnnnnnnnnnnnnnnnnnnnnnnnnnnnnnnnnnnnnnnnnnnnnnnnnnnnnnnnnnnnnnnnnnnnnnnnnnnnnnnnnnnnnnnnnnnnnnnnnnnnnnnnnnnnnnnnnnnnnnnnnnnnnnnnnnnnnnnnnnnnnnnnnnnnnnnnnnnnnnnnnnnnnnnnnnnnnnnnnnnnnnnnnnnnnnnnnnnnnnnnnnnnnnnnnnnnnnnnnnnnnnnnnnnnnnnnnnnnnnnnnnnnnnnnnnnnnnnnnnnnnnnnnnnnnnnnnnnnnnnnnnnnnnnnnnnnnnnnnnnnnnnnnnnnnnnnnnnnnnnnnnnnnnnnnnnnnnnnnnnnnnnnnnnnnnnnnnnnnnnnnnnnnnnnnnnnnnnnnnnnnnnnnnnnnnnnnnnnnnnnnnnnnnnnnnnnnnnnnnnnnnnnnnctttctaaacaataaacaacatcaaccttattgattttattttcccttaaattatattgactgttgtgagtccataagatttatacactcttttctctccctattttgcagcaacaaattgaaaaatgcttttgtttggtcgtttttgttttgcttggataaagcttgttatcatgctggtgaggctatggatactgtctggatggcttacaatggtttattgcttatggcaaaatttgcctgatttcttataggcagcttttggaaaccttttattatgcagttgtttacatacttataagtctataatttaaagacatgtacttgaaacaaatgttgtatttgtttcataagcatcttcctacaatccactataacattgaaattacctatagagaatgttttaacaa

SEQ ID NO: 20183 - DNA, 203 bp, Macaca Mulatta
ttacaatttcttaacacagtaagttacatacagatcacttttcattttctttgcttccttaggatttcagttctccatttttactaagaaggaagaatagagataaaaataaaatatccattatttgctcaaaaaagtcttatttctcccttttagcaagctattttcaacttggaaaactaacaacaaccctgaattaaact

SEQ ID NO: 20184 - DNA, 1780 bp, Macaca Mulatta
  misc_feature (1)...(1780): n = A,T,C or G
ggtatggcctcacaagtcttggtctatccaccatatgtttatcaaactcagtcaagtgccttttgtagtgtgaagaaactcaaagtagagccaagcagttgtatattccaggaaagaaactatccacggacctatgtgaatggtagaaactttggaaattctcatcctcccactaagggtagtgcttttcagacaaagataccatttaatagacctcgaggacacaacttttcattgcagacaagtgctgttgttttgaaaaacactgcaggtgctacaaaggtcatagcagctcaggctcagcaagctcaattgcaagcacctcagattggggcgtggcgaaacagattgcatttcctagaaggcccccagcgatgtggattgaagcgcaagagtgaggagttggataatcatagcagcgcaatgcagattgtcgatgaattgtccatacttcctgcaatgttgcaaaccaacatgggaaatccagtgacagttgtgacaactaccacaggatcaaaacagaattgtaccactggagaaggtgactatcagttagtgcagcatgaagtcttatgctccatgaaaaatacttatgaagtccttgattttcttggtcgaggcacctttggccaggtagttaaatgctggaaaagagggacaaatgaaattgtagcaatcaaaattttgaaaaatcatccttcttatgctcgtcaaggtcaaatagaagtgagcatattagcaaggctcagtactgaaaatgctgatgaatataactttgtacgagcttatgaatgctttcagcaccgtaaccatacttgtttagtttttgagatgctggaacaaaacttgtatgactttctgaaacaaaataaatttagtcccctgccactaaaagtgattcggcccattcttcagcaagtgaccactgcactgaaaaaattgaaaagtcttggtttaattcatgctgatctcaagccagagaatattatgttggtggatcctgttcggcagccttacagggttaaagtaatagactttgggtcggccagtcatgtatcaaagactgtttgttcaacgtatctacaatctcggtactacanncagagctccggagattatattggggttgccattttgtgaagccatagacatgtggtcattgggatgtgtgattgcagaattattccttggatggccgctctacccaggagccttggagtatgatcannnnnnnnnnnnnnnnnnnnnnnnnnnnnnnnnnnnnnnnnnnnnnnnnnnnnnnnnnnnnnnnnnnnnnnnnnnnnnnnnnnnnnnnnnnnnnnnnnnnnnnnnnnnnnnnnnnnnnnnnnnnnnnnnnnnnnnnnnnnnnnnnnnnnnnnnnnnnnnnnnnnnnnnnnnnnnnnnnnnnnnnnnnnnnnnnnnnnnnnnnnnnnnnnnnnnnnnnnnnnnnnnnnnnnnnnnnnnnnnnnnnnnnnnnnnnnnnnnnnnnnnnnnnnnnnnnnnnnnnnnnnnnnnnnnnnnnnnnnnnnnnnnnnnnnnnnnnnnnnnnnnnnnnnnnnnnnnnnnnnnnnnnnnnnnnnnnnnnnnnnnnnnnnnnnnnnnnnnnnnnnnnnnnnnnnntaaagtcctggttttcatattatggctatttgtaagtcccacctaaatttatgtgacacaaataatcacaacaaaacttcacttttaagaccagttgcttcaagcagtactgctacactgactgcaaattttactaaaattgggacattaagaagtcagg

SEQ ID NO: 20185 - DNA, 1742 bp, Macaca Mulatta
  misc_feature (1)...(1742): n = A,T,C or G
aataaagtggaagtttgttcatttattcagtaaatgtttattgattgcattctgtgtgccaagcactgttctaggtgctggggatacagcagtgaacagataagtctcttccttcccggaacttacgttttattgaagggaggagaaacatgcaatcaatgagtgaataatatgctttgtggtgataagggctgttggaaaagcaaaagcattgtaaaggggatggagatggggaagagagaagggacttgccatttttatatgagatgctcggtgctgattattacaactgtttggtgacctacttcaccgacctgtgaggatttcttccctttaagtactggattcttgatctttctgcatcatcaannnnnnnnnnnnnnnnnnnnnnnnnnnnnnnnnnnnnnnnnnnnnnnnnnnnnnnnnnnnnnnnnnnnnnnnnnnnnnnnnnnnnnnnnnnnnnnnnnnnnnnnnnnnnnnnnnnnnnnnnnnnnnnnnnnnnnnnnnnnnnnnnnnnnnnnnnnnnnnnnnnnnnnnnnnnnnnnnnnnnnnnnnnnnnnnnnnnnnnnnnnnnnnnnnnnnnnnnnnnnnnnnnnnnnnnnnnnnnnnnnnnnnnnnnnnnnnnnnnnnnnnnnnnnnnnnnnnnnnnnnnnnnnnnnnnnnnnnnnnnnnnnnnnnnnnnnnnnnnnnnnnnnnnnnnnnnnnnnnnnnnnnnnnnnnnnnnnnnnnnnnnnnnnnnaaacgcactctttcaaagactggaagcttgaaaagggatggacagtcatgactacactttttcctttcagaggggctggtgctggtacagaatgttgatataaagcttgaaattcttgcatatggtcatagaaaatgcatctttggttttgtgtttttatcacttgctttcaacttaggcttttggctcagaagattattgaataatgatttgtcttagtttctgtttcagtaagggaattctgaggccgttgctatgataccatcattaagacattcacatgtcttcatataatatctcttcatttcaaatcctaatcagtatttcatactcttattacagggctttgatgctgctagcactgtcttttacataggaaattctagatttgcacagtaatagaggaattagaattacctaactatacactttgattcaacctgctaaatcaggggttcactactagcttggagaaactttgtagtaattaattgctactagccttattggaaacaaattatcaactagtttcccctgcacaaattttgaaattcactgcttcacttaatctatttatattagaaataatggattaataaagattatttaattatatattactgaactagtattaaatgaaaaacagggactgaaatagttctgtattccgtgtttgcaacagccagccaactaagcagaggataaaccgttagcaatgaatgtaataattactcatttccaagatatctaagcacataagcaaatacaggaacagacttcattctttttcttaacaaaaagcatcttcagtgtgtgatttaaaagaaagaagattctggtttcctagaaaacaatattttggcctgtgttgattcttattctgaatgtgtgtttacataatgtacagtatatattcagaaagtatttttgcttcaagatttactttctatgatgtagtgctttggtattcccactagaacgcccaccttccccaacagatgta

SEQ ID NO: 20186 - DNA, 183 bp, Macaca Mulatta
agaaatgcctcttactgtgacaaagtgtccattgagctcagagtttttgagaatacagatgcttccctgccattcatctcatacccgcaaattttaaccttgtcaacctctggggtattagtgtgccctgacctgagagaattcacccgtgacaaaactgacgtgaagattcaatggtacaag

SEQ ID NO: 20187 - DNA, 214 bp, Macaca Mulatta
  misc_feature (1)...(214): n = A,T,C or G
ggaagggaacctgattggattaccccttctgattgacaactatgtgccccctttggagggactgcctatcttcattcttcgactagccactgaggtnaggtgaattgggatgaagaaaaggaatgttttgaaagcctcagtaaagaatgtgctatgttctactccatccggaagcagtacatatctgaggagtcgaccctctcaggccagcagn

SEQ ID NO: 20188 - DNA, 662 bp, Macaca Mulatta
  misc_feature (1)...(662): n = A,T,C or G
tattgaaaggaacaacaagcttataaatacattaggacctggaagtcagttgaccagccacgacagtgacagcgtttaacaaannaagcttagagaaacctccagaagactgctatcatggcagagaaacccaagctccactacttcaatgcacggggcagaatggagtccacccggtggctcctggctgcagctggagtagannnnnnnnnnnnnnnnnnnnnnnnnnnnnnnnnnnnnnnnnnnnnnnnnnnnnnnnnnnnnnnnnnnnnnnnnnnnnnnnnnnnnnnnnnnnnnnnnnnnnnnnnnnnnnnnnnnnnnnnnnnnnnnnnnnnnnnnnnnnnnnnnnnnnnnnnnnnnnnnnnnnnnnnnnnnnnnnnnnnnnnnnnnnnnnnnnnnnnnnnnnnnnnnnnnnnnnnnnnnnnnnnnnnnnnnnnnnnnnnnnnnnnnnnnnnnnnnnnnnnnnnnnnnnnnnnnnnnnnnnnnnnnnnnnnnnnnnnnnnnnnnnnnnnnnnnnnnnnnnnnnnnnngtcttaaagagccatggacaagactaccttgttggcaacaagctgagccgggctgacattcacctggtggaacttctctactacgtggaagagcttgactccagccttatctccagcttccctctgctgaag

SEQ ID NO: 20189 - DNA, 4942 bp, Macaca Mulatta
  misc_feature (1)...(4942): n = A,T,C or G
gagtagctcccacttttgggcggggccagaagcgcagcagggcgcggctccgggtgtgggcggtgacacgcgggaacgcggagatgcccggccaccgagaaggaccttcgcggaggacgccgcgtgggaagaagatccagcagaacactttcacgcgctggtgcaacgagcacttgaagtgcgtgagcaagcgcatcgccaacctgcagacggacntgagcgacgggctgcggctcatcgcgctgctggaggtgctcagccagaagaagatgcaccgcaagcacaaccagcggcccactttccgccaaatgcagcttgagaatgtgtcggtggcgctcgagttcctggaccgcgagagcatcaaactggtgtccatcgnnnnnnnnnnnnnnnnnnnnnnnnnnnnnnnnnnnnnnnnnnnnnnnnnnnnnnnnnnnnnnnnnnnnnnnnnnnnnnnnnnnnnnnnnnnnnnnnnnnnnnnnnnnnnnnnnnnnnnnnnnnnnnnnnnnnnnnnnnnnnnnnnnnnnnnnnnnnnnnnnnnnnnnnnnnnnnnnnnnnnnnnnnnnnnnnnnnnnnnnnnnnnnnnnnnnnnnnnnnnnnnnnnnnnnnnnnnnnnnnnnnnnnnnnnnnnnnnnnnnnnnnnnnnnnnnnnnnnnnnnnnnnnnnnnnnnnnnnnnnnnnnnnnnnnnnnnnnnnnnnnnnnnnnnnnnnnnnnnnnnnnnnnnnnnnnnnnnnnnnnnnnnnnnnnnnnnnnnnnnnnnnnnnnnnnnnnnnnnnnnnnnnnnnnnnnnnnnnnnnnnnnnnnnnnnnnnnnnnnnnnnnnnnnnnnnnnnnnnnnnnnnnnnnnnnnnnnnnnnnnnnnnnnnnnnnnnnnnnnnnnnnnnnnnnnnnnnnnnnnnnnnnnnnnnnnnnnnnnnnnnnnnnnnnnnnnnnnnnnnnnnnnnnnnnnnnnnnnnnnnnnnnnnnnnnnnnnnnnnnnnnnnnnnnnnnnnnnnnnnnnnnnnnnnnnnnnnnnnnnnnnnnnnnnnnnnnnnnnnnnnnnnnnnnnnnnnnnnnnnnnnnnnnnnnnnnnnnnnnnnnnnnnnnnnnnnnnnnnnnnnnnnnnnnnnnnnnnnnnnnnnnnnnnnnnnnnnnnnnnnnnnnnnnnnnnnnnnnnnnnnnnnnnnnnnnnnnnnnnnnnnnnnnnnnnnnnnnnnnnnnnnnnnnnnnnnnnnnnnnnnnnnnnnnnggcaggagctggcacgggcgaggttgaggttgtgatccaggaccccgcgggacagaagggcacggtagagcctcagctggaggcccggggcgacagcacataccgctgcacgtaccagcccaccatggagggtgtccacaccgtgcacgtcacgtttgccggcgtgcccatccctcgcagcccatacactgtcactgttggccaannagcctgtaacccgagtgcctgccgggcagtcggccggggcctccagcccaagggtgtgcgggtgaaggagacagccgacttcaaggtgtacacaaagggcgctggcagtggggagctgaaggtcaccgtgaagggccccnnnnnnnnnnnnnnnnnnnnnnnnnnnnnnnnnnnnnnnnnnnnnnnnnnnnnnnnnnnnnnnnnnnnnnnnnnnnnnnnnnnnnnnnnnnnnnnnnnnnnnnnnnnnnnnnnnnnnnnnnnnnnnnnnnnnnnnnnnnnnnnnnnnnnnnnnnnnnnnnnnnnnnnnnnnnnnnnnnnnnnnnnnnnnnnnnnnnnnnnnnnnnnnnnnnnnnnnnnnnnnnnnnnnnnnnnnnnnnnnnnnnnnnnnnnnnnnnnnnnnnnnnnnnnnnnnnnnnnnnnnnnnnnnnnnnnnnnnnnnnnnnnnnnnnnnnnnnnnnnnnnnnnnnnnnnnnnnnnnnnnnnnnnnnnnnnnnnnnnnnnnnnnnnnnnnnnnnnnnnnnnnnnnnnnnnnnnnnnnnnnnnnnnnnnnnnnnnnnnnnnnnnnnnnnnnnnnnnnnnnnnnnnnnnnnnnnnnnnnnnnnnnnnnnnnnnnnnnnnnnnnnnnnnnnnnnnnnnnnnnnnnnnnnnnnnnnnnnnnnnnnnnnnnnnnnnnnnnnnnnnnnnnnnnnnnnnnnnnnnnnnnnnnnnnnnnnnnnnnnnnnnnnnnnnnnnnnnnnnnnnnnnnnnnnnnnnnnnnnnnnnnnnnnnnnnnnnnnnnnnnnnnnnnnnnnnnnnnnnnnnnnnnnnnnnnnnnnnnnnnnnnnnnnnnnnnnnnnnnnnnnnnnnnnnnnnnnnnnnnnnnnnnnnnnnnnnnnnnnnnnnnnnnnnnnnnnnnnnnnnnnnnnnnnnnnnnnnnnnnnnnnnnnnnnnnnnnnnnnnnnnnnnnnnnnnnnnnnnnnnnnnnnnnnnnnnnnnnnnnnnnnnnnnnnnnnnnnnnnnnnnnnnnnnnnnnnnnnnnnnnnnnnnnnnnnnnnnnnnnnnnnnnnnnnnnnnnnnnnnnnnnnnnnnnnnnnnnnnnnnnnnnnnnnnnnnnnnnnnnnnnnnnnnnnnnnnnnnnnnnnnnnnnnnnnnnnnnnnnnnnnnnnnnnnnnnnnnnnnnnnnnnnnnnnnnnnnnnnnnnnnnnnnnnnnnnnnnnnnnnnnnnnnnnnnnnnnnnnnnnnnnnnnnnnnnnnnnnnnnnnnnnnnnnnnnnnnnnnnnnnnnnnnnnnnnnnnnnnnnnnnnnnnnnnnnnnnnnnnnnnnnnnnnnnnnnnnnnnnnnnnnnnnnnnnnnnnnnnnnnnnnnnnnnnnnnnnnnnnnnnnnnnnnnnnnnnnnnnnnnnnnnnnnnnnnnnnnnnnnnnnnnnnnnnnnnnnnnnnnnnnnnnnnnnnnnnnnnnnnnnnnnnnnnnnnnnnnnnnnnnnnnnnnnnnnnnnnnnnnnnnnnnnnnnnnnnnnnnnnnnnnnnnnnnnnnnnnnnnnnnnnnnnnnnnnnnnnnnnnnnnnnnnnnnnnnnnnnnnnnnnnnnnnnnnnnnnnnnnnnnnnnnnnnnnnnnnnnnnnnnnnnnnnnnnnnnnnnnnnnnnnnnnnnnnnnnnnnnnnnnnnnnnnnnnnnnnnnnnnnnnnnnnnnnnnnnnnnnnnnnnnnnnnnnnnnnnnnnnnnnnnnnnnnnnnnnnnnnnnnnnnnnnnnnnnnnnnnnnnnnnnnnnnnnnnnnnnnnnnnnnnnnnnnnnnnnnnnnnnnnnnnnnnnnnnnnnnnnnnnnnnnnnnnnnnnnnnnnnnnnnnnnnnnnnnnnnnnnnnnnnnnnnnnnnnnnnnnnnnnnnnnnnnnnnnnnnnnntgacagtggagggcccctgcgaggcacagctcgagtgcttggacaacggggacggcacatgttccgtgtcctatgtgcccaccgagcccggggactacaacatcaacatccttttcgctgacacccacatccctggctccccattcaaggcccatgtggttccctgctttgacgcatccaaagtcaagtgctcaggccctgggctggagcgggccaccgctggggaagtgggccaattccaagtagactgctcgagtgcaggcagtgcagagctgaccattgagatctgctcagaggcggggctgccagccgaggtgtacatccaggaccacggcgacggcacgcacactatcacatacattcctctctgccccggggcctacactgtcaccatcaagtacggcggccagcctgtgcccaacttccccagcaagctgcaggtggagcccgcagtggacacttccggcgtccagtgttacgggcctgggattgagggccagggtnnnnnnnnnnnnnnnnnnnnnnnnnnnnnnnnnnnnnnnnnnnnnnnnnnnnnnnnnnnnnnnnnnnnnnnnnnnnnnnnnnnnnnnnnnnnnnnnnnnnnnnnnnnnnnnnnnnnnnnnnnnnnnnnnnnnnnnnnnnnnnnnnnnnnnnnnnnnnnnnnnnnnnnnnnnnnnnnnnnnnnnnnnnnnnnnnnnnnnnnnnnnnnnnnnnnnnnnnnnnnnnnnnnnnnnnnnnnnnnnnnnnnnnnnnnnnnnnnnnnnnnnnnnnnnnnnnnnnnnnnnnnnnnnnnnnnnnnnnnnnnnnnnnnnnnnnnnnnnnnnnnnnnnnnnnnnnnnnnnnnnnnnnnnnnnnnnnnnnnnnnnnnnnnnnnnnnnnnnnnnnnnnnnnnnnnnnnnnnnnnnnnnnnnnnnnnnnnnnnnnnnnnnnnnnnnnnnnnnnnnnnnnnnnnnnnnnnnnnnnnnnnnnnnnnnnnnnnnnnnnnnnnnnnnnnnnnnnnnnnnnnnnnnnnnnnnnnnnnnnnnnnnnnnnnnnnnnnnnnnnnnnnnnnnnnnnnnnnnnnnnnnnnnnnnnnnnnnnnnnnnnnnnnnnnnnnnnnnnnnnnnnnnnnnnnnnnnnnnnnnnnnnnnnnnnnnnnnnnnnnnnnnnnnnnnnnnnnnnnnnnnnnnnnnnnnnnnnnnnnnnnnnnnnnnnnnnnnnnnnnnnnnnnnnnnnnnnnnnnnnnnnnnnnnnnnnnnnnnnnnnnnnnnnnnnnnnnnnnnnnnnnnnnnnnnnnnnnnnnnnnnnnnnnnnnnnnnnnnnnnnnnnnnnnnnnnnnnnnnnnnnnnnnnnnnnnnnnnnnnnnnnnnnnnnnnnnnnnnnnnnnnnnnnnnnnnnnnnnnnnnnnnnnnnnnnnnnnnnnnnnnnnnnnnnnnnnnnnnnnnnnnnnnnnnnnnnnnnnnnnnnnnngatccggaaggcaagccgaagaagacacacatccaagacaaccatgacggcacgtatacagtggcctatgtgccagatgtgacgggtcgctactccatcctcatcaagtatggaggtgacgagatccccttctccccgtaccgcgtgcgtgccgtgtccaccgttgacgtcagcaagtgca

SEQ ID NO: 20190 - DNA, 1735 bp, Macaca Mulatta
  misc_feature (1)...(1735): n = A,T,C or G
cggcgggccgctcgatactgcaccatggaccccactcgccccnctggagctgtcgattctgctgctgctcctgacggaggctgcactgggcgatgctgctcaggagccaacaggaaataacgcggagatctgcctcctgcccctagactacggaccctgccgggccctacttccccgttactactacgacaggtacacgcagagatgccgccagttcttgtacgggggctgcgagggcaacgccaacaatttctacacctgggaggcctgcgacgaggcttgctggcggatagaaaaagttcccaaagtttgccggctgcaagtgagcgtggacgaccagtgtgaggggtccacagaaaagtatttctttaatctaagttccatgacatgtgaaaaattctcatctggtgggtgtcaccggaactggattgagaacaggtttccagatgaagttacttgtatggccttctgtgcaccaaagaaaagtccatcattttgctacagtccaaaagatgagggactgtgctctgccaacgtgactcgctattattttaatccaagatacaaaacctgtgatgctttcacctatactggctgtggagggaatgacaataactttgttagcagggaggattgcagacgtgcctgtgcaaaagcttgacaaaggcaaaagaagataccaaagtttcgctttgccagtagaatccggaaaattcggaagaagcaattttaaacattcttaatatgtcatcttgtgaatgcttatttgcctttatggttatatgtgaagaataatatgacagcatgaggaaacaaatcattagtgatttattcaccagtttttattgacacaagttcactttttaaaaatttgtatgttttttatacacagctagctgctattcaaatgtgaatctaccatttttaatttatggttcaactgtttgtgcgactgaattcttgcaatgcataagatataaaagcaaatatgactcactcatttcttgggattgtattcctgatttcagaagaggataataactgaaacaacgtaagacaacataatcatgtgttttttaagatatttgagaatataaaggactagcaaataaaactcattttgctttaaaagttggattatattttaggcccaagaagatgaagtcgcagatttaccaacactttaaaaatattactcccattttattgtgttagattgcagtacagtgagtgaataaggggatttatttaaaagatcataactttcttgactgatttaaaaagctgatcaatttattaaagccagaaatgttgtcctctgggaaaacaatttctatctatttatctaccaatccccactcacatgtatatgtttgtgtttacatatagatagatggaaggattttcctggtgttacattatttcctaagacagagtgggttggagaccactaaagttataaaaaccaaggtaaagtaaagtttttcaaatgtttgtactgtttaaggtgtttatttatataaacctatgctataaatttaataatattaaccagtaaattatcattgattaaatatgctcattccaatgaaacagcttttttctttctctgtaataaaataannnnnnnnnnnnnnnnnnnnnnnnnnnnnnnnnnnnnnnnnnnnngnnnnnnnnnnnnnnnnnnnnnnnnnngnnnnnnnnnnnnnnnnnnnnngnnnnnnnnnnnnnnnnt

SEQ ID NO: 20191 - DNA, 715 bp, Macaca Mulatta
gatgcaacttaattttattaggacaaggctgttggacactggagtggcaccttccatggccaggagtggcaattgggaggggtcacaagggatgccacccaggcatctagaagccacagctgccctccacagcgcggcaccgcacggtgcgcaggaatgtctcgaccttgttcatgtccttcctgaagcagtagagcagcctgtagttcttgagcagtgtgtcatcgttgtgcgagtttgtgtcaaacttgctgtaggtctgcttgaagatctgcccagtccgggggctgccgtcttccagcctccacatcagcgtttggatgccttcctctaggttctttaggtagagatagacgttgaagttcgaggtgccatacaccaggttgttggtaaacacactcctcgagtaactgcacgggctccagccacgactggatgagaagcagggagatgtggagcagctttctaggttggattttctgctgtgtttcctcgggtgcgagcggcggcagtccggggggaaaggagctgagcggagaccaaagtcagctgggagacagtgggtctgtgagagaacggatagaggagctggggccacgagcgccgttgacaagcaatggggaagaaacagaaaaacaagaacgaagacagtgccaaggatgacattgatcttgatgccttggctgcagaaatagaaggagctggtgctgccaaa

SEQ ID NO: 20192 - DNA, 2438 bp, Macaca Mulatta
  misc_feature (1)...(2438): n = A,T,C or G
tgaaatgaagagaagaagggatttttatgcagctcatccttctgctgatgngctgccaatggctctaatgaagatagaggagaggttgcagatgaagataagagaattataactgatgatgagataataagcttatccattgaattctttgaccagaacagnagattggatcggaaagtaaacaaagacaaagagaaatctaaggaggaggtnnnnnnnnnnnnnnnnnnnnnnnnnnnnnnnnnnnnnnnnnnnnnnnnnnnnnnnnnnnnnnnnnnnnnnnnnnnnnnnnnnnnnnnnnnnnnnnnnnnnnnnnnnnnnnnnnnnnnnnnnnnnnnnnnnnnnnnnnnnnnnnnnnnnnnnnnnnnnnnnnnnnnnnnnnnnnnnnngaatggtccacttcctttgaaatacagagttcgacctacttgtaaaagaatgaagatcagtcatcagagagatggactgacaaatgctggagaactggaaagtgactctgggagtgacaaggccaacagcccagcaggaggtattccctccacctcttcttgtttgcctagccccagtactccagtgcagtctcctcatccacagtttcctcacatttccagtactatgaatggaaccagcaacagccccagcggtaaccaccaatcttcttttgccaatagacctcgaaaatcatcagtaaatgggtcatcagcaacttcttctggttgatacctgagactgttaaggaaaaaaattttaaacccctgatttatatagatatcttcatgccattacagctttatagatgctaatacatgtgactatcgtccaatttgctttcttttgtagtgacattaaatttggctataaaagatggactacatgtgatactcctatggacgttaattgaaaagaaagatttttgttacaaagaattggtttcttggaaagcaggcaagactttttctctgtgttaggaaagatgggaaatggtttctgtaaccattgtttggatttggaaatactctgcagtggacataagcattgggccatagtnnnnnnnnnnnnnnnnnnnnnnnnnnnnnnnnnnnnnnnnnnnnnnnnnnnnnnnnnnnnnnnnnnnnnnnnnnnnnnnnnnnnnnnnnnnnnnnnnnnnnnnnnnnnnnnnnnnnnnnnnnnnnnnnnnnnnnnnnnnnnnnnnnnnnnnnnnnnnnnnnnnnnnnnnnnnnnnnnnnnnnnnnnnnnnnnnnnnnnnnnnnnnnnnnnnnnnnnnnnnnnnnnnnnnnnnnnnnnnnnnnnnnnnnnnnnnnnnnnnnnnnnnnnnnnnnnnnnnnnnnnnnnnnnnnnnnnnnnnnnnnnnnnnnnnnnnnnnnnnnnnnnnnnnnnnnnnnnnnnnnnnnnnnnnnnnnnnnnnnnnnnnnnnnnnnnnnnnnnnnnnnnnnnnnnnnnnnnnnnnnnnnnnnnnnnnnnnnnnnnnnnnnnnnnnnnnnnnnnnnnnnnnnnnnnnnnnnnnnnnnnnnnnnnnnnnnnnnnnnnnnnnnnnnnnnnnnnnnnnnnnnnnnnnnnnnnnnnnnnnnnnnnnnnnnnnnnnnnnnnnnnnnnnnnnnnnnnnnnnnnnnnnnnnnnnnnnnnnnnnnnnnnnnnnnnnnnnnnnnnnnnnnnnnnnnnnnnnnnnnnnnnnnnnnnnnnnnnnnnnnnnnnnnnnnnnnnnnnnnnnnnnnnnnnnnnnnnnnnnnnnnnnnnntaattttccattggctatgatggaattaatattgtattttaaaaatgcatattgatcactgtaattctaaaacaattttttaaataaaccagcaagttgctgaaagaaggctttttatcttaaagttattttaatatgtggtatagcaggaatttcaaatttaagagttgcttttacagttaacaatggaatatgccttctctgctatgtctggaagtagaagctatttattataagcttctacaggtatttttaaatagagcaagcatgttgaatttaaaatatgaataaccccacccaacaattttcaatttgttttttgctttggtcgaacttggtgtgtgttcatcacccatcagttatttgtgagggtgtttattctatatgaatattgtttcatgtttgtatgggaaaattgtagctaaacatttcactgtccccagtctgcaaaagaagcacaattctattgctttgtcttgcttatagtcattaaatcattacttttacatatattgctgttacttctgctttctttaaagatatagtaaaggatgttttatgaagtcacaaaatacatatatttttattttgacctaaatttgtacagtcccattgtaagtgttgtttctaattatagatgtaaaatgaaatttcatttgtaattggaaaaaatccaataaaaaggatattcatttagaaaata

SEQ ID NO: 20193 - DNA, 602 bp, Macaca Mulatta
  misc_feature (1)...(602): n = A,T,C or G
ctgctatttaaaatttcttgatcattgaatgtgagacccttctaacatgatttgagaagctgtacaagtataggcagagttattttcctgtttacnnnnnnnnnnnnnnnnnnnnnnnnnnnnttggtaggtgtctaattactgtttacttcattgttatattgcagtaaaagttttaaaacaaccattgcatgtttgcttttgatgtatccctttgtgaaattagcacttttggggccaatggagaaatgcagcattcactctccctgtcttttccccttccctcagcagaaatgtgtttatcagcaagtcgtgagtcaaactgctgcctttttaaaaacccacaaaatgctgattcagttcaaaattaatgcaaatgtttcaaaactgggtttctgatatttgtaaatgtgtttctttattagataagagtgtattaccattaaagtcattagtataatatcgctttcaaaaagagatggtagagaaaactataatccagcatcttttattgcattggaaagactggcaaaatcttttggaagggttgggagatgtggctggaaagtactttggacaatatacgatcaagatatctcatg

SEQ ID NO: 20194 - DNA, 231 bp, Macaca Mulatta
aggtttcttcgtttgagtcagtcgccttgattcagaatgtcacgagccttatgatatcatgctgaggcgccttgcaaatccgacaattaagatcctcctagaccttgaggtgatcagcataagaggccagatcccctcgagtcatctacacctagcttcaccttattctttaaagggcagaaaatttgagacggtgatcgccgtaacagtaaatttggcttacaattgggg

SEQ ID NO: 20195 - DNA, 2608 bp, Macaca Mulatta
  misc_feature (1)...(2608): n = A,T,C or G
ncataggtacaattggtcatgtagctcatgggaaatccacagttgtcaaagctatttctggagttcacaccgtcaggttcaaaaatgaactagaaagaaatattacaatcaagcttggatatgctaatgctaangatttataaacttgatgacccacgttgccctcggccagaatgttatagatcttgtgggagcagtacacctgatgagtttcctacagacattgcagggaccaaagggaacttcaaattagtcagnagacatgtttcctttgttgactgtcctggccatgatattttgatggctactatgctgaatggtgcagcagtgatggatgcagctcttctgttgatagnnnnnnnnnnnnnnnnnnnnnnnnnnnnnnnnnnnnnnnnnnnnnnnnnnnnnnnnnnnnnnnnnnnnnnnnnnnnnnnnnnnnnnnnnnnnnnnnnnnnnnnnnnnnnnnnnnnnnnnnnnnnnnnnnnnnnnnnnnnnnnnnnnnnnnnnnnnnnnnnnnnnnnnnnnngggagctcccattattccaatttcagctcttctgaaatacatattgaagttgtttgtgagtacatagtatagaaaattccagtacccccaagagactttacttcagagccccggcttattgngttattagatcttttgatgtcaacaaacctggctgtgaagttgatgaccttaagggaggtgtagctggtggtagtatcctaaaaggagtattaaaggtnnnnnnnnnnnnnnnnnnnnnnnnnnnnnnnnnnnnnnnnnnnnnnnnnnnnnnnnnnnnnnnnnnnnnnnnnnnnnnnnnnnnnnnnnnnnnnnnnnnnnnnnnnnnnnnnnnnnnnnnnnnnnnnnnnnnnnnnnnnnnnnnnnnnnnnnnnnnnnnnnnnnnnnnnnnnnnnnnnnnnnnnnnnnnnnnnnnnnnnnnnnnnnnnnnnnnnnnnnnnnnnnnnnnnnnnnnnnnnnnnnnnnnnnnnnnnnnnnnnnnnnnnnnnnnnnnnnnnnnnnnnnnnnnnnnnnnnnnnnnnnnnnnnnnnnaggttcaaaagctgtctaagaatgaagtgctcatggtgaacataggatccctgtcgacaggagggagagttagtgctgtcaaggccgatttgggtaaaattgttttgaccaatccagtgtgcacagaggtaggagaaaaaattgcccttagccgaagagttgaaaaacactggcnnnnnnnnnnnnnnnnnnnnnnnnnnnnnnnnnnnnnnnnnnnnnnnnnnnnnnnnnnnnnnnnnnnnnnnnnnnnnnnnnnnnnnnnnnnnnnnnnnnnnnnnnnnnnnnnnnnnnnnnnnnnnnnnnnnnnnnnnnnnnnnnnnnnnnnnnnnnnnnnnnnnnnnnnnnnnnnnnnnnnnnnnnnnnnnnnnnnnnnnnnnnnnnnnnnnnnnnnnnnnnnnnnnnnnnnnnnnnnnnnnnnnnnnnnnnnnnnnnnnnnnnnnnnnnnnnnnnnnnnnnnnnnnnnnnnnnnnnnnnnnnnnnnnnnnnnnnnnnnnnnnnnnnnnnnnnnnnnnnnnnnnnnnnnnnnnnnnnnnnnnnnnnnnnnnnnnnnnnnnnnnnnnnnnnnnnnnnnnnnnnnnnnnnnnnnnnnnnnnnnnnnnnnnnnnnnnnnnnnnnnnnnnnnnnnnnnnnnnnnnnnnnnnnnnnnnnnnnnnnnnnnnnnnnnnnnnnnnnnnnnnnnnnnnnnnnnnnnnnnnnnnnnnnnnnnnnnnnnnnnnnnnnnnnnnnnnnnnnnnnnnnnnnnnnnnnnnnnnnnnnnnnnnnnnnnnnnnnnnnnnntgtcacccaggctggagtgcagtggcgtgatccgcaacctccgcctcccgggttcaagcgattctcctgcctcagcctcccgagtagctgagattacaggtgcgcgccaccacatctagctaatttttgtattgttagtagagacggggttttggcatgttggccaggccagtctctcttgacctcagggtaatcagcccaccttggcctcacaaagtgctgggattacaggcgtaagccaccttccccagcccacatcatacagtttgaaatgaaactttgccacaaccagcctttgctgtagcacacacatatatcactgaacctgcttgaaataaannnnnnnnnnnnnncatgattcgtctttgagtacctccaggctgatggactgttgtaccagtaaaaacttaaaggcacaaattctccttgaagaccttctcccttttctttggccccatattttatgttgctttatctttgaaattttgcatgaaaaggaaattaatgggttcaaatgaaattgtcctttgaagcatgattacttgttcccatggacagatatttttctccccttgctcttcctggcttgaaacacgggaaaccagagtcagaagttatctccctctccctgtgatgccttgagatttttttctgcattgttttatgcctgaaatccaatagtcttcctccattggaaaatactgttataacaaataattctagatgagtaacaaagatctttctaggcctacagtttatgttttttcttaactg

SEQ ID NO: 20196 - DNA, 143 bp, Macaca Mulatta
gagtcgttcaccagacaggtgttatggaagctgctgaaggttgtgaaatttggagaagtgatttcttaccagcaattagcagccctggcaggcaaccccaaagccgcgcgagctgtgggaggagcaatgagaaacaatcctgt

SEQ ID NO: 20197 - DNA, 212 bp, Macaca Mulatta
tgcatggaaggttcggttgtgagattgagaataacagaagcagtggatcattctggaagtattactacgatggaaaggactacatcgaattcaacaaagaaatcccagcctgggtcgccttggacccagcagcccagaacaccaagcagaagtgggaggcagaaccagtctacgtgcagcgggccaaggcatacctggaggaggagtgccct

SEQ ID NO: 20198 - DNA, 1933 bp, Macaca Mulatta
  misc_feature (1)...(1933): n = A,T,C or G
aggagagtaccagttccctgaaaaaggggaggcacagctcaggccaagacnnnnnnnnnnnnnnnnnnnnnnnnnnnnnnnnnnnnnnnnnnnnnnnnnnnnnnnnnnnnnnnnnnnnnnnnnnnnnnnnnnnnnnnnnnnnnnnnnnnnnnnnnnnnnnnnnnnnnnnnnnnnnnnnnnnnnnnnnnnnnnnnnnnnnnnnnnnnnnnnnnnnnnnnnnnnnnnnnnnnnnnnnnnnnnnnnnnnnnnnnnnnnnnnnnnnnnnnnnnnnnnnnnnnnnnnnnnnnnnnnnnnnnnnnnnnnnnnnnnnnnnnnnnnnnnnnnnnnnnnnnnnnnnnnnnnnnnnnnnnnnnnnnnnnnnnnnnnnnnnnnnnnnnnnnnnnnnnnnnnnnnnnnnnnnnnnnnnnnnnnnnnnnnnnnnnnnnnnnnnnnnnnnnnnnnnnnnnnnnnnnnnnnnnnnnnnnnnnnnnnnnnnnnnnnnnnnnnnnnnnnnnnnnnnnnnnnnnnnnnnnnnnnnnnnnnnnnnnnnnnnnnnnnnnnnnnnnnnnnnnnnnnnnnnnnnnnnnnnnnnnnnnnnnnnnnnnnnnnnnnnnnnnnnnnnnnnnnnnnnnnnnnnnnnnnnnnnnnnnnnnnnnnnnnnnnnnnnnnnnnnnnnnnnnnnnnnnnnnnnnnnnnnnnnnnnnnnnnnnnnnnnnnnnnnnnnnnnnnnnnnnnnnnnnnnnnnnnnnnnnnnnnnnnnnnnnnnnnnnnnnnnnnnnnnnnnnnnnnnnnnnnnnnnnnnnnnnnnnnnnnnnnnnnnnnnnnnnnnnnnnnnnnnnnnnnnnnnnnnnnnnnnnnnnnnnnnnnnnnnnnnnnnnnnnnnnnnnnnnnnnnnnnnnnnnnnnnnnnnnnnnnnnnnnnnnnnnnnnnnnnnnnnnnnnnnnnnnnnnnnnnnnnnnnnnnnnnnnnnnnnnnnnnnnnnnnnnnnnnnnnnnnnnnnnnnnnnnnnnnnnnnnnnnnnnnnnnnnnnnnnnnnnnnnnnnnnnnnnnnnnnnnnnnnnnnnnnnnnnnnnnnnnnnnnnnnnnnnnnnnnnnnnnnnnnnnnnnnnnnnnnnnnnnnnnnnnnnnnnnnnnnnnnnnnnnnnnnnnnnnnnnnnnnnnnnnnnnnnnnnnnnnnnnnnnnnnnnnnnnnnnnnnnnnnnnnnnnnnnnnnnnnnnnnnnnnnnnnnnnnnnnnnnnnnnnnnnnnnnnnnnnnnnnnnnnnnnnnnnnnnnnnnnnnnnnnnnnnnnnnnnnnnnnnnnnnnnnnnnnnnnnnnnnnnnnnnnnnnnnnnnnnnnnnnnnnnnnnnnnnnnnnnnnnnnnnnnnnnnnnnnnnnnnnnnnnnnnnnnnnnnnnnnnnnnnnnnnnnnnnnnnnnnnnnnnnnnnnnnnnnnnnnnnnnnnnnnnnnnnnnnnnnnnnnnnnnnnnnnnnnnnnnnnnnnnnnnnnnnnnnnnnnnnnnnnnnnnnnnnnnnnnnnnnnnnnnnnnnnnnnnnnnnnnnnnnnnnntggaagtcgtgaggtggtggatgaaggcttgatccccggagatgggctgggtgccgcagggcttgattccagcttctatggacacctcaagcgcaactggatctggaccagctacatcatcaaccaggccaaaaagnnnnnnnnnnnnnnnnnnnnnnnnnnnnnnnnnnnnnnnnnnnnnnnnnnnnnnnnnnnnnnnnnnnnnnnnnnnnnnnggcaacagcaggttgaatatttggggggaagcaagagtaggctccgagctctgtgctgactgggaagagcagtttgaggtggaccaagagccctcgctggaccgaaaccggagagtgaggggtgggaaaagccagaagcggaagcggctgaagaatgaccctgggaagaagatcaagagaagaaagaaagg

SEQ ID NO: 20199 - DNA, 1933 bp, Macaca Mulatta
  misc_feature (1)...(1933): n = A,T,C or G
agacattgatcagctcatcaccatcagcggcatggtgatcaggacatcccagctgattcccgagatgcaggaggccttcttccaatgccaagtgtgtgcccacacgacccgggtggagatggaccgcggccgcattgcggagcccagcgtgtgcgggcgctgccacaccacccacagcatggcactcatccacaaccgctccctcttctctgacaagcagatgatcaagcttcaagagtctccagaagacatgcctgcagggcagacaccacatacagtcatcctatttgctcacaatgatctggttgacaaggttcagcctggggacagagtgaatgttacagnnncaggcatctatcgagcagtgcctattcgaatcaatccaagagtgagtaatgtgaagtctgtctacaaaacccacattgatgtcattcattatcggaaaacggatgcaaaacgtctgcatggccttgatgaagaagcagaacagaaacttttttcagagaaacgtgtggaattgcttaaggaactttccaggaaaccagacatttatgagaggcttgcttcagccttggctccaagcatttatgaacatgaagatataaagaagnnagggaattttgcttcagctctttggcgggacaaggaaggattttagtcacactggaaggggcaaatttcgggctgagatcaacatcttgctgtgtggtgaccctggtaccagcaagtcccagctgctgcagtacgtgtacaacctagtccccaggggccagtacacttctgggaagggctccannnnnnnnnnnnnnnnnnnnnnnnnnnnnnnnnnnnnnnnnnnnnnnnnnnnnnnnnnnnnnnnnnnnnnnnnnnnnnnnnnnnnnnnnnnnnnnnnnnnnnnnnnnnnnnnnnnnnnnnnnnnnnnnnnnnnnnnnnnnnnnnnnnnnnnnnnnnnnnnnnnnnnnnnnnnnnnnnnnnnnggctgggatcatctgtcagctcaatgcacgcacctctgtcctggcagcagcaaatcccattgagtctcagtggaatcctaaaaaaacaaccattgaaaacatccagctgcctcatactttattatcaaggtnnnnnnnnnnnnnnnnnnnnnnnnnnnnnnnnnnnnnnnnnnnnnnnnnnnnnnnnnnnnnnnnnnnnnnnnnnnnnnnnnnnnnnnnnnnnnnnnnnnnnnnnnnnnnnnnnnnnnnnnnnnnnnnnnnnnnnnnnnnnnnnnnnnnnnnnnnnnnnnnnnnnnnnnnnnnnnnnnnnnnnnnnnnnnnnnnnnnnnnnnnnnnnnnnnnnnnnnnnnnnnnnnnnnnnnnnnnnnnnnnnnnnnnnnnnnnnnnnnnnnnnnnnnnnnnnnnnnnnnnnnnnnnnnnnnnnnnnnnnnnnnnnnnnnnnnnnnnnnnnnnnnnnnnnnnnnnnnnnnnnnnnnnnnnnnnnnnnnnnnnnnnnnnnnnnnnnnnnnnnnnnnnnnnnnnnnnnnnnnnnnnnnnnnnnnnnnnnnnnnnnnnnnnnnnnnnnnnnnnnnnnnnnnnnnnnnnnnnnnnnnnnnnnnnnnnnnnnnnnnnnnnnnnnnnnnnnnnnnnnnnnnnnnnnnnnnnnnnnnnnnnnnnnnnnnnnnnnnnnnnnnnnnnnnnnnnnnnnnnnnnnnnnnnnncaatcactaaagatatgtttgaagaagcactgcgtgccctggcagatgatgacttcctgacggtgactgggaagaccgtgcgcttgctctaaagccttgtgagcaaggaaggctgcctgcatgtcctgcttgctgcatgccacacgggtgtggcctgcatctcagttggccgccatcagtgtaaatagagcttaaagtcgtggtttggctacataaaaatttctaacttggttcaatatttgtagtgaagtatct

SEQ ID NO: 20200 - DNA, 7058 bp, Macaca Mulatta
  misc_feature (1)...(7058): n = A,T,C or G
ccactactccatctccatgcctgtgtgggaggatgaaggggatgatgatgccaagaagcagacgccaaagcagaggctgctggggtggattcagaacaagatcccctacttgcccatcaccaactttaaccagaactggcaagatggcaaagccctgggagccctggtagacagctgtgctccaggnnnnnnnnnnnnnnnnnnnnnnnnnnnnnnnnnnnnnnnnnnnnnnnnnnnnnnnnnnnnnnnnnnnnnnnnnnnnnnnnnnnnnnnnnnnnnnnnnnnnnnnnnnnnnnnnnnnnnnnnnnnnnnnnnnnnnnnnnnnnnnnnnnnnnnnnnnnnnnnnnnnnnnnnnnnnnnnnnnnnnnnnnnnnnnnnnnnnnnnnnnnnnnnnnnnnnnnnnnnnnnnnnnnnnnnnnnnnnnnnnnnnnnnnnnnnnnnnnnnnnnnnnnnnnnnnnnnnnnnnnnnnnnnnnnnnnnnnnnnnnnnnnnnnnnnnnnnnnnnnnnnnnnnnnnnnnnnnnnnnnnnnnnnnnnnnnnnnnnnnnnnnnnnnnnnnnnnnnnnnnnnnnnnnnnnnnnnnnnnnnnnnnnnnnnnnnnnnnnnnnnnnnnnnnnnnnnnnnnnnnnnnnnnnnnnnnnnnnnnnnnnnnnnnnnnnnnnnnnnnnnnnnnnnnnnnnnnnnnnnnnnnnnnnnnnnnnnnnnnnnnnnnnnnnnnnnnnnnnnnnnnnnnnnnnnnnnnnnnnnnnnnnnnnnnnnnnnnnnnnnnnnnnnnnnnnnnnnnnnnnnnnnnnnnnnnnnnnnnnnnnnnnnnnnnnnnnnnnnnnnnnnnnnnnnnnnnnnnnnnnnnnnnnnnnnnnnnnnnnnnnnnnnnnnnnnnnnnnnnnnnnnnnnnnnnnnnnnnnnnnnnnnnnnnnnnnnnnnnnnnnnnnnnnnnnnnnnnnnnnnnnnnnnnnnnnnnnnnnnnnnnnnnnnnnnnnnnnnnnnnnnnnnnnnnnnnnnnnnnnnnnnnnnnnnnnnnnnnnnnnnnnnnnnnnnnnnnnnnnnnnnnnnnnnnnnnnnnnnnnnnnnnnnnnnnnnnnnnnnnnnnnnnnnnnnnnnnnnnnnnnnnnnnnnnnnnnnnnnnnnagggtctggaggagctggtgaagcagaaaggctttctggatggggtctacgcattcgagtattaccccagcaccccggggagatacagcattgccatcacatgggggggacaccacattccaaagannnnnnnnnnnnnnnnnnnnnnnnnnnnnnnnnnnnnnnnnnnnnnnnnnnnnnnnnnnnnnnnnnnnnnnnnnnnnnnnnnnnnnnnnnnnnnnnnnnnnnnnnnnnnnnnnnnnnnnnnnnnnnnnnnnnnnnnnnnnnnnnnnnnnnnnnnnnnnnnnnnnnnnnnnnnnnnnnnnnnnnnnnnnnnnnnnnnnnnnnnnnnnnnnnnnnnnnnnnnnnnnnnnnnnnnnnnnnnnnnnnnnnnnnnnnnnnnnnnnnnnnnnnnnnnnnnnnnnnnnnnnnnnnnnnnnnnnnnnnnnnnnnnnnnnnnnnnnnnnnnnnnnnnnnnnnnnnnnnnnnnnnnnnnnnnnnnnnnnnnnnnnnnnnnnnnnnnnnnnnnnnnnnnnnnnnnnnnnnnnnnnnnnnnnnnnnnnnnnnnnnnnnnnnnnnnnnnnnnnnnnnnnnnnnnnnnnnnnnnnnnnnnnnnnnnnnnnnnnnnnnnnnnnnnnnnnnnnnnnnnnnnnnnnnnnnnnnnnnnnnnnnnnnnnnnnnnnnnnnnnnnnnnnnnnnnnnnnnnnnnnnnnnnnnnnnnnnnnnnnnnnnnnnnnnnnnnnnnnnnnnnnnnnnnnnnnnnnnnnnnnnnnnnnnnnnnnnnnnnnnnnnnnnnnnnnnnnnnnnnnnnnnnnnnnnnnnnnnnnnnnnnnnnnnnnnnnnnnnnnnnnnnnnnnnggtgatgtcagcgttggcattaagtgtgatgcccgggtgttaagtgaagatgaggaagacgtggattttgacattattcacaatgccaatgatacgtttacagtcaaatatgtgcctcctgctgctgggcgatacactatcaaagttctctttgcatctcaggnnnnnnnnnnnnnnnnnnnnnnnnnnnnnnnnnnnnnnnnnnnnnnnnnnnnnnnnnnnnnnnnnnnnnnnnnnnnnnnnnnnnnnnnnnnnnnnnnnnnnnnnnnnnnnnnnnnnnnnnnnnnnnnnnnnnnnnnnnnnnnnnnnnnnnnnnnnnnnnnnnnnnnnnnnnnnnnnnnnnnnnnnnnnnnnnnnnnnnnnnnnnnnnnnnnnnnnnnnnnnnnnnnnnnnnnnnnnnnnnnnnnnnnnnnnnnnnnnnnnnnnnnnnnnnnnnnnnnnnnnnnnnnnnnnnnnnnnnnnnnnnnnnnnnnnnnnnnnnnnnnnnnnnnnnnnnnnnnnnnnnnnnnnnnnnnnnnnnnnnnnnnnnnnnnnnnnnnnnnnnnnnnnnnnnnnnnnnnnnnnnnnnnnnnnnnnnnnnnnnnnnnnnnnnnnnnnnnnnnnnnnnnnnnnnnnnnnnnnnnnnnnnnnnnnnnnnnnnnnnnnnnnnnnnnnnnnnnnnnnnnnnnnnnnnnnnnnnnnnnnnnnnnnnnnnnnnnnnnnnnnnnnnnnnnnnnnnnnnnnnnnnnnnnnnnnnnnnnnnnnnnnnnnnnnnnnnnnnnnnnnnnnnnnnnnnnnnnnnnnnnnnnnnnnnnnnnnnnnnnnnnnnnnnnnnnnnnnnnnnnnnnnnnnnnnnnnnnnnnnnnnnnnnnnnnnnnnnnnnnnnnnnnnnnnnnnnnnnnnnnnnnnnnnnnnnnnnnnnnnnnnnnnnnnnnnnnnnnnnnnnnnnnnnnnnnnnnnnnnnnnnnnnnnnnnnnnnnnnnnnnnnnnnnnnnnnnnnnnnnnnnnnnnnnnnnnnnnnnnnnnnnnnnnnnnnnnnnnnnnnnnnnnnnnnnnnnnnnnnnnnnnnnnnnnnnnnnnnnnnnnnnnnnnnnnnnnnnnnnnnnnnnnnnnnnnnnnnnnnnnnnnnnnnnnnnnnnnnnnnnnnnnnnnnnnnnnnnnnnnnnnnnnnnnnnnnnnnnnnnnnnnnnnnnnnnnnnnnnnnnnnnnnnnnnnnnnnnnnnnnnnnnnnnnnnnnnnnnnnnnnnnnnnnnnnnnnnnnnnnnnnnnnnnnnnnnnnnnnnnnnnnnnnnnnnnnnnnnnnnnnnnnnnnnnnnnnnnnnnnnnnnnnnnnnnnnnnnnnnnnnnnnnnnnnnnnnnnnnnnnnnnnnnnnnnnnggacaccagcaggatcaaagtctttggaccagggatagaagggaaannnnnnnnnnnnnnnnnnnnnnnnnnnnnnnnnnnnnnnnnnnnnnnnnnnnnnnnnnnnnnnnnnnnnnnnnnnnnnnnnnnnnnnnnnnnnnnnnnnnnnnnnnnnnnnnnnnnnnnnnnnnnnnnnnnnnnnnnnnnnnnnnnnnnnnnnnnnnnnnnnnnnnnnnnnnnnnnnnnnnnnnnnnnnnnnnnnnnnnnnnnnnnnnnnnnnnnnnnnnnnnnnnnnnnnnnnnnnnnnnnnnnnnnnnnnnnnnnnnnnnnnnnnnnnnnnnnnnnnnnnnnnnnnnnnnnnnnnnnnnnnnnnnnnnnnnnnnnnnnnnnnnnnnnnnnnnnnnnnnnnnnnnnnnnnnnnnnnnnnnnnnnnnnnnnnnnnnnnnnnnnnnnnnnnnnnnnnnnnnnnnnnnnnnnnnnnnnnnnnnnnnnnnnnnnnnnnnnnnnnnnnnnnnnnnnnnnnnnnnnnnnnnnnnnnnnnnnnnnnnnnnnnnnnnnnnnnnnnnnnnnnnnnnnnnnnnnnnnnnnnnnnnnnnnnnnnnnnnnnnnnnnnnnnnnnnnnnnnnnnnnnnnnnnnnnnnnnnnnnnnnnnnnnnnnnnnnnnnnnnnnnnnnnnnnnnnnnnnnnnnnnnnnnnnnnnnnnnnnnnnnnnnnnnnnnnnnnnnnnnnnnnnnnnnnnnnnnnnnnnnnnnnnnnnnnnnnnnnnnnnnnnnnnnnnnnnnnnnnnnnnnnnnnnnnnnnnnnnnnnnnnnnnnnnnnnnnnnnnnnnnnnnnnnnnnnnnnnnnnnnnnnnnnnnnnnnnnnnnnnnnnnnnnnnnnnnnnnnnnnnnnnnnnnnnnnnnnnnnnnnnnnnnnnnnnnnnnnnnnnnnnnnnnnnnnnnnnnnnnnnnnnnnnnnnnnnnnnnnnnnnnnnnnnnnnnnnnnnnnnnnnnnnnnnnnnnnnnnnnnnnnnnnnnnnnnnnnnnnnnnnnnnnnnnnnnnnnnnnnnnnnnnnnnnnnnnnnnnnnnnnnnnnnnnnnnnnnnnnnnnnnnnnnnnnnnnnnnnnnnnnnnnnnnnnnnnnnnnnnnnnnnnnnnnnnnnnnnnnnnnnnnnnnnnnnnnnnnnnnnnnnnnnnnnnnnnnnnnnnnnnnnnnnnnnnnnnngtcctggaatcgcctccactgtgaaaactggcgaagaagtaggctttgtggttgatgccaagactgccgggaaggggaaagtgacctgcacggttctgaccccagatggcactgaggccgaggccgatgtcatcgagaatgaagatggaacctatgacatcttctacacagctgccaagccaggcacatatgtgatctatgtgcgcttcggtggtgttgatattcctaacagccccttcactgtcatggnnnnnnnnnnnnnnnnnnnnnnnnnnnnnnnnnnnnnnnnnnnnnnnnnnnnnnnnnnnnnnnnnnnnnnnnnnnnnnnnnnnnnnnnnnnnnnnnnnnnnnnnnnnnnnnnnnnnnnnnnnnnnnnnnnnnnnnnnnnnnnnnnnnnnnnnnnnnnnnnnnnnnnnnnnnnnnnnnnnnnnnnnnnnnnnnnnnnnnnnnnnnnnnnnnnnnnnnnnnnnnnnnnnnnnnnnnnnnnnnnnnnnnnnnnnnnnnnnnnnnnnnnnnnnnnnnnnnnnnnnnnnnnnnnnnnnnnnnnnnnnnnnnnnnnnnnnnnnnnnnnnnnnnnnnnnnnnnnnnnnnnnnnnnnnnnnnnnnnnnnnnnnnnnnnnnnnnnnnnnnnnnnnnnnnnnnnnnnnnnnnnnnnnnnnnnnnnnnnnnnnnnnnnnnnnnnnnnnnnnnnnnnnnnnnnnnnnnnnnnnnnnnnnnnnnnnnnnnnnnnnnnnnnnnnnnnnnnnnnnnnnnnnnnnnnnnnnnnnnnnnnnnnnnnnnnnnnnnnnnnnnnnnnnnnnnnnnnnnnnnnnnnnnnnnnnnnnnnnnnnnnnnnnnnnnnnnnnnnnnnnnnnnnnnnnnnnnnnnnnnnnnnnnnnnnnnnnnnnnnnnnnnnnnnnnnnnnnnnnnnnnnnnnnnnnnnnnnnnnnnnnnnnnnnnnnnnnnnnnnnnnnnnnnnnnnnnnnnnnnnnnnnnnnnnnnnnnnnnnnnnnnnnnnnnnnnnnnnnnnnnnnnnnnnnnnnnnnnnnnnnnnnnnnnnnnnnnnnnnnnnnnnnnnnnnnnnnnnnnnnnnnnnnnnnnnnnnnnnnnnnnnnnnnnnnnnnnnnnnnnnnnnnnnnnnnnnnnnnnnnnnnnnnnnnnnnnnnnnnnnnnnnnnnnnnnnnnnnnnnnnnnnnnnnnnnnnnnnnnnnnnnnnnnnnnnnnnnnnnnnnnnnnnnnnnnnnnnnnnnnnnnnnnnnnnnnnnnnnnnnnnnnnnnnnnnnnnnnnnnnnnnnnnnnnnnnnnnnnnnnnnnnnnnnnnnnnnnnnnnnnnnnnnnnnnnnnnnnnnnnnnnnnnnnnnnnnnnnnnnnnnnnnnnnnnnnnnnnnnnnnnnnnnnnnnnnnnnnnnnnnnnnnnnnnnnnnnnnnnnnnnnnnnnnnnnnnnnnnnnnnnnnnnnnnnnnnnnnnnnnnnnnnnnnnnnnnnnnnnnnnnnnnnnnnnnnnnnnnnnnnnnnnnnnnnnnnnnnnnnnnnnnnnnnnnnnnnnnnnnnnnnnnnnnnnnnnnnnnnnnnnnnnnnnnnnnnnnnnnnnnnnnnnnnnnnnnnnnnnnnnnnnnnnnnnnnnnnnnnnnnnnnnnnnnnnnnnnnnnnnnnnnnnnnnnnnnnnnnnnnnnnnnnnnnnnnnnnnnnnnnnnnnnnnnnnnnnnnnnnnnnnnnnnnnnnnnnnnnnnnnnnnnnnnnnnnnnnnnnnnnnnnnnnnnnnnnnnnnnnnnnnnnnnnnnnnnnnnnnnnnnnnnnnnnnnnnnnnnnnnnnnnnnnnnnnnnnnnnnnnnnnnnnnnnnnnnnnnnnnnnnnnnnnnnnnnnnnnnnnnnnnnnnnnnnnnnnnnnnnnnnnnnnnnnnnnnnnnnnnnnnnnnnnnnnnnnnnnnnnnnnnnnnnnnnnnnnnnnnnnnnnnnnnnnnnnnnnnnnnnnnnnnnnnnnnnnnnnnnnnnnnnnnnnnnnnnnnnnnnnnnnnnnnnnnnnnnnnnnnnnnnnnnnnnnnnnnnnnnnnnnnnnnnnnnnnnnnnnnnnnnnnnnnnnnnnnnnnnnnnnnnnnnnnnnnnnnnnnnnnnnnnnnnnnnnnnnnnnnnnnnnnnnnnnnnnnnnnnnnnnnnnnnnnnnnnnnnnnnnnnnnnnnnnnnnnnnnnnnnnnnnnnnnnnnnnnnnnnnnnnnnnnnnnnnnnnnnnnnnnnnnnnnnnnnnnnnnnnnnnnnnnnnnnnnnnnnnnnnnnnnnnnnnnnnnnnnnnnnnnnnnnnnnnnnnnnnnnnnnnnnnnnnnnnnnnnnnnnnnnnnnnnnnnnnnnnnnnnnnnnnnnnnnnnnnnnnnnnnnnnnnnnnnnnnnnnnnnnnnnnnnnnnnnnnnnnnnnnnnnnnnnnnnnnnnnnnnnnnnnnnnnnnnnnnnnnnnnnattgccaggaaacacctgaagggtacaaagtcatgtacacccccatggctcctggtaactacctgatcggcgtcaaatacggtgggcccaaccacattgtgggcagtcccttcaaggccaaggtgacag

SEQ ID NO: 20201 - DNA, 226 bp, Macaca Mulatta
  misc_feature (1)...(226): n = A,T,C or G
ggtctttacccttgatttttccacgggaggagaatgnnnnnnnnnnnnnnnnnnnnnnnnnnnnnnnnnnnnnnnnnnnnnnnnnnnnnnnnnnnnnnnnnnnnnnnnnnnnnnnnnnnnnnngtgccaacatcgcctctggtgaggatttttttttcaagctggagtgtgtgaagactatgcgccgccagctgcacattgagagcaagttctacaatatgatgca

SEQ ID NO: 20202 - DNA, 140 bp, Macaca Mulatta
ggtgaacggccatggcaggctggatccaggctcagcagctgcagggagatgcgctgcgccagatgcaggtgctgtacggccagcacttccccatcgaggtccggcactacttggcccagtggattgagagccagccatgg

SEQ ID NO: 20203 - DNA, 456 bp, Macaca Mulatta
  misc_feature (1)...(456): n = A,T,C or G
ggggatttacagatttattgtgagacacaaattcactgctgcctttacactaagaaatgtatatgttaaccatatatgctgtatttattttgttaagcatacttttagtttactcagaattttcaatttgctataaaaatgtatcaattagcatatagaaaaatattactttaagatgacttgtttcctttgaaaatacatatgtactgagggttatgatttatgtcagaaattgacataagtgcttttacaagcaccaaagttgaatgaattttcaacaaaatgtaattcaagtctatgttttcagatgtgactcaggttaagaaatgtgttttaggatctacttgctggtttttctttttgatccaaatgtatgatctgccctgataaataacaagttatagtaccatctcccccgnnnnnnnnnnnnnnnnnnnnnnnnnnnnnnnnnatgtc

SEQ ID NO: 20204 - DNA, 147 bp, Macaca Mulatta
tgcctccttgtaagtttaacccactggctttcatttttcatacatgtattcaatcatttattgaaaatgtattgagcactattcatgtgctgggaattaatagtgaatatttgttcttacactcatgcaatttacaattctttattg

SEQ ID NO: 20205 - DNA, 540 bp, Macaca Mulatta
cgcagccctggtgtagtagcgctcacgagtgtgaatcacccctgcccgagacccactctgctgggctcagctgggctctctggctccagtggaacagcagcggttccacccccagtctctttctctgtgcctctctggttccagcaccattgccgttagctggcacccctttacctaataacctcgttctaggcctggggagagtacactcgcattgtccacggtttccattggaggtgaaaataagattttcaaaatgctcatgttgttggggtcaaaaatgactatctctgaacatcagaaggttattactttaatccaacttactgagagtcaacaatatttgaaccttgggttcttggactaattcaacaacatttcaccttaagagctgtttttaactagaccgaggctcaacccaagtacgtgtccagcttatgttacattattataggttcagtaattgtcttcattttgcaaagaaaggtgtacagtgaacacaacctgttatcttgaagacacacgccagagtgtgaaaga

SEQ ID NO: 20206 - DNA, 101 bp, Macaca Mulatta
aggctctatttgacttcactggaaacagcaaactggagctgaatttcaaagccggagatgtgatcttcctcctcagtcggatcaacaaagactggctggag

SEQ ID NO: 20207 - DNA, 2668 bp, Macaca Mulatta
  misc_feature (1)...(2668): n = A,T,C or G
cagtggttggagacccgacctaacagacaggtgtgtcccgtttgcaaagctggcatcagccgagacaaagtcatccccctctatggaaggggcagcactgggcaacaggaccccanncagagagaagacccctcctcgtcctcaaggacagaggccagagccggagaatagagggnnnnnnnnnnnnnnnnnnnnnnnnnnnnnnnnnnnnnnnnnnnnnnnnnnnnnnnnnnnnnnnnnnnnnnnnnnnnnnnnnnnnnnnnnnnnnnnnnnnnnnnnnnnnnnnnnnnnnnnnnnnnnnnnnnnnnnnnnnnnnnnnnnnnnnnnnnnnnnnnnnnnnnnnnnnnnnnnnnnnnnnnnnnnnnnnnnnnnnnnnnnnnnnnnnnnnnnnnnnnnnnnnnnnnnnnnnnnnnnnnnnnnnnnnnnnnnnnnnnnnnnnnnnnnnnnnnnnnnnnnnnnnnnnnnnnnnnnnnnnnnnnnnnnnnnnnnnnnnnnnnnnnnnnnnnnnnnnnnnnnnnnnnnnnnnnnnnnnnnnnnnnnnnnnnnnnnnnnnnnnnnnnnnnnnnnnnnnnnnnnnnnnnnnnnnnnnnnnnnnnnnnnnnnnnnnnnnnnnnnnnnnnnnnnnnnnnnnnnnnnnnnnnnnnnnnnnnnnnnnnnnnnnnnnnnnnnnnnnnnnnnnnnnnnnnnnnnnnnnnnnnnnnnnnnnnnnnnnnnnnnnnnnnnnnnnnnnnnnnnnnnnnnnnnnnnnnnnnnnnnnnnnnnnnnnnnnnnnnnnnnnnnnnnnnnnnnnnnnnnnnnnnnnnnnnnnnnnnnnnnnnnnnnnnnnnnnnnnnnnnnnnnnnnnnnnnnnnnnnnnnnnnnnnnnnnnnnnnnnnnnnnnnnnnnnnnnnnnnnnnnnnnnnnnnnnnnnnnnnnnnnnnnnnnnnnnnnnnnnnnnnnnnnnnnnnnnnnnnnnnnnnnnnnnnnnnnnnnnnnnnnnnnnnnnnnnnnnnnnnnnnnnnnnnnnnnnnnnnnnnnnnnnnnnnnnnnnnnnnnnnnnnnnnnnnnnnnnnnnnnnnnnnnnnnnnnnnnnnnnnnnnnnnnnnnnnnnnnnnnnnnnnnnnnnnnnnnnnnnnnnnnnnnnnnnnnnnnnnnnnnnnnnnnnnnnnnnnnnnnnnnnnnnnnnnnnnnnnnnnnnnnnnnnnnnnnnnnnnnnnnnnnnnnnnnnnnnnnnnnnnnnnnnnnnnnnnnnnnnnnnnnnnnnnnnnnnnnnnnnnnnnnnnnnnnnnnnnnnnnnnnnnnnnnnnnnnnnnnnnnnnnnnnnnnnnnnnnnnnnnnnnnnnnnnnnnnnnnnnnnnnnnnnnnnnnnnnnnnnnnnnnnnnnnnnnnnnnnnnnnnnnnnnnnnnnnnnnnnnnnnnnnnnnnnnnnnnnnnnnnnnnnnnnnnnnnnnnnnnnnnnnnnnnnnnnnnnnnnnnnnnnnnnnnnnnnnnnnnnnnnnnnnnnnnnnnnnnnnnnnnnnnnnnnnnnnnnnnnnnnnnnnnnnnnnnnnnnnnnnnnnnnnnnnnnnnnnnnnnnnnnnnnnnnnnnnnnnnnnnnnnnnnnnnnnnnnnnnnnnnnnnnnnnnnnnnnnnnnnnnnnnnnnnnnnnnnnnnnnnnnnnnnnnnnnnnnnnnnnnnnnnnnnnnnnnnnnnnnnnnnnnnnnnnnnnnnnnnnnnnnnnnnnnnnnnnnnnnnnnnnnnnnnnnnnnnnnnnnnnnnnnnnnnnnnnnnnnnnnnnnnnnnnnnnnnnnnnnnnnnnnnnnnnnnnnnnnnnnnnnnnnnnnnnnnnnnnnnnnnnnnnnnnnnnnnnnnnnnnnnnnnnnnnnnnnnnnnnnnnnnnnnnnnnnnnnnnnnnnnnnnnnnnnnnnnnnnnnnnnnnnnnnnnnnnnnnnnnnnnnnnnnnnnnnnnnnnnnnnnnnnnnnnnnnnnnnnnnnnnnnnnnnnnnnnnnnnnnnnnnnnnnnnnnnnnnnnnnnnnnnnnnnnnnnnnnnnnnnnnnnttctcctttgtacttggcaacaccagagttcagtgtttaaacagacaaaatagaaagtattgagtaggtggttcatttgccacatccacttggtaggaagaagccaccagctttatagtgtgcctgatagattttacacattcctgggcacccactcaagagtgctctttttatcaccttctggaaatctccaaagttgaagggacctctggagtgtctctgctctagagagaattggtgggacccccgctcagtgcagtggccccaactagtggagggagagaggacttcagtcagatggactcaacaaaaacgggtttccagaagaataatgaaaagttgtgggtagcaaaatgaatcagttggactcaatgaaatggagtgagcccaggagagctcaaccaacagaggcactctgggaacctgttagtaaagccaggttggccaaatgccgtttgattttgaaccttgtaggtccccactcaccgtctgccaggagctaaggcaggagagctgacgtgggactgctggctcggccccaacagggagcccccttcccaccacccttcggcaagctcgccacctcatccttctgccaaggcagctttccttttttttctgtgttttctgtgttcttagcctccaccctcc

SEQ ID NO: 20208 - DNA, 146 bp, Macaca Mulatta
catgtgaggctggctgaggcggcacatgtgacacttagtgaccaaggtttatgttgtgcgatcggaacagtctatgtgaagctttttgtgaaatgtccacgtggcttccatatgtcatggtaagaggccatgcagggcctgctgac

SEQ ID NO: 20209 - DNA, 618 bp, Macaca Mulatta
  misc_feature (1)...(618): n = A,T,C or G
ggggagaggcagataacactgaagcaggtctctcatggcccaggaaggcaggggtggatccctccttgtgttgtagtccatgctattcaaagtgtggcccacagaccaagagcctcaacattttctagggccttattagataagtgcagaatctgaagccccactctggacccagggcattttgatgagatccacaggagctgtatgcacatgaaggtttgagaagcatcgtcatagagaagtaaacatcacacccaacttccttatcttcccagtggctaaaccacttaacctctctgggtgttacctgctcatttgtttgaaaacaaaaaaaaagtctcagctgccctcaagttcagatgttcaagcttataatatttaggctgttcctcaaatttgtgaaaagtgttctcagaattgggagatagtcaaagggtacaaagcctcaggaggaataagtnnnnnnnnnnnnnnnnnnnnnntcacttgcacagcatgctaaatataggaataattgaatgtatatttcagtattgctaagagagtaaatttctaatgttttcattaaaaagttaaatatctnnnnnnnnnnnnnnnnnnnnnnnnnnnnaacatgtc

SEQ ID NO: 20210 - DNA, 433 bp, Macaca Mulatta
ataggtatataagaatgtgactctacaggttccagtgggactgactatacatacctctttagtatgttctgtgactctgttcgttacaatcctgtgctctacgttgatcctagtagcagttttcaaatatggctatttttccctataagttttatgtagttaaatgcttcatagaaacctaaataagacctattaatttctgacgagaagtgttcttctagaatttagttaattacttttatcttttgtcttcatttgtggccaaaattatgtttactagaggaaatttgggataattctcaactaattccaaaatttagtgctctattgcatagatccttggtaatcctcaagcatcaaaggccataagaggaaacttaattctgctaaattaatgtttatttttgggagaagtgactttatcttcatttga

SEQ ID NO: 20211 - DNA, 4731 bp, Macaca Mulatta
  misc_feature (1)...(4731): n = A,T,C or G
cagataggcctgatagacctgctgagctgcatggggctgagaccagacggcatcatcggccactctctgggggaggtggcctgtggctatgctgacggctgcctgtcccaggaggaggccgtcctcgctgcctactggagggggcaatgcatcaaagaagcccatctcccgccgggcgccatggcagccgtgggngcttgtcctgggaggagtgtaaacagcgctgccccccgggcgtggtgcccgcctgccacaactccaaggacacagtcaccatctcgggacctcaggncaggcctctgtgttcgagttcatggagcagctgaggaaggagggtgtgtttgccaaggaggtgcggaccggcggcatggccttccactcctacttcatggaggccatcgcacccccactgctgcaggcgctcaagaannnnnnnnnnnnnnnnnnnnnnnnnnnnnnnnnnnnnnnnnnnnnnnnnnnnnnnnnnnnnnnnnnnnnnnnnnnnnnnnnnnnnnnnnnnnnnnnnnnnnnnnnnnnnnnnnnnnnnnnnnnnnnnnnnnnnnnnnnnnnnnnnnnnnnnnnnnnnnnnnnnnnnnnnnnnnnnnnnnnnnnnnnnnnnnnnnnnnnnnnnnnnnnnnnnnnnnnnnnnnnnnnnnnnnnnnnnnnnnnnnnnnnnnnnnnnnnnnnnnnnnnnnnnnnnnnnnnnnnnnnnnnnnnnnnnnnnnnnnnnnnnnnnnnnnnnnnnnnnnngcatcgacgccaaccccaatgccctgttcccgcctgtggagttcccagctccccgaggaacccccctcatctccccactcatcaagtgggaccacagcctggcctgggacgtgccagctgccgaggacttccccaacggctctggttccccctcggccgccgtctacaacatcnnnnnnnnnnnnnnnnnnnnnnnnnnnnnnnnnnnnnnnnnnnnnnnnnnnnnnnnnnnnnnnnnnnnnnnnnnnnnnnnnnnnnnnnnnnnnnnnnnnnnnnnnnnnnnnnnnnnnnnnnnnnnnnnnnnnnnnnnnnnnnnnnnnnnnnnnnnnnnnnnnnnnnnnnnnnnnnnnnnnnnnnnnnnnnnnnnnnnnnnnnnnnnnnnnnnnnnnnnnnnnnnnnnnnnnnnnnnnnnnnnnnnnnnnnnnnnnnnnnnnnnnnnnnnnnnnnnnnnnnnnnnnnnnnnnnnnnnnnnnnnnnnnnnnnnnnnnnnnnnnnnnnnnnnnnnnnnnnnnnnnnnnnnnnnnnnnnnnnnnnnnnnnnnnnnnnnnnnnnnnnnnnnnnnnnnnnnnnnnnnnnnnnnnnnnnnnnnnnnnnnnnnnnnnnnnnnnnnnnnnnnnnnnnnnnnnnnnnnnnnnnnnnnnnnnnnnnnnnnnnnnnnnnnnnnnnnnnnnnnnnnnnnnnnnnnnnnnnnnnnnnnnnnnnnnnnnnnnnnnnnnnnnnnnnnnnnnnnnnnnnnnnnnnnnnnnnnnnnnnnnnnnnnnnnnnnnnnnnnnnnnnnnnnnnnnnnnnnnnnnnnnnnnnnnnnnnnnnnnnnnnnnnnnnnnnnnnnnnnnnnnnnnnnnnnnnnnnnnnnnnnnnnnnnnnnnnnnnnnnnnnnnnnnnnnnnnnnnnnnnnnnnnnnnnnnnnnnnnnnnnnnnnnnnnnnnnnnnnnnnnnnnnnnnnnnnnnnnnnnnnnnnnnnnnnnnnnnnnnnnnnnnnnnnnnnnnnnnnnnnnnnnnnnnnnnnnnnnnnnnnnnnnnnnnnnnnnnnnnnnnnnnnnnnnnnnnnnnnnnnnnnnnnnnnnnnnnnnnnnnnnnnnnnnnnnnnnnnnnnnnnnnnnnnnnnnnnnnnnnnnnnnnnnnnnnnnnnnnnnnnnnnnnnnnnnnnnnnnnnnnnnnnnnnnnnnnnnnnnnnnnnnnnnnnnnnnnnnnnnnnnnnnnnnnnnnnnnnnnnnnnnnnnnnnnnnnnnnnnnnnnnnnnnnnnnnnnnnnnnnnnnnnnnnnnnnnnnnnnnnnnnnnnnnnnnnnnnnnnnnnnnnnnnnnnnnnnnnnnnnnnnnnnnnnnnnnnnnnnnnnnnnnnnnnnnnnnnnnnnnnnnnnnnnnnnnnnnnnnnnnnnnnnnnnnnnnnnnnnnnnnnnnnnnnnnnnnnnnnnnnnnnnnnnnnnnnnnnnnnnnnnnnnnnnnnnnnnnnnnnnnnnnnnnnnnnnnnnnnnnnnnnnnnnnnnnnnnnnnnnnnnnnnnnnnnnnnnnnnnnnnnnnnnnnnnnnnnnnnnnnnnnnnnnnnnnnnnnnnnnnnnnnnnnnnnnnnnnnnnnnnnnnnnnnnnnnnnnnnnnnnnnnnnnnnnnnnnnnnnnnnnnnnnnnnnnnnnnnnnnnnnnnnnnnnnnnnnnnnnnnnnnnnnnnnnnnnnnnnnnnnnnnnnnnnnnnnnnnnnnnnnnnnnnnnnnnnnnnnnnnnnnnnnnnnnnnnnnnnnnnnnnnnnnnnnnnnnnnnnnnnnnnnnnnnnnnnnnnnnnnnnnnnnnnnnnnnnnnnnnnnnnnnnnnnnnnnnnnnnnnnnnnnnnnnnnnnnnnnnnnnnnnnnnnnnnnnnnnnnnnnnnnnnnnnnnnnnnnnnnnnnnnnnnnnnnnnnnnnnnnnnnnnnnnnnnnnnnnnnnnnnnnnnnnnnnnnnnnnnnnnnnnnnnnnnnnnnnnnnnnnnnnnnnnnnnnnnnnnnnnnnnnnnnnnnnnnnnnnnnnnnnnnnnnnnnnnnnnnnnnnnnnnnnnnnnnnnnnnnnnnnnnnnnnnnnnnnnnnnnnnnnnnnnnnnnnnnnnnnnnnnnnnnnnnnnnnnnnnnnnnnnnnnnnnnnnnnnnnnnnnnnnnnnnnnnnnnnnnnnnnnnnnnnnnnnnnnnnnnnnnnnnnnnnnnnnnnnnnnnnnnnnnnnnnnnnnnnnnnnnnnnnnnnnnnnnnnnnnnnnnnnnnnnnnnnnnnnnnnnnnnnnnnnnnnnnnnnnnnnnnnnnnnnnnnnnnnnnnnnnnnnnnnnnnnnnnnnnnnnnnnnnnnnnnnnnnnnnnnnnnnnnnnnnnnnnnnnnnnnnnnnnnnnnnnnnnnnnnnnnnnnnnnnnnnnnnnnnnnnnnnnnnnnnnnnnnnnnnnnnnnnnnnnnnnnnnnnnnnnnnnnnnnnnnnnnnnnnnnnnnnnnnnnnnnnnnnnnnnnnnnnnnnnnnnnnnnnnnnnnnnnnnnnnnnnnnnnnnnnnnnnnnnnnnnnnnnnnnnnnnnnnnnnnnnnnnnnnnnnnnnnnnnnnnnnnnnnnnnnnnnnnnnnnnnnnnnnnnnnnnnnnnnnnnnnnnnnnnnnnnnnnnnnnnnnnnnnnnnnnnnnnnnnnnnnnnnnnnnnnnnnnnnnnnnnnnnnnnnnnnnnnnnnnnnnnnnnnnnnnnnnnnnnnnnnnnnnnnnnnnnnnnnnnnnnnnnnnnnnnnnnnnnnnnnnnnnnnnnnnnnnnnnnnnnnnnnnnnnnnnnnnnnnnnnnnnnnnnnnnnnnnnnnnnnnnnnnnnnnnnnnnngttgacctggtcttgaactccttggcggaagagaagctgcaggccagcgtgaggtgcttggctcagcacggtcgcttcctggaaattggcaaattcgacctttctcagaaccaccnnnnggcatggccatcttcctgaagaacgtgacattccacgggatcctactggatgcgctgttggaaggcagtgctgaatggcaggaggtggcggcgctcctgcaggccggcannnnnnnnnnnnnnnnnnnnnnnnnnnnnnnnnnnnnnnnnnnnnnnnnnnnnnnnnnnnnnnnnnnnnnnnnnnnnnnnnnnnnnnnnnnnnnnnnnnnnnnnnnnnnnnnnnnnnnnnnnnnnnnnnnnnnnnnnnnnnnnnnnnnnnnnnnnnnnnnnnnnnnnnnnnnnnnnnnnnnnnnnnnnnnnnnnnnnnnnnnnnnnnnnnnnnnnnnnnnnnnnnnnnnnnnnnnnnnnnnnnnnnnnnnnnnnnnnnnnnnnnnnnnnnnnnnnnnnnnnnnnnnnnnnnnnnnnnnnnnnnnnnnnnnnnnnnnnnnnnnnnnnnnnnnnnnnnnnnnnnnnnnnnnnnnnnnnnnnnnnnnnnnnnnnnnnnnnnnnnnnnnnnnnnnnnnnnnnnnnnnnnnnnnnnnnnnnnnnnnnnnnnnnnnnnnnnnnnnnnnnnnnnnnnnnnnnnnnnnnnnnnnnnnnnnnnnnnnnnnnnnnnnnnnnnnnnnnnnnnnnnnnnnnnnnnnnnnnnnnnnnnnnnnnnnnnnnnnnnnnnnnnnnnnnnnnnnnnnnnnnnnnnnnnnnnnnnnnnnnnnnnnnnnnnnnnnnnnnnnnnnnnnnnnnnnnnnnnnnnnnnnnnnnnnnnnnnnnnnnnnnnnnnnnnnnnnnnnnnnnnnnnnnnnnnnnnnnnnnnnnnnnnnnnnnnnnnnnnnnnnnnnncaggcctggccgtgcagtggggcgccatcggcgacgtgggcattttggcggacacagtgaacatccacgccacggtcatcggtggcacgctgccccagcgtgtggcctcctgcctggaggtgctggaccttttcctgaaccagccccacatggtcctgagcagtttcgtgctggctgagaaggctgcggcctacagggacagggacggcgagcaggacctggtgaaggccgtggcacacatcctgg

SEQ ID NO: 20212 - DNA, 1030 bp, Macaca Mulatta
  misc_feature (1)...(1030): n = A,T,C or G
agggggaacaggtggagttctccttcccactcgcctttacacttgaaaagctgacgggcagtggcgagctgtggtggcaggcggagagggcctcctcctccaagtcttggattaccttcgacctgaagaacaaggaagtgtctgtaaaacgggttacccaggaccccaagctccagatgggcaagaagctcccgctccacctcaccctgccccaggccttgcctcagtatgctggctctggaaacctcacgctggcccttgaagcgaaaacaggaaagttgcatcaggaagtgaacctcgtggtgatgagagnnnnnnnnnnnnnnnnnnnnnnnnnnnnnnnnnnnnnnnnnnnnnnnnnnnnnnnnnnnnnnnnnnnnnnnnnnnnnnnnnnnnnnnnnnnnnnnnnnnnnnnnnnnnnnnnnnnnnnnnnnnnnnnnnnnnnnnnnnnnnnnnnnnnnnnnnnnnnnnnnnnnnnnnnnnnnnnnnnnnnnnnnnnnnnnnnnnnnnnnnnnnnnnnnnnnnnnnnnnnnnnnnnnnnnnnnnnnnnnnnnnnnnnnnnnnnnnnnnnnnnnnnnnnnnnnnnnnnnnnnnnnnnnnnnnnnnnnnnnnnnnnnnnnnnnnnnnnnnnnnnnnnnnnnnnnnnnnnnnnnnnnnnnnnnnnnnnnnnnnnnnnnnnnnnnnnnnnnnnnnnnnnnnnnnnnnnnnnnnnnnnnnnnnnnnnnnnnnnnnnnnnnnnnnnnnnnnnnnnnnnnnnnnnnnnnnnnnnnnnnnnnnnnnnnnnnnnnnnnnnngcctgcggaccagatgaatgtagcagatcctaggcctctggcctcctgttcgcctcctctacgatttaccattgtttctcctgggttaggccccagcttcattggttaagtgttgctctctattttccagaggcttaatcacaccattctccccaccgtttccttttccttcaagccctagcccttctctcattatttctctctgaccttctcccccactgctcatttggatccca

SEQ ID NO: 20213 - DNA, 583 bp, Macaca Mulatta
  misc_feature (1)...(583): n = A,T,C or G
cccagcaaacagcagcacacaactgaaaggaagactcagaggagagagataaggaaggaaagtagtgatggatctcatcccagacttggctgtggaaacctggcttctcttggctgtcaccctggtgctcctctatnnnnnnnnnnnnnnnnnnnnnnnnnnnnnnnnnnnnnnnnnnnnnnnnnnnnnnnnnnnnnnnnnnnnnnnnnnnnnnnnnnnnnnnnnnnnnnagggcttttggacgtttgatatggaatgttataaaaagtatggaaaagtgtgggnnnnnnnnnnnnnnnnnnnnnnnnnnnnnnnnnnnnnnnnnnnnnnnnnnnnnnnnnnnnnnnnnnnnnnnnnnnnnnnnnnnnnnnnnnnnnnnnnnnnnnnnnnnnnnnnnnnnnnnnnnnnnnnnnnnnnnnnnnnnnnnnnnnnnnnnnnnnnnnnnnnnnnnnnnnnnnnnnnnnnnnnnnnnnnnnnnnnnnnnnnnnnnnnnnnngatggtccctatcattgcccagtatggagacgtgctggtgagaaatctgaggcgggaagcagagacaggcaagcctgtcaccttgaa

SEQ ID NO: 20214 - DNA, 490 bp, Macaca Mulatta
agttcccgaggagagatggatgccgcgttcccttcgcagcgacgagacttccctgccgtgtttgtgaccccctcctgcccagcaacctgccagctacgggagccccctgcgtcccagagactccctcacccaggcaggctccgtcgcggagtcgctgagtccgtgcccttttagttagttctgcagtctagtatggtccccatttgcccttccactccaccccaccctaaaccatgcgttcccaaatcttccttcttttgcttctcgcccacctctccccacacccagcatgcagctctgcctccgcagcctcagtgcgctttcctgcgcgcactgcggagggcgccctaagcgtcacccaagtacactcacttaaagaaaaaacaagttattttgttctgtgcgcagctaaaaggggcgccctacatctccgtgccactcccgccccagcctagcctcaggactttggatctggggtgagatgaaggga

SEQ ID NO: 20215 - DNA, 631 bp, Macaca Mulatta
caacagcatggtcttgctcatggacataagttcaaacttgatgatgatcttgaacaccaagggggccatgtccttgaccatggacataagcataagcatggtcatggccatggaaaacataaaaataaaggcaaaaagaatggaaagcacaatggttggaaaacagagcatttggcaagctcttctgaagacagtactacaccttctgcacagatacaagagaagacagaagggccaacacccatcccttccctagcccagccaggtgtagcagataccttttctgactttcaggactctgatctcattgtaactatgatgcctcctataccaccaactcccacagagagtgatgacgattggatccctgacatccagatagaaccaaatgggctttcatttaacccaatatcagattttccagacacaacctcccccaaatgtcctggacgcccctggaagtcagttagtgaaaataacccaaccacaaaaatgaaagaatcttatgatttcaatcttgctgatgccctttattaatgtatgcagctatgggtatttctttaatactttattaaagtatcaatatccctctttccattgtctaaatgaaaatatcctgatataatgcacc

SEQ ID NO: 20216 - DNA, 138 bp, Macaca Mulatta
agtccctgttctgggaaaatagccacctccttgttaacagctttgcaggaaacacccgtcgttttatgcccctgagtgatgttctgtatggcagggttgcagatttcttgagctggtgtcgacagaaaaatgcctctg

SEQ ID NO: 20217 - DNA, 1937 bp, Macaca Mulatta
  misc_feature (1)...(1937): n = A,T,C or G
caggaacaatatgaattatattgtgaaatgggctccacttttcagctctgtaagatttgtgcagagaatgacaaagatgtcaagattgagccttgtgggcatttgatgtgcacctcttgccttacggcatggcagnnnnnnnnnnnnnnnnnnnnnnnnnnnnnnnnnnnnnnnnnnnnnnnnnnnnnnnnnnnnnnnnnnnnnnnnnnnnnnnnnnnnnnnnnnnnnnnnnnnnnnnnnnnnnnnnnnnnnnnnnnnnnnnnnnnnnnnnnnnnnnnnnnnnnnnnnnnnnnnnnnnnnnnnnnnnnnnnnnnnnnnnnnnnnnnnnnnnnnnnnnnnnnnnnnnnnnnnnnnnnnnnnnnnnnnnnnnnnnnnnnnnnnnnnnnnnnnnnnnnnnnnnnnnnnnnnnnnnnnnnnnnnnnnnnnnnnnnnnnnnnnnnnnnnnnnnnnnnnnnnnnnnnnnnnnnnnnnnnnnnnnnnnnnnnnnnnnnnnnnnnnnnnnnnnnnnnnnnnnnnnnnnnnnnnnnnnnnnnnnnnnnnnnnnnnnnnnnnnnnnnnnnnnnnnnnnnnnnnnnnnnnnnnnnnnnnnnnnnnnnnnnnnnnnnnnnnnnnnnnnnnnnnnnnnnnnnnnnnnnnnnnnnnnnnnnnnnnnnnnnnnnnnnnnnnnnnnnnnnnnnnnnnnnnnnnnnnnnnnnnnnnnnnnnnnnnnnnnnnnnnnnnnnnnnnnnnnnnnnnnnnnnnnnnnnnnnnnnnnnnnnnnnnnnnnnnnnnnnnnnnnnnnnnnnnnnnnnnnnnnnnnnnnnnnnnnnnnnnnnnnnnnnnnnnnnnnnnnnnnnnnnnnnnnnnnnnnnnnnnnnnnnnnnnnnnnnnnnnnnnnnnnnnnnnnnnggtcttttccaatggtcatcttggaagtgaagaatatgacgttcctccccggctttctcctcctcctccagttaccaccctcctccctagcataaagtgnnnnnnnnnnnnnnnnnnnnnnnnnnnnnnnnnnnnnnnnnnnnnnnnnnnnnnnnnnnnnnnnnnnnnnnnnnnnnnnnnnnnnnnnnnnnnnnnnnnnnnnnnnnnnnnnnnnnnnnnnnnnnnnnnnnnnnnnnnnnnnnnnnnnnnnnnnnnnnnnnnnnnnnnnnnnnnnnnnnnnnnnnnnnnnnnnnnnnnnnnnnnnnnnnnnnnnnnnnnnnnnnnnnnnnnnnnnnnnnnnnnnnnnnnnnnnnnnnnnnnnnnnnnnnnnnnnnnnnnnnnnnnnnnnnnnnnnnnnnnnnnnnnnnnnnnnnnnnnnnnnnnnnnnnnnnnnnnnnnnnnnnnnnnnnnnnnnnnnnnnnnnnnnnnnnnnnnnnnnnnnnnnnnnnnnnnnnnnnnnnnnnnnnnnnnnnnnnnnnnnnnnnnnnnnnnnnnnnnnnnnnnnnnnnnnnnnnnnnnnnnnnnnnnnnnnnnnnnnnnnnnnnnnnnnnnnnnnnnnnnnnnnnnnnngatccctttgttgatctagcaagtggccaagttcctttgcctcccgctagaaggttaccaggtgaaaatatcaaaactaacagaacatcacaggactatgatcagcttccttcgtgttcagnnnnnnnnnnnnnnnnnnnnnnnnnnnnnnnnnnnnnnnnnnnnnnnnnnnnnnnnnnnnnnnnnnnnnnnnnnnnnnnnnnnnnnnnnnnnnnnnnnnnnnnnnnnnnnnnnnnnnnnnnnnnnnnnnnnnnnnnnnnnnnnnnnnnnnnnnnnnnnnnnnnnncctttgagatagcccagaataatgtcgaagttgcccggagcatcctccgagaatttgccttccctcctccagtatccccacgtctaaatctatagcaaccagaactgtagacaccaaaatggaaagcaatcgacatattccaggagtgtggaaa

SEQ ID NO: 20218 - DNA, 491 bp, Macaca Mulatta
  misc_feature (1)...(491): n = A,T,C or G
aggccccgtgaagctcggcggggaggccgcccacctcccacacctgcggccactgcccgagaaccagccctcgtccagcccgctgctccagactgctccgggggtcaaaggtcaccagcgggtggtcactctggcccagcacatcagtgnnnnnnnnnnnnnnnnnnnnnnnnnnnnnnnnnnnnnnnnnnnnnnnnnnnnnnnnnnnnnnnnnnnnnnnnnnnnnnnnnnnnnnnnnnnnnnnnnnnnnnnnnnnnnnnnnnnnnnnnnnnnnnnnnnnnnnnnnnnnnnnnnnnnnnnnnnnnnnnnnnnnnnnnnnnnnnnnnnnnnnnnnnnnnnnaggtctccagagccaagcaagacgtcggtcttgggtggtggtgaggacggtattgaacctgtgtccccaccggagggcgtgacggagccagggcactcccggagtgctgtgtacccgctgttgtaccgggatggggagcagacagagccca

SEQ ID NO: 20219 - DNA, 435 bp, Macaca Mulatta
  misc_feature (1)...(435): n = A,T,C or G
taaggctgaagaaaaagatgaattactacactttttccaaattgtgactgattctctcttctggcttttgggaggccatgttgaacttattcagaatgnnagtggtgatttactcagaataggaagaaaagccctgtattcaattttagatgaagttattttcaagcttttttcaactcctagtccggtcataagaagtactgctacaaaactcctactgttgatggctgaatcccatcaggaaattttgattttactgagacaaagtacctgctacaaaggnaggactcagaagtctactaagtaaacaggaaactgggaccgaattcagtcaagaacttaaacagctcgttggccttttatgcccaatggtctgtcaggaagtagaagagcagncagatctaaacgaacaaagatgttgctggagataaatag

SEQ ID NO: 20220 - DNA, 738 bp, Macaca Mulatta
tgggatggcgggagcttcacggccccttcagccaggtaccagcccactggacagggacagggcagggagctggggagaccaggcacccctgagaccccgtcccccatccatcctgtcccgccaggtggaggacctggaacgcgtggagggcataacggggaaacagatggagtccttcctgaaggtgaggtcacggccctgcccctcctctgcgtgtcctgcgtcccgcgtccctctctaacgtcgctgcccccctccctcctgtgttgcaggcaaacatcctgggtctcgccgccggccagcgctgtggcccctcctgaccgtcgtctcttcactccgcctttttaaatccttgtataaccccgtgttgtgtaaatacagttttttctctggtgcttccgcctgatttttggggctgtgggggcgggaccggggtgtgaccgcctcggggtgggccgcgagcgaggccggagactccactgggcgccatcttcgggcagcgagtcagcgctggattgtaaataaacagctggagtggggcggggaggacggtggccggcaggacgcaaaaagaggaagccgaagcatgaggcctgcgaccgttaggcgggcgcgcgctcagggattagccccgccccgtccgtgcccccggcgcgcgctcccccactctcccgctcggcaacggcggcggccttgtgcgcgtgcgcgcgaaataacggccgctggcggagggagggg

SEQ ID NO: 20221 - DNA, 652 bp, Macaca Mulatta
cctccttcagcaagcgggagcggagaggaagtacctgagcctgagtccctgggacaaggccaccctcagcatggggcgtctggttctctccaacaagatggcgcgcaccatcggcttcttctacacactgttcctgcactgcctggtcttcctggtgctctacaagttggcatggagcgagagcgtggagagggactgtgccaccttctgcgccaagaagttcgccgaccacctgcacaagttccacgagaatgacaacggggcggcagctggtgacttgtggcagtgacaccccggcacctgccccgtgacagtgacagctgcacctccacctctgactgctcagtgcatctaatcacttagtcttccccgaagaatccctcatggaaactgttcttatccgctgtccagcagctgccagaggccccaggtcccctcgggtccccttgaaagaatgtctcggtcacatcaggcccgctaggtccagagagccagcccccaatgcccgaccaggctaagccgcagagaccctctcagcccctacctcaggctagggctctgcccgcagcctgacctctagccctggtggcagaggtccctcagctgcgaggctgattgggtgaccaccaattccagctgtggttaatccagc

SEQ ID NO: 20222 - DNA, 1660 bp, Macaca Mulatta
  misc_feature (1)...(1660): n = A,T,C or G
aggaatttgatgacaggctctgttagtctgttcctcccttatttgaaggacaggccaaagatccagtttggaaatgagagaggactagcatgacacattggctccaccattgatatctcccagaggtacagaaacaggattcatgaagatgttgacaagactccaagttcttaccttagctttgttttcaaagggatttttactctctttaggggaccataactttctaaggagagagattaaaatagaaggtgaccttgttttagggggcctatttcctattannnnnnnnnnnnnnnnnnnnnnnnnnnnnnnnnnnnnnnnnnnnnnnnnnnnnnnnnnnnnnnnnnnnnnnnnnnnnnnnnnnnnnnnnnnnnnnnnnnnnnnnnnnnnnnnnnnnnnnnnnnnnnnnnnnnnnnnnnnnnnnnnnnnnnnnnnnnnnnnnnnnnnnnnnnnnnnnnnnnnnnnnnnnnnnnnnnnnnnnnnnnnnnnnnnnnnnnnnnnnnnnnnnnnnnnnnnnnnnnnnnnnnnnnnnnnnnnnnnnnnnnnnnnnnnnnnnnnnnnnnnnnnnnnnnnnnnnnnnnnnnnnnnnnnnnnnnnnnnnnnnnnnnnnnnnnnnnnnnnnnnnnnnnnnnnnnnnnnnnnnnnnnnnnnnnnnnnnnnnnnnnnnnnnnnnnnnnnnnnnnnnnnnnnnnnnnnnnnnnnnnnnnnnnnnnnnnnnnnnnnnnnnnnnnnnnnnnnnnnnnnnnnnnnnnnnnnnnnnnnnnnnnnnnnnnnnnnnnnnnnnnnnnnnnnnnnnnnnnnnnnnnnnnnnnnnnnnnnnnnnnnnnnnnnnnnnnnnnnnnnnnnnnnnnnnnnnnnnnnnnnnnnnnnnnnnnnnnnnnnnnnnnnnnnnnnnnnnnnnnnnnnnnnnnnnnnnnnnnnnnnnnnnnnnnnnnnnnnnnnnnnnnnnnnnnnnnnnnnnnnnnnnnnnnnnnnnnnnnnnnnnnnnnnnnnnnnnnnnnnnnnnnnnnnnnnnnnnnnnnnnnnngggtggccagcgacggctggggtgcgcaggagagcatcatcaagggcagcgagcatgtggcctacggcgccatcaccctggagctggcctcgcagcctgtccgccagttcgaccgctacttccagagcctcaacccctacaacaaccaccgcaatccctggttccgggacttctgggagcaaaagttccagtgcagcctccagaacaagcgtaaccacaggcgcgtctgcgacaagcacctggccatcgacagcagcaactacgagcaagagtccaagatcatgtttgtggttaacgcggtgtatgccatggcccacgctttgcacaaaatgcagcgcaccctctgtcccaacactaccaagctttgtgatgctatgaagatcctggannnnnnnnnnnnnnnnnnnnnnnnnnnnnnnnnnnnnnnncacagctccattcaacccaaataaagatgcagatagcatagtcaagtttgacacttttggagatggaatggggcgatacaacgtgttcaatttccaaaatgtagngtggaaagtattcctacttgaaagttggtcactgggcggaaaccttatcgctagatgtcaactctatccactggtcccggaactcagtccccacttc

SEQ ID NO: 20223 - DNA, 133 bp, Macaca Mulatta
  misc_feature (1)...(133): n = A,T,C or G
naggtgtacatgtaccagctcttccgcagcttggcctacatccactcccagggcgtgtgtcaccgtgacatcaagccccagaacctgctggtggaccctgacactgctgtcctcaagctctgcgattttggca

SEQ ID NO: 20224 - DNA, 874 bp, Macaca Mulatta
cggagaaagtgggcgttctttttgaggaagacgcggtcgtaggacttgcggatctttggttcgcacgctcctgctcctgactcaccgctgttcgctctcgccgaggaacaagtcggtcaggaagccgcgcagcaggcatggcttttaaggatactggaaaaacacccgtggagccggaggtggcaattcaccgaattcgaatcaccctaacgagccgcaacgttaaatccctggaaaaggtgtgtgctgacttgatcagaggcgcgaaggaaaagaacctgaaagtgaaaggaccagttcgaatgcctaccaagactttgagaatcactacaagaaaaactccttgtggtgaaggttctaagacatgggatcgtttccagatgagaatccacaagcgactcattgacttgcacagtccttctgagattgttaagcagattacttccatcagtattgagccaggagttgaggtggaagtcaccattgcagatgcttaagtcaactattttaataaattgattaccagttgttaaaaagcgcacatcgcgtctagactatcttgtccgcatgatttattaagcattgaaatctggtcctatcctttgcccttggttggtgcgccctcgggcccttgaaaaggttttcttaaaaccatttccgttttgggcgcgcggggccccgtaagggaaagggaaaatgggcccatagctgtgtttcccctaggagaaatcccggggcacatggaactaaggggcttgtggatttcccccccatataaaaaaaaaccgcccgggcgggaaaactccagaagcgtttcctgaaaaaaaattcccgaaggtaggggtttctctggagggggtccttttcactgggc

SEQ ID NO: 20225 - DNA, 470 bp, Macaca Mulatta
agccccctctccggaggaggagttccagtttctgcgctgccagcaatgccaggctgaagccaagtgcccgaagctgctgccttgtctgcacacgctgtgctcaggatgcctggaggagtcgggcatgcagtgccccatctgccaggcgccctggcccctaggtgcagacacgcctgccctggataacgtctttttcgagagtctgcaacggcgcctgtcggtgtaccggcagattgtggatgcacaggctgcgtgcatccgctgcaaagagtccgccgacttctggtgctttgagtgcgagcagctcctctgcgccaagtgcttcgaggcacaccagtggttcctcaagcacgaggcccggcccttagcagagctgcgcaaccagtccgtgcgtgagttcctggatggcacccgcaagaccaacaatatcttctgctccaaccccaaccaccgcacccctacactgacca

SEQ ID NO: 20226 - DNA, 1579 bp, Macaca Mulatta
  misc_feature (1)...(1579): n = A,T,C or G
atttgctgccaaactcattgagggtgtgttggatttcaaggtcatgattgacaannnnnnnnnnnnnnnnnnnnnnnnnnnnnnnnnnnnnnnnnnnnnnnnnnnnnnnnnnnnnnnnnnnnnnnnnnnnnnnnnnnnnnnnnnnnnnnnnnnnnnnnnnnnnnnnnnnnnnnnnnnnnnnnnnnnnnnnnnnnnnnnnnnnnnnnnnnnnnnnnnnnnnnnnnnnnnnnnnnnnnnnnnnnnnnnnnnnnnnnnnnnnnnnnnnnnnnnnnnnnnnnnnnnnnnnnnnnnnnnnnnnnnnnnnnnnnnnnnnnnnnnnaacaaagagcctgtgggcatcctcacctccaaccaccgcaactcctgggccaaggcatacaacaccctcatcaaannnnnnnnnnnnnnnnnnnnnnnnnnnnnnnnnnnnnnnnnnnnnnnnnnnnnnnnnnnnnnnnnnnnnnnnnnnnnnnnnnnnnnnnnnnnnnnnnnnnnnnnnnnnnnnnnnnnnnnnnnnnnnnnnnnnnnnnnnnnnnnnnnnnnnnnnnnnnnnnnnnnnnnnnnnnnnnnnnnnnnnnnnnnnnnnnnnnnnnnnnnnnnnnnnnnnnnnnnnnnnnnnnnnnnnnnnnnnnnnnnnnnnnnnnnnnnnnnnnnnnnnnnnnnnnnnnnnnnnnnnnnnnnnnnnnnnnnnnnnnnnnnnnnnnnnnnnnnnnnnnnnnnnnnnnnnnnnnnnnnnnnnnnnnnnnnnnnnnnnnnnnnnnnnnnnnnnnnnnnnnnnnnnnnnnnnnnnnnnnnnnnnnnnnnnnnnnnnnnnnnnnnnnnnnnnnttccatcattttggaaaggacttccccaagtcggagaagctaagcccagacgccttcatccagatggctttgcagctggcctactacaggncaggatctacaggcaggcatgtgccacctatgaaagtgcctcactgcgcatgtttcacctgggccgcttctacaccatccgctcggcttccatggattcactcgcctttgtcaaggccatggatgactccagcgtcacggnnnnnnnnnnnnnnnnnnnnnnnnnnnnnnnnnnnnnnnnnnnnnnnnnnnnnnnnnnnnngccatccgtggagaggcctttgatcgacacctcctgggcctgaagctgcaggccatcgaggacctggtgagcatgcctgacatcttcatggacacctcctatgccatcgccatgcacttccacctctccaccagccaggtnnnnnnccaggtcccttccaagacagactgcgtcatgttctttgggcccgtggtccccgatggctacggtgtctgctataaccccatggaggcccacatcaacttctccctgtcggcctacaacagctgcgcagagaccaacgccgcccgcctggcacattacctagagaaggcgctcctggacatgcgtgccctgctgcagagccacccccgggccaagctctgagcccctaggactcaggcctgccaatgccacagccaagcccaccctgggatgggccacccaccagggctcagcccattggttccctcttccctgg

SEQ ID NO: 20227 - DNA, 324 bp, Macaca Mulatta
  misc_feature (1)...(324): n = A,T,C or G
ngagagagcgagccacatcagtactcctggcagatccctgcttccagctacgctcaatatgctatctcctgggacagccagagcccccagcacctggcactgccctgccagcccctgatcggaagcgcttctccctgcagagcnnnnnnnnnnnnnnnnnnnnnnnnnnnnnnnnnnnnnnnnnnnnnnnnnnnnnnnnnnnnnnnnnnnnnnnnnnnnnnnnnnnnnnnnnnnnnnngcccaccagtgaagaggacctctgccccatctgctatgcccaccccatctctgctgtgttccagccctgtggccacaagtcgtgca

SEQ ID NO: 20228 - DNA, 630 bp, Macaca Mulatta
  misc_feature (1)...(630): n = A,T,C or G
aggaggcaggatcgaccatgggcaccatgaaggcaaatccaagcaggccctgcacgaggcggtagagatggaccgggccatcgggcaggcaggcagcatgacctccttggaagacactctgaccgtggtcaccgcggaccattcccacgtcttcacctttggtggatacaccccccgtggcaactctatctttggtnnnnnnnnnnnnnnnnnnnnnnnnnnnnnnnnnnnnnnnnnnnnnnnnnnnnnnnnnnnnnnnnnnnnnnnnnnnnnnnnnnnnnnnnnnnnnnnnnnnnnnnnnnnnnnnnnnnnnnngctcacaacaactaccaggcgcagtctgctgtgcccctgcgccacgagacccacggcggggaggatgtggccgtcttctccaagggccccatggcacacctgctgcacggcgtccatgagcagaactacatcccccacgtgatggcgtacgcagcctgcatcggggccaacctcgaccactgtgcccctgccagctcggcaggcagccttgctgcaggccccctgctgctccccctggccctcttccccctgagcatcctgttctgagggcccagggcccgggcacccacgagcccgtgacacaccaacttccca

SEQ ID NO: 20229 - DNA, 447 bp, Macaca Mulatta
  misc_feature (1)...(447): n = A,T,C or G
gggaatggtttgtgaaatccacagctatatcctgatgctagatggtattaatcttgtgtagtcctaaactggttagtgtgaaatagttctgacgcaccactgccaattctgtacatgctgcatttgccccttaagccaggtggatgtttactgtgtgttttataatttcctggctccttcactgaacatgcctagtccaacattttttcccagtcagtcacatcctgggatccagtgtataaatccaatatcgtatgtcttgtgcataattgttccaaaggagcttattttgtgaactatatatatcagtagtgtacattaccacataacataaaaagatctacatataaacaatacaaccaactatccaagtgttataccaactaaaaaccccaataaaccttgaacannnnnnnnnnnnnnnnnnnnnnnnnnnnnnnnnnnnnn

SEQ ID NO: 20230 - DNA, 1069 bp, Macaca Mulatta
  misc_feature (1)...(1069): n = A,T,C or G
gaataatgtggaacaggaccttaaggagaaagaagatactattaaacaaaggacaagcgaggttcaggatcttcaagatgaagttcaaagggagaagactaatctgcaaaaactnnnnnnnnnnnnnnnnnnnnnnnnnnnnnnnnnnnnnnnnnnnnnnnnnnnnnnnnnnnnnnnnnnnnnnnnnnnnnnnnnnnnnnnnnnnnnnnnnnnnnnnnnnnnnnnnnnnnnnnnnnnnnnnnnnnnnnnnnnnnnnnnnnnnnnnnnnnnnnnnnnnnnnnnnnnnnnnnnnnnnnnnnnnnnnnnnnnnnnnnnnnnnnnnnnnnnnnnnnnnnnnnnnnnnnnnnnnnnnnnnnnnnnnnnnnnnnnnnnnnnnnnnnnnnnnnnnnnnnnnnnnnnnnnnnnnnnnnnnnnnnnnnnnnnnnnatgcaaatgaaactgatggaaatgaaagatttggaaaatcataataatacgttaaattggtgcagtagcccacacagcattcttgtaaatggagctacagattattgcagcctcagcaccagcagcagtgaaacagccaaccttaatgaacatnnnnnnnnnnnnnnnnnnnnnnnnnnnnnnnnnnnnnnnnnnnnnnnnnngcaagaagtagtcctgaactactgccttctggtgtgactgatgaaaatgaagtgactacagctgttactgaaaaagtttgttctgaactcgataataacagacattcaaaagagnnnnnnnnnnnnnnnnnnnnnnnnnnnnnnnnnnnnnnnnnnnnnnnnnnnnnnnnnnnnnnnnnnnnnnnnnnnnnnnnnnnnnnnnnnnnnnnnnnnnnnnnnnnnnnnnnnnnnnnnnnnnnnnnnnnnnnnnnnnnnnnnnnnnnnnnnnnnnnnnnnnnnnnnnnnnnnnnnnnnnnnnnnnnnnnnnnnnnnnnnnnnnnnnnnnnnnnnnnnnnnnnnnnnnnnnnnnnnnnnnnnnnnnnnnnnnnnnnnnnnnngaaacattgaagcacaatgatccttttgctcctggtggaacagttgttgcagcaagcgattca

SEQ ID NO: 20231 - DNA, 1547 bp, Macaca Mulatta
  misc_feature (1)...(1547): n = A,T,C or G
aggttctctcaagtagtgctgccagtagtaccatcacagcactgtcacctggaggggcacttatgcagggaggaacacagcaagccataaaccnnnnnnnnnnnnnnnnnnnnnnnnnnnnnnnnnnnnnnnnnnnnnnnnnnnnnnnnnnnnnnnnnnnnnnnnnnnnnnnnnnnnnnnnnnnnnnnnnnnnnnnnnnnnnnnnnnnnnnnnnnnnnnnnnnnnnnnnnnnnnnnnnnnnnnnnnnnnnnnnnnnnnnnnnnnnnnnnnnnnnnnnnnnnnnnnnnnnnnnnnnnnnnnnnnnnnnnnnnnnnnnnnnnnnnnnnnnnnnnnnnnnnnnnnnnnnnnnnnnnnnnnnnnnnnnnnnnnnnnnnnnnnnnnnnnnnnnnnnnnnnnnnnnnnnnnnnnnnnnnnnnnnnnnnnnnnnnnnnnnnnnnnnnnnnnnnnnnnnnnnnnnnnnnnnnnnnnnnnnnnnnnnnnnnnnnnnnnnnnnnnnnnnnnnnnnnnnnnnnnnnnnnnnnnnnnnnnnnnnnnnnnnnnnnnnnnnnnnnnnnnnnnnnnnnnnnnnnnnnnnnnnnnnnnnnnnnnnnnnnnnnnnnnnnnnnnnnnnnnnnnnnnnnnnnnnnnnnnnnnnnnnnnnnnnnnnnnnnnnnnnnnnnnnnnnnnnnnnnnnnnnnnnnnnnnnnnnnnnnnnnnnnnnnnnnnnnnnnnnnnnnnnnnnnnnnnnnnnnnnnnnnnnnnnnnnnnnnnnnnnnnnnnnnnnnnnnnnnnnnnnnnnnnnnnnnnnnnnnnnnnnnnnnnnnnnnnnnnnnnnnnnnnnnnnnnnnnnnnnnnnnnnnnnnnnnnnnnnnnnnnnnnnnnnnnnnnnnnnnnnnnnnnnncaccctccattggatcctcaagttttaattaattccattataccttacatcagcaagttaaaaagagtactttaaaataaagcaaagggagactgttgctcaaccatcaggaaacagttgtcagaagacatcattggtcctgtgtttcctacggaaataagaaacaataaatattgcactgaatgtttgtggtttggagtccctgaataataaagagggaacatacttgcagaaagttgcatagggttttttaatgcagaattttgtcagaagacaatagcgctgcatgtttttctttgagtgcaaatgtacattgctaagattttttttaagatggcatgtgctttgaaaagaggatattgcatttttaagagtttaaaaatcttatgagtgagaaatataaaaaaaatattattttcacctctttagaagaaataaaagatgtttctcctatctccttttctctagtatttgactgttactgtccttggcgaatcgataatcattgcatagtgactgaaaagcctaagtgnnnnnnnnnnnnnnnnnnngttcttgtttctggaattcgtgccatattttgttcctgatgggatcaacttactgtttaagacttcagatgtcctgtattaaaaattacacaaaaaagtaaaactttttatactt

SEQ ID NO: 20232 - DNA, 865 bp, Macaca Mulatta
  misc_feature (1)...(865): n = A,T,C or G
gggttgtctgggtcatcttgtctgcctgccgctggcctggccccgtctgtctctctcagcagctgtctttctcgcgcccactggccggtctctcctcttccccgcagtcgcctccttcctctgcctgcctgggtggccgccatgggccggaagcggctcatcactgattcctacccggttgtgaagaggagggaggggcccgctgggcacagcaagggggagctggcatccgagctaggggaggagccccagccccgcgacgaggaggaagcggagctggagctgctgaggcagtttgacctggcctggcagtacgggccctgcaccgggatcacacggctgcaccgctggtgtcgggcccagcaaatgggctcggaagccttcccccaaaaggtgtggggaagtgctgaaaaacccacccccgggataccccccgccttccagatgccacccttctgggcattctccttattccccctaggaagggcaccctcgttattgaccctccctggccccttgggatctactttggttcgctcaacccaaaaaaattctccagggaaacagaaaacctaagaggccccaatttggcctccctgggtttcaagtcttcaaacccccctcctggccggaaaagaaaccccccttgtgccacaggcaataaaacacctggagagggtgttccaaaaaagggtaaaaaacttccttttcctttcttaaacccgagccatgggctctttctatnnnnnnnnnnnnnnnnnnnnnnnnnnnnnnnnntgttggtatacccctgagaaaaccacaaaaaatgactctttctcctcaaaatggtggaaaaaatggggggccccctcgggggggagaa

SEQ ID NO: 20233 - DNA, 602 bp, Macaca Mulatta
agggctttctctacgtgctgttgtctcactgagtttttgtcggagccccacgcactcctgcctctgattcctggaagaaaggggtggtcccctcagccccccagcatcccggaaaatggggagcaaggccctgccagcgcccatcccgctccacccgtcgctgcagctcaccaattactccttcctgcaggccgtgaatactttcccggccacagtggaccacctgcagggcctgtacggtctcagcgcggtacagaccatgcacatgaaccactggacgctggggtatcccaatgtgcacgagatcacccgctccaccatcacggagatggcggcagcgcagggcctcgtggacgcgcgcttccccttcccggccctgccttttaccacccacctattccaccccaagcagggggccattgcccatgtcctcccagccctgcacaaagaccggccccgttttgactttgccaatttggcggtggctgccacgcaagaagatccacctaagatgggagacctaaccaagctgagtcagagggctgggtagccccatctcgggcctcagtaaattgacaacggacagaaagccctctcgagga

SEQ ID NO: 20234 - DNA, 561 bp, Macaca Mulatta
  misc_feature (1)...(561): n = A,T,C or G
caagtccttctcagcaaatcaaccttggcccatcgtccaatcctcatgctaaaccatctgactttcacttcttgaaagtgattgggaagggcagttttggaaaggtnaggttcttctagcaagacacaaggcnnnnnnnnnnnnnnnnnnnnnnnnnnnnnnnnnnnnnnnnnnnnnnnnnnnnnnnnnnnnnnnnnnnnnnnnnnnnnnnnnnnnnnnnnnnnnnnnnnnnnnnnnnnnnnnnnnnnnnnnnnnnnnnnnnnnnnnnnnnnnnnnnnnnnnnnnnnnnnnnnnnnnnnnnnnnnnnnnnnnnnnnnnnnnnnnnnnnnnnnnnnnnnnnnnnnnnnnnnnnnnnnnnnnnnnnnnnnnnnnnnnnnnnnnnnnnnnnnnnnnnnnnnnnnnnnnnnnnnnnnnnnnnnnnnnnnnnnnnntttacagagacttaaaaccagagaatattntgctagattcacagggacacattgtccttaccgacttcggactctgcaaggagaacattgaacacaacagcacgacatccaccttctgtggcacgccgga

SEQ ID NO: 20235 - DNA, 14611 bp, Macaca Mulatta
  misc_feature (1)...(14611): n = A,T,C or G
gagaatgtgcccccagacctctccatctgcacctttgtgctggagcagtccctctctgtccgggccctgcaggagatgctggctaacaccgtggagaaatcagaaggggcannnnnnnnnnnnnnnnnnnnnnnnnnnnnnnnnnnnntctcttctctctaaagactgctcaaggtggtggtcatcgaacactcctctatggacatgccatattgctgcgccattcctacagtggcatnnnnnnnnnnnnnnnnnnnnnnnnnnnnnnnnnnnnnnnnnnnnnnnnnnnnnnnnnnnnnnnnnnnnnnnnnnnnnnnnnnnnnnnnnnnnnnnnnnnnnnnnnnnnnnnnnnnnnnnnnnnnnnnnnnnnnnnnnnnnnnnnnnnnnnnnnnnnnnnnnnnnnnnnnnnnnnnnnnnnnnnnnnnnnnnnnnnnnnnnnnnnnnnnnnnnnnnnnnnnnnnnnnnnnnnnnnnnnnnnnnnnnnnnnnnnnnnnnnnnnnnnnnnnnnnnnnnnnnnnnnnnnnnnnnnnnnnnnnnnnnnnnnnnnnnnnnnnnnnnnnnnnnnnnnnnnnnnnnnnnnnnnnnnnnnnnnnnnnnnnnnnnnnnnnnnnnnnnnnnnnnnnnnnnnnnnnnnnnnnnnnnnnnnnnnnnnnnnnnnnnnnnnnnnnnnnnnnnnnnnnnnnnnnnnnnnnnnnnnnnnnnnnnnnnnnnnnnnnnnnnnnnnnnnnnnnnnnnnnnnnnnnnnnnnnnnnnnnnnnnnnnnnnnnnnnnnnnnnnnnnnnnnnnnnnnnnnnnnnnnnnnnnnnnnnnnnnnnnnnnnnnnnnnnnnnnnnnnnnnnnnnnnnnnnnnnnnnnnnnnnnnnnnnnnnnnnnnnnnnnnnnnnnnnnnnnnnnnnnnnnnnnnnnnnnnnnnnnnnnnnnnnnnnnnnnnnnnnnnnnnnnnnnnnnnnnnnnnnnnnnnnnnnnnnnnnnnnnnnnnnnnnnnnnnnnnnnnnnnnnnnnnnnnnnnnnnnnnnnnnnnnnnnnnnnnnnnnnnnnnnnnnnnnnnnnnnnnnnnnnnnnnnnnnnnnnnnnnnnnnnnnnnnnnnnnnnnnnnnnnnnnnnnnnnnnnnnnnnnnnnnnnnnnnnnnnnnnnnnnnnnnnnnnnnnnnnnnnnnnnnnnnnnnnnnnnnnnnnnnnnnnnnnnnnnnnnnnnnnnnnnnnnnnnnnnnnnnnnnnnnnnnnnnnnnnnnnnnnnnnnnnnnnnnnnnnnnnnnnnnnnnnnnnnnnnnnnnnnnnnnnnnnnnnnnnnnnnnnnnnnnnnnnnnnnnnnnnnnnnnnnnnnnnnnnnnnnnnnnnnnnnnnnnnnnnnnnnnnnnnnnnnnnnnnnnnnnnnnnnnnnnnnnnnnnnnnnnnnnnnnnnnnnnnnnnnnnnnnnnnnnnnnnnnnnnnnnnnnnnnnnnnnnnnnnnnnnnnnnnnnnnnnnnnnnnnnnnnnnnnnnnnnnnnnnnnnnnnnnnnnnnnnnnnnnnnnnnnnnnnnnnnnnnnnnnnnnnnnnnnnnnnnnnnnnnnnnnnnnnnnnnnnnnnnnnnnnnnnnnnnnnnnnnnnnnnnnnnnnnnnnnnnnnnnnnnnnnnnnnnnnnnnnnnnnnnnnnnnnnnnnnnnnnnnnnnnnnnnnnnnnnnnnnnnnnnnnnnnnnnnnnnnnnnnnnnnnnnnnnnnnnnnnnnnnnnnnnnnnnnnnnnnnnnnnnnnnnnnnnnnnnnnnnnnnnnnnnnnnnnnnnnnnnnnnnnnnnnnnnnnnnnnnnnnnnnnnnnnnnnnnnnnnnnnnnnnnnnnnnnnnnnnnnnnnnnnnnnnnnnnnnnnnnnnnnnnnnnnnnnnnnnnnnnnnnnnnnnnnnnnnnnnnnnnnnnnnnnnnnnnnnnnnnnnnnnnnnnnnnnnnnnnnnnnnnnnnnnnnnnnnnnnnnnnnnnnnnnnnnnnnnnnnnnnnnnnnnnnnnnnnnnnnnnnnnnnnnnnnnnnnnnnnnnnnnnnnnnnnnnnnnnnnnnnnnnnnnnnnnnnnnnnnnnnnnnnnnnnnnnnnnnnnnnnnnnnnnnnnnnnnnnnnnnnnnnnnnnnnnnnnnnnnnnnnnnnnnnnnnnnnnnnnnnnnnnnnnnnnnnnnnnnnnnnnnnnnnnnnnnnnnnnnnnnnnnnnnnnnnnnnnnnnnnnnnnnnnnnnnnnnnnnnnnnnnnnnnnnnnnnnnnnnnnnnnnnnnnnnnnnnnnnnnnnnnnnnnnnnnnnnnnnnnnnnnnnnnnnnnnnnnnnnnnnnnnnnnnnnnnnnnnnnnnnnnnnnnnnnnnnnnnnnnnnnnnnnnnnnnnnnnnnnnnnnnnnnnnnnnnnnnnnnnnnnnnnnnnnnnnnnnnnnnnnnnnnnnnnnnnnnnnnnnnnnnnnnnnnnnnnnnnnnnnnnnnnnnnnnnnnnnnnnnnnnnnnnnnnnnnnnnnnngattgtgttgcctcctcatctagaaagaataagagaaaaactggcagagaatatccatgaactctgggttatgaataaaattgagcttggctggcagtatggaccggtnnnnnnnnnnnnnnnnnnnnnnnnnnnnnnnnnnnnnnnnnnnnnnnnnnnnnnnnnnnnnnnnnnnnnnnnnnnnnnnnnnnnnnnnnnnnnnnnnnnnnnnnnnnnnnnnnnnnnnnnnnnnnnnnnnnnnnnnnnnnnnnnnnnnnnnnnnnnnnnnnnnnnnnnnnnnnnnnnnnnnnnnnnnnnnnnnnnnnnnnnnnnnnnnnnnnnnnnnnnnnnnnnnnnnnnnnnnnnnnnnnnnnnnnnnnnnnnnnnnnnnnnnnnnnnnnnnnnnnnnnnnnnnnnnnnnnnnnnnnnnnnnnnnnnnnnnnnnnnnnnnnnnnnnnnnnnnnnnnnnnnnnnnnnnnnnnnnnnnnnnnnnnnnnnnnnnnnnnnnnnnnnnnnnnnnnnnnnnnnnnnnnnnnnnnnnnnnnnnnnnnnnnnnnnnnnnnnnnnnnnnnnnnnnnnnnnnnnnnnnnnnnnnnnnnnnnnnnnnnnnnnnnnnnnnnnnnnnnnnnnnnnnnnnnnnnnnnnnnnnnnnnnnnnnnnnnnnnnnnnnnnnnnnnnnnnnnnnnnnnnnnnnnnnnnnnnnnnnnnnnnnnnnnnnnnnnnnnnnnnnnnnnnnnnnnnnnnnnnnnnnnnnnnnnnnnnnnnnnnnnnnnnnnnnnnnnnnnnnnnnnnnnnnnnnnnnnnnnnnnnnnnnnnnnnnnnnnnnnnnnnnnnnnnnnnnnnnnnnnnnnnnnnnnnnnnnnnnnnnnnnnnnnnnnnnnnnnnnnnnnnnnnnnnnnnnnnnnnnnnnnnnnnnnnnnnnnnnnnnnnnnnnnnnnnnnnnnnnnnnnnnnnnnnnnnnnnnnnnnnnnnnnnnnnnnnnnnnnnnnnnnnnnnnnnnnnnnnnnnnnnnnnnnnnnnnnnnnnnnnnnnnnnnnnnnnnnnnnnnnnnnnnnnnnnnnnnnnnnnnnnnnnnnnnnnnnnnnnnnnnnnnnnnnnnnnnnnnnnnnnnnnnnnnnnnnnnnnnnnnnnnnnnnnnnnnnnnnnnnnnnnnnnnnnnnnnnnnnnnnnnnnnnnnnnnnnnnnnnnnnnnnnnnnnnnnnnnnnnnnnnnnnggtgaccagaatagacggcaccatagacagttccccatgtttaaaggtcactcagaagtcttttggttctcagaacagccacactgatatcatgttctatcgcctgagcatgccgatcgagtgcgcggaggtcttctccaagactgtggctggagggctccctggggctggcctttttgggcccaagaatgatttggaagattatgatgctgattctgactttgaggttctgatgaagacagctcatggccatctagtgcccgatcgtgttgacaaagacaaagaagctaccaagccagagtttaataaccacaaagattatgcccaggaaaagccctctcgtctgannnnnnnnnnnnnnnnnnnnnnnnnnnnnnnnnnnnnnnnnnnnnnnnnnnnnnnnnnnnnnnnnnnnnnnnnnnnnnnnnnnnnnnnnnnnnnnnnnnnnnnnnnnnnnnnnnnnnnnnnnnnnnnnnnnnnnnnnnnnnnnnnnnnnnnnnnnnnnnnnnnnnnnnnnnnnnnnnnnnnnnnnnnnnnnnnnnnnnnnnnnnnnnnnnnnnnnnnnnnnnnnnnnnnnnnnnnnnnnnnnnnnnnnnnnnnnnnnnnnnnnnnnnnnnnnnnnnnnnnngcatcaaacgcagcaactgctatatggtatgtgcgggtgagagcatgagccccgggcaaggacgcaacaataatggactggagatcggctgtgtggtggatgctgccagcgggctgctcacgttcattgccaatggcaaggaactgagcacatactatcaggtnnnnnnnnnnnnnnnnnnnnnnnnnnnnnnnnnnnnnnnnnnnnnnnnnnnnnnnnnnnnnnnnnnnnnnnnnnnnnnnnnnnnnnnnnnnnnnnnnnnnnnnnnnnnnnnnnnnnnnnnnnnnnnnnnnnnnnnnnnnnnnnnnnnnnnnnnnnnnnnnnnnnnnnnnnnnnnnnnnnnnnnnnnnnnnnnnnnnnnnnnnnnnnnnnnnnnnnnnnnnnnnnnnnnnnnnnnnnnnnnnnnnnnnnnnnnnnnnnnnnnnnnnnnnnnnnnnnnnnnnnnnnnnnnnnnnnnnnnnnnnnnnnnnnnnnnnnnnnnnnnnnnnnnnnnnnnnnnnnnnnnnnnnnnnnnnnnnnnnnnnnnnnnnnnnnnnnnnnnnnnnnnnnnnnnnnnnnnnnnnnnnnnnnnnnnnnnnnnnnnnnnnnnnnnnnnnnnnnnnnnnnnnnnnnnnnnnnnnnnnnnnnnnnnnnnnnnnnnnnnnnnnnnnnnnnnnnnnnnnnnnnnnnnnnnnnnnnnnnnnnnnnnnnnnnnnnnnnnnnnnnnnnnnnnnnnnnnnnnnnnnnnnnnnnnnnnnnnnnnnnnnnnnnnnnnnnnnnnnnnnnnnnnnnnnnnnnnnnnnnnnnnnnnnnnnnnnnnnnnnnnnnnnnnnnnnnnnnnnnnnnnnnnnnnnnnnnnnnnnnnnnnnnnnnnnnnnnnnnnnnnnnnnnnnnnnnnnnnnnnnnnnnnnnnnnnnnnnnnnnnnnnnnnnnnnnnnnnnnnnnnnnnnnnnnnnnnnnnnnnnnnnnnnnnnnnnnnnnnnnnnnnnnnnnnnnnnnnnnnnnnnnnnnnnnnnnnnnnnnnnnnnnnnnnnnnnnnnnnnnnnnnnnnnnnnnnnnnnnnnnnnnnnnnnnnnnnnnnnnnnnnnnnnnnnnnnnnnnnnnnnnnnnnnnnnnnnnnnnnnnnnnnnnnnnnnnnnnnnnnnnnnnnnnnnnnnnnnnnnnnnnnnnnnnnnnnnnnnnnnnnnnnnnnnnnnnnnnnnnnnnnnnnnnnnnnnnnnnnnnnnnnnnnnnnnnnnnnnnnnnnnnnnnnnnnnnnnnnnnnnnnnnnnnnnnnnnnnnnnnnnnnnnnnnnnnnnnagatgtgcctactgcttcaataagtctgtgactgccaggtccggcaccggatagaagccataggagccttttcagatgattttgtagctnnnnnnnnnnnnnnnnnnnnnnnnnnnnnnnnnnnnnnnnnnnnnnnnnnnnnnnnnnnnnnnnnnnnnnnnnnnnnnnnnnnnnnnnnnnnnnnnnnnnnnnnnnnnnnnnnnnnnnnnnnnnnnnnnnnnnnnnnnnnnnnnnnnnnnnnnnnnnnnnnnnnnnnnnnnnnnnnnnnnnnnnnnnnnnnnnnnnnnnnnnnnnnnnnnnnnnnnnnnnnnnnnnnnnnnnnnnnnnnnnnnnnnnnnnnnnnnnnnnnnnnnnnnnnnnnnnnnnnnnnnnnnnnnnnnnnnnnnnnnnnnnnnnnnnnnnnnnnnnnnnnnnnnnnnnnnnnnnnnnnnnnnnnnnnnnnnnnnnnnnnnnnnnnnnnnnnnnnnnnnnnnnnnnnnnnnnnnnnnnnnnnnnnnnnnnnnnnnnnnnnnnnnnnnnnnnnnnnnnnnnnnnnnnnnnnnnnnnnnnnnnnnnnnnnnnnnnnnnnnnnnnnnnnnnnnnnnnnnnnnnnnnnnnnnnnnnnnnnnnnnnnnnnnnnnnnnnnnnnnnnnnnnnnnnnnnnnnnnnnnnnnnnnnnnnnnnnnnnnnnnnnnnnnnnnnnnnnnnnnnnnnnnnnnnnnnnnnnnnnnnnnnnnnnnnnnnnnnnnnnnnnnnnnnnnnnnnnnnnnnnnnnnnnnnnnnnnnnnnnnnnnnnnnnnnnnnnnnnnnnnnnnnnnnnnnnnnnnnnnnnnnnnnnnnnnnnnnnnnnnnnnnnnnnnnnnnnnnnnnnnnnnnnnnnnnnnnnnnnnnnnnnnnnnnnnnnnnnnnnnnnnnnnnnnnnnnnnnnnnnnnnnnnnnnnnnnnnnnnnnnnnnnnnnnnnnnnnnnnnnnnnnnnnnnnnnnnnnnnnnnnnnnnnnnnnnnnnnnnnnnnnnnnnnnnnnnnnnnnnnnnnnnnnnnnnnnnnnnnnnnnnnnnnnnnnnnnnnnnnnnnnnnnnnnnnnnnnnnnnnnnnnnnnnnnnnnnnnnnnnnnnnnnnnnnnnnnnnnnnnnnnnnnnnnnnnnnnnnnnnnnnnnnnnnnnnnnnnnnnnnnnnnnnnnnnnnnnnnnnnnnnnnnnnnnnnnnnnnnnnnnnnnnnnnnnnnnnnnnnnnnnnnnnnnnnnnnnnnnnnnnnnnnnnnnnnnnnnnnnnnnnnnnnnnnnnnnnnnnnnnnnnnnnnnnnnnnnnnnnnnnnnnnnnnnnnnnnnnnnnnnnnnnnnnnnnnnnnnnnnnnnnnnnnnnnnnnnnnnnnnnnnnnnnnnnnnnnnnnnnnnnnnnnnnnnnnnnnnnnnnnnnnnnnnnnnnnnnnnnnnnnnnnnnnnnnnnnnnnnnnnnnnnnnnnnnnnnnnnnnnnnnnnnnnnnnnnnnnnnnnnnnnnnnnnnnnnnnnnnnnnnnnnnnnnnnnnnnnnnnnnnnnnnnnnnnnnnnnnnnnnnnnnnnnnnnnnnnnnnnnnnnnnnnnnnnnnnnnnnnnnnnnnnnnnnnnnnnnnnnnnnnnnnnnnnnnnnnnnnnnnnnnnnnnnnnnnnnnnnnnnnnnnnnnnnnnnnnnnnnnnnnnnnnnnnnnnnnnnnnnnnnnnnnnnnnnnnnnnnnnnnnnnnnnnnnnnnnnnnnnnnnnnnnnnnnnnnnnnnnnnnnnnnnnnnnnnnnnnnnnnnnnnnnnnnnnnnnnnnnnnnnnnnnnnnnnnnnnnnnnnnnnnnnnnngctttgagtgctacagacatggccttggccctcaatcggtacctttgcacggccgtcttgccgttgctaacaagatgtgctcctctctttgctggcacagagcaccatgcttctctcattgactcattgcttcatactgtgtatagactttataagggctgttcacttaccaaagctcagcgggattctatagaagtttgtttgctctctatttgtgnnnnnnnnnnnnnnnnnnnnnnnnnnnnnnnnnnnnnnnnnnnnnnnnnnnnnnnnnnnnnnnnnnnnnnnnnnnnnnnnnnnnnnnnnnnnnnnnnnnnnnnnnnnnnnnnnnnnnnnnnnnnnnnnnnnnnnnnnnnnnnnnnnnnnnnnnnnnnnnnnnnnnnnnnnnnnnnnnnnnnnnnnnnnnnnnnnnnnnnnnnnnnnnnnnnnnnnnnnnnnnnnnnnnnnnnnnnnnnnnnnnnnnnnnnnnnnnnnnnnnnnnnnnnnnnnnnnnnnnnnnnnnnnnnnnnnnnnnnnnnnnnnnnnnnnnnnnnnnnnnnnnnnnnnnnnnnnnnnnnnnnnnnnnnnnnnnnnnnnnnnnnnnnnnnnnnnnnnnnnnnnnnnnnnnnnnnnnnnnnnnnnnnnnnnnnnnnnnnnnnnnnnnnnnnnnnnnnnnnnnnnnnnnnnnnnnnnnnnnnnnnnnnnnnnnnnnnnnnnnnnnnnnnnnnnnnnnnnnnnnnnnnnnnnnnnnnnnnnnnnnnnnnnnnnnnnnnnnnnnnnnnnnnnnnnnnnnnnnnnnnnnnnnnnnnnnnnnnnnnnnnnnnnnnnnnnnnnnnnnnnnnnnnnnnnnnnnnnnnnnnnnnnnnnnnnnnnnnnnnnnnnnnnnnnnnnnnnnnnnnnnnnnnnnnnnnnnnnnnnnnnnnnnnnnnnnnnnnnnnnnnnnnnnnnnnnnnnnnnnnnnnnnnnnnnnnnnnnnnnnnnnnnnnnnnnnnnnnnnnnnnnnnnnnnnnnnnnnnnnnnnnnnnnnnnnnnnnnnnnnnnnnnnnnnnnnnnnnnnnnnnnnnnnnnnnnnnnnnnnnnnnnnnnnnnnnnnnnnnnnnnnnnnnnnnnnnnnnnnnnnnnnnnnnnnnnnnnnnnnnnnnnnnnnnnnnnnnnnnnnnnnnnnnnnnnnnnnnnnnnnnnnnnnnnnnnnnnnnnnnnnnnnnnnnnnnnnnnnnnnnnnnnnnnnnnnnnnnnnnnnnnnnnnnnnnnnnnnnnnnnnnnnnnnnnnnnnnnnnnnnnnnnnnnnnnnnnnnnnnnnnnnnnnnnnnnnnnnnnnnnnnnnnnnnnnnnnnnnnnnnnnnnnnnnnnnnnnnnnnnnnnnnnnnnnnnnnnnnnnnnnnnnnnnnnnnnnnnnnnnnnnnnnnnnnnnnnnnnnnnnnnnnnnnnnnnnnnnnnnnnnnnnnnnnnnnnnnnnnnnnnnnnnnnnnnnnnnnnnnnnnnnnnnnnnnnnnnnnnnnnnnnnnnnnnnnnnnnnnnnnnnnnnnnnnnnnnnnnnnnnnnnnnnnnnnnnnnnnnnnnnnnnnnnnnnnnnnnnnnnnnnnnnnnnnnnnnnnnnnnnnnnnnnnnnnnnnnnnnnnnnnnnnnnnnnnnnnnnnnnnnnnnnnnnnnnnnnnnnnnnnnnnnnnnnnnnnnnnnnnnnnnnnnnnnnnnnnnnnnnnnnnnnnnnnnnnnnnnnnnnnnnnnnnnnnnnnnnnnnnnnnnnnnnnnnnnnnnnnnnnnnnnnnnnnnnnnnnnnnnnnnnnnnnnnnnnnnnnnnnnnnnnnnnnnnnnnnnnnnnnnnnnnnnnnnnnnnnnnnnnnnnnnnnnnnnnnnnnnnnnnnnnnnnnnnnnnnnnnnnnnnnnnnnnnnnnnnnnnnnnnnnnnnnnnnnnnnnnnnnnnnnnnnnnnnnnnnnnnnnnnnnnnnnnnnnnnnnnnnnnnnnnnnnnnnnnnnnnnnnnnnnnnnnnnnnnnnnnnnnnnnnnnnnnnnnnnnnnnnnnnnnnnnnnnnnnnnnnnnnnnnnnnnnnnnnnnnnnnnnnnnnnnnnnnnnnnnnnnnnnnnnnnnnnnnnnnnnnnnnnnnnnnnnnnnnnnnnnnnnnnnnnnnnnnnnnnnnnnnnnnnnnnnnnnnnnnnnnnnnnnnnnnnnnnnnnnnnnnnnnnnnnnnnnnnnnnnnnnnnnnnnnnnnnnnnnnnnnnnnnnnnnnnnnnnnnnnnnnnnnnnnnnnnnnnnnnnnnnnnnnnnnnnnnnnnnnnnnnnnnnnnnnnnnnnnnnnnnnnnnnnnnnnnnnnnnnnnnnnnnnnnnnnnnnnnnnnnnnnnnnnnnnnnnnnnnnnnnnnnnnnnnnnnnnnnnnnnnnnnnnnnnnnnnnnnnnnnnnnnnnnnnnnnnnnnnnnnnnnnnnnnnnnnnnnnnnnnnnnnnnnnnnnnnnnnnnnnnnnnnnnnnnnnnnnnnnnnnnnnnnnnnnnnnnnnnnnnnnnnnnnnnnnnnnnnnnnnnnnnnnnnnnnnnnnnnnnnnnnnnnnnnnnnnnnnnnnnnnnnnnnnnnnnnnnnnnnnnnnnnnnnnnnnnnnnnnnnnnnnnnnnnnnnnnnnnnnnnnnnnnnnnnnnnnnnnnnnnnnnnnnnnnnnnnnnnnnnnnnnnnnnnnnnnnnnnnnnnnnnnnnnnnnnnnnnnnnnnnnnnnnnnnnnnnnnnnnnnnnnnnnnnnnnnnnnnnnnnnnnnnnnnnnnnnnnnnnnnnnnnnnnnnnnnnnnnnnnnnnnnnnnnnnnnnnnnnnnnnnnnnnnnnnnnnnnnnnnnnnnnnnnnnnnnnnnnnnnttctgatcaggaaaggaagaaaatgaagcgcaaaggagatcggtattccatgcagacctctctgattgtagcagctctgaagcgcttactgcccattgggttgaacatctgtgccccaggggaccaggagctcattgctctagccaaaaatcgatttagcctgnnnnnnnnnnnnnnnnnnnnnnnnnnnnnnnnnnnnnnnnnnnnnnnnnnnnnnnnnnnnnnnnnnnnnnnnnnnnnnnnnnnnnnnnnnnnnnnnnnnnnnnnnnnnnnnnnnnnnnnnnnnnnnnnnnnnnnnnnnnnnnnnnnnnnnnnnnnnnnnnnnnnnnnnnnnnnnnnnnnnnnnnnnnnnnnnnnnnnnnnnnnnnnnnnnnnnnnnnnnnnnnnnnnnnnnnnnnnnnnnnnnnnnnncctcaaagatctaaaaaggntgtatggnataaactactctccaagcagaggaaaagagctgttgtcgcctgcttccggatggcccccttatataatctgccaaggcnnnnnnnnnnnnnnnnnnnnnnnnnnnnnnnnnnnnnnnnnnnnnnnnnnnnnnnnnnnnnnnnnnnnnnnnnnnnnnnnnnnnnnnnnnnnnnnnnnnnnnnnnnnnnnnnnnnnnnnnnnnnnnnnnnnnnnnnnnnnnnnnnnnnnnnnnnnnnnnnnnnnnnnnnnnnnnnnnnnnnnnnnnnnnnnnnnnnnnnnnnnnnnnnnnnnnnnnnnnnnnnnnnnnnnnnnnnnnnnnnnnnnnnnnnnnnnnnnnnnnnnnnnnnnnnnnnnnnnnnnnnnnnnnnnnnnnnnnnnnnnnnnnnnnnnnnnnnnnnnnnnnnnnnnnnnnnnnnnnnnnnnnnnnnnnnnnnnnnnnnnnnnnnnnnnnnnnnnnnnnnnnnnnnnnnnnnnnnnnnnnnnnnnnnnnnnnnnnnnnnnnnnnnnnnnnnnnnnnnnnnnnnnnnnnnnnnnnnnnnnnnnnnnnnnnnnnnnnnnnnnnnnnnnnnnnnnnnnnnnnnnnnnnnnnnnnnnnnnnnnnnnnnnnnnnnnnnnnnnnnnnnnnnnnnnnnnnnnnnnnnnnnnnnnnnnnnnnnnnnnnnnnnnnnnnnnnnnnnnnnnnnnnnnnnnnnnnnnnnnnnnnnnnnnnnnnnnnnnnnnnnnnnnnnnnnnnnnnnnnnnnnnnnnnnnnnnnnnnnnnnnnnnnnnnnnnnnnnnnnnnnnnnnnnnnnnnnnnnnnnnnnnnnnnnnnnnnnnnnnnnnnnnnnnnnnnnnnnnnnnnnnnnnnnnnnnnnnnnnnnnnnnnnnnnnnnnnnnnnnnnnnnnnnnnnnnnnnnnnnnnnnnnnnnnnnnnnnnnnnnnnnnnnnnnnnnnnnnnnnnnnnnnnnnnnnnnnnnnnnnnnnnnnnnnnnnnnnnnnnnnnnnnnnnnnnnnnnnnnnnnnnnnnnnnnnnnnnnnnnnnnnnnnnnnnnnnnnnnnnnnnnnnnnnnnnnnnnnnnnnnnnnnnnnnnnnnnnnnnnnnnnnnnnnnnnnnnnnnnnnnnnnnnnnnnnnnnnnaggattccagtcagattgagcttttaaaagaattaatggatctgcagaaggatatggtggtcatgttgctgtccatgctagaaggtannnnnnnnnnnnnnnnnnnnnnnnnnnnnnnnnnnnnnnnnnnnnnnnnnnnnnnnnnnnnnnnnnnnnnnnnnnnnnnnnnnnnnnnnnnnnnnnnnnnnnnnnnnnnnnnnnnnnnnnnnnnnnnnnnnnnnnnnnnnnnnnnnnnnnnnnnnnnnnnnnnnnnnnnnnnnnnnnnnnnnnnnnnnnnnnnnnnnnnnnnnnnnnnnnnnnnnnnnnnnnnnnnnnnnnnnnnnnnnnnnnnnnnnnnnnnnnnnnnnnnnnnnnnnnnnnnnnnnnnnnnnnnnnnnnnnnnnnnnnnnnnnnnnnnnnnnnnnnnnnnnnnnnnnnnnnnnnnnnnnnnnnnnnnnnnnnnnnnnnnnnnnnnnnnnnnnnnnnnnnnnnnnnnnnnnnnnnnnnnnnnnnnnnnnnnnnnnnnnnnnnnnnnnnnnnnnnnnnnnnnnnnnnnnnnnnnnnnnnnnnnnnnnnnnnnnnnnnnnnnnnnnnnnnnnnnnnnnnnnnnnnnnnnnnnnnnnnnnnnnnnnnnnnnnnnnnnnnnnnnnnnnnnnnnnnnnnnnnnnnnnnnnnnnnnnnnnnnnnnnnnnnnnnnnnnnnnnnnnnnnnnnnnnnnnnnnnnnnnnnnnnnnnnnnnnnnnnnnnnnnnnnnnnnnnnnnnnnnnnnnnnnnnnnnnnnnnnnnnnnnnnnnnnnnnnnnnnnnnnnnnnnnnnnnnnnnnnnnnnnnnnnnnnnnnnnnnnnnnnnnnnnnnnnnnnnnnnnnnnnnnnnnnnnnnnnnnnnnnnnnnnnnnnnnnnnnnnnnnnnnnnnnnnnnnnnnnnnnnnnnnnnnnnnnnnnnnnnnnnnnnnnnnnnnnnnnnnnnnnnnnnnnnnnnnnnnnnnnnnnnnnnnnnnnnnnnnnnnnnnnnnnnnnnnnnnnnnnnnnnnnnnnnnnnnnnnnnnnnnnnnnnnnnnnnnnnnnnnnnnnnnnnnnnnnnnnnnnnnnnnnnnnnnnnnnnnaggtgctaaaaagatcaaagttgcagaactcttagccaacatgccagaccccactcaggatgaggttagaggagatggggaggagggagagaggaaaaccctggaagccgccctgccctctgaggatctgaccgacttaaaggagctgacagaagagagtgaccttctttcggacatcttcggcctggatctgaaaagagaaggaggacagtacaaactaatccctcataatccaaatgctgggctcagtgacctcatgagcaacccagtccccatgcctgaggtgcaagaaaaatttcagnnnnnnnnnnnnnnnnnnnnnnnnnnnnnnnnnnnnnnnnnnnnnnnnnnnnnnnnnnnnnnnnnnnnnnnnnnnnnnnnnnnnnnnnnnnnnnnnnnnnnnnnnnnnnnnnnnnnnnnnnnnnnnnnnnnnnnnnnnnnnnnnnnnnnnnnnnnnnnnnnnnnnnnnnnnnnnnnnnnnnnnnnnnnnnnnnnnnnnnnnnnnnnnnnnnnnnnnnnnnnnnnnnnnnnnnnnnnnnnnnnnnnnnnnnnnnnnnnnnnnnnnnnnnnnnnnnnnnnnnnnnnnnnnnnnnnnnnnnnnnnnnnnnnnnnnnnnnnnnnnnnnnnnnnnnnnnnnnnnnnnnnnnnnnnnnnnnnnnnnnnnnnnnnnnnnnnnnnnnnnnnnnnnnnnnnnnnnnnnnnnnnnnnnnnnnnnnnnnnnnnnnnnnnnnnnnnnnnnnnnnnnnnnnnnnnnnnnnnnnnnnnnnnnnnnnnnnnnnnnnnnnnnnnnnnnnnnnnnnnnnnnnnnnnnnnnnnnnnnnnnnnnnnnnnnnnnnnnnnnnnnnnnnnnnnnnnnnnnnnnnnnnnnnnnnnnnnnnnnnnnnnnnnnnnnnnnnnnnnnnnnnnnnnnnnnnnnnnnnnnnnnnnnnnnnnnnnnnnnnnnnnnnnnnnnnnnnnnnnnnnnnnnnnnnnnnnnnnnnnnnnnnnnnnnnnnnnnnnnnnnnnnnnnnnnnnnnnnnnnnnnnnnnnnnnnnnnnnnnnnnnnnnnnnnnnnnnnnnnnnnnnnnnnnnnnnnnnnnnnnnnnnnnnnnnnnnnnnnnnnnnnnnnnnnnnnnnnnnnnnnnnnnnnnnnnnnnnnnnnnnnnnnnnnnnnnnnnnnnnnnnnnnnnnnnnnnnnnnnnnnnnnnnnnnnnnnnnnnnnnnnnnnnnnnnnnnnnnnnnnnnnnnnnnnnnnnnnnnnnnnnnnnnnnnnnnnnnnnnnnnnnnnnnnnnnnnnnnnnnnnnnnnnnnnnnnnnnnnnnnnnnnnnnnnnnnnnnnnnnnnnnnnnnnnnnnnnnnnnnnnnnnnnnnnnnnnnnnnnnnnnnnnnnnnnnnnnnnnnnnnnnnnnnnnnnnnnnnnnnnnnnnnnnnnnnnnnnnnnnnnnnnnnnnnnnnnnnnnnnnnnnnnnnnnnnnnnnnnnnnnnnnnnnnnnnnnnnnnnnnnnnnnnnnnnnnnnnnnnnnnnnnnnnnnnnnnnnnnnnnnnnnnnnnnnnnnnnnnnnnnnnnnnnnnnnnnnnnnnnnnnnnnnnnnnnnnnnnnnnnnnnnnnnnnnnnnnnnnnnnnnnnnnnnnnnnnnnnnnnnnnnnnnnnnnnnnnnnnnnnnnnnnnnnnnnnnnnnnnnnnnnnnnnnnnnnnnnnnnnnnnnnnnnnnnnagaccaaatgcatcatctgtgggataggcaatgattacttcgacacagtgccacatggctttgaaacccacactttacaggagaaagacttggctaattacttg

SEQ ID NO: 20236 - DNA, 785 bp, Macaca Mulatta
ggggagtctccttcgctaagaccatggcgtcgctcagatgtagcaccgtcgtctgcgtgatctgcttggagaagcccaaataccgctgtccggcctgccgcgtgccctactgctctgtagcctgcttccggaagcacaaagaacagtgcaaccctgaagctcgtcctgttgagaaaaaaataagatcagctcttcctaccaaaaccataaagcctgtggagaacaaagatgatgatgactctatagctgattttctcaatagtgatgaggaagaagacagagtttctttgcagaatttaaagaatttagggaaatctgcaacattaagaagcttattgctcaatccacacctcaggcagttgatggtcaacctcgatcagggggaagacaaagcaaagctcatgagagcctacatgcaagagcccttgtttgtggagtttgcagactgctgtttaggaattgtggagccatcccagaatgaggattcttaagatggattattgtgctgcttgctcaaacatgtgcttgactcccagaacctggctggtccgtcgtctaggagaccaacttagtggtggggggcccccgggcacaagaggtttcccggattgcagacttagggtatccaggccctttacccggcattgactgtggcttcatggtttcaggcaaaagtggggggaccttagggtggccagtccccttttggcaaaaaaaaccttgaaatttcggagtgggggtttttaaaatggtttttgactttgggccaacgccttgatatgcca

SEQ ID NO: 20237 - DNA, 687 bp, Macaca Mulatta
  misc_feature (1)...(687): n = A,T,C or G
ccattaaaagaggaccatacctattnnnnnnnnngtggagttggagggctaacgtatttaattaaataaataaatctgggtctgcatctcttattaaataaaaatataaaaatatgtacattacattttgcttattttcatataaaaggtaagacagagtttgcaaagcatttgtggctttttgtagtttacttaagccaaaatgtgttttttccccttgatagcttcgctaatattttaaacagtcctgtnnnnnnnnnnnnngactttttgtatagaaagcactaccctaagccatgaagaactccatgctttgctaaccaagataactgttttctctttgtagaagttttgtttttgaaatgtgtatttctaattatataaaatattaagaatcttttaaaaaaatctgtgaaattaacatgcttgtgtatagctttctaatatatataatattatggtaatagcagaagttttgttatcttaatagcgggaaggggngtatattttgtgcagttgcacatttgagtaactattttctttctgttttcttttactctgcatacattttataagtttaaggtcagctgtcaaaaggataacctgtggggttagaacatatcacattgcaacaccctaaattgtttttaatacattaacaatctattgggtcaactgacatccatt

SEQ ID NO: 20238 - DNA, 1242 bp, Macaca Mulatta
  misc_feature (1)...(1242): n = A,T,C or G
aggattcacaactgccatcctcaccaacacctggctggatgaccgtgctgagagagatggcctggcccaactgatgtgtgagctgaaaacgcactttgacttcctgatagagtcgtgtcaagtgggaatggtcaaacctgaaactcaaatctacaggtttctactggacaccctgaaggccacccccagtgaggnnnnnnnnnnggatgacgtggggtctaatctgaagccagcccgtgacttgggaatggtcaccatcctggtccaggacactgacacagccctgagggaactggaaaaagtgactggaatccagnnnnnnnnnnnnnnnnnnnnnnnnnnnnnnnnnnnnnnnnnnnnnnnnnnnnnnnnnnnnnnnnnnnnnnnnnnnnnnnnnnnnnnnnnnnnnnnnnnnnnnnnnnnnnnnnnnnnnnnnnnnnnnnnnnnnnnnnnnnnnnnnnnnnnnnnnnnnnnnnnnnnnnnnnnnnnnnnnnnnnnnnnnnnnnnnnnnnnnnnnnnnnnnnnnnnnnnnnnnnnnnnnnnnnnnnnnnnnnnnnnnnnnnnngaaatagaagaatattgcatggaagtgttatgtaaggnnnnnnnnnnnnnnnnnnnnnnnnnnnnnnnnnnnnnnnnnnnnnnnnnnnnnnnnnnnnnnnnnnnnnnnnnnnnnnnnnnnnnnnnnnnnnnnnnnnnnnnnnnnnnnnnnnnnnnnnnnnnnnnnnnnnnnnnnnnnnnnnnnnnnnnnnnnnnnnnnnnnnnnnnnnnnnnnnnnnnnnnnnnnnnnnnnnnnnnnnnnnnnnnnnnnnnnnnnnnnnnnggagtggctgaggctgaactggaacagaacctgagtcggactttcaaaagcctcttcagagcaagcgatgagnnnnnnnnnnnnnnnnnnnnnnnnnnnnnnnnnnnnnnnnnnnnnnnnnnnnnnnnnnnnnnnnnnnnnnnnnnnnnnnnnnnnnnnnnnnnnnnnnnnnnnnnnnnnnnnnnnnnnnnnnnnnnnnnnnnnnnnnnnnnnnnnnnnnnnnnnnnnnnnnnnnnnnnnnnnnnnnnnnnnnnnnnnnnnnnnnnnnnnnnnnnnnagatcctgattccggccctgatggtcacggcggagaaggacttcgtgctcgttcctcagatgtccaagcacatggaggactggngattccccacctgaaaaggggacacattgaggactgtgggcactggacacagatg

SEQ ID NO: 20239 - DNA, 200 bp, Macaca Mulatta
ctgactcagtcttctggtctctgtggtgatgtattatcccaactcgccttgccggacagccctgggagggaggatgcagggcacaatcctccctgcttggagtcagggaggcaaggcctggcaggcagcacccagtgaagctctggaaggtgctttgcccacaaggtgtcccgtcggtggtgctggaggagcgacaggtg

SEQ ID NO: 20240 - DNA, 162 bp, Macaca Mulatta
  misc_feature (1)...(162): n = A,T,C or G
natataccaggtgcagctgcgggccatcgagcacgtggatgggacgcacgtgtgccagctgccgaaggaggaccagaagggcaacatccatctgaaaccttccttctctgatggcctcaagatggacgcgggcatcatctgtgatgtgtgcccctgcgagct

SEQ ID NO: 20241 - DNA, 672 bp, Macaca Mulatta
atctacaccaaggtcaccgccttcctcaagtggatcgacaggtccatgaaaaccaggggcttgcccaaggctgagagccgtgccccagaggccagcacgacctctccattaaagtgagatcccacgcaaggcctggtatgtctctcgattgccgccttgccctggcttctcccgccatcggggtgggaaggtgaagtacgtctggaacccgagctcccgcccttcccagctaggctggggattcctccagggaatgttctagtctgttctagatgggcaggatggaggctccaaggatgatactgtgctgtgactgccatgggcattcctttccctggacagcttcctatgtctcggtcacgcccagaggcaggtgggagcctgtgcaggccccgtggggtcgggaggggcccacacgctggcatgtcctccccaagacctcccacctggcctggtctctcttgttccccttgggaactggacacctccccggtgactgcctaggactcacagactccccggtagggaaacgtccagaaagcctcttgttggggcggacgttttgcattgacctaaaccatcgggtgctcttcaaccgcacggtgccaggccccaccccagcttgggcttgcatggtgggggcgcacggacatcccccgggtgggtgacctc

SEQ ID NO: 20242 - DNA, 383 bp, Macaca Mulatta
  misc_feature (1)...(383): n = A,T,C or G
agggggccatggatctgctgcgggagctgaaggccatgcctatcacgctgcacctgctccagnnnnnnnnnnnnnnnnnnnnnnnnnnnnnnnnnnnnnnnnnnnnnnnnnnnnnnnnnnnnnnnnnnnnnnnnnnnnnnnnnnnnnnnnnnnnnnnnnnnnnnnnnnnnnnnnnnnnnnnnnnnnnnnnnnnnnnnnnnnnnnnnnnnnnnnnnnnnnnnnnnnnnnnnnnnnnnnnnnnnnnnnnnnnnnncagccgcaagaggccggagctgcccagggcaccgtcgactccaaggatcaccacatttcctccggtgcctgtcacctgtgatgccgtacgcaacaagtgccgcgagatgctgactgctgccctgcagacg

SEQ ID NO: 20243 - DNA, 840 bp, Macaca Mulatta
  misc_feature (1)...(840): n = A,T,C or G
atgctaaaaatgtggcttgctttgaggaatcagccaaagaggccccaccatcacttgaacagaatcaagctgagcaagacctggccaactgcactgcgacaccaagcaagtgcaggatccagctgggtggtttggattacctggatcccgcatgttttacgcactcctttcattgatagcttgactaatggaatgattggttaaaatgtgatttttcttcaggtaacactacggagtacatgaaatgttcaagaatatagtcagactgacactactaaagctcccagctcctttcatgctccatttttaaccacttgcctctttctccagcagctgattccagaacaaatcattatgtttcctaactgtgatttgtagatttactttttgctattagttataaaattatgtgttcaatgaaataaaagcacactgcttagtattcttgagggacaatgccaatagaaatatcctctggaaaaggctttcgtgatttggcatgggacagacggaaatgaaattgtgaaaattgtttaccatagaaagatgacaaaggaaaattttccacataggaaaatgccatgaaaattgcttttgaaaaacaattgcataacctttacactcctcctccattttattaggattacccaaatataaccatttaaggaaagaatgcattccagaacaaattgtttacatcagttcctataccttactgacacattgctgatatgcaagtaagaaataatgcctccatttttttcttaanatagtttagatatgttaagcatggattttcccccctaaattctattttaaagcctctatagaatatagttt

SEQ ID NO: 20244 - DNA, 1878 bp, Macaca Mulatta
  misc_feature (1)...(1878): n = A,T,C or G
aggccactattgaactttgcagtacccatgcaaatgatgcctctgccctgaggattctgttttcttccctgatcttgatctcaaaattgttctatagtttaaactttcaggnnnnnnnnnnnnnnnnnnnnnnnnnnnnnnnnnnnnnnnnnnnnnnnnnnnnnnnnnnnnnnnnnnnnnnnnnnnnnnnnnnnnnnnnnnnnnnnnnnnnnnnnnnnnnnnnnnnnnnnnnnnnnnnnnnnnnnnnnnnnnnnnnnnnnnnnnnnnnnnnnnnnnnnnnnnnnnnnnnnnnnnnnnnnnnnnnnnnnnnnnnnnnnnnnnnnnnnnnnnnnnnnnnnnnnnnnnnnnnnnnnnnnnnnnnnnnnnnnnnnnnnnnnnnnnnnnnnnnnnnnnnnnnnnnnnnnnnnnnnnnnnnnnnnnnnnnnnnnnnnnnnnnnnnnnnnnnnnnnnnnnnnnnnnnnnnnnnnnnnnnnnnnnnnnnnnnnnnnnnnnnnnnnnnnnnnnnnnnnnnnnnnnnnnnnnnnnnnnnnnnnnnnnnnnnnnnnnnnnnnnnnnnnnnnnnnnnnnnnnnnnnnnnnnnnnnnnnnnnnnnnnnnnnnnnnnnnnnnnnnnnnnnnnnnnnnnnnnnnnnnnnnnnnnnnnnnnnnnnnnnnnnnnnnnnnnnnnnnnnnnnnnnnnnnnnnnnnnnnnnnnnnnnnnnnnnnnnnnnnnnnnnnnnnnnnnnnnnnnnnnnnnnnnnnnnnnnnnnnnnnnnnnnnnnnnnnnnnnnnnnnnnnnnnnnnnnnnnnnnnnnnnnnnnnnnnnnnnnnnnnnnnnnnnnnnnnnnnnnnnnnnnnnnnnnnnnnnnnnnnnnnnnnnnnnnnnnnnnnnnnnnnnnnnnnnnnnnnnnnnnnnnnnnnnnnnnnnnnnnnnnnnnnnnnnnnnnnnnnnnnnnnnnnnnnnnnnnnnnnnnnnnnnnnnnnnnnnnnnnnnnnnnnnnnnnnnnnnnnnnnnnnnnnnnnnnnnnnnnnnnnnnnnnnnnnnnnnnnnnnnnnnnnnnnnnnnnnnnnnnnnnnnnnnnnnnnnnnnnnnnnnnnnnnnnnnnnnnnnnnnnnnnnnnnnnnnnnnnnnnnnnnnnnnnnnnnnnnnnnnnnnnnnnnnnnnnnnnnnnnnnnnnagctatcatgagaagtttttctctcctacaagaagccataatcccctacatccctactctcatcactcagcttacacagaagctattagctgttagtaannnnnnnnnnnnnnnnnnnnnnnnnnnnnnnnnnnnnnnnnnnnnnnnnnnnnnnnnnnnnnnnnnnnnnnnnnnnnnnnnnnnnnnnnnnnnnnnnnnnnnnnnnnnnnnnnnnnnnnnnnnnnnnnnnnnnnnnnnnnnnnnnnnnnnnnnnnnnnnnnnnnnnnnnnnnnnnnnnnnnnnnnnnnnnnnnnnnnnnnnnnnnnnnnnnnnnnnnnnnnnnnnnngccttatcttcctcatctccttcagccagtgctttgtcaaagacaggaaatattcctgctctagtgaggcttctccaagcattcttagaacgtggttcaaacacaatagcaagtgctgcagctgacaaaattnnnnnnnnnnnnnnnnnnnnnnnnnnnnnnnnnnnnnnnnnnnnnnnnnnnnnnnnnnnnnnnnnnnnnnnnnnnnnnnnnnnnnnnnnnnnnnnnnnnnnnnnnnnnnnnnnnnnnnnnnnnnnnnnnnnnnnnnnnnnnnnnnnnnnnnnnnnnnnnnnnnnnnnnnnnnnnnnnnnnnnnngttttttagtctttattaatttgtattgcataaaatatggggcgaatagcactacaagaaatatttgatggtgtacaacc

SEQ ID NO: 20245 - DNA, 150 bp, Macaca Mulatta
caggggcttacagaaagactacagaacggatctcgtgtttggaacggatgttacctgctggtttgtgcacaacagtggaaaaggattcattgacgggcattacaaggattacttcgtgcctcagctctacagctttctcaaacggcctta

SEQ ID NO: 20246 - DNA, 2529 bp, Macaca Mulatta
  misc_feature (1)...(2529): n = A,T,C or G
agaattgtttaagctgcatcagtggagcacatacagggagcctggaagacgatcagccgtggttttggattcaaagatgccgtgtttgatggctccagctgcatctctcccgccatggttcagcagttcgggatcagcgccgggcatcaaatgatggcaaacgcacagatccttctaaggcaagcaacactacctgtgttttcttgccaaacaaggaaagaacagtggtccatgtgcaaaatggaatgagcttgcacgactgccttatgaaagccctggaggtgaggggcctgcaaccagagcgctgtgcagtgttcagacttctccaccaacacgaaggtcaaaaagcagcttagattggaatactgatgctgcctctttgattggagaagaacttcaagtagatttcctggatcgtgttccgctgacaacacacagctgtgcccggacgacgttcctgaagctcaccttctgtgacatctgtcagaaattcctgctcaatggatttcggtgtcagactcgtggctacagatttcatgagcactgtagcaccaaagtacctactatgtgtgtggactggagtaatatcggacaactcctattgcttccaaattccactattggtgatagtggagtcccagtgctaccttctttgactatgcgtcatatgcgagcgtctgtttccaggatgcctgttagttctcagnnnnnnnnnnnnnnnnnnnnnnnnnnnnnnnnnnnnnnnnnnnnnnnnnnnnnnnnnnnnnnnnnnnnnnnnnnnnnnnnnnnnnnnnnnnnnnnnnnnnnnnnnnnnnnnnnnnnnnnnnnnnnnnnnnnnnnnnnnnnnnnnnnnnnnnnnnnnnnnnnnnnnnnnnnnnnnnnnnnnnnnnnnnnnnnnnnnnnnnnnnnnnnnnnnnnnnnnnnnnnnnnnnnnnnnnnnnnnnnnnnnnnnnnnnnnnnnnnnnnnnnnnnnnnnnnnnnnnnnnnnnnnnnnnnnnnnnnnnnnnnnnnnnnnnnnnnnnnnnnnnnnnnnnnnnnnnnnnnnnnnnnnnnnnnnnnnnnnnnnnnnnnnnnnnnnnnnnnnnnnnnnnnnnnnnnnnnnnnnnnnnnnnnnnnnnnnnnnnnnngagacgttgcagtaaagatcctaaaggttgtcgacccaaccccagagcaattccaggccttcaggaatgaggtggctgttctgcgngcaaaacacggcatgtgaacattctgcttttcatggggtacatgacaaaggacaacctggcaattgtgacccagtggtgcgagggcagcagcctctacaaacacctgcatgtccaggagaccaagtttcagatgttccagctaattgacattgcccggcagacggctcagggaatggactatttgcatgcaaagaacatcatccacagagacatgaaatccaacaatacatttccccatgaaggcctaacagtgaaaactggagattttggtttggcaacagtaaagtcacgctggggtggttctcagcaggttgaacaacctgctggctctgtcctgtggatggtcccgggggtgatccgaacgcaggataacaacccattcagtgtccagccggatgtccacgcctatggcatcgtgtcgtatgagctgatgacgggggagcttcctcactctcacaccaacaactgagatcagatcatcttcgtggtgggccgagggatgcctccccagatcttagtaagctacgtaagaactgccccaaagcgatgaagaggctggtcactgactgtgtgaagaaagtaaaggaagagaggcctcttttccccaggtcctgtcttccattgagctgctccaacactctctgctgaagatcagccggagcgcttccgagccgcccttgcatcgggcagcccacactgaggatatcaatgcctgcacgctgaccacgtccccnnnnnnnnnnnnnnnnnnnnnnnnnnnnnnnnnnnnnnnnnnnnnnnnnnnnnnnnngagaagccagcgggcaccacctttctgctccctttctccggaggcagaacacatgttttcagagaagctgctgctgaggaccttctagactgctcacagggcctcaacttcatggcgccttcttttctattcctnnnnnnnnnnnnnnnnnnnnnnnnnnnnnnnnnnnnnnnnnnnnnnnnnnnnnnnnnnnnnnnnntgctcaaggcccagccttctctagatgcgcaagtggatgctgatggtggtacaaaacgcagggcccagcccggccgttggctccatgagtattttgaggaagtaaggtagcgggcagcccagccctgatgtggagacacatgggattttggaaatcagcttctggaggaatgcatgtcacaggcgagactttcttcagagagtcgtgcagcgccagacgttttgcacataaggcaccaaacagcccaggactgccgaggctctggccgcccgaaggagcctgctttggtactatgggacttttcttaggaagacgcgtcctccttt

SEQ ID NO: 20247 - DNA, 2599 bp, Macaca Mulatta
  misc_feature (1)...(2599): n = A,T,C or G
gaattcaggactgaatcctgcccagaacccccacaatctattggctgtgtttggtgccttttcgcaacacacacattctctctgctgggtggaggggagacatgtgaggaggaggaaagggataggatagagagtgggatggggtctgtaggggtctcgaggactggctatcctgacatccttccccgtgttcaggttggccaccatgatgtgctgccagagggcacccacctgctccttaaagagaggacaagttgggtggtatctctggccgacactctgtgcacaactcttacgatgctggtaacggtgagaagggaaagatgacaagccagggggcatgatcccagcatgtgtgggaggagcttctaaattagccattagcacaggtacatcagtggccccatgtgtaaacgtacagagaaataggtggggtcaagcagcaagagataaggggccagggtataaaaagggcccacaagagaccagctccaggatcccaaggcccgactccccgaaccactcagggtcctgtggacagcccacctagctgcaatggctgcaggtaagcgcccctaaaatccatttctgcacgatgtgtcctgaggggagagcggagccctgtagatgggacggggcatctcagcccagatatttgaacaatctcagaatgttcctggtcctggagggannnnnnnnnnnnnnnnnnnctcctggagcagggagagcactggcatcttgctctccattccctctgttgcctccggtttctccccaggctcctggacatgcctaattctggctattgccctgctctgcctaccttggcttcaagagggcagtgccttcccaaccattcccttatcctggctttttaacaacgctgtgttccgcgcccatcacctgcacaagctagcatctgacacgtaccagaagtttgtaagctcttggggaatgggtgcacatcaggggtggcaagaaggggtgactttccctcgctgggaagtcctgggagagaataaggagctcagatttgtttcctgaagcagaaatgcaggcagatgaccgtacgctgagtgaggttcccagaaaagtaacaacgggagctggtctgcagggtagaccttggtgggtggtccttctcctaggaagaaacctatatcccaaaggaacagaagtattcattcctgcgcaacccccagacctccctctgcttctcagagtctattccgacaccctccaacaaggaggaaacacagcagaaatccgtgagtggatgccttctccccaggcggggatggggaggccggtggtcagagcccccaggcagcacagcaaccgctggtccttcctctgcagaacctagagctgctccacatctccctgctgctcatccagtcgtggctggagcccgtgcagttcctcaggagtgtgtttgccaaccacctggtgcataccaactcgaacttcgacatctatctctacctaaagaaactagaggaaggcatccaaacgctgatgggggtgagggtgacccagggttcccaatcctggaacccactggcttcgaggggtgaggcagagaaactgctgccctctttttagcagtcaggctctgacctaagagaactcaccttagtcttcatttcctctcgtgaatcctccaggcctctctctacaccctgaaggggagggaggaaaacgaatgaatgagagcgggagggaggcaacagtgaccaagcgctcagcctctccttctcatccaaacgctgatggggaggctggaagacggcagcccccggactgggcagatcttcaaggagacctacagcaagtatgacacaaactcgcacaacgatgacacactgctcaagaactacaggctgctctactgcttcaggaaggacatgaacaaggtcgagacattcctgcgcaccgtgcggtgccgcgctgtggagggcagctgtggcttctagatgcctgggtggcatcccttgtgacccctcccaattgccactcctggccatggaaggtgccactccagtgtccaacagccttgtcctaataaaattaagttgcatcattttgtctgactaggtgtccttctataatgttatggaccaatacgatggtaatatggagcaaggggcaggttgggaagacgacctcgtattacccacgggtctattgggaaccaggctgaagtgcactggccatcttannnnnnnnnnnnnnnnnnnnnnnnnnnnnnnnnnnnnnnnnnnnnnnnntctccgaatagttgggatccaggcatgcgcgaccaggctcannnnnnnnnnnnnnnnnnggtagtgacggggtttcaccatattggccaaactggtctccnnnnnnnnnnnnnnnnnnnnntgcccaannnnnnnnnnnnnntnnnnnnnnnnnnnnnnnnnnnnatggcacccttccctgtcctgtcattttaaaataattataccagcaggaggacgtcaggcacagcatgggacctggccatgcccagcccagtggacatttgacttctctgcttagcactgtcctctcatgtgctgggtccactcagtagacgcttgttgaattc

SEQ ID NO: 20248 - DNA, 158 bp, Macaca Mulatta
ctacaaaaattatttctttactgatttagtcttttattttaattttgcttcttgccgtctctttatgtgtactgttgcttttcaatttgatagtagttttataccagcaactttgaaaggtgataacagggtatgcagggatagaggggggtgtcttt

SEQ ID NO: 20249 - DNA, 362 bp, Macaca Mulatta
agaaacaaaaagagctttccttctctaggaatacttgaacatgggagctcttgaaatacgtagtattaaaagtttcatttgaaattcttgactttcttatgggcacttttgtcttccaaattaaaactctaccgccaatatacttatccaagggctaatagtaatactcgattaaaaatgcagatgccttctctatttgtgtattgcgtgtctgctctcattctgactacagatatggttaatcttcacagtgcaaggtcccaagagactttggggggattgtttctacccatatctgtgaaactccagaacgtgccaggcaacaaacagcattgctcaacgggaatgccccacctaagggg

SEQ ID NO: 20250 - DNA, 1223 bp, Macaca Mulatta
  misc_feature (1)...(1223): n = A,T,C or G
nagtaacggcacagccaacaagatgaacggagctttggatcactcagaccaaccagacccagatgccattaagatgtttgtcggacagatcccccggtcgtggtcggaaaaggagctgaaagaactttttgagccttacggagccgtctaccagatcaacgtcaaccgggatcggagtcagaaccctccacagagnnnnnnnnnnnnnnnnnnnnnnnnnnnnnnnnnnnnnnnnnnnnnnnnnnnnnnnnnnnnnnnnnnnnnnnnnnnnnnnnnnnnnnnnnnnnnnnnnnnnnnnnnnnnnnnnnnnnnnnnnnnnnnnnnnnnnnnnnnnnnnnnnnnnnnnnnnnnnnnnnnnnnnnnnnnnnnnnnnnnnnnnnnnnnnnnnnnnnnnnnnnnnnnnnnnnnnnnnnnnnnnnnnnnnnnnnnnnnnnnnnnnnnnnnnnnnnnnnnnnnnnnnnnnnnnnnnnnnnnnnnnnnnnnnnnnnnnnnnnnnnnnnnnnnnnnnnnnnnnnnnnnnnnnnnnnnnnnnnnnnnnnnnnnnnnnnnnnnnnnnnnnnnnnnnnnnnnnnnnnnnnnnnnnnnnnnnnnnnnnnnnnnnnnnnnnnnnnnnnnnnnnnnnnnnnnnnnnnnnnnnnnnnnnnnnnnnnnnnnnnnnnnnnnnnnnnnnnnnnnnnnnnnnnnnnnnnnnnnnnnnnnnnnnnnnnnnnnnnnnnnnnnnnnnnnnnnnnnnnnnnnnnnnnnnnnnnnnnnnnnnnnnnnnnnnnnnnnnnnnnnnnnnnnnnnnnnnnnnnnnnnnnnnnnnnnnnnnnnnnnnnnnnnnnnnnnnnnnnnnnnnnnnnnnnnnnnnnnnnnnnnnnnnnnnnnnnnnnnnnnnnnnnnnnnnnnnnnnnnnnnnnnnnnnnnnnnnnnnnnnnnnnnnnnnnnnnnnnnnnnnnnnnnnnnnnnnnnnnnnnnnnnnnnnnnnnnnnnnnnnnnnnnnnnnnnnnnnnnnnnnnnnnnnnnnnnnnnnnnnnnnnnnnagttgctcaaatgctctcaggtatggcggctctgaatggaggacttggcgccacaggcttgacgaatggcacggctggcaccatggacgccctcacccaggcctactcaggaattcagcagtatgcagccgccgcgctgcccactctgtacagccagagcctgctgcagcagcagagcgctgcgggcagccagaaggaagg

SEQ ID NO: 20251 - DNA, 304 bp, Macaca Mulatta
gttttctaagtattttcccaagtattacaatattcacttcattactggttggctgccaatgaccccatatgttctcccagaacaggagctttgtctctttatctttcatataatacgtagtctccaaataggtaatgcttctcaattcattatattttcagagtagatttagagttccctgtttgtgtggtgagcgtcatatgtttttgttgaaattaataagctcacaaatttgataaattaggaatgatatgcatttgtctcataacataattatgtgtaatgaacctctatagaaaattaa

SEQ ID NO: 20252 - DNA, 1654 bp, Macaca Mulatta
  misc_feature (1)...(1654): n = A,T,C or G
gagggcgggggaggagtgaagaggttgaggcgccccgcccagtcagcagggttgcgcgtgccctgtgagaccgccaagatggtggtgggcgcgttccctatggcgaagctgctatacttgggcatccggcaggtcagcaagccgcttgccaaccgcattaaggaggccgcccgccgaagcgagttcttcaagacctatatctgcctcccgccggctcaacnnnnnnnnnnnnnnnnnnnnnnnnnnnnnnnnnnnnnnnnnnnnnnnnnnnnnnnnnnnnnnnnnnnnnnnnnnnnnnnnnnnnnnnnnnnnnnnnnnnnnnnnnnnnnnnnnnnnnnnnnnnnnnnnnnnnnnnnnnnnnnnnnnnnnnnnnnnnnnnnnnnnnnnnnnnnnnnnnnnnnnnnnnnnnnnnnnnnnnnnnnnnnnnnnnnnnnnnnnnnnnnnnnnnnnnnnnnnnnnnnnnnnnnnnnnnnnnnnnnnnnnnnnnnnnnnnnnnnnnnnnnnnnnnnnnnnnnnnnnnnnnnnnnnnnnnnnnnnnnnnnnnnnnnnnnnnnnnnnnnnnnnnnnnnnnnnnnnnnnnnnnnnnnnnnnnnnnnnnnnnnnnnnnnnnnnnnnnnataggaggtctcggggccctggtcttggaggtgactactgcctggactgcgaagtctccgtcttggcctattctccgcactgtcccatcttggacaggcccagctgacaccacccagtccttcgagggcgccgcagagatgctgggctgaagccgaccaacctccctactaaactgccccagtggtaccttccactgggactccccgcctcctgcaggtggaacgttccaagaaggaccccgccctctcccaccccgcccctgccagcgcattggttgagcactttggagaggcagcgtcttttatcagaccccacctccatccggctaggtaggccagcaggacgtccaccacttttggcaaaagaaaattggattctgcacctggatttagccacctctcattctgtcacctgcaccctcactcacctgagtggagccttcccctaggacgcttatcttttgcaccaaacacccactacctccacctcattggtacagaccattgtaaaaatgcacaaagttcgtacggacttcctgactcgcccccttccatctacctcagtcttagggggaagggaggtgggggtgaatcctgcacagggttagctccnnnnnnnnnnnnccctgtggctcctgaccttaatccatcttagtacctgccattggcatcctcccctccctgagtggatcgatccaacagaacccccctcttcttccacctatggcgcaccctactggcatggctatgctgggtcttccagggcgacgcctcccagcctggcattctgtagtctgttccagcaggacgtggccttttgggaggaaatacccatcttgaccagggatagtccattctnnnnnnnnnnnnnnnnnnnnnnntcaccagtccccagtcctgggaccttactgccactgtccttttatctgggtatccctcgctgtcctcttcagttgccctttgctagggaccggccctgtccctctactaccctaagtcatcgtcagtttcccccaacttccctccaaatctgcccc

SEQ ID NO: 20253 - DNA, 176 bp, Macaca Mulatta
cagaaccatcatgggctggacgctggacttcctccgggagcggctgttgggctggatccaagaccagggtggttgggtgagactcctcaaccctcctcaccccaaccaccgcccctgccccactgtccctgcccacccgccactcctctgggaccctgggccttctggagccggtc

SEQ ID NO: 20254 - DNA, 4542 bp, Macaca Mulatta
  misc_feature (1)...(4542): n = A,T,C or G
aggtcctaaagaagacgaagagaagccttcagcctcagcacttgagcagccggccaccctccaggaggtnnnnnnncaggaggttcctccagaactagcaacccctgcccctgcctgggagccacagccagaaccagacgagcgattagaagcagcagattgtgaggtgaatgatttgggnnnnnnnnnnnnnnnnnnnnnnnnnnnnnnnnnnnnnnnnnnnnnnnnnnnnnnnnnnnnnnngttggaagaagagggggaagaagaagccagcatgccaaatgaaagttctgtgaaagagccagaaatacggtgtgatgagaagccagaagatttattagaggaaccaaaaacaacttcagaagaaactcttgaagacttctcagaggtagcacctgccatgcaaatccccagaactaaagaagaggccaatggtgatgtatttgaaacgtttatgtttccatgtcagcattgtgaaaggaagtttacaaccaaacaggggcttgagcgtcacatgcatatccatatatccaccatcaatcatgctttcaaatgtaagtactgtgggaaagcctttggcacacagattaaccggcggcggcatgagcggcgccacgaagcagggttaaagcggaaacccagccaaacactacagccgtcagaggacctggctgatggcaaagcatctggagaaaacgttacttcaaaagatgagttgagtcctcccagtctggccagactgtcnnnnnnnnnnnnnnnnnnnnnnnnnnnnnnnnnnnnnnnnnnnnnnnnnnnnnnnnnnnnnnnnnnnnnnnnnnnnnnnnnnnnnnnnnnnnnnnnnnnnnnnnnnnnnnnnnnnnnnnnnnnnnnnnnnnnnnnnnnnnnnnnnnnnnnnnnnnnnnnnnnnnnnnnnnnnnnnnnnnnnnnnnnnnnnnnnnnnnnnnnnnnnnnnnnnnnnnnnnnnnnnnnnnnnnnnnnnnnnnnnnnnnnnnnnnnnnnnnnnnnnnnnnnnnnnnnnnnnnnnnnnnnnnnnnnnnnnnnnnnnnnnnnnnnnnnnnnnnnnnnnnnnnnnnnnnnnnnnnnnnnnnnnnnnnnnnnnnnnnnnnnnnnnnnnnnnnnnnnnnnnnnnnnnnnnnnnnnnnnnnnnnnnnnnnnnnnnnnnnnnnnnnnnnnnnnnnnnnnnnnnnnnnnnnnnnnnnnnnnnnnnnnnnnnnnnnnnnnnnnnnnnnnnnnnnnnnnnnnnnnnnnnnnnnnnnnnnnnnnnnnnnnnnnnnnnnnnnnnnnnnnnnnnnnnnnnnnnnnnnnnnnnnnnnnnnnnnnnnnnnnnnnnnnnnnnnnnnnnnnnnnnnnnnnnnnnnnnnnnnnnnnnnnnnnnnnnnnnnnnnnnnnnnnnnnnnnnnnnnnnnnnnnnnnnnnnnnnnnnnnnnnnnnnnnnnnnnnnnnnnnnnnnnnnnnnnnnnnnnnnnnnnnnnnnnnnnnnnnnnnnnnnnnnnnnnnnnnnnnnnnnnnnnnnnnnnnnnnnnnnnnnnnnnnnnnnnnnnnnnnnnnnnnnnnnnnnnnnnnnnnnnnnnnnnnnnnnnnnnnnnnnnnnnnnnnnnnnnnnnnnnnnnnnnnnnnnnnnnnnnnnnnnnnnnnnnnnnnnnnnnnnnnnnnnnnnnnnnnnnnnnnnnnnnnnnnnnnnnnnnnnnnnnnnnnnnnnnnnnnnnnnnnnnnnnnnnnnnnnnnnnnnnnnnnnnnnnnnnnnnnnnnnnnnnnnnnnnnnnnnnnnnnnnnnnnnnnnnnnnnnnnnnnnnnnnnnnnnnnnnnnnnnnnnnnnnnnnnnnnnnnnnnnnnnnnnnnnnnnnnnnnnnnnnnnnnnnnnnnnnnnnnnnnnnnnnnnnnnnnnnnnnnnnnnnnnnnnnnnnnnnnnnnnnnnnnnnnnnnnnnnnnnnnnnnnnnnnnnnnnnnnnnnnnnnnnnnnnnnnnnnnnnnnnnnnnnnnnnnnnnnnnnnnnnnnnnnnnnnnnnnnnnnnnnnnnnnnnnnnnnnnnnnnnnnnnnnnnnnnnnnnnnnnnnnnnnnnnnnnnnnnnnnnnnnnnnnnnnnnnnnnnnnnnnnnnnnnnnnnnnnnnnnnnnnnnnnnnnnnnnnnnnnnnnnnnnnnnnnnnnnnnnnnnnnnnnnnnnnnnnnnnnnnnnnnnnnnnnnnnnnnnnnnnnnnnnnnnnnnnnnnnnnnnnnnnnnnnnnnnnnnnnnnnnnnnnnnnnnnnnnnnnnnnnnnnnnnnnnnnnnnnnnnnnnnnnnnnnnnnnnnnnnnnnnnnnnnnnnnnnnnnnnnnnnnnnnnnnnnnnnnnnnnnnnnnnnnnnnnnnnnnnnnnnnnnnnnnnnnnnnnnnnnnnnnnnnnnnnnnnnnnnnnnnnnnnnnnnnnnnnnnnnnnnnnnnnnnnnnnnnnnnnnnnnnnnnnnnnnnnnnnnnnnnnnnnnnnnnnnnnnnnnnnnnnnnnnnnnnnnnnnnnnnnnnnnnnnnnnnnnnnnnnnnnnnnnnnnnnnnnnnnnnnnnnnnnnnnnnnnnnnnnnnnnnnnnnnnnnnnnnnnnnnnnnnnnnnnnnnnnnnnnnnnnnnnnnnnnnnnnnnnnnnnnnnnnnnnnnnnnnnnnnnnnnnnnnnnnnnnnnnnnnnnnnnnnnntccccgtgatatttttcaaacaggagggaattggagaatgaaggtttgaaacccagggaaggagcccccagtttgttgttgaacaggatgtttttcaggaaacattcaaccaaaaaactttgtttgcaatgtctgtgattcaccttttctttccattaaagatctaaccaaacattttatctattcatgttgaagaatggcccttcaaaatgtgaattttgtgtgcagctttttaaggataaaaacggacttgtcagaacatcgctttttgcttcatggagttgggaatatctttgtgtgttctgtttgtaaaaaagaatttgcttttttgtgcaatttgcagcagcaccagcgagatctccacccagataaggtgtgcacacatcaccagtttgaaagcgggactctgaggccccaaaactttacagatcccagcaaggcccatgtagagcatatgcagagcttgccagaagatcctttagaaacttcgaaagaagaagaggagttaaacgattcctctgaagagctttacacgactataaaaataatggcttctggaataaagacaaaagatccagatgttcgattaggcctcaatcagcattacccaagctttaaaccacctccatttcagtaccatcaccgtaaccccatggggattggtgtgacagccacaaatttcactacacacaatattccacagacttttactactgccattcgctgcaccaagtgtggaaaaggtgtcgacaacatgccggagttgcacaaacatatcctggcgtgtgcttctgcaagtgacaagaagaggtacacgcctaagaagaacccagtaccattaaaacaaactgtgcaacccaaaaatggcatggtggttttagataactctgggaaaaatgccttccgacgaatgggacagcccaaaaggctaaactttagtgttgagctcagcgaaaatgtcctcgaataagctcataattaaatgcattnnnnnnnnnnnnnnnnnnnnnnnnnnnnnnnnnnnnnnnnnnnnnnnnnnnnnnnnnnnnnnnnnnnnnnnnnnnnnnnnnnnnnnnnnnnnnnnnnnnnnnnnnnnnnnnnnnnnnnnnnnnnnnnnnnnnnnnnnnnnnnnnnnnnnnnnnnnnnnnnnnnnnnnnnnnnnnnnnnnnnnnnnnnnnnnnnnnnnnnnnnnnnnnnnnnnnnnnnnnnnnnnnnnnnnnnnnnnnnnnnnnnnnnnnnnnnnnnnnnnnnnnnnnnnnnnnnnnnnnnnnnnnnnnnnnnnnnnnnnnnnnnnnnnnnnnnnnnnnnnnnnnnnnnnnnnnnnnnnnnnnnnnnnnnnnnnnnnnnnnnnnnnnnnnnnnnnnnnnnnnnnnnnnnnnnnnnnnnnnnnnnnnnnnnnnnnnnnnnnnnnnnnnnnnnnnnnnnnnnnnnnnnnnnnnnnnnnnnnnnnnnnnnnnnnnnnnnnnnnnnnnnnnnnnnnnnnnnnnnnnnnnnnnnnnnnnnnnnnnnnnnnnnnnnnnnnnnnnnnnnnnnnnnnnnnnnnnnnnnnnnnnnnnnnnnnnnnnnnnnnnnnnnnnnnnnnnnnnnnnnnnnnnnnnnnnnnnnnnnnnnnnnnnnnnnnnnnnnnnnnnnnnnnnnnnnnnnnnnnnnnnnnnnnnnnnnnnnnnnnnnnnnnnnnnnnnnnnnnnnnnnnnnnnnnnnnnnnnnnnnnnnnnnnnnnnnnnnnnnnnnnnnnnnnnnnnnnnnnnnnnnnnnnncagctacagcctccgcttggcatcccgatgctctccaccagcagccccgtacatcaccaggcagtgtaggaaggtcaaagccccggctgcagcccagttccagggaccattcttcaaagagtag

SEQ ID NO: 20255 - DNA, 254 bp, Macaca Mulatta
cgggaaggcactcggactggagccgagtgcaagcaaaccatgaagacccagagatgtaagatcccctgcaactggaagaagcaatttggagcggagtgcaaataccagttccgggcctggggagaatgtgacctgaacacggccctgaagaccagaactggaagtctgaagcgagccctgcacaatgccgaatgccagaagacggtcaccatctccaagccctgtggcaaactgaccaagcccaaacctcaagc

SEQ ID NO: 20256 - DNA, 1162 bp, Macaca Mulatta
  misc_feature (1)...(1162): n = A,T,C or G
agggccgggcctggccttcatcgcctacccgcgggctgtcacactgatgccagtggccccactctgggctgccctgttcttcttcatgctgttgctgcttggtctcgacagccagnnnnnnnnnnnnnnnnnnnnnnnnnnnnnnnnnnnnnnnnnnnnnnnnnnnnnnnnnnnnnnnnnnnnnnnnnnnnnnnnnnnnnnnnnnnnnnnnnnnnnnnnnnnnnnnnnnnnnnnnnnnnnnnnnnnnnnnnnnnnnnnnnnnnnnnnnnnnnnnnnnnnnnnnnnnnnnnnnnnnnnnnnnnnnnnnnnnnnnnnnnnnnnnnnnnnnnnnnnnnnnnnnnnnnnnnnnnnnnnnnnnnnnnnnnnnnnnnnnnnnnnnnnnnnnnnnnnnnnnnnnnnnnnnnnnnnnnnnnnnnnnnnnnnnnnnnnnnnnnnnnnnnnnnnnnnnnnnnnnnnnnnnnnnnnnnnnnnnnnnnnnnnnnnnnnnnnnnnnnnnnnnnnnnnnnnnnnnnnnnnnnnnnnnnnnnnnnnnnnnnnnnnnnnnnnnnnnnnnnnnnnnnnnnnnnnnnnnnnnnnnnnnnnnnnnnnnnnnnnnnnnnncctcagggccaagggcaccatggnnagcgctggcagcacctgacccagcccatctggggcctccaccacttggagtaccgagctcaggatgcggatgtcaggggcctgaccaccctgaccccagtgtccgagagcagcaaggtcgtcgtggtggagagtgtcatgtgacagcccagctcacatcaccagctcacctctggtagccatagcagcccctgcttcagccccacccaccccatccctccagggggcctgcctttccctgacacttttggggtctgcctggaggaggaggggagaaagcaccatgagtgctcactaaaacaactttttccatttttaataaaacgccaaaaatatcacagcccaccaaaaatagatgcctctccccctccagccctagccaagctggtcctaggccctgcctagtgccccacccccaacccacagtgctgcacttctcctgcccctgccatgcccaccccctgcccacctctccagcttgtgctaaacagcacacccttgggtgacccctcaccccagaagcagcagtggcagtttg

SEQ ID NO: 20257 - DNA, 191 bp, Macaca Mulatta
  misc_feature (1)...(191): n = A,T,C or G
tgagcggggagccggggcagacgtccgtagcgccccctcccgaggaggtggagccggggagtggggtccgcatcatggtggagtactgngtgaaccctgcggcttcgaggcgacctacctggagctggccagtgctgtgaaggagcagtatccgggcatcgagatcgagtcgcgcttggggggcacaggtg

SEQ ID NO: 20258 - DNA, 402 bp, Macaca Mulatta
aggggatattgaccagtgaagaccaaattaaggcgggagggaggagcgagaattgtggggcgggaactgcagccaggtgagggggtcgggcgtgtggggccggggtggacgcgggccgtccctcacggccccgtcctgtccccacagggcgactccgggggcccgctggtgtgcgggggcgtgctcgagggcgtggtcacctcgggctcgcgagtttgcggcaaccgcaagaagcccgggatctacacgcgcgtggcgagctatgcagaaatggatcgacagcgtcctggcctaggacgctggggcctgaagatcggggtcaccggagcaataaagtcgtgagcaataaagtcatccactcctgcatctggttggtctttattgagcacctactatatgcag

SEQ ID NO: 20259 - DNA, 2331 bp, Macaca Mulatta
  misc_feature (1)...(2331): n = A,T,C or G
gtcttggctgtatgccatgtgccgagggattgaacatgatccagtgaaacccaggcaactacccaaaaccattggctgtagtaagaacttcccaggaaaaacagctcttgctactcgggagcaggtannnnnnnnnnnnnnnnnnnnnnnnnnnnnnnnnnnnnnnnnnnnnnnnnnnnnnnnnnnnnnnnnnnnnnnnnnnnnnnnnnnnnnnnnnnnnnnnnnnnnnnnnnnnnnnnnnnnnnnnnnnnnnnnnnnnnnnnnnnnnnnnnnnnnnnnnnnnnnnnnnnnnnnnnnnnnnnnnnnnnnnnnnnnnnnnnnnnnnnnnnnnnnnnnnnnnnnnnnnnnnnnnnnnnnnngtctcctcctctcacaatgcttttcctctgtgctacaaaattttctgcctctgccccttcatcttgcacagacatcaccagcttcttgagcagtgacccaagttctctgctaaaggtgccagttaccagcttagaagctaagaccgagggaagtggcccagtggcgacagccactaagaaagcaaccacgtctctggaatcattcttccaaaaagctgcagaaaggcagaaagttaaagaagcttcactttcatctcttactgctcccactcaggctcccactatcaattcgccgtccaagccctcattaccttttcaaaccagtcaaactacaggaactgagcccttctttaagcagaaaagtttgcttctaaagcagaaacagcttagtaattcttcagtttctttccccccacaaaatccatggtccaactgtatggcattaccaaactctttaccaacagagtatccaggctgtgtccctgtttgtgaaggggtattgaagctagaatcctctaaagcaactcctgcagagatggatttggcacacaannnnnnnnnnnnnnnnnnnnnnnnnnnnnnnnnnnnnnnnnnnnnnnnnnnnnnnnnnnnnnnnnnnnnnnnnnnnnnnnnnnnnnnnnnnnnnnnnnnnnnnnnnnnnnnnnnnnnnnnnnnnnnnnnnnnnnnnnnnnnnnnnnnnnnnnnnnnnnnnnnnnnnnnnnnnnnnnnnnnnnnnnnnnnnnnnnnnnnnnnnnnnnnnnnnnnnnnnnnnnnnnnnnnnnnnnnnnnnnnnnnnnnnnnnnnnnnnnnnnnnnnnnnnnnnnnnnnnnnnnnnnnnnnnnggcctgagggcatgcaaacattggaatcatttttaagccattaacacattagtgctgccctcaggcttgcttntacgatttaatattttttatctctacagatctttaatattttatctttacagatttccctgagaagaagaattatgaaatttttaatacaaaaaataatccatttaggtgccgagttaacagtcccatctcttcacaggtgtggattctaatcccactgctgatagagatgtaaaaattcatcctaccattgagtttttaatctttagcatttagggaggcagtgtcatatagtaaagtgtgggccttggagtctaagagacctggttgcaaacttagctctgcttattacaatgagggccttgaacaggtcattttcttcactttctcatctgtaaaatggagataataccttacagattattgcagattaataacaatgtattcaaattatataacttggctgggtacaatggctcacgcctgtaatcccaacactctgtgaggccaaggcagatggatcacctgaggtcaggagttcaagaccagcctggccaacatggcaaaaccctgtctctactaaaaatagaaaaattagccaggcatgttctgggcacctgtaattccagctactcagaggctgaggcaggagaattgctttaaccctggaggcagaggttgcagcgagctgagatcatgctactgtgttctaacctgggcaacagcgcaagacttcatctnnnnnnnnnnnnnnnnnnnnnnnnnnnnnnnnnnnnnnnnnnnnnnnnnnnnnnnnnnnnnnnnnnnnnnnnnnnnnnnnnnnnnnnnnnnnnnnnnnnnnnnnnnnnnnnnnnnnnnnnnnnnnnnnnnnnnnnnnnnnnnnnnnnnnnnnnnnnnnnnnnnnnnnnnnnnnnnnnnnnnnnnnnnnnnnnnnnnnnnnnnnnnnnnnnnnnnnnnnnnnnnnnnnnnnnnnnnnnnnnnnnnnnnnnnnnnnnnnnnnnnnnnnnnnnnnnnnnnnnnnnnnnnnnnnnnnnnnnnnnnnnnnnnnnnnnnnnnnnnnnnnnnnncacagaaaagggaccaagtttaaaaaagggttataaatgtaatgagacttg

SEQ ID NO: 20260 - DNA, 477 bp, Macaca Mulatta
  misc_feature (1)...(477): n = A,T,C or G
gactgcctccaagtggaagttggcaggatttaaaggatcacatgcgtgaagcaggtgatgtatgttatgctgatgtttaccgagatggcactggtgtcgtggagtttgtacggaaagaagatatgacctatgcagttcgaaaactggataacactaagtttagatctcatgaggnagggagaaactgcctacatccgggttaaagttgatgggcccagaagtccaagttatggaagatctcgatctcgaagccgtagtcgtagcagaagccgtagcagaagcaacagcaggagtcgcagttactccccaaggagaagcagaggatcaccacgctattctccccgtcatagcagatctcgctctcgtacataagatgattggtgacactttttgtagaacccatgttgtatacagttttcctttattcagtacaatcttttcattttttaattcaaactgttttgttcagaatgggct

SEQ ID NO: 20261 - DNA, 681 bp, Macaca Mulatta
  misc_feature (1)...(681): n = A,T,C or G
ctcatccactgccaggctggggtgtcccgctctgccaccatcgtcatcgcttacttgatgaagcacactcggatgaccatgactgatgcttataaatttgtcaaaggcaaacgaccaattatctccccaaaccttaacttcatggggcagttgctagaatntgatgaagacctaaacaacggtgtgacaccgagaatccttacaccaaagctgatgggtgtggagacggttgtgtgacaatggtctggatggaaaggattgctgctctccgttaggagacaatgaggaaggaggatggattctgnnnnnnnnnnnnnnnnnnnnnnnnnnagttgggagtaaagtttgtgaatggaaacaaacttgtttaaacactttatttttaacaagtgtgagaagactataacttttgacgccattgagattcacctcccacaaactgacaaattcaggaggttaaagaagtaatttttttaagccaacaataaaaatataatacaacttgttgctcccccttttccttttaagctatttgtagagtttatgactaaatagtctgtgcaggttcatagaccgaaaatactacacactttaaaccaattaaaaagaacacaaaagtaaatagaaaagacattgaatcaccaaggcctgggacccgcctgggcagtccacatagaaaac

SEQ ID NO: 20262 - DNA, 764 bp, Macaca Mulatta
  misc_feature (1)...(764): n = A,T,C or G
ggggaacaccacccagtgtggagaagcccagccaagcactgtcaggaatcctgtgaagcagctccagctatgtgtgaagaagaggacagcactgccttggtgtgtgacaatggctctgggctctgtaaggccggctttgctggggacgatgctcccagggctgttttcccatccattgtgggacgtcccagacatcagggggtgatggtgggaatgggacaaaaagacagcactgccttggtgtgtgacaatggctctggactttgaaaatgagatggccactgccgcatcctcctcctcccttgagaagagttacgagctgcctgatgggcaagtgatcaccatcggaaatgaacgcttccgctgcccagagaccctgttccagccatccttcatcgggatggagtctgcaggcatccatgaaaccacctacaacagcatcatgaagtgtgatattgacatcaggaaggacctctacgctaacaatgtcctatcaggaggcaccactatgtaccctggcattgccgaccgaatgcagaaggagatcacggccctagcgcccagcaccatgaagatcaagatcattgcccctccggagcgcaaatactctgtctggatcggtggctccatcctggcctctctgtccaccctccagcagatgtggatcagcaaacaggaatacgatgaaagcgggccnttccatttgtccaccgcaaatgcttctaaaaacactttcccgnctcttctctgtctctagcacacac

SEQ ID NO: 20263 - DNA, 657 bp, Macaca Mulatta
ggcctgaggtctggttagccagggctggtgctgtccctgcccacctccacttccttttcccttgctcactctggatccagtgacagcaggtgtcacgggtgaagcataaatcatatatagcattttcaggcatgttcctggtagttcttttgagtttgatattctaataaaataatttgtagaaaccatttgtctttgcagtgattccaaattaaacgttttctttctccaatctaagggcatggccaaaaagatctggttattttttagccagaaacgtgcttgtaatgagtacttctggaggacagacctgctcattaggcgtgctgtcccctgtagccttgtgagtcagcctggaggagggaacatccgactgtggcctggccccagtggtgcccacacatcagcacgaccacaggaaccaacactgagccttggaagctagatcacaggttaggcgtttctctagatgggggttctgaaatgtgcagtgtctgctcctggcaggcagcaccagaaagggcactgaaatgtaccagctggatgtgccccagtcttaataaacaggttttctaatccagatcttctgattgtctccaaattcttaccttctattctttagactaaatgcacacaaaactgaaagacgattctgag

SEQ ID NO: 20264 - DNA, 810 bp, Macaca Mulatta
  misc_feature (1)...(810): n = A,T,C or G
ggactgatccaccaacacctaaagaggctatgctacaatctctagctaaatggaagacacattcatccttctccctctgactgctttgatcatcatttactgcatctcataactgtaattttccaaagtttggattgggacttttcaggtcctttttggagggcaaaggaagtgccagcttctctggggaacttgtttttaaatccaaagacttgaaccacattccctgcacatgaacatgttgcttttatcccttctctcattgtctccctcccatcttagtaccattgtagttatagacatctgcatttttagaagcattttacccatttatttttttaaacattcaagaactgctgacgtactgtggatgtagagtataaaacttgaaaaatgcagatgttgaaggaataataggtatcttgtgctttaatactttatggcaggattgtactataagcaaatgaattaaacagctatgtaaatcataaacaaaaactaaaaatgaaccaaagtgaaaaggataacttccaggcagtatctttctattgtaacctgttatttaaggaaatactagtgatttcttctaaataggatgtaaaacttatttcanattactcttcctcagtcctgcctgcccagaactcaagtgtaactgtgataaaataacctttcccaggtatattggcaagtatgtgtgtaatctcagaatacacaggtgacatagatatgatatgacaactgggtaatggtgggattcatttacattgtttacacttctatgaacaggccttaaaggaaaggtcagtt

SEQ ID NO: 20265 - DNA, 99 bp, Macaca Mulatta
tgagagtgcagaggatgcatcttatcgactacctgctcctcctgctgattggactactggccctttctcatggccagctgcacgttgagcatgatggtg

SEQ ID NO: 20266 - DNA, 157 bp, Macaca Mulatta
caggtcaacgtattgaaacttactgttgaagacttggagaaagagagggatttctacttcggaaagctacggaacattgaattgatttgccaggagaatgagggggaaaacgaccctgtattgcagaggattgtagacattctgtatgccacagatg

SEQ ID NO: 20267 - DNA, 3698 bp, Macaca Mulatta
  misc_feature (1)...(3698): n = A,T,C or G
ccagagctgagcagggccctggagagatggccacggtcccagcagcggggaggactagagagcgcgcgctgccaccgccccatgcctcagccaggnnnnnnnnnnnnnnnnnnnnnnnnnnnnnnnnnnnnnnnnnnnnnnnnnnnnnnnnnnnnnnnnnnnnnnnnnnnnnnnnnnnnnnnnnnnnnnnnnnnnnnnnnnnnnnnnnnnnnnngcacttcccggttcacatgcttctacaactcgagagccaacatctcctgtgtctggagccaagatggggctctgcaggacacttcctgccaagtccacgcctggccggacagacggnnnnnnnnnnnnnnnnnnnnnnnnnnnnnnnnnnnnnnnnnnnnnnnnnnnnnnnnnnnnnnnnnnnnnnnnnnnnnnnnnnnnnnnnnnnnnnnnnnnnnnnnnnnnnnnnnnnnnnnnnnnnnnnnnnnnnnnnnnnnnnnnnnnnnnnnnnnnnnnnnnnnnnnnnnnnnnnnnnnnnnnnnnnnnnnnnnnnnnnnnnnnnnnnnnnnnnnnnnnnnnnnnnnnnnnnnnnnnnnnnnnnnnnnnnnnnnnnnnnnnnnnnnnnnnnnnnnnnnnnnnnnnnnnnnnnnnnnnnnnnnnnnnnnnnnnnnnnnnnnnnnnnnnnnnnnnnnnnnnnnnnnnnnnnnnnnnnnnnnnnnnnnnnnnnnnnnnnnnnnnnnnnnnnnnnnnnnnnnnnnnnnnnnnnnnnnnnnnnnnnnnnnnnnnnnnnnnnnnnnnnnnnnnnnnnnnnnnnnnnnnnnnnnnnnnnnnnnnnnnnnnnnnnnnnnnnnnnnnnnnnnnnnnnnnnnnnnnnnnnnnnnnnnnnnnnnnnnnnnnnnnnnnnnnnnnnnnnnnnnnnnnnnnnnnnnnnnnnnnnnnnnnnnnnnnnnnnnnnnnnnnnnnnnnnnnnnnnnnnnnnnnnnnnnnnnnnnnnnnnnnnnnnnnnnnnnnnnnnnnnnnnnnnnnnnnnnnnnnnnnnnnnnnnnnnnnntccagaagtggctctcctcgcccttcccctcatcgtccttcagccctggcggcctggcgcctgagatctcgccactggaagtgctggagagggacaaggtgacacagctgctcctgcagcaggacaaggtgcctgagccctcatccttaagcagcaaccgctcactgaccagctgcnnnnnnnnnnnnnnnnnnnnnnnnnnnnnnnnnnnnnnnnnnnnnnnnnnnnnnnnnnnnnnnnnnnnnnnnnnnnnnnnnnnnnnnnnnnnnnnnnnnnnnnnnnnnnnnnnnnnnnnnnnnnnnnnnnnnnnnnnnnnnnnnnnnnnnnnnnnnnnnnnnnnnnnnnnnnnnnnnnnnnnnnnnnnnnnnnnnnnnnnnnnnnnnnnnnnnnnnnnnnnnnnnnnnnnnnnnnnnnnnnnnnnnnnnnnnnnnnnnnnnnnnnnnnnnnnnnnnnnnnnnnnnnnnnnnnnnnnnnnnnnnnnnnnnnnnnnnnnnnnnnnnnnnnnnnnnnnnnnnnnnnnnnnnnnnnnnnnnnnnnnnnnnnnnnnnnnnnnnnnnnnnnnnnnnnnnnnnnnnnnnnnnnnnnnnnnnnnnnnnnnnnnnnnnnnnnnnnnnnnnnnnnnnnnnnnnnnnnnnnnnnnnnnnnnnnnnnnnnnnnnnnnnnnnnnnnnnnnnnnnnnnnnnnnnnnnnnnnnnnnnnnnnnnnnnnnnnnnnnnnnnnnnnnnnnnnnnnnnnnnnnnnnnnnnnnnnnnnnnnnnnnnnnnnnnnnnnnnnnnnnnnnnnnnnnnnnnnnnnnnnnnnnnnnnnnnnnnnnnnnnnnnnnnnnnnnnnnnnnnnnnnnnnnnnnnnnnnnnnnnnnnnnnnnnnnnnnnnnnnnnnnnnnnnnnnnnnnnnnnnnnnnnnnnnnnnnnnnnnnnnnnnnnnnnnnnnnnnnnnnnnnnnnnnnnnnnnnnnnnnnnnnnnnnnnnnnnnnnnnnnnnnnnnnnnnnnnnnnnnnnnnnnnnnnnnnnnnnnnnnnnnnnnnnnnnnnnnnnnnnnnnnnnnnnnnnnnnnnnnnnnnnnnnnnnnnnnnnnnnnnnnnnnnnnnnnnnnnnnnnnnnnnnnnnnnnnnnnnnnnnnnnnnnnnnnnnnnnnnnnnnnnnnnnnnnnnnnnnnnnnnnnnnnnnnnnnnnnnnnnnnnnnnnnnnnnnnnnnnnnnnnnnnnnnnnnnnnnnnnnnnnnnnnnnnnnnnnnnnnnnnnnnnnnnnnnnnnnnnnnnnnnnnnnnnnnnnnnnnnnnnnnnnnnnnnnnnnnnnnnnnnnnnnnnnnnnnnnnnnnnnnnnnnnnnnnnnnnnnnnnnnnnnnnnnnnnnnnnnnnnnnnnnnnnnnnnnnnnnnnnnnnnnnnnnnnnnnnnnnnnnnnnnnnnnnnnnnnnnnnnnnnnnnnnnnnnnnnnnnnnnnnnnnnnnnnnnnnnnnnnnnnnnnnnnnnnnnnnnnnnnnnnnnnnnnnnnnnnnnnnnnnnnnnnnnnnnnnnnnnnnnnnnnnnnnnnnnnnnnnnnnnnnnnnnnnnnnnnnnnnnnnnnnnnnnnnnnnnnnnnnnnnnnnnnnnnnnnnnnnnnnnnnnnnnnnnnnnnnnnnnnnnnnnnnnnnnnnnnnnnnnnnnnnnnnnnnnnnnnnnnnnnnnnnnnnnnnnnnnnnnnnnnnnnnnnnnnnnnnnnnnnnnnnnnnnnnnnnnnnnnnnnnnnnnnnnnnnnnnnnnnnnnnnnnnnnnnnnnnnnnnnnnnnnnnnnnnnnnnnnnnnnnnnnnnnnnnnnnnnnnnnnnnnnnnnnnnnnnnnnnnnnnnnnnnnnnnnnnnnnnnnnnnnnnnnnnnnnnnnnnnnnnnnnnnnnnnnnnnnnnnnnnnnnnnnnnnnnnnnnnnnnnnnnnnnnnnnnnnnnnnnnnnnnnnnnnnnnnnnnnnnnnnnnnnnnnnnnnnnnnnnnnnnnnnnnnnnnnnnnnnnnnnnnnnnnnnnnnnnnnnnnnnnnnnnnnnnnnnnnnnnnnnnnnnnnnnnnnnnnnnnnnnnnnnnnnnnnnnnnnnnnnnnnnnnnnnnnnnnnnnnnnnnnnnnnnnnnnnnnnnnnnnnnnntgcaatggctcagacaaccttctatcccagcaggacagtgtcccagtcccagctaactctgacctggcagccctcaagcacctgcacttataggccctgctcacaactgattgggcacctgactacacgcccctacaggctgaccagcagcctataagggggcttggcaccaagctctgtccaatcaggtagccccggcctgaactagccaatcagatcatctctgtctcgggcgtttgaactcagggagggaggcctgtgggtgcaggtgcttgtgnnnnnnnnnnnnnnnnnnnnnnnnnnnnnaaggtagacaagcgttgagccactaagcagaggaccttgggctcccaatacaaaaatacttactgccgagagggctgccgaccatttggtcaggattcctgttgcctttatatccaaaataaactcccttttcttggggttgtctgagtcttgggtctgtgccttgaaaagagcttaattatgggacagtctcacctcctgccatagggtcctgaatgtttcagaccccaaggggctccacacctttgctgtgtgttctg

SEQ ID NO: 20268 - DNA, 3965 bp, Macaca Mulatta
  misc_feature (1)...(3965): n = A,T,C or G
atattcagatggagacctcaccttgatatattttggaggcgatgaatgcagctcagggtttcagcggatgagcgtcatnnnnnnnnnnnnnnnnnnnnnnnnnnnnnnnnnnnnnnnnnnnnnnnnnnnnnnnnnnnnnnnnnnnnnnnnnnnnnnnnnnnnnnnnnnnnnnnnnnnnnnnnnnnnnnnnnnnnnnnnnnnnnnnnnnnnnnnnnnnnnnnnnnnnnnnnnnnnnnnnnnnnnnnnnnnnnnnnnnnnnnnnnnnnagaaccagagcagaattgggaagccgtggatggcagccagatggaaacagagaagaagcattttttcattaatatctgtcacagagtgctgcaggcaggcaaggcgcgcgggtgccccgaggatgcggcagtgtgnnnnnnngataagaatggaagtaaaaatctgggaaaatttatttcttctcccacaaaagagaaaggcaacattcaactctcttattcagatggtgatgattgtggtcatggcaagaaaataagaactaatatcacacttgtatgcaagccaggnnnnnnnnnnnnnnnnnnnnnnnnnnnnnnnnnnnnnnnnnnnnnnnnnnnnnnnnnnnnnnnnnnnnnnnnnnnnnnnnnnnnnnnnnnnnnnnnnnnnnnnnnnnnnnnnnnnnnnnnnnnnnnnnnnnnnnnnnnnnnnnnnnnnnnnnnnnnnnnnnnnnnnnnnnnnnnnnnnnnnnnnnnnnnnnnnnnnnnnnnnnnnnnnnnnnnnnnnnnnnnnnnnnnnnnnnnnnnnnnnnnnnnnnnnnnnnnnnnnnnnnnnnnnnnnnnnnnnnnnnnnnnnnnnnnnnnnnnnnnnnnnnnnnnnnnnnnnnnnnnnnnnnnnnnnnnnnnnnnnnnnnnnnnnnnnnnnnnnnnnnnnnnnnnnnnnnnnnnnnnnnnnnnnnnnnnnnnnnnnnnnnnnnnnnnnnnnnnnnnnnnnnnnnnnnnnnnnnnnnnnnnnnnnnnnnnnnnnnnnnnnnnnnnnnnnnnnnnnnnnnnnnnnnnnnnnnnnnnnnnnnnnnnnnnnnnnnnnnnnnnnnnnnnnnnnnnnnnnnnnnnnnnnnnnnnnnnnnnnnnnnnnnnnnnnnnnnnnnnnnnnnnnnnnnngtctggcaaaatctgaaggtggccctggaggaaactggtacgccatggacaactcaggggaacatgtcacgtggaggaaatactacattaacgtgtgtcggcctctgaatccagtgccgggctgcaaccggtatgcatcggcttgccagatgaagtatgaaaaagatcaggnnnnnnnnnnnnnnnnnnnnnnnnnnnnnnnnnnnnnnnnnnnnnnnnnnnnnnnnnnnnnnnnnnnnnnnnnnnnnnnnnnnnnnnnnnnnnnnnnnnnnnnnnnnnnnnnnnnnnnnnnnnnnnnnnnnnnnnnnnnnnnnnnnnnnnnnnnnnnnnnnnnnnnnnnnnnnnnnnnnnnnnnnnnnnnnnnnnnnnnnnnnnnnnnnnnnnnnnnnnnnnnnnnnnnnnnnnnnnnnnnnnnnnnnnnnnnnnnnnnnnnnnnnnnnnnnnnnnnnnaggcttgctctataaaggatcccaacagtggatttgtatttaatcttaacccactaaacagttcgcaaggatannnnnnnnnnnnnnnnnnnnnnnnnnnnnnnnnnnnnnnnnnnnnnnnnnnnnnnnnnnnnnnnnnnnnnnnnnnnnnnnnnnnnnnnnnnnnnnnnnnnnnnnnnnnnnnnnnnnnnnnnnnnnnnnnnnnnnnnnnnnnnnnnnnnnnnnnnnnnnnnnnnnnnnnnnnnnnnnnnnnnnnnnnnnnnnnnnnnnnnnnnnnnnnnnnnnnnnnnnnnnnnnnnnnnnnnnnnnnnnnnnnnnnnnnnnnnnnnnnnnnnnnnnnnnnnnnnnnnnnnnnnnnnnnnnnnnnnnnnnnnnnnnnnnnnnnnnnnnnnnnnnnnnnnnnnnnnnnnnnnnnnnnnnnnnnnnnnnnnnnnnnnnnnnnnnnnnnnnnnnnnnnnnnnnnnnnnnnnnnnnnnnnnnnnnnnnnnnnnnnnnnnnnnnnnnnnnnnnnnnnnnnnnnnnnnnnnnnnnnnnnnnnnnnnnnnnnnnnnnnnnnnnnnnnnnnnnnnnnnnnnnnnnnnnnnnnnnnnnnnnnnnnnnnnnnnnnnnnnnnnnnnnnnnnnnnnnnnnnnnnnnnnnnnnnnnnnnnnnnnnnnnnnnnnnnnnnnnnnnnnnnnnnnnnnnnnnnnnnnnnnnnnnnnnnnnnnnnnnnnnnnnnnnnnnnnnnnnnnnnnnnnnnnnnnnnnnnnnnnnnnnnnnnnnnnnnnnnnnnnnnnnnnnnnnnnnnnnnnnnnnnnnnnnnnnnnnnnnnnnnnnnnnnnnnnnnnnnnnnnnnnnnnnnnnnnnnnnnnnnnnnnnnnnnnnnnnnnnnnnnnnnnnnnnnnnnnnnnnnnnnnnnnnnnnnnnnnnnnnnnnnnnnnnnnnnnnnnnnnnnnnnnnnnnnnnnnnnnnnnnnnnnnnnnnnnnnnnnnnnnnnnnnnnnnnnnnnnnnnnnnnnnnnnnnnnnnnnnnnnnnnnnnnnnnnnnnnnnnnnnnnnnnnnnnnnnnnnnnnnnnnnnnnnnnnnnnnnnnnnnnnnnnnnnnnnnnnnnnnnnnnnnnnnnnnnnnnnnnnnnnnnnnnnnnnnnnnnnnnnnnnnnnnnnnnnnnnnnnnnnnnnnnnnnnnnnnnnnnnnnnnnnnnnnnnnnnnnnnnnnnnnnnnnnnnnnnnnnnnnnnnnnnnnnnnnnnnnnnnnnnnnnnnnnnnnnnnnnnnnnnnnnnnnnnnnnnnnnnnnnnnnnnnnnnnnnnnnnnnnnnnnnnnnnnnnnnnnnnnnnnnnnnnnnnnnnnnnnnnnnnnnnnnnnnnnnnnnnnnnnnnnnnnnnnnnnnnnnnnnnnnnnnnnnnnnnnnnnnnnnnnnnnnnnnnnnnnnnnnnnnnnnnnnnnnnnnnnnnnnnnnnnnnnnnnnnnnnnnnnnnnnnnnnnnnnnnnnnnnnnnnnnnnnnnnnnnnnnnnnnnnnnnnnnnnnnnnnnnnnnnnnnnnnnnnnnnnnnnnnnnnnnnnnnnnnnnnnnnnnnnnnnnnnnnnnnnnnnnnnnnnnnnnnnnnnnnnnnnnnnnnnnnnnnnnnnnnnnnnnnnnnnnnnnnnnnnnnnnnnnnnnnnnnnnnnnnnnnnnnnnnnnnnnnnnnnnnnnnnnnnnnnnnnnnnnnnnnnnnnnnnnnnnnnnnnnnnnnnnnnnnnnnnnnnnnnnnnnnnnnnnnnnnnnnnnnnnnnnnnnnnnnnnnnnnnnnnnnnncaggacacctgtttgatctgacctccttaagtggaagggcgggattcacagctgcttacagcgagaaggggctggtctacatgagcatctgtggggagaatgaaaactgccctcctggcgtggnnnnnnnnnnnnnnnnnnnnnnnnnnnnnnnnnnnnnnnnnnnnnnnnnnnnnnnnnnnnnnnnnnnnnnnnnnnnnnnnnnnnnnnnnnnnnnnnnnnnnnnnnnnnnnnnnnnnnnnnnnnnnnnnnnnnnnnnnnnnnnnnnnnnnnnnnnnnnnnnnnnnnnnnnnnnnnnnnnnnnnnnnnnnnnnnnnnnnnnnnnnnnnnnnnnnnnnnnnnnnnnnnnnnnnnnnnnnnnnnnnnnnnnnnnnnnnnnnnngaatgttccgtgaggaatggaagctctattgttgacttgtctcctctcattcatcgcacgggtggttatgaggcttatgatgagagtgaggatgacgcctccgataccaacccggaattatacatcaatatttgtcagccactaaatcccatgcacggagtgccttgtcctgctggagccgctgtgtgcaaagttcctattgatggtccccccata

SEQ ID NO: 20269 - DNA, 385 bp, Macaca Mulatta
tagtttacagatatttttgaccagttcattttcgagatatttcagagaagaaaccagatctgacctgttgatggttggcgcttgttgaaaacgagctttctttcccatgataatgcttcgtttttgaagtgttgaagctgtgctccccttaaattgtggcagaagagattaaggtaattacaacactcagttctatgtcttacaagcactttgttttgtctctgcaagacaatacgattccagtcatttcccataaaatacagacattctaccaacataatatgctttgattgatgcagcattatgctttgggcagtattacaaaatagctggcgaatgctttctgtatttaaatattgtaaacaagaaaaataagttataactg

SEQ ID NO: 20270 - DNA, 772 bp, Macaca Mulatta
  misc_feature (1)...(772): n = A,T,C or G
gcctcggacgaggccgtcgggccgccacctcttctgctcagctgccttcgccatggccaatgacagctgcgggcccgcgagccgagnnnnnngagtgagactggcagtactgcgagctgtgggggaagatggagaacctgctgctctacagccgcccttcctactgctgcaaggagcaccagcctcaggactggaagaagtacaagttagtgtgccagggcagcgagggtgtcctcggtcacggaggnnnnnnnnnnnnnnnnnnnnnnnnnnnnnnnnnnnnnnnnnnnnnnnnnnnnnnnnnnnnnnnnnnnnnnnnnnnnnnnnnnnnnnnnnnnnnnnnnnnnnnnnnnnnnnnnnnnnnnnnnnnnnnnnnnnnnnnnnnnnnnnnnnnnnnnnnnnnnnnnnnnnnnnnnnnnnnnnnnnnnnnnnnnnnnnnnnnnnnnnnnnnnnnnnnnnnnnnnnnnnnnnnnnnnnnnnnnnnnnnnnnnnnnnnnnnnnnnnnnnnnnnnnnnnnnnnnnnnnnnnnnnnnnnnnnnnnnnnnnnnnnnnnnnnnnnnnnnnnnnnnnnnnnnnnnnnnnnnnnnnnnnnnnnnnnnnnnnnnnnnnnnnnnnnnnnnnnnnnnnnnnntggctctgagaattcctgcagagaagagcagggtggtgaggagatagtgagcaactcccagnngcatggagggatccagaatctggacagaagaaccacctagaaataactcggcagaattctgaaaatgaggtcacgctg

SEQ ID NO: 20271 - DNA, 729 bp, Macaca Mulatta
catctgtgtattattgacgagtattttgtttgtttgttgcttgctttgggtaattgaattctgaagaacttatctgcatgaagataactaggcattctatccatttgtagatcagagaaagtgaagagattatatattagtacttaaatttttacattttccaaatgaatgaaaatgtatgtttctttgtactttttttaaaaaaccagcttagtaacaataccatatggtttcaactagtaggtaatctgcttatatttctaatgcaaacttaacaattgtgtactttttaaaagctgcagtatgtgatggaaaataactgtggtcaattttgttatccatatttcagactcaattttagatacaatgtggctttatattttaagtatatagagctactcaaggagttgaatctccccttttctcattaacatgatttttctaagttgatatagtatactcattaacatacatcaaatttacttttacttggttcagattgtggaatgaatttccaccagttctcttctttttaatgtgtatcctaggagaaattttattgaggttatagcataccccatgagcacagtggggaagaataatgtgttattatgcactgctgctaaacagaagaagcagttgtagtttgtttttcagtttaaatgtgggtatatttagatttttgtgtaagcagcaacttttaaagataaactataattctgactttgt

SEQ ID NO: 20272 - DNA, 1389 bp, Macaca Mulatta
  misc_feature (1)...(1389): n = A,T,C or G
ctacaatcaagatttagagaggctctaacaagtgtcatttttccttgttagctttcatttctcagccctttacaagattataatagtctgcagtttactctctccaaagctttacggacagtgagcctgtcctaaacaagacagtgactccaggatttctgaagactattgtggaaaaagtatccattaagnnnnnnnnnnnnnnnnnnnnnnnnnnnnnnnnnnnnnnnnnnnnnnnnnnnnnnnnnnnnnnnnnnnnnnnnnnnnnnnnnnnnnnnnnnnnnnnnnnnnnnnnnnnnnnnnnnnnnnnnnnnnnnnnnnnnnnnnnnnnnnnnnnnnnnnnnnnnnnnnnnnnnnnnnnnnnnnnnnnnnnnnnnnnnnnnnnnnnnnnnnnnnnnnnnnnnnnnnnnnnnnnnnnnnnnnnnnnnnnnnnnnnnnnnnnnnnnnnnnnnnnnnnnnnnnnnnnnnnnnnnnnnnnnnnnnnnnnnnnnnnnnnnnnnnnnnnnnnnnnnnnnnnnnnaaaccaggaagaagtgggtcttgtggcacctgcacccaccgcaagaaacacactgacatctgaagtaggagagaggattcctgtagctcagnnnnnnnnnnnnnnnnnnnnnnnnnnnnnnnnnnnnnnnnnnnnnnnnnnnnnnnnnnnnnnnnnnnnnnnnnnnnnnnnnnnnnnnnnnnnnnnnnnnnnnnnnnnnnnnnnnnnnnnnnnnnnnnnnnnnnnnnnnnnnnnnnnnnnnnnnnnnnnnnnnnnnnnaatcagcaaaccctggcccaatgtcaggtggatacgagaagaaatgttccccaaaaggacccagtgacagtgatggtactgaaagcaacagcaccatttaaatatgagtccccagaacatggagaaaagcacaatgtttcatgctacagtggccagtaagactcagtatttccatgtgaaagtcttcgacatcagcttgaaagagaaattcataaggaagaaggtcattaccatatctgattactctgaatgtaaaggagtaatggaaataaaggaagcatcatctgtgtctgactttgatcaaaactttgaggtcccaaacagaattatcgaaatagcaaataaaactcccaagatcagtcaactttacaagcaagcatctggaacaatggtgtatgggttgtttatggtacaaaagnagaaaagcatacacaagaagaacacaatctatgaaataaaagataatacaggatccatggatgtagtggggaatggaaaatggcacaatatcaagtgtgagaaaggagataaacttcgactcttctgctttcaactgagaacagttaaccgcaagctgaaactggtgtgcggaagtcacagcttcatcaagg

SEQ ID NO: 20273 - DNA, 121 bp, Macaca Mulatta
aaggtcaagaagaagagagactggccctagaaacggccctgatgtatggagctaaaaagcccctcaatacagagggtgtcatgaaatcgaggtccaaagttgacatggactttgaagtgga

SEQ ID NO: 20274 - DNA, 660 bp, Macaca Mulatta
cctaatggtgctggggaaaggcagctttggcaaggtcatgctttcagaacgaaaaggccagatgagctctatgctgtgaagatcctgaagaaggatgtcgtgatccaagatgatgacgtggagtgcactatggtggagaagcgggtgctggccctacctgggaagccgcccttcctgacccagctccactcctgcttccagaccatggaccgcctgtactttgtgatggagtacgtcaacgggggcgacctcatgtatcacatccagcaagttggccggttcaaggagccccatgccgtattttacgctgcagaaattgccatcggtctgttcttcttacagagtaagggcatcatttaccgtgacctaaaacttgacaacgtgatgctcgattctgaggggcacatcaagattgctgattttggcatgtgtaaggagaacatctgggatggggtgacaaccaagacattctgtggcactccagactacatcgcccctgagataattgcttatcagccctatgggaagtccgtggattggtgggcatttggagtcctgctgtatgaaatgttggctgggcaggcaccctttgaaggggaggatgaagatgaactcttccagtccatcatggaacacaacgtagcctatcccaagtctatg

SEQ ID NO: 20275 - DNA, 1413 bp, Macaca Mulatta
  misc_feature (1)...(1413): n = A,T,C or G
cctgaggcactgcagaaagtgggcctaagcctcgaggatgacggtgctgcaggaacccgttcagnnnnnnnnnnnnnnnnnnnnnnnnnnnnnnnnnnnnnnnnnnnnnnnnnnnnnnnnnnnnnnnnnnnnnnnnnnnnnnnnnnnnnnnnnnnnnnnnnnnnnnnnnnnnnnnnnnnnnnnnnnnnnnnnnnnnnnnnnnnnnnnnnnnnnnnnnnnnnnnnnnnnnnnnnnnnnnnnnnnnnnnnnnnnnnnnnnnnnnnnnnnnnnnnnnnnnnnnnnnnnnnnnnnnnnnnnnnnnnnnnnnnnnnnnnnnnnnnnnnnnnnnnnnnnnnnnnnnnnnnnnnnnnnnnnnnnnnnnnnnnnnnnnnnnnnnnnnnnnnnnnnnnnnnnnnnnnnnnnnnnnnnnnnnnnnnnnnnnnnnnnnnnnnnnnnnnnnnnnnnnnnnnnnnnnnnnnnnnnnnnnnnnnnnnnnnnnnnnnnnnnnnnnnnnnnnnnnnnnnnnnnnnnnnnnnnnnnnnnnnnnnnnnnnnnnnnnnnnnnnnnnnnnnnnnnnnnnnnnnnnnnnnnnnnnnnnnnnnnnnnnnnnnnnnnnnnnnnnnnnnnnnnnnnnnnnnnnnnnnnnnnnnnnnnnnnnnnnnnnnnnnnnnnnnnnnnnnnnnnnnnnnnnnnnnnnnnnnnnnnnnnnnnnnnnnnnnnnnnnnnnnnnnnnnnnnnnnnnnnnnnnnnnnnnnnnnnnnnnnnnnnnnnnnnnnnnnnnnnnnnnnnnnnnnnnnnnnnnnnnnnnnnnnnnnnnnnnnnnnnnnnnnnnnnnnnnnnnnnnnnnnnnnnnnnnnnnnnnnnnnnnnnnnnnnnnnnnnnnnnnnnnnnnnnnnnnnnnnnnnnnnnnnnnnnnnnnnnnnnnnnnnnnnnnnnnnnnnnnnnnnnnnnnnnnnnnnnnnnnnnnnnnnnnnnnnnnnnnnnnnnnnnnnnnnnnnnnnnnnnnnnnnnnnnnnnnnnnnnnnnnnnnnnnnnnnnnnnnnnnnnnnnnnnnnnnnnnnnnnnnnnnnnnnnnnnnnnnnnnnnnnnnnnnnnnnnnnnnnnnnnnnnnnnnnnnnnnnnnnngtacaacacctcaggtattgagccccacaattgcatctcccccaaacgcactgcctcgaagaagttcacgactctttactagtgacagctccacaaccaaggnnnnnnnnnnnnnnnnnnnnnnnnnnnnnnnnnnnnnnnnnnnnnnnnnnnnnnnnnnnnnnnnnnnnnnnnnnnnnaggaataactcaacctaacataaatgatagcctggaaattacaaaattagactcttccatcatttcagaagggaaaatatccacaatcacacctcagattcaggcttttaatctacaaaaagcagcagca

SEQ ID NO: 20276 - DNA, 1906 bp, Macaca Mulatta
  misc_feature (1)...(1906): n = A,T,C or G
ggggagtaagcggtgactcatttcgagaaggcacctcttcttgaggaatctgccgcagagccgttagatcattggcaagccctccaggcgacctcgcccaagttgggcaagagcggctccccggctggtcatcagacgtcgggccctgatctgagaaggannnnnnnnnnnnnnnnnnggcttgtttgtccgagtgcggcgcggacagctgatctcgggagccggagcgcatagacctcgcagacctcgccggcttcacactcacctcggtgtctgctgcacccgccgcttcttctcctaggccacgagacccagcggctagaaattcaccatgtctattctcaaggtccatgccagggagatctttgactctcgtgggaatcccactgttgaggttgatctcttcacctcaaaaggtctcttcagagctgctgtgcccagtggtgcttcaactggtatctatgaggccctagaactccgggacaatgataagactcgctatatggggaagggtgtctcaaaggctgttgagcacatcaataaaactattgcgcctgccctggttagcaagaaactgaacgtcacagaacaagagaagattgacaaactgatgatcgagatggacggaacagaaaataaatctaagtttggtgcgaacgccattctgggggtgtccctcgccgtctgcaaagctggtgctgttgagaagggggtccccctgtaccgccacatcgctgacttggctggcaactctgaagtcatcctgccagtcccggctttcaatgtcatcaatggcggttctcatgccggcaacaagctggccatgcaggagttcatgatcctcccagtcggtgcagcaaacttcagggaagccatgcgcattggagcggaggtttaccacaacctgaagaatgtcatcaaggagaaatacgggaaagatgccaccaatgtgggggatgaaggcgggtttgctcccaatatcctggagaataaagaaggcctggagctgctgaagactgccattgggaaagctggttacactgataaggtggtcattggcatggacgtagcagcctccgagttcttcaggtctgggaagtatgacctggacttcaagtctcccgatgaccccagcaggtacatctcacctgatcagctggctgacctgtacaagtccttcatcaaggactacccagtggtgtctatcgaagatccctttgaccaggatgactggggagcttggcagaagttcacggccagtgcaggaatccaggtagtcggggatgatctcacagtggaccaacccaaagaggattgccaaggccgtgaatgagaagtcctgcaactgcctcctgctcaaagtcaaccagattggctccgtgaccgagtcgcttcatgcgtgcaagttggcccaagccaatggttggggcgtcatggtgtctcaatcattctggggagactgaaaaataccttcatttgctgaccttggttgtggaggctggtgccctggggcagattcaggacttggctgccccctttggccgattcttgaaccgcctttgagccaaagataacaacccaagcctcaccccaagaaattttgaaaaaatgaaccctgtgggcaagacaaagggcttaatgtttttgcccgggccagggaaatctttcagtaaaaacccaccctggggcccaaatttaaaccctgcgcgaggctatagacaaagccccccattagcggttccaaccatgttttgtgtctcaacaaaggaaaccccctttccccatattagggattcatatcttcccaggagcagatattatgggaggatcctctgaaaaaaaaataactacttgtgtaagggagaggtaccacctggaactttagtattaagccccccacccactc

SEQ ID NO: 20277 - DNA, 451 bp, Macaca Mulatta
  misc_feature (1)...(451): n = A,T,C or G
gtgtcccgccccgtgtcccgccctgtatttgtgcggcgccagctgacccggcagcctgcggcgcagagaggctgggctgacaggcgcagtagctccggaggtcgcgctggactgagagtgcgggccggcagaagctggcggggagcggccggggttatgctgggcaaggattacatgctggccatcattctggtcaactgcgatgngatgacttgtggggggaccagagtctggagggggagcctggcttgcctcctggctggaggaagatccacgatgctgcaggtacttactattggcatgtacccagcggtagcacccagtggcagcgcccagcctgggaactaggagatgcggaggacccaggcacggngggaacggaggggatttggggactgcggcccctcaaagggagatccttctccagcctggagagctcactggaccggag

SEQ ID NO: 20278 - DNA, 154 bp, Macaca Mulatta
gacaacggaaaattggtggacagtgaaatgaaatatctgggcagtcctattactgctccaaagttggatacaaatccaaacctaggagaagaccaggcagaagagatttcaaatgaattaatggagttttccctggaagatcaagaagcaaagg

SEQ ID NO: 20279 - DNA, 611 bp, Macaca Mulatta
  misc_feature (1)...(611): n = A,T,C or G
ngctggctggcaaggtcctacgctcccaaaaggctttcctgacccagctggatgagctgctgaccgagcacaggatgacctgggacccagcccagccaccccgagacctgactgaggccttcctggcagagatggagaagnnnnnnnnnnnnnnnnnnnnnnnnnnnnnnnnnnnnnnnnnnnnnnnnnnnnnnnnnnnnnnnnnnnnnnnnnnnnnnnnnnnnnnnnnnnnnnnnnnnnnnnnnnnnnnnnnnnnnnnnnnnnnnnnnnnnnnnnnnnnnnnnnnnnnnnnnnnnnnnnnnnnnnnnnnnnnnnnnnnnnnnnnnnnnnnnnnnnnnnnnnnnnnnnnnnnnnnnnnnnnnnnnnnnnnnnnnnnnnnnnnnnnnnnnnnnnnnnnnnnnnnnnnnnnnnnnnnnnnnnnnnnnnnnnnnnnnnnnnnnnnnnnnnnnnnnnnnnnnnnnnnnnnnaggggacgacgctcttcaccaacctgtcatcggtgctgaaggatgaggccgtctgggagaagcccttccgcttccaccctgaacacttcctggatgctcagggccgctttgtgaagccagaggccttcctgcctttctcagcag

SEQ ID NO: 20280 - DNA, 828 bp, Macaca Mulatta
  misc_feature (1)...(828): n = A,T,C or G
ggggagtacgagtctgaggcggagggagtcatggcaggacaagcgtttagaaagtttcttccactctttgaccgagtattggttgaaaggagtgctgctgaaactgtaaccaaaggaggcattatgcttccagaaaaatctcaaggaaaagtattgcaagcaacagtagtcgctgttggatcgggttctaaaggaaagggtggagagattcaaccggttagcgtgaaagttggagataaagttcttctgccagagtatggaggcaccaaagtagttctagatgacaaggattatttcctatttagagatggtgacattcttggaaagtacctagactgaaataaatcactattgaaatggcatcaacatgaagctgcccattccactgaagttctgaaatctttcatcatgtaaataatttccatagttctcttttataataaactaatgacatccagtgtctccaaaattatttccttgtgctgatataaacatttccaaataaaaatatgtnnnnnnnnnnnnnnnnnnaaaggcgtgtcgggccgcctccggccctcgaagaagcttttctagacccattcgttttggcgccgcggggcccggntaaggtagagtgagcctggggccataagctgtgttcccaagggagatccctggggcatggaactaagggcttggggatttcccccccagataaaagaaacgcccccgggcgggcaaccccgaacgggtttcgtggaaacaaaattcccagaaatgtgggggtgccttgcagggggccgttgccacctgggagacccttgtcccaacggacgcagagtgcct

SEQ ID NO: 20281 - DNA, 1813 bp, Macaca Mulatta
  misc_feature (1)...(1813): n = A,T,C or G
gcgcgaaacctggttgttgctggagtggctgagaggatcgtggtactgcgatggcgnnnnnnnnnnnnnnnnnnnnnnnnnnnnnnnnnnnnnnnnnnnnnnnnnnnnnnnnnnnnnnnnnnnnnnnnnnnnnnnnnnnnnnnnnnnnnnnnnnnnnnnnnnnnnnnnnnnnnnnnnnnnnnnnnnnnnnnnnnnnnnnnnnnnnnnnnnnnnnnnnnnnnnnnnnnnnnnnnnnnnnnnnnnnnnnnnnnnnnnnnnnnnnnnnnnnnnnnnnnnnnnnnnnnnnnnnnnnnnnnnnnnnnnnnnnnnnnnnnnnnnnnnnnnnnnnnnnnnnnnnnnnnnnnnnnnnnnnnnnnnnnnnnnnnnnnnnnnnnnnnnnnnnnnnnnnnnnnnnnnnnnnnnnnnnnnnnnnnnnnnnnnnnnnnnnnnnnnnnnnnnnnnnnnnnnnnnnnnnnnnnnnnnnnnnnnnnnnnnnnnnnnnnnnnnnnnnnnnnnnnnnnnnnnnnnnnnnnnnnnnnnnnnnnnnnnnnnnnnnnnnnnnnnnnnnnnnnnnnnnnnnnnnnnnnnnnnnnnnnnnnnnnnnnnnnnnnnnnnnnnnnnnnnnnnnnnnnnnnnnnnnnnnnnnnnnnnnnnnnnnnnnnnnnnnnnnnnnnnnnnnnnnnnnnnnnnnnnnnnnnnnnnnnnnnnnnnnnnnnnnnnnnnnnnnnnnnnnnnnnnnnnnnnnnnnnnnnnnnnnnnnnnnnnnnnnnngcagcaagggagcacgtgctggcctacttcccttcaaggcgccggcggagctgctgcagatctttgacgaggctgccctggaggtggtactggccatgtaccccacgtatgaccgtatcaccaaccacatccatgtccgcatctcccacctgcctctggtggaggagctgcgctcgctgaggnaggcaactgcatctgaaccagctgatccgcaccagtggggtggtgaccagctgcactggcgtcctgccccagctcagcatggtcaagtacaactgcaacaagtgcaatttcgtcctggggcctttctgccagtcccagaaccaggaggtgaaaccaggctcctgtcccgagtgccagtcagccggcccctttgaggtcaacatggannagaccatctatcagaactaccagcgtatccgaatccaggagagtccaggcaaagtggcagctggccggctgccccgctccaaggacgccattctccttgcggatctggtagacagctgcaagccaggagacgagatannnnnnnnnnnnnnnnnnnnnnnnnnnnnnnnnnnnnnnnnnnnnnnnnnnnnnnnnnnnnnnnnnnnnnnnnnnnnnnnnnnnnnnnnnnnnnnnnnnnnnnnnnnnnnnnnnnnnnnnnnnnnnnnnnnnnnnnnnnnnnnnnnnnnnnnnnnnnnnnnnnnnnnnnnnnnnnnnnnnnnnnnnnnnnnnnnnnnnnnnnnnnnnnnnnnnnnnnnnnnnnnnnnnnnnnnnnnnnnnnnnnnnnnnnnnnnnnnnnnnnnnnnnnnnnnnnnnnnnnnccaggtggcaaacacaaggtacgtggcgatatcaacgtgctcttgtgtggagaccctggcacagcaaagtcgcagtttctcaagtatattgagaaagtgtccagccgagccatcttcaccaccggccagggggcgtcagctgtgggcctcacggcgtatgtccagcggcaccctgtcagcagggagtggaccttggaggctggggccctggttctggctgaccgaggagtgtgtctcattgatgaatttgacaa

SEQ ID NO: 20282 - DNA, 643 bp, Macaca Mulatta
  misc_feature (1)...(643): n = A,T,C or G
cttatataagtagagtcatggtatctgccctcctgtcagtagtggcaggatctattggcatatgtgggagcttcttagagggatgaggttctttgaacacagtgaaaatttaaattagtaacttttttgcaagcagttcattgactgttactgctaagaagaagtaagaaggaaaagccttttggcaatcttggttatttctttaagatttctggcagtgtgggatggatgaatgaagtggaatgtgaactttggtcaagttaaatgggacagccttccatgttcatctgtctacctcttaactgaataaaaaagcctacagttnnnnnnnnnnnnnnnnnnnnnnnnnnnnnnnnnnnnnnnnnnnnnnnnnnnnnnnnnnnnnnnnnnnnnnnnnnnnnnnnnnnnnnnnnnnnnnnnnnnnnnnnnnnnnnnnnnnnnnnnnnnnnnnnnnnnnnnnnnnnnnnnnnnnnnnnnnnnnnnnnnnnnnnnnnnnnnnnnnnnnnnnnnnnnnnnnnnnnnnnnnnnnnnnnnnnnnnnnnnnnnnnnnnnnnnnnnnnnnnnnnnnnnnnnnnnnnnnnnnnnnnnnnnnnnnnnnnnnnnnnnnnnnnnnnnnnnnnnnnnnnnnnnnnnnnnnnnnnnn

SEQ ID NO: 20283 - DNA, 569 bp, Macaca Mulatta
cccagtcagtcacatcctgggatccagtgtataaatccaatatcgtatgtcttgtgcataattgttccaaaggagcttattttgtgaactatatatatcagtagtgtacattaccacataacataaaaagatctacatataaacaatacaaccaactatccaagtgttataccaactaaaaaccccaataaaccttgaacagtgactactttggttaattcattatattaagatatagtcataaagctactagttattatattaatttggaaatgttaggctattcttgggcaaccctgcaacaattttttctaaaagggatattattgacttttagcagaggatgttatagtcaactgagttgtactggtaccacttccattataataagtcccaaagtattatatatttgataatgctaatcataattggaaagtaacattctatatgtgaatgtaaaatttatttgccaactgaatagaggcaatggtagtttgtcactatagggaacacagatttttgagatcttttgccctctggaagccggtaacaattaaaaacaattttaa

SEQ ID NO: 20284 - DNA, 503 bp, Macaca Mulatta
gcagcagtaccgcgccttcacggtgcccgagctcaccaagcagattttgcctccaagacatgaatgaccacatgcgacccgcaccacggccgctacctgacgggggctgccatctccgggggccgcatgtccatgaaggaggtggacgagcagatgctcaacgtgcagaacaagaacagcagctacttcgtggagtggatccccaacaacgtgaagacggccgtgtgcgacatcccgccccgcggcctgaagatgtcggccaccttcatcggcaacagcacggccatccaggagctgttcaagcgcatctcggagcagttcacggccatgttccggcgcaaggccttcctgcactggtacacgggcgagggcatggacgagatggagttcaccgaggccgagagcaacatgaacgacctggtgtctgagtaccagcagtaccaggacgccacggccgacgaacagggggagttcgaggaggaggagggcgaggacgaggctta

SEQ ID NO: 20285 - DNA, 645 bp, Macaca Mulatta
  misc_feature (1)...(645): n = A,T,C or G
tggaaaacgggaaccttttaaaaacttttttggtgggcacagggttcacccggtatcccgcctttgggggcccaggcgggggcatctcgggttagggattcagaccaggggacgggcccaatttggggaacccgttttttctaaaaatacaaaattggcggggtgggtggcaaaagtnnnnnnnnnnnnnnnnnnnnnagttgaggcagagaattcactggaacccgggaggcagaggannnnnnnnnnnnnnnnngnnnnnnnnnnnnnnnnnnnnnnnnnnnnnnnnnnnnnncatctcaagnaaacaaacaaaaccactttattgactgtattgtgacacgtttattaagcatgaacccctatcagtactcctaaactgtaaacaatgaggaactaaggtgtcaaaagaaacacattagggatcatattaatagacaaaaacctttacattttcttattgcatttacacaatcaacacacaataagcaaaactgaatcctttctaagcaaacatttttgcatatactgccttctctttatctttctgtgcctttatcttttgtttgactttcagcagttctgcctggatagctttatcttctggtgctatctcctgtgctttcttaagatcagccaatgccc

SEQ ID NO: 20286 - DNA, 329 bp, Macaca Mulatta
  misc_feature (1)...(329): n = A,T,C or G
gagcctgtcctggctgggcctcgggcccgtggcagcatctccgtggctgctcctgctgctggtcgggggctcctggctcctggcccgtgtcctggcctggacctacaccttctatgacaactgccgccacctccagtgttttccgcaacccccgaaacagaactggttttggggacaccagggcctggtnnnnnnnnnnnnnnnnnnnnnnnnnnnnnnnnnnnnnnnnnnnnnnnnnnnnncccaaggctttaagttgtgacgtgggtcctaccttccccctcctcattttatgcaaccctgaaaggatccgttctatcaccagtgcc

SEQ ID NO: 20287 - DNA, 718 bp, Macaca Mulatta
  misc_feature (1)...(718): n = A,T,C or G
caaggaagaggcctttagaactggaacaaagtcatgccctgcccccatggatacatcccctttctctcctttttcagcatcttcaagaggataagtcacttccttaattcccacaacccagaggccaagtgcaactggtcacccacaacccctacttggatgcctagcgccatcccaattgcctcctccaccatctctaccagcatcccttccagtctgcacggggcagtcctcctgggcttgacctctctgtacccaccactggggaccaggcagcccccctgtatccctcccagcaccccatccctctccacgtacacgacagatcccccaagtgctgagaatcaagctcccacctgcccacagcacgcccacagacagggtccctggatggcagctcaggtggactgagacacttgagtcatcactcaggaggtccctctgggatctgggcaggtgactgccccatgtggcaggacatccccacccatcttagactgatcagggtcagtctagaagagcaaccctctgannnnnnnnnnnnnnnnngnnnnnnnnnnnnnnnnnnnannnnnnnnnnnnnnnnnaagactgcttgagcccaggagttcaaggtcagcctgggcagcataggagacctcgcctcatnnnnnnnnnnnnnnnnnnnnngcctctggccaaagataccttgtctgtggggccttccctttcctgtctg

SEQ ID NO: 20288 - DNA, 799 bp, Macaca Mulatta
tcacctccttgaatgctggcggttcatttcatgatcagtgttaagcattttcctccatgggaaggaaggatgggatgtaaaaaagctaagggctatcctttacaaattctggttctgcaacttcctagcgtgactttgggcttgggcaagtttcttagccgttctgagccttagtttcctcatctgtacaatgagattaatagtacttatctaccttcaggattgctgacagaatctgaaataaaatatgcaagttagctagtacaaagtagatgatccaaaaatggtagccactcacccttcacaaactgaagtccatgggccacggaagccaagaattaatgtacacctgtatcgtgtaggaaaccagaaaggtgttccttatttcttgttcccaaacaggattaactgtgaagactaatttataaatgtgaacctaagaaaactccagctctgaaggaaatcatttgaattttgtttttgtacgtaaagttaaccttccagtggtctgagctgtcgtcactgacttgatgacagtctggccctccggacgagagcagcgctggcatcgggcaggtgattcctgacacctgctgcctgcaggcattcgctgacggggcttttcctggaggaaactcccagggccagacggccgctgcttccgcgcgtggactcggatctgctgtgacaccgtctgcccgacagtctctccacaggcagcctttctctgtactttttctccatggtcgaaataaaacagggtgactgggagttacttataattcatgaagattttaaa

SEQ ID NO: 20289 - DNA, 169 bp, Macaca Mulatta
gaccacaggatggaaacaagcccactgagactagtcaacctcagtctagcacagggggttacaaccagcccagcctaggatatggacagagtaactacagttatccccaggtacctgggagctaccccatgcagccagtcaccgcacctccatcttaccctcctaccag

SEQ ID NO: 20290 - DNA, 138 bp, Macaca Mulatta
ccatcccaacatcctgcgtctttacaactatttttacgaccggaggaggatctacttgattctagagtatgcgccccgcggggagctctacaaggagatgcagaagagccgctcatttgacgagcagcgatcagccac

SEQ ID NO: 20291 - DNA, 855 bp, Macaca Mulatta
tgagaattggtgaactcgtgccctctgttactgcaactgattccgattcaggtgacaatgcctgttttatattacagtattactgggactaacaaccacggaacttttagcattagcccaaacactgggagtatttttcttgccaaaaaattggactttgaaacacagtctttgtataaattaaatataacagcaaaagaccaaggaagacctcctcgttcatctacaatgtcagtggttattcacgtgagggactttaatgacaaccctcctagctttcctcctggagatattttcaaatctattgttgagaacattcccattggtacatctgtcatttcagtgactgcacatgaccctgatgcagatattaatgggcaactatcctacacaatcattcaacagatgccaagaggcaaccattttaccatagatgaagtcaaagggactatatatactaatgctgaaatagatcgggaatttgctaatctctttgagttaactgtaaaagccaatgatcaagctgtgccaatagaaactagacggtatgctttgaagaacgtgaccattttggttacagacctcaatgacaatgtcccaatgtttatatcacaaaacgcccttgctgcagacccatcagctgtgattggttctgttctgacaacaattatggctgctgacccagatgaaggtgctaatggagaagtagagtatgagatcatcaatggggacacagacaccttcattgttgatcgttatagtggagacttgagagtggcttcagcgctggttccttcacagttgatctacaatctcatagtttcagcaacagaccttgggcctgaaaggaggaag

SEQ ID NO: 20292 - DNA, 592 bp, Macaca Mulatta
taaatgttcttatttctaaaatggagataataaaacttcatgcaggtcacatataataggtctgacacatgctaattcattgcccaggatgctgtaagcattcaaaatccaggtgtcagcatcaccaccacagatatattctcattcttctaaatgtacagggaagccccatggtagttttgtcttgagatcattcaacatatttatgtttctcccacagatactatgataagaaataccaagtattcctgaagctggttgaacaccagaaggagtatttggcgatcatgaatgacaactgaacagggcttgcaggtgctgatgccagaagcttctgtgccattgcattaaagacctctgtcatttcatccatgttcaagacccttgaggtattgtttcatcatttctgtattgtcttttaataaagaaaacaaacatgtgcaaccagaattagagtcttcatttcataccactattatttagtttcagtttccatacagtttccatcacagtaacagaagtttcacatagagtcataggatctcacatgagactagatcttgggggccgttcagtccaggggaggcctgta

SEQ ID NO: 20293 - DNA, 1201 bp, Macaca Mulatta
  misc_feature (1)...(1201): n = A,T,C or G
atgtttctgcaatcccctttacaatctacagagaaagcaaccagcgagatgaatactgctgaggactggggcctcattttggatatctgtgataaagttggtcagtctcgcactgnnnnnnnnnnnnnnnnnnnnnnnnnnnnnnnnnnnnnnnnnnnnnnnnnnnnnnnnnnnnnnnnnnnnnnnnnnnnnnnnnnnnnnnnnnnnnnnnnnnnnnnnnnnnnnnnnnnnnnnnnnnnnnnnnnnnnnnnnnnnnnnnnnnnnnnnnnnnnnnnnnnnnnnnnnnnnnnnnnnnnnnnnnnnnnnnnnnnnnnnnnnnnnnnnnnnnnnnnnnnnnnnnnnnnnnnnnnnnnnnnnnnnnnnnnnnnnnnnnnnnnnnnnnnnnnnnnnnnnnnnnnnnnnnnnnnnnnnnnnnnnnnnnnnnnnnnnnnnnnnnnnnnnnnnnnnnnnnnnnnnnnnnnnnnnnnnnnnnnnnnnnnnnnnnnnnnnnnnnnnnnnnnnnnnnnnnnnnnnnnnnnnnnnnnnnnnnnnnnnnnnnnnnnnnnnnnnnnnnnnnnnnnnnnnnnnnnnnnnnnnnnnnnnnnnnnnnnnnnnnnnnnnnnnnnnnnnnnnnnnnnnnnnnnnnnnnnnnnnnnnnnnnnnnnnnnnnnnnnnnnnnnnnnnnnnnnnnnnnnnnnnnnnnnnnnnnnnnnnnnnnnnnnnnnnnnnnnnnnnnnnnnnnnnnnnnnnnnnnnnnnnnnnnnnnnnnnnnnnnnnnnnnnnnnnnnnnnnnnnnnnnnnnnnnnnnnnnnnnnnnnnnnnnnnnnnnnnnnntaaaacagagaacattacggtacaatttagtgatgatgttcaggtagagacaatctataccagagccggaaccagcctttattgatgaagataaaatggaccagttgctacaaatgttgcaaagtacagaccccagtgatgatcagccagacctcccagagctacttcatcttgaagnnnnnnnnnnnnnnnnnnnnnnnnnnnnnnnnnnnnnnnnnnnnnnnnnnnnnagaaaactttcagatctctcagaacttaatgtgaaagtgatggaggctctttccttatataccaagttaatgaacgaagatccgatgtattccatgtatgcaaagttacagaatcagccatataataagcagtcgtctggtgtttctggttctcaggt

SEQ ID NO: 20294 - DNA, 699 bp, Macaca Mulatta
  misc_feature (1)...(699): n = A,T,C or G
gggggagcctcatgacgtggcccccaacgggccatcagcggggggcctggccgtcccccagnnnnnnnnnnnnnnnnnnggcctcccacccgagcccgaggtgcccccagccctggagtgctgggcccccacgcctcnnnnnnnnnnnnnnnnnnnnnnnnnnnnnnnnnnnnnnnnnnnnnnnnnnnnnnnnnnnnnnnnnnnnctcgccacagcgggagccgcagcgagtatcccatgagcagttccgggctgccctgcagctccctagagaacccaggtgacccccgctcctacctggacaacttcatcaagattggcgagggctccacgggcattgcgtgcatcgccaccgtgcgcagctcgggcaagcttgtggccgtcaagaagatggacctgcgcaagcagcagaggcgcgagctgctcttcaacgaggtgnnnnnnnnnnnnnnnnnnnnnnnnnnnnnnnnnnnnnnnnnnnnnnnnnnnnnnnnnnnnnnnnnnnnnnnnnnnnnnnnnnnnnnnnnnnnnnnnnnnnnnnnnnnnnnnnnnnnnnnnnnnnnnnncaggatgaacgaggagcagatcgcggccgtgttcctggcagtggtgcaggccttgtcggtgctccacgcccaaaaaatcatccaccgggacatcaagagcgactcgatcctgctgacccatgacggcagggtg

SEQ ID NO: 20295 - DNA, 788 bp, Macaca Mulatta
  misc_feature (1)...(788): n = A,T,C or G
ggtcactaagtttgtcttctcttctggatagattgattttaagagactgagggaatttacaaactaaagaatttaatcatctggtggaaaaggagactttaagattgtaaaacaggctgggtggggtgactcacatnnnnnnnnnnnnnnnnnnnnnnnnnnnnnncaggtggatcgcttgannnnnnnnnnnnnnnnnncnnnnnnnnnnnnnnngnnnnnnnnnnnnnnnnnnnnnnnnnnnnnnnnnnnnngatcgtttagctctgtttttcataatagaaatagaaaaagtaaagttgccttttcttctgaaaagagcaagtattgttcagaccaagaagggtttttgtgattgaatcaccagtgcctgtcctagtcatagctgtgcttcaaaaatcttagcatgattagtgttggagtaaaacaaggaagcaaagcaaattctgtttttgaaattctgttgcttgaactattttgtaataattaaactttgatgttgagaaattacaactttattgtacacttcattgcagcttgaaattcatggtcttaaagtgagatttgagtttctattgagcacctttaaaaaagtaataccaaaccataaagttaaaattgatgtatattgagtcatatctaaagccaggtataaacgtaaaatgtatttcctggttttatttcaggngaactactngtttggaaagctattattangcaaatgtttttaaaaaatactgttttctcattttcagtcgtacccctaatgatctcagcaagataatgtc

SEQ ID NO: 20296 - DNA, 738 bp, Macaca Mulatta
  misc_feature (1)...(738): n = A,T,C or G
actgtggctgtctaaatggaggaacatgtatgtccaacaagtacttctccagcattcactggtgcaactgcccaaagaagttcggagggcagcactgtgagatannnnnnnnnnnnnnnnnnnnnnnnnnnnnnnnnnnnnnnnnnnnnnnnnnnnnnnnnnnnnnnnnnnnnnnnnnnnnnnnnnnnnnnnnnnnnnnnnnnnnnnnnnnnnnnnnnnnnnnnnnnnnnnnnnnnnnnnnnnnnnnnnnnnnnnnnnnnnnnnnnnnnnnnnnnnnnnnnnnnnnnnnnnnnnnnnnnnnnnnnnnnnnnnnnnnnnnnnnnnnnnnnnnnnnnnnnnnnnnnnnnnnnnnnnnnnnnnnnnnnnnnnnnnnnnnnagccctcctctcttccagaagaattacagattcagtgtggccaaaggactctgaggccccgcattaagattgttgggggagaattcaccaccatcgagaaccagccctggtttgcagccatctacaggaggcaccggggcggctctgtcacctacgtgtgtggaggcagcctcatcagcccttgctgggtggtcagcgccacacannnnnnnnnnattacccaaagaaggaggactacatcgtctacctgggtcgctcaaggcttaactccaacacgcaaggggagatgaagtttgaggtggaaaacctcatcctacatgaggactacagcgctgacacgcttgctcaccacaacgacatt

SEQ ID NO: 20297 - DNA, 979 bp, Macaca Mulatta
  misc_feature (1)...(979): n = A,T,C or G
ggatagatttgttcttccatccaaggcctttgcctctccagttcaaaacccagacaaccattgtttctgcacagaaaaaattatctcaaaaaattgtacatcatatggtgtgctagacatcagcaaatgcaaagaagggaaacctgtgtacatttcacttcctcattttctatatgcaagtcctgacgtttcagaaactattgatggattaaacccaaatgaagaagaacataggacatacttggatattgaacctataactggattcactttacaatttgcnaaacggctgcaggtcaacctatttggtcaagccanntcaacaaatttcaagtaataaaagcgtctgaaagagaaactataattgtgccttatttctttggccttaaatgagactggggaaccattgggtgaatgaagaaaggcaaaagatggttcaaaaaagtccaggttaactgggaaaaaataaaacctttccttgggccctgaatagaaattgaatcttaactccaatgggttggtgggggggggaatggtttgtttgcctttttaagaattttcgnaattggggccattgccgaattccaaaaaccctttaaaatttagcccgcgcaaagggaattcctctccccattttttggcccctaaacccaccctttctggaacccttgggggaaaaacccgcaccctccaannnnnnnnnnnnnnnnnnnnaaattgccttttaaccctttttcaaaaaacaccaacccttaatactctttttaaatttgacacaaaaatggttgtggggcccccaatttctctcttttttttggagatataaagacacactgcgcgcccattttctaaaaagagggtatattttgggaaaggtgttatgtgaaaaattttccttccctcgtgtnnnnnnnnnnnnnnnnnncgcgcgagcgctttttaaaaaaataattcatatttttctcccaaccagaagaat

SEQ ID NO: 20298 - DNA, 999 bp, Macaca Mulatta
  misc_feature (1)...(999): n = A,T,C or G
ttttgactggattacaagctcccgagtaggctnntattttttcttttcaacattcctgttctgcggcttccttggctctttttgcccgtatgccgaagagccgggcgttggcacgggccatgcggagactagcgaaggtttttgccctcctctgcctgccttggcttcaagaggctggtagggtcccaagcgtacccttatccagactttttgaccatgctatgatccaagcccatcgcctgcaccaactggcctttgacacctaccaggagtttgaagaagcctatatcccaaaggaaaagaagcattcgctcatggagaacccccaggcctccttctgcttcgcagactctattcccacaccctccaacttggaggaaacgcagcagaaatccaacctagagctgctccgcatctccctgctgctcatccagtcgtggctggagcccgtgcagttcctcagtagtgtgtttgccaacaacctgttgcatcacacctcggacagcgacgtccatgacctcctaaaggacctagaggaaggcatcgaaacgttgatgtggaggctggaagatggcatcccccggactgggcacatcttcaagcagacctacagcaagtttgacgcacactcacagaacgatgactcactgctcaagaactacgggctgctccactgcttcaggaaggacatggatatggtcgagacattcctgcgcatggtgcagtgccgcactgtggagggcagctgtggcttctaggtgcccatgtggcatcctgtgacccctccccagtgcctctcctggccccggaaggtgccactccagtgcccaccagccttgtcctaataaaattaagttgtattaaattcacaaaaacnnnnnnnnnnnnnnatnnnggtcccaatngcccttagttagtattgagtgtattnnnnnnnnnnnnnnnnnnacgattannnnnnnnnngcgtgaccaacctaatcgctacccaacttaatcg

SEQ ID NO: 20299 - DNA, 149 bp, Macaca Mulatta
  misc_feature (1)...(149): n = A,T,C or G
ntgcagacccgctacgacttcacctcgtgcatgggtgtgctcctggtgagcatggtggtgctcttcatcttcgccatcctctgcatcttcatccggaaccgcatcctggagattgtgtacgcctcgctgggcgctctgctcttcacctg

SEQ ID NO: 20300 - DNA, 1512 bp, Macaca Mulatta
atggatctcatcccagacttggctgtggaaacctggcttctcttggctgtcaccctggtgctcctctatttatatggaacccattcacatggactttttaagaagcttggaattccagggcccacacctttgcctttattgggaaacattttgtcctaccgtaagggcttttggacgtttgatatggaatgttataaaaagtatggaaaagtgtggggcttttatgatggtcgacagcctgtgctggctatcacagatcccaacatgatcaaaacagtgctagtgaaagaatgttattctgtcttcacaaaccggaggccttttggtccagtgggatttatgaaaaatgccatctctatagctgaggatgaagaatggaagagaatacggtcattgctctctccaaccttcaccagcggaaaactcaaggagatggtccctatcattgccaagtatggagatgtgttggtgagaaatctgaggcgggaagcagagacaggcaagcctgtcaccttgaaagatgtctttggggcctacagcatggacgtgatcactagcacatcatttggagtgaatatcgactctctcaacaatccacaagacccctttgtggaaaacaccaagaagcttttaagatttgatttcttagatccattctttctctcaataacaatcttcccatttatcatcccaattcttgaagtattaaatatctctatttttccaagagaagttacaagttttttaagaaaatctgtaaaaaggataaaagaaagtcgcctcaaagatacacaaaagcaccgagtggatttccttcagctgatgattgactctcagaattcgaaagaaactgagtcccacaaagctctgtctgatctggagctcgtggcccaatcaattatcttcatttttgctggctatgaaaccaccagcagtgttctttccttcattatatatgagctggccactcaccctgatgtccagcagaaactgcaggaggaaattgatacagttttacccaataaggcaccacccacctatgatactgtgctacagatggagtatctcgacatggtggtgaatgaaacgctcagaatattcccaattgctatgagacttgagagggtctgcaaaaaagatgttgaaatcaatgggatattcatacccaaaggggtggtggtgatgattccaagctatgctcttcatcatgacccaaagtactggccagagcctgagaagttcctccctgaaaggttcagcaagaagaacaatgacaacatagatccttacatatacacgccctttggaagtggacccagaaactgcattggcatgaggtttgctctcatgaacatgaaacttgctataatcagagtccttcagaacttctccttcaaaccttgtaaagaaacacagatcccactgaaattacgcttaggaggacttcttcaaacagaaaaacccattgttctaaagattgagtcaagggatgggaccgtaagtggagcctga

SEQ ID NO: 20301 - DNA, 298 bp, Macaca Mulatta
  misc_feature (1)...(298): n = A,T,C or G
cagatcaaactcctactccaactagattcctgaagaactgtgaggaggtgggactcttcaatgaactagctagctcctttgaacatgaattcaagaaagctgcagatgaggatgagaaaaaggcaagaagcaggactgttgccaaaaaactggtggnggctgctgctgggccccttgacatgtctctaccttccacaccagacatcaaaatcaaagaagaagagcccgtggaggtagactcatccccacctgatagcccttcctctagtccctgttcccccaccactgaaggagaagg

SEQ ID NO: 20302 - DNA, 771 bp, Macaca Mulatta
  misc_feature (1)...(771): n = A,T,C or G
cagaaatggttttgatactgattccagctgtctggaatcacataactcatctgattcagaatttccnccaaataataaaggtgaaataaaaacagaaggacaagagctcataacagtaataaaagcccccacctcctttggttatgataaaccgcatgtgctggtggatctacttgtggatgatggccgtaaagagtccttgattggttacagaccaacagaaggttccaaagaattttcatgagatcagctaagatgcaccaactctgaagtctcattttcctggacagttttctgctttaatttcatgaaaagattatgatctcagaaattgtatcttagctggtatcaaccaaagggagtgacttagtttagataaaagtgtaaagaggatgtgtggcattttcaattttggnnnnnnnnnnnnnnnnnnnnnnnnnnnnnnnnnnnnnnnnnnnnngtaatttatgaccctttacatccagataggttagcagtaacaaggaacagtatccagtactccttattcctaggtgagcaggtgatgccccagggacctttgtagccacttcactttttttcttttctctgccttgatatagcatatgtttttgtaagttttatgcatacagtaattttaagtggttaatttcagaagaaattctgcaagcttttcaaaattggacttaaaatctaattcaaactaatagaattaatggaatatgtaaatagaaacatgtatatattttttatgaaacattacagttagag

SEQ ID NO: 20303 - DNA, 2870 bp, Macaca Mulatta
  misc_feature (1)...(2870): n = A,T,C or G
tggagtgggtgctcgcggaagcgctgctttcgcagagccgggacccccgggccctgcttggggcgctgtgccaaggggaggcatccgcggagcgcgtggagacgctgcgcttccttctgcagcggctcnnnnnnnnnnnnnnnnnnnnnnnnnnnnnnnnnnnnnnnnnnnnnnnnnnnnnnnnnnnnnnnnnnnnnnnnnnnnnnnnnnnnnnnnnnnnnnnnnnnnnnnnnnnnnnnnnnnnnnnnnnnnnnnnnnnnnnnnnnnnnnnnnnnnnnnnnnnnnnnnnnnnnnnnnnnnnnnnnnnnnnnnnnnnnnnnnnnnnnnnnnnnnnnnnnnnnnnnnnnnnnnnnnnnnnnnnnnnnnnnnnnnnnnnnnnnnnnnnnnnnnnnnnnnnnnnnnnnnnnnnnnnnnnnnnnnnnnnnnnnnnnnnnnnnnnnnnnnnnnnnnnnnnnnnnnnnnnnnnnnnnnnnnnnnnnnnnnnnnnnnnnnnnnnnnnnnnnnnnnnnnnnnnnnnnnnnnnnnnnnnnnnnnnnnnnnnnnnnnnnnnnnnnnnnnnnnnnnnnnnnnnnnnnnnnnnnnnnnnnnnnnnnnnnnnnnnnnnnnnnnnnnnnnnnnnnnnnnnnnnnnnnnnnnnnnnnnnnnnnnnnnnnnnnnnnnnnnnnnnnnnnnnnnnnnnnnnnnnnnnnnnnnnnnnnnnnnnnnnnnnnnnnnnnnnnnnnnnnnnnnnnnnnnnnnnnnnnnnnnnnnnnnnnnnnnnnnnnnnnnnnnnnnnnnnnnnnnnnnnnnnnnnnnnnnnnnnnnnnnnnnnnnnnnnnnnnnnnnnnnnnnnnnnnnnnnnnnnnnnnnnnnnnnnnnnnnnnnnnnnnnnnnnnnnnnnnnnnnnnnnnnnnnnnnnnnnnnnnnnnnnnnnnnnnnnnnnnnnnnnnnnnnnnnnnnnnnnnnnnnnnnnnnnnnnnnnnnnnnnnnnnnnnnnnnnnnnnnnnnnnnnnnnnnnnnnnnnnnnnnnnnnnnnnnnnnnnnnnnnnnnnnnnnnnnnnnnnnnnnnnnnnnnnnnnnnnnnnnnnnnnnnnnnnnnnnnnnnnnnnnnnnnnnnnnnnnnnnnnnnnnnnnnnnnnnnnnnnnnnnnnnnnnnnnnnnnnnnnnnnnnnnnnnnnnnnnnnnnnnnnnnnnnnnnnnnnnnnnnnnnnnnnnnnnnnnnnnnnnnnnnnnnnnnnnnnnnnnnnnnnnnnnnnnnnnnnnnnnnnnnnnnnnnnnnnnnnnnnnnnnnnnnnnnnnnnnnnnnnnnnnnnnnnnnnnnnnnnnnnnnnnnnnnnnnnnnnnnnnnnnnnnnnnnnnnnnnnnnnnnnnnnnnnnnnnnnnnnnnnnnnnnnnnnnnnnnnnnnnnnnnnnnnnnnnnnnnnnnnnnnnnnnnnnnnnnnnnnnnnnnnnnnnnnnnnnnnnnnnnnnnnnnnnnnnnnnnnnnnnnnnnnnnnnnnnnnnnnnnnnnnnnnnnnnnnnnnnnnnnnnnnnnnnnnnnnnnnnnnnnnnnnnnnnnnnnnnnnnnnnnnnnnnnnnnnnnnnnnnnnnnnnnnnnnnnnnnnnnnnnnnnnnnnnnnnnnnnnnnnnnnnnnnnnnnnnnnnnnnnnnnnnnnnnnnnnnnnnnnnnnnnnnnnnnnnnnnnnnnnnnnnnnnnnnnnnnnnnnnnnnnnnnnnnnnnnnnnnnnnnnnnnnnnnnnnnnnnnnnnnnnnnnnnnnnnnnnnnnnnnnnnnnnnnnnnnnnnnnnnnnnnnnnnnnnnnnnnnnnnnnnnnnnnnnnnnnnnnnnnnnnnnnnnnnnnnnnnnnnnnnnnnnnnnnnnnnnnnnnnnnnnnnnnnnnnnnnnnnnnnnnnnnnnnnnnnnnnnnnnnnnnnnnnnnnnnnnnnnnnnnnnnnnnnnnnnnnnnnnnnnnnnnnnnnnnnnnnnnnnnnnnnnnnnnnnnnnnnnnnnnnnnnnnnnnnnnnnnnnnnnnnnnnnnnnnnnnnnnnnnnnnnnnnnnnnnnnnnnnnnnnnnnnnnnnnnnnnnnnnnnnnnnnnnnnnnnnnnnnnnnnnnnnnnnnnnnnnnnnnnnnnnnnnnnnnnnnnnnnnnnnnnnnnnnnnnnnnnnnnnnnnnnnnnnnnnnnnnnnnnnnnnnnnnnnnnnnnnnnnnnnnnnnnnnnnnnnnnnnnnnnnnnnnnnnnnnnnnnnnnnnnnnnnnnnnnnnnnnnnnnnnnnnnnnnnnnnnnnnnnnnnnnnnnnnnnnnnnnnnnnnnnnnnnnnnnnnnnnnnnnnnnnnnnnnnnnnnnnnnnnnnnnnnnnnnnnnnnnnnnnnnnnnnnnnnnnnnnnnnnnnnnnnnnnnnnnnnnnnnnnnnnnnnnnnnnnnnnnnnnnnnnnnnnnnnnnnnnnnnnnnnnnnnnnnnnnnnnnnnnnnnnnnnnnnnnnnnnnnnnnnnnnnnnnnnnnnnnnnnnnnnnnnnnnnnnnnnnnnnnnnnnnnnnnnnnnnnnnnnnnnnnnnnnnnnnnnnnnnnnnnnnnnnnnnnnnnnnnnnnnnnnnnnnnnnnnnnnnnnnnnnnnnnnnnnnnnnnnnnnnnnnnnnnnnnnnnnnnnagtgttttagaagaatcgtcatcttcccaaggatggggaaaaatagttgcacaatatattcatgatcaatgggtgtgcctctctttcctgttgaaaaaatatcacacccttataccaagcacagggagtgaaattctggaaccatttctgcctgccgttcagatgccaatcaggactttgcagtctgcactagaagccctcacagttctttcttctgatcaagttttaccagtgttccattgcttgaaagtgttggttcccaag

SEQ ID NO: 20304 - DNA, 648 bp, Macaca Mulatta
ctctggaggctgtgcgcatgcagcacctgatagctcgtgaggctgaggcagccatgttccaccgcaagctgtttgaagaacttgtgcgagcctcaagtcactccacagacctcatggaagccatggccatgggcagcgtggaggcttcttataagtgtttagcagcagctttgatagttctgacggagtctggcaggtctgctcatcaggtggccagataccgcccacgtgcccccatcattgctgtgacccggaatccccagacagctcgtcaggcccacctgtaccgtggcatcttccctgtgctgtgcaaggacccagtccaggaggcctgggctgaggacgtggacctccgggtgaactttgccatgaatgttggcaaggcccgaggcttcttcaagaagggagatgtggtcattgtgctgaccggatggcgccctggctccggcttcaccaacaccatgcgtgttgttcctgtgccgtgatgaacctgagagcccttcctccagcccctgtcccacccccttcccccaacccatccattaggccagcaacgcttgtagaactcactctgggctgtaatgtggcactggtgggctgggacaccagggaagaagattagtgcctcgctgaaacatggctgtgttt

SEQ ID NO: 20305 - DNA, 848 bp, Macaca Mulatta
  misc_feature (1)...(848): n = A,T,C or G
ggtcctatggcagcgtatacaaagctattcataaagagacaggtcagattgttgctattaagcaagttcctgtggaatcagacctgcaggagataatcaaagaaatctctataatgcagcaatgtgacannnnnnnnnnnnnnnnnnnnnnnnnnnnnnnnnnnnnnnnnnnnnnnnnnnnnnnnnnnnnnnnnnnnnnnnnnnnnnnnnnnnnnnnnnnnnnnnnnnnnnnnnnnnnnnnnnnnnnnnnnnnnnnnnnnnnnnnnnnnnnnnnnnnnnnnnnnnnnnnnnnnnnnnnnnnnnnnnnnnnnnnnnnnnnnnnnnnnnnnnnnnnnnnnnnnnnnnnnnnnnnnnnnnnnnnnnnnnnnnnnnnnnnnnnnnnnnnnnnnnnnnnnnnnnnnnnnnnnnnnnnnnnnnnnnnnnnnnnnnnnnnnnnnnnnnnnnnnnnnnnnnnnnnnnnnnnnnnnnnnnnnnnnnnnnnnnnnnnnnnnnnnnnnnnnnnnnnnnnnnnnnnnnnnnnnnnnnnnnnnnnnnnnnnnnnnnnnnnnnnnnnnnnnnnnnnnnnnnnnnnnnnnngcaatcttcatgattcctacaaatcctcctcccacattccgaaaaccagagctgtggtcagataactttacagattttgtgaaacagtgtcttgtaaagagtcctgagcagagagccacagccactcagctcctgcagnagcacccatttgtcaagagtgccaaaggagtgtcaatactgcgagacttaattaatgaagccatggatgtgaaactgaaacgccaggaatcccagcagcgggaagtggaccaggacgatgaagaaaactcagn

SEQ ID NO: 20306 - DNA, 3407 bp, Macaca Mulatta
  misc_feature (1)...(3407): n = A,T,C or G
gaaattcctgatgagaaggaagaggccacctctaactccccctccaaggagagtaagaaggaatcatctctgaagaagagtcgaattctcttagggaaaacaggggtcatcaaggaggaaccacagcagnagaacatgtctcagccagaagtgaaagatccgtggaatctctccaatgatgagtattattaccccaagcaacagggtcttcgaggcacctttggagggaatattatccnnnnnnnnnnnnnnnnnnnnnnnnnnnnnnnnnnnnnnnnnnnnnnnnnnnnnnnnnnnnnnnnnnnnnnnnnnnnnnnnnnnnnnnnnnnnnnnnnnnnnnnnnnnnnnnnnnnnnnnnnnnnnnnnnnnnnnnnnnnnnnnnnnnnnnnnnnnnnnnnnnnnnnnnnnnnnnnnnnnnnnnnnnnnnnnnnnnnnnnnnnnnnnnnnnnnnnnnnnnnnnnnnnnnnnnnnnnnnnnnnnnnnnnnnnnnnnnnnnnnnnnnnnnnnnnnnnnnnnnnnnnnnnnnnnnnnnnnnnnnnnnnnnnnnnnnnnnnnnnnnnnnnnnnnnnnnnnnnnnnnnnnnnnnnnnnnnnnnnnnnnnnnnnnnnnnnnnnnnnnnnnnnnnnnnnnnnnnnnnnnnnnnnnnnnnnnnnnnnnnnnnnnnnnnnnnnnnnnnnnnnnnnnnnnnnnnnngcatttgagaacaacctttttcgtgctccaatttatcttcataagatgccagaaactgatttcctgatcattcggacaagacagggatactatattcgggaattagtggatatttttgtggttggccagcagtgtcccttgtttgaagttcctgggcctaactccaaaagggccaatacacatattcgagactttctacaggtnnnnnnnnnnnnnnnnnnnnnnnnnnnnnnnnnnnnnnnnnnnnnnnnnnnnnnnnnnnnnnnnnnnnnnnnnnnnnnnnnnnnnnnnnnnnnnnnnnnnnnnnnnnnnnnnnnnnnnnnnnnnnnnnnnnnnnnnnnnnnnnnnnnnnnnnnnnnnnnnnnnnnnnnnnnnnnnnnnnnnnnnnnnnnnnnnnnnnnnnnnnnnnnnnnnnnnnnnnnnnnnnnnnnnnnnnnnnnnnnnnnnnnnnnnnnnnnnnnnnnnnnnnnnnnnnnnnnnnnnnnnnnnnnnnnnnnnnnnnnnnnnnnnnnnnnnnnnnnnnnnnnnnnnnnnnnnnnnnnnnnnnnnnnnnnnnnnnnnnnnnnnnnnnnnnnnnnnnnnnnnnnnnnnnnnnnnnnnnnnnnnnnnnnnnnnnnnnnnnnnnnnnnnnnnnnnnnnnnnnnnnnnnnnnnnnnnnnnnnnnnnnnnnnnnnnnnnnnnnnnnnnnnnnnnnnnnnnnnnnnnnnnnnnnnnnnnnnnnnnnnnnnnnnnnnnnnnnnnnnnnnnnnnnnnnnnnnnnnnngtcgcctttccctggaaaaaggccaagcaaacttctacgtaaatttggggtgcctgaggannagattaaaaagttgtcccgctgggaagtgattgatgtggtgcgcacaatgtcaacagaacaggctcgttctggagaggggcccatgagtaaatttgcccgcggatcaaggttttctgtggctgagcatcaagagcgttacaaagaggaatgtcagcgcatctttgacctacagaacaagnnnnnnnnnnnnnnnnnnnnnnnnnnnnnnnnnnnnnnnnnnnnnnnnnnnnnnnnnnnnnnnnnnnnnnnnnnnnnnnnnnnnnnnnnnnnnnnnnnnnnnnnnnnnnnnnnnnnnnnnnnnnnnnnnnnnnnnnnnnnnnnnnnnnnnnnnnnnnnnnnnnnnnnnnnnnnnnnnnnnnnnnnnnnnnnnnnnnnnnnnnnnnnnnnnnnnnnnnnnnnnnnnnnnnnnnnnnnnnnnnnnnnnnnnnnnnnnnnnnnnnnnnnnnnnnnnnnnnnnnnnnnnnnnnnnnnnnnnnnnnnnnnnnnnnnnnnnnnnnnnnnnnnnnnnnnnnnnnnnnnnnnnnnnnnnnnnnnnnnnnnnnnnnnnnnnnnnnnnnnnnnnnnnnnnnnnnnnnnnnnnnnnnnnnnnnnnnnnnnnnnnnnnnnnnnnnnnnnnnnnnnnnnnnnnnnnnnnnnnnnnnnnnnnnnnnnnnnnnnnnnnnnnnnnnnnnnnnnnnnnnnnnnnnnnnnnnnnnnnnnnnnnnnnnnnnnnnnnnnnnnnnnnnnnnnnnnnnnnnnnnnnnnnnnnnnnnnnnnnnnnnnnnnnnnnnnnnnnnnnnnnnnnnnnnnnnnnnnnnnnnnnnnnnnnnnnnnnnnnnnnnnnnnnnnnnnnnnnnnnnnnnnnnnnnnnnnnnnnnnnnnnnnnnnnnnnnnnnnnnnnnnnnnnnnnnnnnnnnnnnnnnnnnnnnnnnnnnnnnnnnnnnnnnnnnnnnnnnnnnnnnnnnnnnnnnnnnnnnnnnnnnnnnnnnnnnnnnnnnnnnnnnnnnnnnnnnnnnnnnnnnnnnnnnnnnnnnnnnnnnnnnnnnnnnnnnnnnnnnnnnnnnnnnnnnnnnnnnnnnnnnnnnnnnnnnnnnnnnnnnnnnnnnnnnnnnnnnnnnnnnnnnnnnnnnnnnnnnnnnnnnnnnnnnnnnnnnnnnnnnnnnnnnnnnnnnnnnnnnnnnnnnnnnnnnnnnnnnnnnnnnnnnnnnnnnnnnnnnnnnnnnnnnnnnnnnnnnnnnnnnnnnnnnnnnnnnnnnnnnnnnnnnnnnnnnnnnnnnnnnnnnnnnnnnnnnnnnnnnnnnnnnnnnnnnnnnnnnnnnnnnnnnnnnnnnnnnnnnnnnnnnnnnnnnnnnnnnnnnnnnnnnnnnnnnnnnnnnnnnnnnnnnnnnnnnnnnnnnnnnnnnnnnnnnnnnnnnnnnnnnnnnnnnnnnnnnnnnnnnnnnnnnnnnnnnnnnnnnnnnnnnnnnnnnnnnnnnnnnnnnnnnnnnnnnnnnnnnnnnnnnnnnnnnnnnnnnnnnnnnnnnnnnnnnnnnnnnnnnnnnnnnnnnnnnnnnnnnnnnnnnnnnnnnnnnnnnnnnnnnnnnnnnnnnnnnnnnnnnnnnnnnnnnnnnnnnnnnnnnnnnnnnnnnnnnnnnnnnnnnnnnnnnnnnnnnnnnnnnnnnnnnnnnnnnnnnnnnnnnnnnnnnnnnnnnnnnnnnnnnnnnnnnnnnnnnnnnnnnnnnnnnnnnnnnnnnnnnnnnnnnnnnnnnnnnnnnnnnnnnnnnnnnnnnnnnnnnnnnnnnnnnnnnnnnagtatgatgagcatttgactcaacttgagaaggatatctgtacagctaaagaagcagctttggaggaagcagaattagaaagcctggacccaatgaccccagggccctacacacctcag

SEQ ID NO: 20307 - DNA, 853 bp, Macaca Mulatta
  misc_feature (1)...(853): n = A,T,C or G
gaaatgtgctgcagcctggggccggggcaatcatggcccgaatcgcccagtttctgagnnnnnnnnnnnnnnnnnnnnnnnnnnnnnnnnnnnnnnnnnnnnnnnnnnnnnnnnnnnnnnnnnnnnnnnnnnnnnnnnnnnnnnnnnnnnnnnnnnnnnnnnnnnnnnnnnnnnnnnnnnnnnnnnnnnnnnnnnnnnnnnnnnnnnnnnnnnnnnnnnnnnnnnnnnnnnnnnnnnnnnnnnnnnnnnnnnnnnnnnnnnnnnnnnnnnnnnnnnnnnnnnnnnnnnnnnnnnnnnnnnnnnnnnnnnnnnnnnnnnnnnnnnnnnnnnnnnnnnnnnnnnnnnnnnnnnnnnnnnnnnnnnnnnnnnnnnnnnnnnnnnnnnnnnnnnnnnnnnnnnnnnnnnnnnnnnnnnnnnnnnnnnnnnnnnnnnnnnnnnnnnnnnnnnnnnnnnnnnnnnnnnnnnnnnnnnnnnnnnnnnnnnnnnnnnnnnnnnnnnnnnnnnnnnnnnnnnnnnnnnnnnnnnnnnnngggtgtgagaaaggaggccatggccatgctgggtgctgtactctgggaacctggaatagacccctctgcaaagtagaagtgggagggctgggatctcctcagccccatcctgatgccttcttaccccaacaatttgctcctaggaaactctagccaagtgagtgatggggcagctgccatcctgctggcccggaggtccaaggcagaagagttgggccttcccatccttggggtcctgaggtcctatgcagtggttggggtcccacctgacatcatgggcatcggacctgcctacgccatccctatagctttgcaaaaagcag

SEQ ID NO: 20308 - DNA, 1096 bp, Macaca Mulatta
gggtgaccaaagacgatgccatgctcttaaaaggaaaaggtgacaaggttaaaattgaaaaacgtattcaagaaatcattgagcagttagatgtcacaactagtgaatatgaaaaggaaaaactgaatgaacggctagcaaaactttcagatggagtagctgtgctgaaggttggtgggacaagtgatgttgaagtgaatgaaaagaaagacagagttacagatgcacttaatgctacaagagctgctgttgaagaaggcattgttttgggagggggttgtgccctgcttcgatgcattccagccttggactcattgactccagctaatgaagatcaaaaaattggtatagaaattattaaaagaacactcaaaattccagcaatgaccattgctaagaatgcaggtgttgaaggatctttgatagttgagaaaattatgcagagttcctcagaagttggttatgatgctatggctggagattttgtgaatatggtagaaaaaggaattattgacccaacaaaggttgtgagaactgctttattggatgctgctggtgtggcctctctgttaactacagcagaagttgtcgtcacagaaattcctaaagaagagaaggaccctggaatgggtgcaatgggtgggaatgggaggtgggtaatggggaaggtgggcatgttctaactccttagactagataagtgctttacctttttattaatgaaacttgtgaacaggaagccccaaggcaagtgtttcctccaccaataaccttcagagaagtcagttggagagaaatgaagaaaaaggctggctgaaaatcactataaccatcagttactggtttcagttgacaaaatatataatggtttactgctgttattgtccatgcctacagataatttattttgtatttttggattaaaaaacatttgtacattcctggataatgggtaccagaaccatgtacccaatgtaactgctttcaacttaaattcctgaagcattttttaccaccatttccggttaaaatacgggaattttagtggctgccccccacccagataaaaaaatttaagccacccttttctggggga

SEQ ID NO: 20309 - DNA, 348 bp, Macaca Mulatta
  misc_feature (1)...(348): n = A,T,C or G
agcctccagcacctgaagatcttgcagtagtttgtttcacaagtggaactacagnnnnacaggcaaccccaaaggagcactgatcactcatcgaaacatagtgagcgattgttcagcttttgtgaaagcaacagannnnnnnnnnnnnnnnnnnnnnnnnnnnnnnnnnnnnnnnnnnnnnnnnnnnnnnnnnnnnnnnnnnnnnnnnnnnagtgtgtaatgctgtgtcatggagctaaaatcggatttttccaaggagatatcaggctgctcatggatgacctcaaggtgcttcaacccactgtcttccctgtggttccaagactgctgaaccgtatgtttgaccga

SEQ ID NO: 20310 - DNA, 396 bp, Macaca Mulatta
gctagatcaagagaccctgagagcagagagcaaatcccagtgttgctgatagggcttctgcttctctcgtgtgtgcctcagctctgaagaagttcctgagaatgggttatggatgtcatgttagctgtgagtcttcccacaggtggcacttcaaaaggcagcaccactgggtgccggcacttatttgaaaatggaactttgggagaagtatccttgccagtggctctgtaacttaacagatgacaattaggcttttgtcattgtcgccatcatatggaagataatgtttacatccttttaaacatctttttatatgacagttccttaggatttggtaagccttccaagttgtagcttttaatgtaagtgctgaggtggtaataaaatgttacctcc

SEQ ID NO: 20311 - DNA, 100 bp, Macaca Mulatta
gactacatgcccctgtggttgtactggttcatcacgggcatctccgtcctgctggtgggctccgccatcctgctgatcgtctgcatgacctggaggctag

SEQ ID NO: 20312 - DNA, 361 bp, Macaca Mulatta
  misc_feature (1)...(361): n = A,T,C or G
gttgcctctcccctttcagtagttttcatttgtggtgagattctctcccaggacacaagacatttcctcctctgaaccttatttactaattnnnnnnnnnnnnnnnnnnnnnnnnnnnnntgcaatctcaggcgccggtggtcgttgtgacccaacctggagtcggtctggcaccccagaactccaactggcagacaagcatgtgtgactgcttcagcgactgcggagtctgtngtctctgtggcacattttgtttcccatgccttgggtgtcaagttgcagctgatatgaacgaatgctgtctgtgtggaacgagcgtcgcaatgaggactctctacaggacccgatatggcatccctgn

SEQ ID NO: 20313 - DNA, 2913 bp, Macaca Mulatta
  misc_feature (1)...(2913): n = A,T,C or G
agcctttaacttcctttaggcaaaggaaaggtggctcaacttccagttccccttccagacgccgagggagtcgatcaaggtcacgctccagatcccctggtcgaccacctaaaagtgcccgccgatctgcttctgcttcccaccaggccaacattaaggaagcaaggagggaagtggaagttaaattgactccgctgattctnnnnnnnnnnnnnnnnnnnnnnnnnnnnnnnnnnnnnnnnnnnnnnnnnnnnnnnnnnnnnnnnnnnnnnnnnnnnnnnnnnnnnnnnnnnnnnnnnnnnnnnnnnnnnnnnnnnnnnnnnnnnnnnnnnnnnnnnnnnnnnnnnnnnnnnnnnnnnnnnnnnnnnnnnnnnnnnnnnnnnnnnnnnnnnnnnnnnnnnnnnnnnnnnnnnnnnnnnnnnnnnnnnnnnnnnnnnnnnnnnnnnnnnnnnnnnnnnnnnnnnnnnnnnnnnnnggtgtgtttctcatcatgtttggcctgcctgtgttcctcttcctgttgctgttgatatgtaaacagaaagatcccagtcttctgaatttccctcctcctttgccagctttgtatgagttatgggaaaccagagtatttggggtctacctcctgtggtttttgattcaagtcctgttctacctactgccaattggaaaggnnnnnnnnnnnnnnnnnnnnnnnnnnnnnnnnnnnnnnnnnnnnnnnnnnnnnnnnnnnnnnnnnnnnnnnnnnnnnnnnnnnnnnnnnnnnnnnnnnnnnnnnnnnnnnnnnnnnnnnnnnnnnnnnnnnnnnnnnnnnnnnnnnnnnnnnnnnnnnnnnnnnnnnnnnnnnnnnnnnnnnnnnnnnnnnnnnnnnnnnnnnnnnnnnnnnnnnnnnnnnnnnnnnnnnnnnnnnnnnnnnnnnnnnnnnnnnnnnnnnnnnnnnnnnnnnnnnnnnnnnnnnnnnnnnnnnnnnnnnnnnnnnnnnnnnnnnnnnnnnnnnnnnnnnnnnnnnnnnnnnnnnnnnnnnnnnnnnnnnnnnnnnnnnnnnnnnnnnnnnnnnnnnnnnnnnnnnnnnnnnnnnnnnnnnnnnnnnnnnnnnnnnnnnnnnnnnnnnnnnnnnnnnnnnnnnnnnnnnnnnnnnnnnnnnnnnnnnnnnnnnnnnnnnnnnnnnnnnnnnnnnnnnnnnnnnnnnnnnnnnnnnnnnnnnnnnnnnnnnnnnnnnnnnnnnnnnnnnnnnnnnnnnnnnnnnnnnnnnnnnnnnnnnnnnnnnnnnnnnnnnnnnnnnnnnnnnnnnnnnnnnnnnnnnnnnnnnnnnnnnnnnnnnnnnnnnnnnnnnnnnnnnnnnnnnnnnnnnnnnnnnnnnnnnnnnnnnnnnnnnnnnnnnnnnnnnnnnnnnnnnnnnnnnnnnnnnnnnnnnnnnnnnnnnnnnnnnnnnnnnnnnnnnnnnnnnnnnnnnnnnnnnnnnnnnnnnnnnnnnnnnnnnnnnnnnnnnnnnnnnnnnnnnnnnnnnnnnnnnnnnnnnnnnnnnnnnnnnnnnnnnnnnnnnnnnnnnnnnnnnnnnnnnnnnnnnnnnnnnnnnnnnnnnnnnnnnnnnnnnnnnnnnnnnnnnnnnnnnnnnnnnnnnnnnnnnnnnnnnnnnnnnnnnnnnnnnnnnnnnnnnnnnnnnnnnnnnnnnnnnnnnnnnnnnnnnnnnnnnnnnnnnnnnnnnnnnnnnnnnnnnnnnnnnnnnnnnnnnnnnnnnnnnnnnnnnnnnnnnnnnnnnnnnnnnnnnnnnnnnnnnnnnnnnnnnnnnnnnnnnnnnnnnnnnnnnnnnnnnnnnnnnnnnnnnnnnnnnnnnnnnnnnnnnnnnnnnnnnnnnnnnnnnnnnnnnnnnnnnnnnnnnnnnnnnnnnnnnnnnnnnnnnnnnnnnnnnnnnnnnnnnnnnnnnnnnnnnnnnnnnnnnnnnnnnnnnnnnnnnnnnnnnnnnnnnnnnnnnnnnnnnnnnnnnnnnnnnnnnnnnnnnnnnnnnnnnnnnnnnnnnnnnnnnnnnnnnnnnnnnnnnnnnnnnnnnnnnnnnnnnnnnnnnnnnnnnnnnnnnnnnnnnnnnnnnnnnnnnnnnnnnnnnnnnnnnnnnnnnnnnnnnnnnnnnnnnnnnnnnnnnnnnnnnnnnnnnnnnnnnnnnnnnnnnnnnnnnnnnnnnnnnnnnnnnnnnnnnnnnnnnnnnnnnnnnnnnnnnnnnnnnnnnnnnnnnnnnnnnnnnnnnnnnnnnnnnnnnnnnnnnnnnnnnnnnnnnnnnnnnnnnnnnnnnnnnnnnnnnnnnnnnnnnnnnnnnnnnnnnnnnnnnnnnnnnnnnnnnnnnnnnnnnnnnnnnnnnnnnnnnnnnnnnnnnnnnnnnnnnnnnnnnnnnnnnnnnnnnnnnnnnnnnnnnnnnnnnnnnnnnnnnnnnnnnnnnnnnnnnnnnnnnnnnnnnnnnnnnnnnnnnnnnnnnnnnnnnnnnnnnnnnnnnnnnnnnnnnnnnnnnnnnnnnnnnnnnnnnnnnnnnnnnnnnnnnnnnnnnnnnnnnnnnnnnnnnnnnnnnnnnnnnnnnnnnnnnnnnnnnnnnnnnnnnnnnnnnnnnnnnnnnnnnnnnnnnnnnnnnnnnnnnnnnnnnnnnnnnnnnnnnnnnnnnnnnnnnnnnnnnnnnnnnnnnnnnnnnnnnnnnnnnnnnnnnnnnnnnnnnnnnnnnnnnnnnnnnnnnnnnnnnnnnnnnnnnnnnnnnnnnnnnnnnnnnnnnnnnnnnnnnnnnnnnnnttatatatccgtgatatttacaaaactttactccctgtaaaggagtgctatcttaaaaacaacttaaggggttaaagtcgtttcttttagtttaatagatgtgcataaggtagctttagcaattaaattctagtgaagttgatatag

SEQ ID NO: 20314 - DNA, 175 bp, Macaca Mulatta
tggagaaccctcctccagggtttgggaaagacaaaatcaatcccagactgaagtttctatttacttgctttgtgcctgactaaaaaacgctcatcttgtttgtccctggcagcaaggctataactgaatagtggccaaggaaagggcatcattgcacccaattaaaactgggcat

SEQ ID NO: 20315 - DNA, 3160 bp, Macaca Mulatta
  misc_feature (1)...(3160): n = A,T,C or G
gattttgacttgcaggtccaaatcttgcttggggtccattatgactcccaaaagtttgaccagaggacccagggacaagcctacccctccagatgagcttctacctcaagctatcgaatttgtcaaccaatattacggctccttcaaagaggcaaaaatagaggaacatctggccagggtggaagcggtaacaaaggagatagaaacaacaggaacctaccaactgacgggagatgagctcatcttcgccaccaagcaggcctggcgcaatgccccacgctgcattgggaggatccagtggtccaacctgcaggnnnnnnnnnnnnnnnnnnnnnnnnnnnnnnnnnnnnnnnnnnnnnnnnnnnnnnnnnnnnnnnnnnnnnnnnnnnnnnnnnnnnnnnnnnnnnnnnnnnnnnnnnnnnnnnnnnnnnnnnnnnnnnnnnnnnnnnnnnnnnnnnnnnnnnnnnnnnnnnnnnnnnnnnnnnnnnnnnnnnnnnnnnnnnnnnnnnnnnnnnnnnnnnnnnnnnnnnnnnnnnnnnnnnnnnnnnnnnnnnnnnnnnnnnnnnnnnnnnnnnnnnnnnnnnnnnnnnnnnnnnnnnnnnnnnnnnnnnnnnnnnnnnnnnnnnnnnnnnnnnnnnnnnnnnnnnnnnnnnnnnnnnnnnnnnnnnnnnnnnnnnnnnnnnnnnnnnnnnnnnnnnnnnnnnnnnnnnnnnnnnnnnnnnnnnnnnnnnnnnnnnnnnnnnnnnnnnnnnnnnnnnnnnnnnnnnnnnnnnnnnnnnnnnnnnnnnnnnnnnnnnnnnnnnnnnnnnnnnnnnnnnnnnnnnnnnnnnnnnnnnnnnnnnnnnnnnnnnnnnnnnnnnnnnnnnnnnnnnnnnnnnnnnnnnnnnnnnnnnnnnnnnnnnnnnnnnnnnnnnnnnnnnnnnnnnnnnnnnnnnnnnnnnnnnnnnnnnnnnnnnnnnnnnnnnnnnnnnnnnnnnnnnnnnnnnnnnnnnnnnnnnnnnnnnnnnnnnnnnnnnnnnnnnnnnnnnnnnnnnnnnnnnnnnnnnnnnnnnnnnnnnnnnnnnnnnnnnnnnnnnnnnnnnnnnnnnnnnnnnnnnnnnnnnnnnnnnnnnnnnnnnnnnnnnnnnnnnnnnnnnnnnnnnnnnnnnnnnnnnnnggtagaggcctggaaaacccatgtctggcaggacgagaagcggagacccaagagaagagagattccgttgaaagtcttggtcaannnnnnnnnnnnnnnnnnnnnnnnnnnnnnnnnnnnnnnnnnnnnnnnnnnnnnnnnnnnnnnnnnnnnnnnnnnnnnnnnnnnnnnnnnnnnnnnnnnnnnnnnnnnnnnnnnnnnnnnnnnnnnnnnnnnnnnnnnnnnnnaggttctctgtatggacaagtataagctgagctgcttggaggaggagcagctgctgttggtggtgaccagcacgttccggaatggagactgctctggcaacggagaggtgggtggcctgaggtctggatagtctagagggnnnnnnnnnnnnnnnnnnnnnnnnnnnnnnnnnnnnnnnnnnnnnnnnnnnnnnnnnnnnnnnnnnnnnnnnnnnnnnnnnnnnnnnnnnnnnnnnnnnnnnnnnnnnnnnnnnnnnnnnnnnnnnnnnnnnnnnnnnnnnnnnnnnnnnnnnnnnnnnnnnnnnnnnnnnnnnnnnnnnnnnnnnnnnnnnnnnnnnnnnnnnnggggcctctcagctcacccctatggcgcagatggggacgaactcagtgggcaggaggacgccttccgcacttgggccgtgcaaaccttcaaggnnnnnnnttccaggcagcctgtgagacgtttgatgtccgaggcaaacagcacattcagatccccaagctctacacctccagtgtgacctgggacccacaccactacaggctcgtgcaggactcacagcctttggacctcatcaaagnnnnnnnnnnnnnnnnnnnnnnnnnnnnnnnnnnnnnnnnnnnnnnnnnnnnnnnnnnnnnnnnnnnnnnnnnnnccagccgtgccaccatcctggtggaactctcctgtgaggacggccaaggcctgaactacttgccgggggagcacctcggggtttgtccaggcaaccagcccgccctggtccaaggcatcctggagcgagtggtggacggccccgcaccccaccagacagtgcgacaggaggccctggacgagannnnnnnnnnnnnnnnnnnnnnnnnnnnnnnnnnnnnnnnnnnnnnnnnnnnnnnnnnnnnnnnnnnnnnnnnnnnnnnnnnnnnnnnnnnnnnnnnnnnnnnnnnnnnnnnnnnnnnnnnnnnnnnnnnnnnnnnnnnnnnnnnnnnnnnnnnnnnnnnnnnnnnnnnnnnnnnnnnnnngagtacagcaagtggaagttcaccaatagccccacgttcctggaggtgctggaggagttcccatccctgtgggtgtctactggcttcctgctctcccggctccccattctgaagcccaggttctactccatgagctcctccctggatcacacgcccacaaagatccacctgactgtggctgtggtgatgtcccacacccgannnnnnnnnnnnnnnnnnnnnnnnnnnnnnnnnnnnnnnnnnnnnnnnnnnnnnnnnnnnnnnnnnnnnnnnnnnnnnnnnnnnnnnnnnnnnnnnnnnnnnnnnnnnnnnnnnnnnnnnnnnnnnnnnnnnnnnnnnnnnnnnnnnnnnnnnnnnnnnnnnnnnnnnnnnnnnnnnnnnnnnnnnnnnnnnnnnnnnnnnnnnnnnnnnnnnnnnnnnnnnnnnnnnnnnnnnnnnnnnnnnnnnnnnnnnnnnnnnnnnnnnnnnnnnnnnnnnnnnnnnnnnnnnnnnnnnnnnnnnnnnnnnnnnnnnnnnnnnnnnnnnnnnnnnnnnnnnnnnnnnnnnnnnnnnnnnnnnaggtctatgttcaggacatcctgcggcagcagctggccagcgaggtgctccgtgtgctccacgaggaaccgggccacctctatgtttgcggggatgtgcgcatggcctgggatgtggcccacaccctgaagcagctggtggctgccaagctgaacttgagtgaggagcagatcgaggactatttctttcagctcaa

SEQ ID NO: 20316 - DNA, 489 bp, Macaca Mulatta
  misc_feature (1)...(489): n = A,T,C or G
ggaatcatttccagcaatggaaagagatggaaggagacccgtcgtttctctctcacatccttgcggaattttgggatgggtaagaggagcattgaggaccgtgttcaagaggaagcacgcataccttgtggaggagttgagaaaaaccaagnnnnnnnnnnnnnnnnnnnnnnnnnnnnnnnnnnnnnnnnnnnnnnnnnnnnnnnnnnnnnnnnnnnnnnnnnnnnnnnnnnnnnnnnnnnnnnnnnnnnnnnnnnnnnnnnnnnnnnnnnnnnnnnnnnnnnnnnnnnnnnnnnnnnnnnnnnnnnnnaggtctgcaataatttccctctactcattgattgtttcccaggaactcacaacaaattgcttaaaaatgttgctcttacaaaaagttacattaggaagaaagtaaaagaacaccaagcaacactggatgttaacaatcctcgggactttatcgattgcttcctgatcaaaatggagcag

SEQ ID NO: 20317 - DNA, 1328 bp, Macaca Mulatta
  misc_feature (1)...(1328): n = A,T,C or G
annnannnnnnnnnnnnnnnnnnnnnnnnnnnnnnnnnnnnnnnnnnnnnnnnnnnnnnnnnnnnnnnnnnnnnnnnnnnnnnnnnnnnnnnnnnnnnnnnnnnnnnnnnnnnnnnnnnnnnnannnnnnnnnnnnnnnnnnnnnaaggatttccgannnnnnnnnnnnnnnnnnnnnnnnnnnnnnnnnnnnnnnnnnnnnnnnnnnnnnnnnnnnnnnnnnnnnnnnnnnnnnnnnnnnnnnnnnannnnnnnnnnnnnnnnnnnnnnnnnnnnnnnnnnnnnnnnnnnnnnnnnnnnnnnnnnnnnnnnnnnnnnnnnnnnnnnngattaagttggtaacgctccagggtttccagtcacgaccgttgtaaaacgtcggccagtgaattgtgactatcctcacaattggatgtctcnnnnttacctccccctggcgagtttctttgtttttttgttgatgatacaacttaattttattaggacaaggctggtgggcactggagtggcaccttccggggccaggagaggcactggggaggggtcacaggatgccacacgggcacctagaagccacagctgccctccacagtgcggcactgcaccatgcgcaggaatgtctcgaccatatccatgtccttcctgaagcagtggagcagcccgtagttcttgagcagtgagtcatcgttctgtgagtctgtgtcaaacgtgctgtaggtctgcttgaagatctgcccagtccgggggctgccatcttccagcctccgcatcaacgtttggatgccttcctctaggttctttaggaggtcatagacgtcgctgtccgaggtgccatacaccaggttgttggcaaacacactcctgaggaactgcacgggctccagccacgactggatgagaagcagggagatgcggagcagctctaggttggatttctgctgcgtttcctccatgttggagggtgtgggaatagactctgagaagcagaaggaggcctgggggttccccatgagcgaatgcttcttttcctttgggatataggcttcttcaaactcctggtaggtgtcaaaggccagttggtgcaggcgatgggcttggatcatagcgttgtcaaaaagcctggataagggtacgcttgggaccctaccagcctcttgaagccaaggcaggcagaggagggcaaaaaccaggagcagggatgtccgggagcctgcagccattgcagctaggcgggctgtccacaggacccctgagtggtgcctgtcctggccccggaaggttcaactcgagtgtccaccaacctgtcctggataaaattaagttgtatc

SEQ ID NO: 20318 - DNA, 1988 bp, Macaca Mulatta
  misc_feature (1)...(1988): n = A,T,C or G
agggctgagtatcttcacgggaaacatggagtggatgtggaagtccaggggccccatgaagcccgagatgggcagctccttatccgcctggatttgaaccgcaaagaggtgctgaccctgaggcttcggaatggcggaacccagtctgttaccctcactcacctcttcccactttgccggacaccccagtttgctttctacaatgaagaccaggagttgccctgtccactgggccctggtganggtgaatgctatgaactccatgtccattgtaagaccagctttgtgggctacttcccagccaccgtgctctgggagctgctgggacctggggagtcgggttcagaaggagccggcacattctacattgcccgcttcttggctgccgtcgcccacagccccctggctgcacagctgaagcccatgactcccttcaagcggacccggatcactggaaaccctgtggtgaccaatcggatagaggaaggagagagacctgaccgnnnnnnnnnnnnnnnnnnnnnnnnnnnnnnnnnnnnnnnnnnnnnnnnnnnnnnnnnnnnnnnnnnnnnnnnnnnnnnnnnnnnnnnnnnnnnnnnnnnnnnnnnnnnnnnnnnnnnnnnnnnnnnnnnnnnnnnnnnnnnnnnnnnnnnnnnnnnnnnnnnnnnnnnnnnnnnnnnnnnnnnnnnnnnnnnnnnnnnnnnnnnnnnnnnnnnnnnnnnnnnnnnnnnnnnnnnnnnnnnnnnnnnnnnnnnnnnnnnnnnnnnnnnnnnnnnnnnnnnnnnnnnnnnnnnnnnnnnnnnnnnnnnnnnnnnnnnnnnnnnnnnnnnnnnnnnnnnnnnnnnnnnnnnnnnnnnnnnnnnnnnnnnnnnnnnnnnnnnnnnnnnnnnnnnnnnnnnnnnnnnnnnnnnnnnnnnnnnnnnnnnnnnnnnnnnnnnnnnnnnnnnnnnnnnnnnnnnnnnnnnnnnnnnnnnnnnnnnnnnnnnnnnnnnnnnnnnnnnnnnnnnnnnnnnnnnnnnnnnnnnnnnnnnnnnnnnnnnnnnnnnnnnnnnnnnnnnnnnnnnnnnnnnnnnnnnnnnnnnnnnnnnnnnnnnnnnnnnnnnnnnnnnnnnnnnnnnnnnnnnnnnnnnnnnnnnnnnnnnnnnnnnnnnnnnnnnnnnnnnnnnnnnnnnnnnnnnnnnnnnnnnnnnnnnnnnnnnnnnnnnnnnnnnnnnnnnnnnnnnnnnnnnnnnnnnnnnnnnnnnnnnnnnnnnnnnnnnnnnnnnnnnnnnnnnnnnnnnnnnnnnnnnnnnnnnnnnnnnnnnnnnnnnnnnnnnnnnnnnnnnnnnnnnnnnnnnnnnnnnnnnnnnnnnnnnnnnnnnnnnnnnnnnnnnnnnnnnnnnnnnnnnnnnnnnnnnnnnnnnnnnnnnnnnnnnnnnnnnnnnnnnnnnnnnnnnnnnnnnnngccctgctgcaactgggacgcaaagaagggggagtatgtatttcccgccaagaagaagctgcaggaataccgggtcttaattaccaccctcatcactgctggcaggtncaggttggtctcggcccagtttcccattgatcacttcacacacatcttcatcgatgaggctggccactgcatggnnnnnnnnnnnnnnnnnnnnnnnnnnnnnnnnnnnnnnnnnnnnnnnnnnnnnnnnnnnnnnnnnnnnnnnnnnnnnnnnnnnnnnnnnnnnnnnnnnnnnnnnnnnnnnnnnnnnnnnnnnnnnnnnnnnnnnnnnnnnnnnnnnnnnnnnnnnnnnnnnnnnnnnnnnnnnnnnnnnnnnnnnnnnnnnnnnnnnnnnnnnnnnnnnnnnnnnnnnnnnnnnnnnnnnnnnnnnnnnnncaggtctcatcccaccatcctggacattcctaaccagctctattatgaaggggagctgcaggcctgtgctgatgtcgtggatcgagaacgcttctgccgctgggcaggcctgcctcgacag

SEQ ID NO: 20319 - DNA, 200 bp, Macaca Mulatta
agaatttttccctagattggtgtaaacagccagacgtgggccttcccaaacccgacctggtcctgttcctccagttacagttggcagatgctgccaagcggggagcgtatggccatgagcgctacgagaacagggctttccaggagcgggccctccagtgtttccaccagctcatgagagacacgactttgaactggaag

SEQ ID NO: 20320 - DNA, 767 bp, Macaca Mulatta
  misc_feature (1)...(767): n = A,T,C or G
gggagtcggggagggccgcgcagtcggaccggctgctgagacgaacgcttctctggggcagtctccgcatatcatggggagatagacgctgctgcctttaattggccttggtcctcacagctccaaaaagaaacaggatctcgataagctctatgagctgaagtccaaagctcggcagattatgaaccagtttggcccctcagccctaatcaacctctccaatttctcatccataaaaccggaaccagccagcacccctccacaaggctccatggccaacagtactacagtggtaaagataccaggcactcctgggacaggaggtcgtcttagccctgaaaacaatcaggtattgaccaagaagaaattacaggacttagtaagagaagtggatcctaatgagcagttggatgaagatgtggaggagatgctgctgcagattgctgatgattttatcgagagtgtggtgacagcagcctgtcagcttgcgcggcatcgcaagtccagcaccctggaggtgaaagatgtccagctgcatttagagcgccagtggaacatgtggatcccaggatttggctctgaagaaatccgaccctacaaaaaagcttgcaccacagaagctcacaaacagagaatggcattgatccggaaaaacaacaagaaataacacacgggaaaggtcangggaatggacaacaatgtatttgggagataactttgaactgaagaactcangccatctcatcctttgggattttttttttnta

SEQ ID NO: 20321 - DNA, 139 bp, Macaca Mulatta
actttcagtgcctggactgcgttgaatgatgtcaattcagaacacacgttcctttggacccttggacgaggagttcattacacaaactgggggaaaggttaccccggtggaagaagaagcagtctttcttatgaagatg

SEQ ID NO: 20322 - DNA, 394 bp, Macaca Mulatta
cctgaagatgttcgtggacacgaaccccgacggcgacaagatcatctacacgaagaacatccgtttcgtgctcgcggccgtgaagggcaccatcctgcagctcaacctcaaggagcacaacccggtctgaaagcgcccaggcccagggagaccggacggagacaagggcccggacaaactttccttcacaccgagcccgcggctgccgccgggtggcgctgctgagcccggtccggggcctctgcctgcggaggagttgtctttgttttgtttgttttttaatatttttaacaaatggtttttatttcacagttgtcaggggatgtatatctctccgaacacttcgcgcgccttctcaccttttgtcaacgggcaaaggcagcctttttccggc

SEQ ID NO: 20323 - DNA, 796 bp, Macaca Mulatta
cccttataggggggccggagcccttcatgaaggggatttagagcccccccttaggagaggcccccagagacccccccttgcctttttttcccctaagagggtgcaaggccaaaggcccttttttaaccaggaagttggacccttcagcagacaccaaattctgcccaatatcttgatttcagatttcccgtccctaaaaagccatgagaaataaatttctggtgtttataagccaccaatccaaggtattttgttacagccgaatggactaagacaccatgagagacaaagtagactaatggttgcctggggcttggtggtgttgggagggtgagaaaatgaggagtttctgctaatggatacagggcttgttcttgagggatgaaaatattctgagagtagcacacaggtctgtgaatatactaaaaaccactgaactgtataccttaaaggagtggattttatggtatgtgaattatatatcaataaagttgttaaagatgtatcatgaacatttcacagctcattacatgcaaactagtgcattcttttacgtagttgcaaaacaatattctgtattctgcatctggtacaatttattttagcatttttatgttaattgcattctattttgtttttccagttttttgctattaacaatgctccaataaaatactactgtaggtaaatgtttttgcctaagttagataagtaccactaaaattgttgaattaaattgtatgtacatatttaattttaatagatgctgctagattgatttacaaaatgaaaagcc

SEQ ID NO: 20324 - DNA, 1213 bp, Macaca Mulatta
  misc_feature (1)...(1213): n = A,T,C or G
acctggaacctggaaccatggacagtgtccgctcaggggcctttggacatcttttcaggcctgacaatttcatcttnnnnnnnnnnnnnnnnnnnnnnnnnnnnnnnnnnnnnnnnnnnnnnnnnnnnnnnnnnnnnnnnnnnnnnnnnnnnnnnnnnnnnnnnnnnnnnnnnnnnnnnnnnnnnnnnnnnnnnnnnnnnnnnnnnnnnnnnnnnnnnnnnnnnnnnnnnnnnnnnnnnnnnnnnnnnnnnnnnnnnnnnnnnnnnnnnnnnnnnnnnnnnnnnnnnnnnnnnnnnnnnnnnnnnnnnnnnnnnnnnnnnnnnnnnnnnnnnnnnnnnnnnnnnnnnnnnnnnnnnnnnnnnnnnnnnnnnnnnnnnnnnnnnnnnnnnnnnnnnnnnnnnnnnnnnnnnnnnnnnnnnnnnnnnnnnnnnnnnnnnnnnnnnnnnnnnnnnnnnnnnnnnnnnnnnnnnnnnnnnnnnnnnnnnnnnnnnnnnnnnnnnnnnnnnnnnnnnnnnnnnnnnnnnnnnnnnnnnnnnnnnnnnnnnnnnnnnnnnnnnnnnnnnnnnnnnnnnnnnnnnnnnnnnnnnnnnnnnnnnnnnnnnnnnnnnnnnnnnnnnnnnnnnnnnnnnnnnnnnnnnnnnnnnnnnnnnnnnnnnnnnnnnnnnnnnnnnnnnnnnnnnnnnnnnnnnnnnnnnnnnnnnnnnncctgtgacccgcgccacggccgctacctgacggtggccactgtgttccgggtccgcatgtccatgaaggaggtggatgagcagatgctggccatccagagcaagaacagcagctacttcgtggagtggatccccaacaatgtgaaggtggccgtgtgtgacatcccgccccgtggcctcaagatgtcctccacgttcatcgggaacagcacgaccatccaggagctgttcaagcgcatctccgagcagttcacggccatgttccggaacaaaaacattcctgcagtggtacacgggcgagggcatggacgagatggagttcaccgaggccgagagcaacatgaacgacctggtgtccgagtaccagcaataccaggacgccacgtccgaggaggagggcgagatgtacgaagacgacgaggaggagtcggaggcccagggccccaagtgaagctgctcgcagctggagtgagaaacaggtggcggccggggccaaggtcagcagtgtc

SEQ ID NO: 20325 - DNA, 807 bp, Macaca Mulatta
ggggcaggcttggctgcgccctctcgcgccgcacgctccgcgggttcctccctcctttcgagcctctaccctggccgccgcgcgggagagaggccgagatggcagatgagattgccaaggctcaggtcgctcggcctggtggcgacacgatcttcgggaagatcatccgcaaggaaataccagccaaaatcatttttgaggatgaccagtgccttgctttccacgacatttcccctcaagcaccaacacattttctggtgatacccaagaaacatatatcccagatttctgcagcagaagatgatgatgaaagtcttcttggacacttaatgattgttggcaagaaatgtgctgctgatctgggcctgaataagggttaacgaatggtggtgaatgaaagtccagatgggggacagtctgtctatcacgttcatctcctggttcttggaggtccgcagatgcattggcctcctggttaaacacgttttggggataattttcacttctccaggcaatgaataagttaggcaagttccagtattgttaagtaacacacttacttttggctgggtaaaggggaaaatttccgaagataattttaaaaaccaccttcactaattaaaaaaactttgattgcaatggtcctcctaaagaaatcataaagagagatgaacagaaaatccttgttggggccgcccctgggacccctgagaaaatgtttttctaaaaacatatccgtttttgctcccaccaggtccctattaggctataatggaacacagggcattaaaccgtatttcacaaaga

SEQ ID NO: 20326 - DNA, 640 bp, Macaca Mulatta
  misc_feature (1)...(640): n = A,T,C or G
tcccatgcgggtagctggctctggctgcgcccccaaggcgaagacccgccctgggcacgctggcctgtgacggagcctgaggtcacagccccgtgactagcctgagaccttcctaggggctgtggctgtttccggggaggccgggaggggcagctgtgagccccgtggaggacgctgggagtaacgctgctttgctttggcaggttgaaggggcccggccaggactcggggaagggtggcctgagagcagcgatgacctctggggtcactgtcccaggagggacttcacctgcaacaagagctggaggcagccgcttgccccggaggcttgtcccctgtaagtgctttcgggaagagtggcatgtggcgctgagccctgtcccgggcggaacctgggcgttccagtgagtcctgctttcctgcacctgtggccccgcggcgggcgcctttcggtgtgtgtggggtgccggacagcgcctcccgnnnnnnnnnnnnnnnnnnnnnnnnnnnnnnnnnnnnnnnnnnnnnnncctcctccctccaggaggcgcttcccgagcgaggtgcgggctcagggcctcaagtctctcctggaggacgggctgcggtgcgctggcggcttgcggggcggccagtcctt

SEQ ID NO: 20327 - DNA, 767 bp, Macaca Mulatta
gactacttttccaaatttggtgaagttgtagactgcactctgaagttagatcctatcacagggcgatcaaggggttttggctttgtgctatttaaagaatcggagagtgtagataaggtcatggatcaaaaagaacataaattgaatgggaaggtgattgatcctaaaagggccaaagccatgaaaacaaaagagccggttacaaaaatttttgttggtggcctttctccagatacacctgaagagaaaataagagagtactttggtggttttggtgaggtggaatccatagagctccccatggacaacaagaccaataagaggcgtggattctgctttattacttttaaggaagaagaaccagtgaagaagataatggaaaagaaataccacaatgttggtcttagtaaatgtgaaataaaagtagccatgtccgaaggaacaatatcagcaacagcaacagtgggggatctagaggaggatttgcaggaagagctcgtggaagaggtggtggccccagtcaaaactggaaccacgggatatagtaacctattggaatcaggggtgatggaaactatggatataacaggcaaggttagcggtgggttgtgggaggatatgaatggcacctggtttcaacggctacctatggaatatggtggattatggcaaccagcaggaagtgggttatgggaaagggtgtccaaggcgagggggtcatgcagaatagcctacaaaccatactgaaattattccatcacgcggac

SEQ ID NO: 20328 - DNA, 393 bp, Macaca Mulatta
ctaaataaataatttcataagcatatacaatctgcttcccactaagaattagggtcaaggacattctgcttgaacacttggaattacccagatttggttggcctttggttgatagatcctctgcctcagaatttcattgagttttttccttccttgcctttggggggtctacttgccacttcctaagaattcttgtagaaagcagttccttctacttgcccaagagcactgagtacttctctactatcctattgttagcttctatctcttagtgtaacttcaaaacttttaagagcagtggagttggtcagggacatgtggccacttattattacctaaagaaaacatttgttccctattcattttattttagggaccagatctaacattgta

SEQ ID NO: 20329 - DNA, 168 bp, Macaca Mulatta
aggtgatagaagtattcattagagcagaagatggcctttgtagagaggtggtaaaacaccttaatcagatcgaagaacagatcttagatcatttggcatggaaaccagagtctccactctgggaaaaaattagagacaatgaaaacagagttcctacatgtgaagagg

SEQ ID NO: 20330 - DNA, 125 bp, Macaca Mulatta
ggcatcccgggcccaaatcctagacaaagccacagagtatatccagtatatgcgaaggaaaaaccacacacaccagcaagatattgacgacctcaagcggcagaatgctcttctggagcagcaag

SEQ ID NO: 20331 - DNA, 1503 bp, Macaca Mulatta
  misc_feature (1)...(1503): n = A,T,C or G
gccagctgtacctggccccagtgccctttcgcggccacaggcggccgtcctcctgctcttgtgctccggcgcctgatctgggttcatggagccggggctgtggctccttttcgggctcacagtgacctctgccgcaggngcaggattggtgccttgctcccagtctggggatgctggcaggcgcggcgtgtcccaggtccccactgcagccagatctgagggcgactgtgaagagactgtggctggccctggtgaggggactgtggcnnnnnnnnnnnnnnnnnnnnnnnnnnnnnnnnnnnnnnnnnnnnnnnnnnnnnnnnnnnnnnnnnnnnnnnnnnnnnnnnnnnnnnnnnnnnnnnnnnnnnnnnnnnnnnnnnnnnnnnnnnnnnnnnnnnnnnnnnnnnnnnnnnnnnnnnnnnnnnnnnnnnnnnnnnnnnnnnnnnnnnnnnnnnnnnnnnnnnnnnnnnnnnnnnnnnnnnnnnnnnnnnnnnnnnnnnnnnnnnnnnnnnnnnnnnnnnnnnnnnnnnnnnnnnnnnnnnnnnnnnnnnnnnnnnnnnnnnnnnnnnnnnnnnnnnnnnnnnnnnnnnnnnnnnnnnnnnnnnnnnnnnnnnnnnnnnnnnnnnnnnnnnnnnnnnnnnnnnnnnnnnnnnnnnnnnnnnnnnnnnnnnnnnnnnnnnnnnnnnnnnnnnnnnnnnnnnnnnnnnnnnnnnnnnnnnnnnnnnnnnnnnnnnnnnnnnnnnnnnnnnnnnnnnnnnnnnnnnnnnnnnnnnnnnnnnnnnnnnnnnnnnnnnnnnnnnnnnnnnnnnnnnnnnnnnnnnnnnnnnnnnnnnnnnnnnnnnnngcaggaaattgtttttggagaggtttggcaagttggaaagccacttactggcttttgacatgacttctcttggagaataagtggactccaagctaactctttgcaaatgtaaacacgtgtccatcttgaaataaatgcaaaatgcccatgcaacagaagcatgtgactttcatatccttgcctagaatatgctgcatgggttatgtcagtgagggccacgagcagcagctttagacacagatcatagctctacaggagtttatgaatttgaagcttatgggattttgtcagagaaattttcagctgtgcttgatacccaccaaaagaatgtatctcaaaagaatgaaggaagaagaaaaaaggatccttgatgtttatgacaagaaaaggagaaagtatctgcaatacggagcttgttcctattcagtgactgaccctctgtattctgtatagacaccaggacgctacacaatggagttcccaggccttgtttgcaggaagccgactataaagacagccccagctcaaggctattaggttgaatatttgctttcatgaataaatgtggatctttggggaatggcttcaaaataagtcatgaacacaaattctttgtaaattatgtaaattcctgtttatctatataaattggcaacaac

SEQ ID NO: 20332 - DNA, 793 bp, Macaca Mulatta
gggactcggtgaggcagtggcgacagccgcggcgagaggatgaacaacaagttcgacgctttgaaagatgatgacagtggggaccatgatcagaatgaagaaaacagcacacagaaagatggtgagaaggaaaaaacggaacgagacaagaatcagagcagtagcaagagaaaggctgttgttcctggaccagcagagcatcccctgcagtacaactacactttttggtactccaggagaacccccggccgtcccaccagctcacagagctatgaacagaatatcaaacagattggcacctttgcctctgtggagcagttctggaggttttatagccacatggtacgtcccggggacctgacaggccacagtgacttccatctctttaaagaaggaattaaacccatgtgggaggatgatgcaaataaaaatggtggcaagtggattattcggctgcggaagggcttggcctcccgttgctgggagaatctcattttggccatgctgggggaacagttcatggttggggaggagatctgtggggctgtggtgtctgtccgctttcagggagacattatttcaatatggaataagactgccagtgaccaagcaacccaagcccgaaatcccgggacacactttcggcgaagtgctttaaccttacctccccaaacaccttatgggaaacaaaactcccacccgacagcattcaaaatgcccaggcagggcttgggcccccccaaaaggcttcctttttttccaaaccttctgggaaacccccgggttggaatgg

SEQ ID NO: 20333 - DNA, 2584 bp, Macaca Mulatta
  misc_feature (1)...(2584): n = A,T,C or G
agagtttcgtgagtgctcacagctcatccctgtggctgtgtctccgtggccacagctgattggcgtcgccttgaaatcccaggccgtgaggagtgagcgagccctgctcacgctcggcgctgttgttttcagtgggtgtgccctgcacctgcgtctttcccnnnnnnntaataaaggtatccatggagaacactgaaaactcagtggattcaaaatccattaaaagtttggaaccnnnnnnnnnnnnnnnnnnnnnnnnnnnnnnnnnnnnnnnnnnnnnnnnnnnnnnnnnnnnnnnnnnnnnnnnnnnnnnnnnnnnnnnnnnnnnnnnnnnnnnnnnnnnnnnnnnnnnnnnnnnnnnnnnnnnnnnnnnnnnnnnnnnnnnnnnnnnnnnnnnnnnnnnnnnnnnnnnnnnnnnnnnnnnnnnnnnnnnnnnnnnnnnnnnnnnnnnnnnnnnnnnnnnnnnnnnnnnnnnnnnnnnnnnnnnnnnnnnnnnnnnnnnnnnnnnnnnnnnnnnnnnnnnnnnnnnnnnnnnnnnnnnnnnnnnnnnnnnnnnnnnnnnnnnnnnnnnnnnnnnnnnnnnnnnnnnnnnnnnnnnnnnnnnnnnnnnnnnnnnnnnnnnnnnnnnnnnnnnnnnnnnnnnnnnnnnnnnnnnnnnnnnnnnnnnnnnnnnnnnnnnnnnnnnnnnnnnnnnnnnnnnnnnnnnnnnnnnnnnnnnnnnnnnnnnnnnnnnnnnnnnnnnnnnnnnnnnnnnnnnnnnnnnnnnnnnnnnnnnnnnnnnnnnngttattattcttggcgaaattcaaaggatggctcctggttcatccagtcgctttgtgccatgctgaaacagtacgccgacaagcttgaatttatgcacattcttacccgggttaaccgaaaggtggcaacagaatttgagtccttttcccttgatgctacttttcatgcaaagaaacagattccatgtattgtttccatgctcacaaaagaactgtatttttatcactaaagaaatggttggttggtggtttttttcagtttgtatgccaagtgagaagacggtatatttggtacttatttccctctcattttgacctagtctcatactgcagagggtactttaagtcatactccttccatcannnnnnnnnnnnnnnnnnnnnnnnnnnnnnnnnnnnnnnnnnnnnnnnnnnnnnnnnnnnnnnnnnnnnnnnnnnnnnnnnnnnnnnnnnnnnnnnnnnnnnnnnnnnnnnnnnnnnnnnnnnnnnnnnnnnnnnnnnnnnnnnnnnnnnnnnnnnnnnnnnnnnnnnnnnnnnnnnnnnnnnnnnnnnnnnnnnnnnnnnnnnnnnnnnnnnnnnnnnnnnnnnnnnnnnnnnnnnnnnnnnnnnnnnnnnnnnnnnnnnnnnnnnnnnnnnnnnnnnnnnnnnnnnnnnnnnnnnnnnnnnnnnnnnnnnnnnnnnnnnnnnnnnnnnnnnnnnnnnnnnnnnnnnnnnnnnnnnnnnnnnnnnnnnnnnnnnnnnnnnnnnnnnnnnnnnnnnnnnnnnnnnnnnnnnnnnnnnnnnnnnnnnnnnnnnnnnnnnnnnnnnnnnnnnnnnnnnnnnnnnnnnnnnnnnnnnnnnnnnnnnnnnnnnnnnnnnnnnnnnnnnnnnnnnnnnnnnnnnnnnnnnnnnnnnnnnnnnnnnnnnnnnnnnnnnnnnnnnnnnnnnnnnnnnnnnnnnnnnnnnnnnnnnnnnnnnnnnnnnnnnnnnnnnnnnnnnnnnnnnnnnnnnnnnnnnnnnnnnnnnnnnnnnnnnnnnnnnnnnnnnnnnnnnnnnnnnnnnnnnnnnnnnnnnnnnnnnnnnnnnnnnnnnnnnnnnnnnnnnnnnnnnnnnnnnnnnnnnnnnnnnnnnnnnnnnnnnnnnnnnnnnnnnnnnnnnnnnnnnnnnnnnnnnnnnnnnnnnnnnnnnnnnnnnnnnnnnnnnnnnnnnnnnnnnnnnnnnnnnnnnnnnnnnnnnnnnnnnnnnnnnnnnnnnnnnnnnnnnnnnnnnnnnnnnnnnnnnnnnnnnnnnnnnnnnnnnnnnnnnnnnnnnnnnnnnnnnnnnnnnnnnnnnnnnnnnnnnnnnnnnnnnnnnnnnnnnnnnnnnnnnnnnnnnnnnnnnnnnnnnnnnnnnnnnnnnnnnnnnnnnnnnnnnnnnnnnnnnnnnnnnnnnnnnnnnnnnnnnnnnnnnnnnnnnnnnnnnnnnnnnnnnnnnnnnnnnnnnnnnnnnnnnnnnnnnnnnnnnnnnnnnnnnnnnnnnnnatccagccgcaggccagagctgagcacccagcctgggaggcaagctccaggcctcacatgtgctgagccgtcactcaccaagtctcactggcttccagtctgacatttcacgggagatttcttgttgctcaaaaaatgaactcgcatttgtcaatgactgtttttcttactagatctgtaacttttctaaatacacatagcatgtaatggtatctcattaaagtgtgttcctgtgtgacaattttgtacaaatttgctattttccatttttatttcaaaatacacattcaaacttaaaat

SEQ ID NO: 20334 - DNA, 6377 bp, Macaca Mulatta
  misc_feature (1)...(6377): n = A,T,C or G
acactccacagccggctcctgagtgaccagactcggctgaaggatgacgtggacatgctgaggcgggagaatgggcagctgctgcgggagcgaaacctgctgcagcagtcgtgggaggacatgaagcggctccacgaggaagaccagaaggagatcggtgacctccgtgcccagcagcagcaggtnnnnnnnnnnnnnnnnnnnnnnnnnnnnnnnnnnnnnnnnnnnnnnnnnnnnnnnnnnnnnnnnnnnnnnnnnnnnnnnnnnnnnnnnnnnnnnnnnnnnnnnnnnnnnnnnnnnnnnnnnnnnnnnnnnnnnnnnnnnnnnnnnnnnnnnnnnnnnnnnnnnnnnnnnnnnnnnnnnnnnnnnnnnnnnnnnnnnnnnnnnnnnnnnnnnnnnnnnnnnnnnnnnnnnnnnnnnnnnnnnnnnnnnnnnnnnnnnnnnnnnnnnnnnnnnnnnnnnnnnnnnnnnnnnnnnnnnnnnnnnnnnnnnnnnnnnnnnnnnnnnnnnnnnnnnnnnnnnnnnnnnnnnnnnnnnnnnnnnnnnnnnnnnnnnnnnnnnnnnnnnnnnnnnnnnnnnnnnnnnnnnnnnnnnnnnnnnnnnnnnnnnnnnnnnnnnnnnnnnnnnnnnnnnnnnnnnnnnnnnnnnnnnnnnnnnnnnnnnnnnnnnnnnnnnnnnnnnnnnnnnnnnnnnnnnnnnnnnnnnnnnnnnnnnnnnnnnnnnnnnnnnnnnnnnnnnnnnnnnnnnnnnnnnnnnnnnnnnnnnnnnnnnnnnnnnnnnnnnnnnnnnnnnnnnnnnnnnnnnnnnnnnnnnnnnnnnnnnnnnnnnnnnnnnnnnnnnnnnnnnnnnnnnnnnnnnnnnnnnnnnnnnnnnnnnnnnnnnnnnnnnnnnnnnnnnnnnnnnnnnnnnnnnnnnnnnnnnnnnnnnnnnnnnnnnnnnnnnnnnnnnnnnnnnnnnnnnnnnnnnnnnnnnnnnnnnnnnnnnnnnnnnnnnnnnnnnnnnnnnnnnnnnnnnnnnnnnnnnnnnnnnnnnnnnnnnnnnnnnnnnnnnnnnnnnnnnnnnnnnnnggaacagatggaatcccagttggaaaaggaggcccggttccggcagctgatggcccacagctcccacgactcggccattgacacggattccatggagtgggaaacggaagttgtagagtttgagagggagacgnnnnnnnnnnnnnnnnnnnnnnnnnnnnnnnnnnnnnnnnnnnnnnnnnnnnnnnnnnnnnnnnnnnnnnnnnnnnnnnnnnnnnnnnnnnnnnnnnnnnnnnnnnnnnnnnnnnnnnnnnnnnnnnnnnnnnnnnnnnnnnnnnnnnnnnnnnnnnnnnnnnnnnnnnnnnnnnnnnnnnnnnnnnnnnnnnnnnnnnnnnnnnnnnnnnnnnnnnnnnnnnnnnnnnnnnnnnnnnnnnnnnnnnnnnnnnnnnnnnnnnnnnnnnnnnnnnnnnnnnnnnnnnnnnnnnnnnnnnnnnnnnnnnnnnnnnnnnnnnnnnnnnnnnnnnnnnnnnnnnnnnnnnnnnnnnnnnnnnnnnnnnnnnnnnnnnnnnnnnnnnnnnnnnnnnnnnnnnnnnnnnnnnnnnnnnnnnnnnnnnnnnnnnnnnnnnnnnnnnnnnnnnnnnnnnnnnnnnnnnnnnnnnnnnnnnnnnnnnnnnnnnnnnnnnnnnnnnnnnnnnnnnnnnnnnnnnnnnnnnnnnnnnnnnnnnnnnnnnnnnnnnnnnnnnnnnnnnnnnnnnnnnnnnnnnnnnnnnnnnnnnnnnnnnnnnnnnnnnnnnnnnnnnnnnnnnnnnnnnnnnnnnnnnnnnnnnnnnnnnnnnnnnnnnnnnnnnnnnnnnnnnnnnnnnnnnnnnnnnnnnnnnnnnnnnnnnnnnnnnnnnnnnnnnnnnnnnnnnnnnnnnnnnnnnnnnnnnnnnnnnnnnnnnnnnnnnnnnnnnnnnnnnnnnnnnnnnnnnnnnnnnnnnnnnnnnnnnnnnnnnnnnnnnnnnnnnnnnnnnnnnnnnnnnnnnnnnnnnnnnnnnnnnnnnnnnnnnnnnnnnnnnnnnnnnnnnnnnnnnnnnnnnnnnnnnnnnnnnnnnnnnnnnnnnnnnnnnnnnnnnnnnnnnnnnnnnnnnnnnnnnnnnnnnnnnnnnnnnnnnnnnnnnnnnnnnnnnnnnnnnnnnnnnnnnnnnnnnnnnnnnnnnnnnnnnnnnnnnnnnnnnnnnnnnnnnnnnnnnnnnnnnnnnnnnnnnnnnnnnnnnnnnnnnnnnnnnnnnnnnnnnnnnnnnnnnnnnnnnnnnnnnnnnnnnnnnnnnnnnnnnnnnnnnnnnnnnnnnnnnnnnnnnnnnnnnnnnnnnnnnnnnnnnnnnnnnnnnnnnnnnnnnnnnnnnnnnnnnnnnnnnnnnnnnnnnnnnnnnnnnnnnnnnnnnnnnnnnnnnnnnnnnnnnnnnnnnnnnnnnnnnnnnnnnnnnnnnnnnnnnnnnnnnnnnnnnnnnnnnnnnnnnnnnnnnnnnnnnnnnnnnnnnnnnnnnnnnnnnnnnnnnnnnnnnnnnnnnnnnnnnnnnnnnnnnnnnnnnnnnnnnnnnnnnnnnnnnnnnnnnnnnnnnnnnnnnnnnnnnnnnnnnnnnnnnnnnnnnnnnnnnnnnnnnnnnnnnnnnnnnnnnnnnnnnnnnnnnnnnnnnnnnnnnnnnnnnnnnnnnnnnnnnnnnnnnnnnnnggaacagaagtgtgtcccagccagtggagaactctccccggagctccaggagtgggcaccttactcacctgggtattccagccggcatagcaaccccccgctataccctagcaggccgtctgtgggnnnnnnnnnnnnnnnnnnnnnnnnnnnnnnnnnnnnnnnnnnnnnnnnnnnnnnnnnnnnnnnnnnnnnnnnnnnnnnnnnnnnnnnnnnnnnnnnnnnnnnnnnnnnnnnnnnnnnnnnnnnnnnnnnnnnnnnnnnnnnnnnnnnnnnnnnnnnnnnnnnnnnnnnnnnnnnnnnnnnnnnnnnnnnnnnnnnnnnnnnnnnnnnnnnnnnnnnnnnnnnnnnnnnnnnnnnnnnnnnnnnnnnnnnnnnnnnnnnnnnnnnnnnnnnnnnnnnnnnnnnnnnnnnnnnnnnnnnnnnnnnnnnnnnnnnnnnnnnnnnnnnnnnnnnnnnnnnnnnnnnnnnnnnnnnnnnnnnnnnnnnnnnnnnnnnnnnnnnnnnnnnnnnnnnnnnnnnnnnnnnnnnnnnnnnnnnnnnnnnnnnnnnnnnnnnnnnnnnnnnnnnnnnnnnnnnnnnnnnnnnnnnnnnnnnnnnnnnnnnnnnnnnnnnnnnnnnnnnnnnnnnnnnnnnnnnnnnnnnnnnnnnnnnnnnnnnnnnnnnnnnnnnnnnnnnnnnnnnnnnnnnnnnnnnnnnnnnnnnnnnnnnnnnnnnnnnnnnnnnnnnnnnnnnnnnnnnnnnnnnnnnnnnnnnnnnnnnnnnnnnnnnnnnnnnnnnnnnnnnnnnnnnnnnnnnnnnnnnnnnnnnnnnnnnnnnnnnnnnnnnnnnnnnnnnnnnnnnnnnnnnnnnnnnnnnnnnnnnnnnnnnnnnnnnnnnnnnnnnnnnnnnnnnnnnnnnnnnnnnnnnnnnnnnnnnnnnnnnnnnnnnnnnnnnnnnnnnnnnnnnnnnnnnnnnnnnnnnnnnnnnnnnnnnnnnnnnnnnnnnnnnnnnnnnnnnnnnnnnnnnnnnnnnnnnnnnnnnnnnnnnnnnnnnnnnnnnnnnnnnnnnnnnnnnnnnnggattgcgggagataccaacaagaagaccctggagccacgcgttgtcttcatcaaaaagtcccagctggagcttggggcgcacttgtgtggtgggaacctgcatggggtgtttgtggctgatgtggaggatgacagtcctgccaagggtcccgacggcctcgtgtcatgggacctcatcctggagnnnnnnnnnnnnnnnnnnnnnnnnnnnnnnnnnnnnnnnnnnnnngtggaaatgctgaagcccagggatggcgtccgcgagaaggtgcagtaccgccccgaggagttcacgaaggccaagggcttgcctggcgacagattctacatcagnnnnnnnnnnnnnnnnnnnnnnnnnnnnnnnnnnnnnnnnnnnnnnnnnnnnnnnnnnnnnnnnnnnnnnnnnnnnnnnnnnnnnnnnnnnnnnnnnnnnnnnnnnnnnnnnnnnnnnnnnnnnnnnnnnnnnnnnnnnnnnnnnnnnnnnnnnnnnnnnnnnnnnnnnnnnnnnnnnnnnnnnnnnnnnnnnnnnnnnnnnnnnnnnnnnnnnnnnnnnnnnnnnnnnnnnnnnnnnnnnnnnnnnnnnnnnnnnnnnnnnnnnnnnnnnnnnnnnnnnnnnnnnnnnnnnnnnnnnnnnnnnnnnnnnnnnnnnnnnnnnnnnnnnnnnnnnnnnnnnnnnnnnnnnnnnnnnnnnnnnnnnnnnnnnnnnnnnnnnnnnnnnnnnnnnnnnnnnnnnnnnnnnnnnnnnnnnnnnnnnnnnnnnnnnnnnnnnnnnnnnnnnnnnnnnnnnnnnnnnnnnnnnnnnnnnnnnnnnnnnnnnnnnnnnnnnnnnnnnnnnnnnnnnnnnnnnnnnnnnnnnnnnnnnnnnnnnnnnnnnnnnnnnnnnnnnnnnnnnnnnnnnnnnnnnnnnnnnnnnnnnnnnnnnnnnnnnnnnnnnnnnnnnnnnnnnnnnnnnnnnnnnnnnnnnnnnnnnnnnnnnnnnnnnnnnnnnnnnnnnnnnnnnnnnnnnnnnnnnnnnnnnnnnnnnnnnnnnnnnnnnnnnnnnnnnnnnnnnnnnnnnnnnnnnnnnnnnnnnnnnnnnnnnnnnnnnnnnnnnnnnnnnnnnnnnnnnnnnnnnnnnnnnnnnnnnnnnnnnnnnnnnnnnnnnnnnnnnnnnnnnnnnnnnnnnnnnnnnnnnnnnnnnnnnnnnnnnnnnnnnnnnnnnnnnnnnnnnnnnaggggtcatccagggaggagccctgtcaagcatttgcactcagatcttggcaatggtcaatcaagaacaaaataaagtcctgtggattccagcctgcccgctctaggagaatgctgtgctgtggatgactgcagctggccgcctgaggggacgccaggctcagctcttttctagcgactcanagtagaagtctgtccgtctatgaacatgcaggggaaggatccggaaccaggacccagaagcacctcctttgnnnnnnnnnnnnnnnnnnnnnnnnnnnnnnnnnnnnnnnnnnnnnnnnnnnnnnnnnnnnnnnnnnnnnnnnnnnnnnnnnnnnnnnnnnnnnnnnnnnnnnnnnnnnnnnnnnnnnnnnnnnnnnnnnnnnnnnnnnnnnnnnnnnnnnnnnnnnnnnnnnnnnnnnnnnnnnnnnnnnnnnnnnnnnnnnnnnnnnnnnnnnnnnnnnnnnnnnnnnnnnnnnnnnnnnnnnnnnnnnnnnnnnnnnnnnnnnnnnnnnnnnnnnnnnnnnnnnnnnnnnnnnnnnnnnnnnnnnnnnnnnnnnnnnnnnnnnnnnnnnnnnnnnnnnnnnnnnnnnnnnnnnnnnnnnnnnnnnnnnnnnnnnnnnnnnnnnnnnnnnnnnnnnnnnggcacctctcctggaaggacgtcacaactgcaggtgctcagactgcctgtggcagcagaaccagtgcctttggcattttcctcccacactggggaaggtgactttggtgttcttacaaactcgtctctcggcctttctctcctgccttccacagcctctcgtttctcctccatctgtgcttattacttgagcactgtgtctgctctgtgagagctgcgtgggcagggccgcggtggggtccaggtggtgtcagctgtgctgatgcctgccattgggtcctccttaggctctgtaagtcgtgacagccttcatcagtgcaatgtttgcagggtaattcttaaaccttttagagggtggcaggtacatcagttccttttaatatgaaaacattcatgtttcagacattgaattgagagcttttaggggaagcataatggttattgtcactatcaacagtctaaaaagaaaaactaaggtctttttaatcttggttacagcactcacggcatgcaccttactcaatgtgggtgtcttcgtttggnnnnnnnnnnnnnnnngcacttctgaggctggatatgtctggctgaagatttgatgtggttcctccttaagctgtgcgtcctgttaataataggtactgtattgggctctgtgtaagtgtcattggggtaggacctatattttaatactgttcctaacatttcattttactagcgagaaatgttagatttcattttattct

SEQ ID NO: 20335 - DNA, 199 bp, Macaca Mulatta
cagcctccatcccccatccacactgaggcctagagggaccagccggggaaaccgaggcagcccatggcggggcgtggggcctcccaggacagcatctgagcccccaccccaggctccagcccacatcaaagccagtgtgaggggtgggggcagaggggcttcgtcagtagaacagacaagatggggcaggggccggcgt

SEQ ID NO: 20336 - DNA, 96 bp, Macaca Mulatta
gagaaataacatctgctgtgctgctgagctcacagaaagagcccccagacccttcccgcagtcagagggctggaacctgctcggaggcgctttgaa

SEQ ID NO: 20337 - DNA, 296 bp, Macaca Mulatta
  misc_feature (1)...(296): n = A,T,C or G
aaacttcatggaatttgtagaaaattatggannnnnnggtgagaaagaacagtcgtcaaaactcacatggatagtgtttgtttttagccaaaaatgccccagattttttcccaaacctcaaaaacgatttggaaaaattgtaaaagtttgataacagaaacatctttaggatatttttgcctgacatattttgcttctaatatgtgcctactgtgatttttttcatgtggaaaatgcaaaatttgtaacaaaatggttatatggaacatgcctattaaatgagttttactatcttc

SEQ ID NO: 20338 - DNA, 805 bp, Macaca Mulatta
  misc_feature (1)...(805): n = A,T,C or G
ggattggaggagtcacactaatactatcaactgtcagtcttcccacagcttcaatcactctcattattctaatcctcctcctacttaatttaaatattaaattttaagttatgaggtttatgtcaaaaggaacatttcacaaatgcacttttaagacataataagggttaacattctaggcggtataaacacatcccataatgcaagtaatagataatctagagatgtggactttattgctacatgggaattacatttaaatttgagggcattttatataaagaaaaatacagacctatgaagtttggcatattcattaagttatcttttaatatttttttctagaaaacaggtgacatttgtatctacaataaaaaatttttatacagatcctactgtcgcaaactgaatcccatcaagaaaatcagtttctattgtattagtaactcaaaatcaattaccacttcgaaaacttgctttcccacactaaggtaagttcaggctagattcaacactccagaagtttttttactaaagacttttttcagttagaagtgatggcagttttataaaaagagaatatacttccactgatgcccttactgtgccnaaaagtcttaagaaaaagcagtagacatctttcataactatgaaatgaagctggctgaggttagtgtttaaggaattcttccatggtcagtttaagtgagatgtaaagaagggactggtggtttaaagttggttgttaaacaagtttaattgccaatggttaatatgccctgggaattctatcccaggaaatggg

SEQ ID NO: 20339 - DNA, 1599 bp, Macaca Mulatta
  misc_feature (1)...(1599): n = A,T,C or G
tggagagcgccctgtgccgccaggaatacaccatcgcccgctccaacccgctcatcctcatgcgtctgcagctgcccaagtgtgaggcgctgcccatgcccgagagccccgacgctgccaactgcatgcgcatcggcatcccggccgagaggctgggccgcnnnnnnnnnnnnnnnnnnnnnnnnnnnnnnnnnnnnnnnnnnnnnnnnnnnnnnnnnnnnnnnnnnnnnnnnnnnnnnnnnnnnnnnnnnnnnnnnnnnnnnnnnnnnnnnnnnnnnnnnnnnnnnnnnnnnnnnnnnnnnnnnnnnnnnnnnnnnnnnnnnnnnnnnnnnnnnnnnnnnnnnnnnnnnnnnnnnnnnnnnnnnnnnnnnnnnnnnnnnnnnnnnnnnnnnnnnnnnnnnnnnnnnnnnnnnnnnnnnnnnnnnnnnnnnnnnnnnnnnnnnnnnnnnnnnnnnnnnnnnnnnnnnnnnnnnnnnnnnnnnnnnnnnnnnnnnnnnnnnnnnnnnnnnnnnnnnnnnnnnnnnnnnnnnnnnnnnnnnnnnnnnnnnnnnnnnnnnnnnnnnnnnnnnnnnnnnnnnnnnnnnnnnnnnnnnnnnnnnnnnnnnnnnnnnnnnnnnnnnnnnnnnnnnnnnnnnnnnnnnnnnnnnnnnnnnnnnnnnnnnnnnnnnnnnnnnnnnnnnnnnnnnnnnnnnnnnnnnnnnnnnnnnnnnnnnnnnnnnnnnnnnnnnnnnnnnnnnnnnnnnnnnnnnnnnnnnnnnnnnnnnnnnnnnnnnnnnnnnnnnnnnnnnnnnnnnnnnnnnnnnnnnnnnnnnnnnnnnnnnnnnnnnnnnnnnnnnnnnnnnnnnnnnnnnnnnnnnnnnnnnnnnnnnnnnnnnnnnnnnnnnnnnnnnnnnnnnnnnnnnnnnnnnnnnnnnnnnnnnnnnnnnnnnnnnnnnnnnnnnnnnnnnnnnnnnnnnnnnnnnnnnnnnnnnnnnnnnnnnnnnnnnnnnnnnnnnnnnnnnnnnnnaccagcccctgagcatgatcttcagctactgttcgcacagcgacctccacgaattcctggtcatgcgctcgccgcactcggacgtgggcagcacggacgacgaccgcacggtgaagtccgccctggagccccccgacttcgtgcacctggtggcacagatcgcggcagggatggagtacctatccagccaccacgtggttcacaaggacctggccacccgcaacgtgctggtgtacgacaagctgaacgtgaagatctcagacttgggcctcttccgagaggtgtatgccgccgattactataagctgctggggaactcgctgctgcccatccgctggatggccccggaggccatcatgtacggcaagttctccatcgactcggacatctggtcctatggcgtggtcctgtgggaggtcttcagctacggcctgcagccttactgcgggtactccaaccaggacgtggtggagatgatccggaaccggcaggtgctgccctgcccggacgactgtcccgcctgggtgtacgccctcatgatcgagtgctggaatgagttccccagccggcggccccgcttcaaggacatccac

SEQ ID NO: 20340 - DNA, 1243 bp, Macaca Mulatta
  misc_feature (1)...(1243): n = A,T,C or G
ctcatttaagaaaaactactggatatgacagcatcagcccaaaccgggatttccagggccatccagatttgcagaaggacacatcaaaaaatgcctggactgatacaaaagtcaaaaagaactctgatgcttctgataatgcacattctgtaaaacagccaaataccgtgaaatatatgactgcacttcacagtaaacctgagataatccaacaagaatgtgcttttggctcagatcctctttctgaacagagcaaaactaggggtatggagccaccattgggttatcagaatcgtacattaagaagcattacatctccgttggttgctcacaggttaaaaccaatcagacagaaaacaaaaaaggctgtggtnnnnnnnnnnnnnnnnnnnnnnnnnnnnnnnnnnnnnnnnnnnnnnnnnnnnnnnnnnnnnnnnnnnnnnnnnnnnnnnnnnnnnnnnnnnnnnnnnnnnnnnnnnnnnnnnnnnnnnnnnnnnnnnnnnnnnnnnnnnnnnnnnnnnnnnnnnnnnnnnnnnnnnnnnnnnnnnnnnnnnnnnnnnnnnnnnnnnnnnnnnnnnnnnnnnnnnnnnnnnnnnnnnnnnnnnnnnnnnnnnnnnnnnnnnnnnnnnnnnnnnnnnnnnnnnnnnnnnnnnnnnnnnnnnnnnnnnnnnnnnnnnnnnnnnnnnnnnnnnnnnnnnnnnnnnnnnnnnnnnnnnnnnnnnnnnnnnnnnnnnnnnnnnnnnnnnnnnnnnnnnnnnnnnnnnnnnnnnnnnnnnnnnnnnnnnnnnnnnnnnnnnnnnnnnnnnnnnnnnnnnnnnnnnnnnnnnnnnnnnnnnnnnnnnnnnnnnnnnnnnnnnnnnnnnnnnnnnnnnnnnnnnnnnnnnnnnnnnnnnnnnnnnnnnnnnnnnnnnnnnnnnnnnnnnnnnnnnnnnnnnnnnnnnnnnnnnnnnnnnnnnnnnnnnnnnnnnnnnnnnnnnnnnnnnnnnnnnnnnnnnnnnnnnnnnnnnnnnnnnnnnnnnnnnnnnnnnnnnnnnnnnnnnnnnnnnnnnnnnnnnnnnnnnnnnnnnnnnnnnnnnnnnnnnnnnnnnnnnnnnnnnnnnnnntggttacaaatgaaggacttggtcttacaactacagcttctggaacagacatctcttctaatagtctaaaagattgtcttcctaaatcagcacaacttttgaaatctgtttttgtgaaaaatgttggttgggctacacag

SEQ ID NO: 20341 - DNA, 617 bp, Macaca Mulatta
gtaatgctttacagagaagcatatattttttattaacagtgcagcaatatctataatgactgagaggatctgccaaaagaataaagcctcctaccccaacttccggtcccttttccctgccatctcaaagaggagcaatgtatcttccagagaagattttatttgtggtttattatatacgtgactgaatatgggacaaagcattatggtctttttggtaagacagtattagcaggatttgtaaagggttttgtttccttctcccttccccttttccctgtactttgtaatgtcagtgtttatatgaatatgactttcatttgcttttccagaataaagaagttattaatccaaagacagggtacctttgaaatcccagagggagtcaggacaagcaagcctggactgtagctctctagcagcaggtggcagcatcgttactcatttctgtgtttgagaaaaactcagggattttccatcattttactccaagggaggccataatatcagcaggagtttgagtccagcttctctgccataagaattgagtagggtgaccttctctcacggccctcaactgaagaggcatccttgttttggcaatgttatgtacctaa

SEQ ID NO: 20342 - DNA, 404 bp, Macaca Mulatta
atgattcagggtggagacttctcaaatcagaatgggacaggtggagaaagtatttatggtgaaaaatttgaagatgaaaatttccattataagcatgattgggagggtttactgagcatggcaaacgcaggttgcaacacaaatggttctcagttttttataacaacagttccaactcctcatttggatgggaaacatgtggtgtttggccaagtagttaaaggaataggagtgacaaggatattggaaaatgtggaagtgaaaggtgaaaaacctgctaaattgtgcattattgcagaatgtggagaattgaaggaaggagatgactggggaatattcccaaaagatggctctggcgacagtcatccagatttccctgaggatgcagatgtagatttaaaaga

SEQ ID NO: 20343 - DNA, 668 bp, Macaca Mulatta
atgtaacctgtaacataagcatttcccgagttgctatgatctactaataacattggtttgattaattgtattgtctgtgtggatgtggaacgaagagtcttgatgtcaagaagggctgaagcacagaaggtgcagtcggtcatttggggccatattgtccgtggttttcaggacagggagcttcaggactcaggtagatgactctggaagagaccttcttttttggaactgcagcatctccttctcctccccaaggggaatttaggccaggaactatcagatctttccttctctgattttcttctcaaatcccaaggcaagacaatggagactaaactcggttttggtcatcaggctcttccagagcgtccggatgcatgagaagtgaataggtgattgtgttctcagccccaactttgtcagcctcatcaggattagtgggattggctgaaatccgctttttcctgcagtagatcaaggccactacagcagcaacaatggccgctacagcaatcccagtgaccacagccacaatgatccctatcggtgaagagctgcccatgctgggcacttggacagtgatggtcacaggtttggatgagtatggcgtgtagcctatgtttcctgtgcagtggtatcacctcgtcgatcggtgtattgcttgtggg

SEQ ID NO: 20344 - DNA, 630 bp, Macaca Mulatta
  misc_feature (1)...(630): n = A,T,C or G
nnnnnnnnnnnnnnnnnnnnnnnnnnnnnnnnnnnnnnnnnaatcgacttcactataggnnnnnnnnnnnnnnnnnnnnnnnnnnnnnnnnnnnnnnnnnnnnnnnnnnnnnngaacctttaatgagaaacaaatatataatgtcgagctcaagaacactgtgtgtttggtgtcattgggtcaaggtttggggatatacacggcagaatttggaaacagggtatacatcaacaaaaacattagtcataacaagaaaaactggcgcctggcacaatcaactctcagtttcctcttcactcagcagcatgttggggatcccgcggctgatggggaacatacgtccagactccgggcactgcagggtgccctctatcacttccacctccagcagcagatggtgcatagtcctcagaaactcttcattctcctcatatccctcaaccggccctttaggcacctggatcaggcgcaaattatcggccgcttccaggaacgccgcccactccaccttaggtatcatacgcgccacgaagttggggttgaactccacagggcagatacggacctcagtggcctggaggcgncagggggaagccacgggaccccaccccctcacatgcgagctcagca

SEQ ID NO: 20345 - DNA, 2663 bp, Macaca Mulatta
  misc_feature (1)...(2663): n = A,T,C or G
gtcgcccatgtttgatggaaaagtcccacactggtaccacttctcctgcttctggaaggtgggccattccatccggcaccctgacgtggaggtggatgggttctctgagcttcggtgggatgaccagcagaaagtcaagaagacagcggaagctggaggagtgacaggnnnnnnnnnnnnnnnnnnnnnnnnnnnnnnnnnnnnnnnnnnnnnnnnnnnnnnnnnnnnnnnnnnnnnnnnnnnnnnnnnnnnnnnnnnnnnnnnnnnnnnnnnnnnnnnnnagggccaggtgcgcctgtccaagaagatgctggacccggagaagccacagctaggcatgattgaccgctggtaccacccacactgctttgtcaagaacagggaggagctgggtttccggcccgagtacagtgcgagtcagctcaagggcttcagcctccttgctgcagaggataaagaagccctgaagaagcagctcccaggagtcaagagcgaagaaagagaaaaggcgatgaggtggatggagtagatgaagtggccaagaagaaatctaaaaaagaaaaagacaaagatagtaagcttgaaaaagctctaaaggnnnnnnnnnnnnnnnnnnnnnnnnnnnnnnnnnnnnnnnnnnnnnnnnnnnnnnnnnnnnnnnnnnnnnnnnnnnnnnnnnnnnnnnnnnnnnnnnnnnnnnnnnnnnnnnnnnnnnnnnnnnnnnnnnnnnnnnnnnnnnnnnnnnnnnnnnnnnnnnnnnnnnnnnnnnnnnnnnnnnnnnnnnnnnnnnnnnnnnnnnnnnnnnnnnnnnnnnnnnnnnnnnnnnnnnnnnnnnnnnnnnnnnnnnnnnnnnnnnnnnnnnnnnnnnnnnnnnnnnnnnnnnnnnnnnnnnnnnnnnnnnnnnnnnnnnnnnnnnnnnnnnnnnnnnnnnnnnnnnnnnnnnnnnnnnnnnnnnnnnnnnnnnnnnnnnnnnnnnnnnnnnnnnnnnnnnnnnnnnnnnnnnnnnnnnnnnnnnnnnnnnnnnnnnnnnnnnnnnnnnnnnnnnnnnnnnnnnnnnnnnnnnnnnnnnnnnnnnnnnnnnnnnnnnnnnnnnnnnnnnnnnnnnnnnnnnnnnnnnnnnnnnnnnnnnnnnnnnnnnnnnnnnnnnnnnnnnnnnnnnnnnnnnnnnnnnnnnnnnnnnnnnnnnnnnnnnnnnnnnnnnnnnnnnnnnnnnnnnnnnnnnnnnnnnnnnnnnnnnnnnnnnnnnnnnnnnnnnnnnnnnnnnnnnnnnnnnnnnnnnnnnnnnnnnnnnnnnnnnnnnnnnnnnnnnnnnnnnnnnnnnnnnnnnnnnnnnnnnnnnnnnnnnnnnnnnnnnnnnnnnnnnnnnnnnnnnnnnnnnnnnnnnnnnnnnnnnnnnnnnnnnnnnnnnnnnnnnnnnnnnnnnnnnnnnnnnnnnnnnnnnnnnnnnnnnnnnnnnnnnnnnnnnnnnnnnnnnnnnnnnnnnnnnnnnnnnnnnnnnnnnnnnnnnnnnnnnnnnnnnnnnnnnnnnnnnnnnnnnnnnnnnnnnnnnnnnnnnnnnnnnnnnnnnnnnnnnnnnnnnnnnnnnnnnnnnnnnnnnnnnnnnnnnnnnnnnnnnnnnnnnnnnnnnnnnnnnnnnnnnnnnnnnnnnnnnnnnnnnnnnnnnnnnnnnnnnnnnnnnnnnnnnnnnnnnnnnnnnnnnnnnnnnnnnnnnnnnnnnnnnnnnnnnnnnnnnnnnnnnnnnnnnnnnnnnnnnnnnnnnnnnnnnnnnnnnnnnnnnnnnnnnnnnnnnnnnnnnnnnnnnnnnnnnnnnnnnnnnnnnaggatgaagaggcagtgaagaagctgacagtaaatcctggcaccaagtccaagctccccaagccagttcaggacctcctcatgttggggtataagtggaaagtatgaagaaagccatggtggaatatgannnnnnnnnnnnnnnnnnnnnnnnnnnnnnnnnnnnnnnnnnnnnnnnnnnnnnnnnnnnnnnnnnnnnnnnnnnnnnnnnnnnnnnnnnnnnnnnnnnnnnnnnnnnnnnnnnnnnnnnnnnnnnnnnnnnnnnnnnnnnnnnnnnnnnnnnnnnnnnnnnnnnnnnnnnnnnnnnnnnnnnnnnnnnnnnnnnnnnnnnnnnaggccaaggtggaaatgcttgacaacctgctggacatcgaggtggcctacagtctgctcaggggagggtctgatgatagcagcaaggaccccatcgatgtcaactatgagaagctcaaaactgacattaaggtnnnnnnnnnnnnnnnnnnnnnnnnnnnnnnnnnnnnnnnnnnnnnnnnnnnnnnnnnnnnnnnnnnnnnnnnnnnnnnnnnnnnnnnnnnnnnnnnnatctttaagatagagcgtgaaggcgaatgccagcgctacaagccctttaagcagcttcataaccgaagattgctgtggcacgggtccaggaccaccaactttgccgggatcctgtcccagggtcttcggatagccccgcctgaagnnnnnngacaggctacatgtttggtaaagggatctatttcgctgacatggtctctaagagtgccaactactgccatacgtctcagggagacccaataggcttaatcgtgttgggagaagttgcccttggaaacatg

SEQ ID NO: 20346 - DNA, 2315 bp, Macaca Mulatta
  misc_feature (1)...(2315): n = A,T,C or G
tattgtaactggggagtatagagtagaagaaagtatagttaaaacatttgttctacaaattaacctttaaaaataaaattactgctaaaaatagagtgctgttacacttaaggaaaattagtgccattttgaaaatgagatctcgtgccataaatacagctgaactaaatataaatgttcacaaattaatgctgtcagaggaatgagtaaagcagaacaacttttaaccagcggcatttcattctaaagcatgtagtgtgatcaaacatgatcatccagaatttttgtattttttctttgtacagaggttacatcttctgggtgttcttttataaaggaaacattttaaatcccacaaattgacgctttctatcttcannnnnnnnnnnnnnnnngtcagtaatctctgaaatttccttaaattatatacttactatagcagagaaactggattgtttttgtatataagactgcttccacctgaaatgctgtcataagtactnnnnnnnnnnnnngtgcctatcttgtacatgatattcttagaggtaataaggtaataatgcatgaacttgttttataaactcttggactatgtatttgacatgtaaaatatgtacagtattaatgtcaaccatctctttaaagttagcctataaatattgttgtataattttctttggtcagaaacatttggactgaatagtgacactcgctaaggattttcagtgccatttagcaaaccaactgtctttagtctatgcaactagcaaaaatctgcataatgcaacaatacagttttcacactnnnnnnnnnnnnnnnnnnnnnnnnnnnnnnnnnnnnnnnnnnnnnnnnnnnnnnnnnnnnnnnnnnnnnnnnnnnnnnnnnnnnnnnnnnnnnnnnnnnnnnnnnnnnnnnnnnnnnnnnnnnnnnnnnnnnnnnnnnnnnnnnnnnnnnnnnnnnnnnnnnnnnnnnnnnnnnnnnnnnnnnnnnnnnnnnnnnnnnnnnnnnnnnnnnnnnnnnnnnnnnnnnnnnnnnnnnnnnnnnnnnnnnnnnnnnnnnnnnnnnnnnnnnnnnnnnnnnnnnnnnnnnnnnnnnnnnnnnnnnnnnnnnnnnnnnnnnnnnnnnnnnnnnnnnnnnnnnnnnnnnnnnnnnnnnnnnnnnnnnnnnnnnnnnnnnnnnnnnnnnnnnnnnnnnnnnnnnnnnnnnnnnnnnnnnnnnnnnnnnnnnnnnnnnnnnnnnnnnnnnnnnnnnnnnnnnnnnnnnnnnnnnnnnnnnnnnnnnnnnnnnnnnnnnnnnnnnnnnnnnnnnnnnnnnnnnnnnnnnnnnnnnnnnnnnnnnnnnnnnnnnnnnnnnnnnnnnnnnacacacacatgaactcagatttgcaaaccagctttctgaaactttgggtaaggtgcatgcttttaactttgaaatgtataaacacccagtggaaacgtatacctttcagggcatagtgcattatgtgctcaccatgggttgtttaaactgtggtcaaatattccccttccaagtggaagcctgtcgggaattccacagtaacacctttactgttctcccattgatgatcatatacattctctcttcctagtggtacatttgtatgatccttaccagtggaattactgggttaaaaggaactgcttaccactaagataccagtattctcctgatggatattttccatcttaatgttgccagtctaatagtatagtatgtggttgccttattgctgttctccccacccccatggagttgtgtcattattttaatgaatatgagctcttgacttaccctagaattctaatacattacagatactttctgcactactatcacttttattattgcagttccatttaaaagcataagtggctaaggcactccccacccccgccggcattacatttcttaaaatagactgctatccaagaccaactgtagaatcttcatgtaaaagtcttgttcgagtgtcatttattttttattagggttttaatagttggaggggatgagaaacttggccctttgcaatgttgccttcactttggagtataagaattctctacaggactcnnnnnnnnnnnnnnnnnnnggtagagattgggtctggctatgttgcccaggctggtctcaaactcccaggcttaagcagtcctccagcctcagccttctcaaaagtgctaggataattgacatgagccacctcatctggcctacaggtcttttaaagcatttgctgttcgataacaagcatctttatgcctagtatttgtgataagagcaaaaaaca

SEQ ID NO: 20347 - DNA, 369 bp, Macaca Mulatta
tgtgttgcctcatacaaaatgtatttggttttgttggagagtgtcagactgacctggaagtgaaacacagtttatatacagggaaaggattttattatccttaggagtgtcatccaagacatagagcttgaatgtgacattatttaaaaataacaacaaagaaggcagagccaggatataactagaaaaaggatgtcttttttattactccccctctaaacactgctgctgccttaattttagaaagcagcttactagtttacccttgtgaagtattataaattgttgtgaatttgaaaagtccatctactgtattattgctaaatatgttgtttgtactaagggacaattattttaagaccatggatt

SEQ ID NO: 20348 - DNA, 319 bp, Macaca Mulatta
agggagaagtgagatgtaaatgttgctcttggacctacgggggcatctgagtccagctcccccgagatgagctgcagccccccagagagagctctgcatgtcaccaagtgaccaggccccagcctccaggcccccaacttcgcccagccactccccgctctggatcctgcacgataacactcgaatctgctgctcatgggaagaacagaactgctcctgcatgcaactaattcaataaaactgtcttgtgagctgagtgcatggagggtcctctttttatgttgagttgctgcgtcccggcatgccttcattttgctac

SEQ ID NO: 20349 - DNA, 236 bp, Macaca Mulatta
  misc_feature (1)...(236): n = A,T,C or G
atgacgaggacgccnagcggccctacttcaccgtggatgaggccgaggcccgtcaggacggctacggggaccggactctgggctaccagtacgaccctgagcagctggacttggctgagaacatggtttctcagaatgacgggtctttcatttccaagaaggagtggtacgtgtagccccccttccagagcctctgtctgtgcccgctcctcccaggccctccccgcacgcccccc

SEQ ID NO: 20350 - DNA, 660 bp, Macaca Mulatta
  misc_feature (1)...(660): n = A,T,C or G
gcagagcttccccaagacatttcaaagtcaccattcctctcttcgggggccctgcctggtggcaagaaggaatgtcagcaggaccccgttgccgtccctgtgtctacacgctgtattgtgtatcgccgggggcattgtcttcattgtaatgttcatttcccacccctgctccagcctcgatttggttttattttgagcccccactacaccccccagtttcctggggcacaagtgtctgtgtgtgtcccccaggagccactgtgggaagctgatggggaggggatggaggaacaagacagggcctctctcaggcccagtggccggtcagccacaccagggcaccacagccaataaaccgaaagtgttacannnnnnnnnnnnnnnnnnnnnnnnnnnnnnnnnnnnnnnnnnnnnnnnnnnnnnnnnnnnnnnnnnnnnnnnnnnnnnnnnnnnnnnnnnnnnnnnnnnnnnnnnnnnnnnnnnnnnnnnnnnnnnnnnnnnnnnnnnnnnnnnnnnnnnnnnnnnnnnnnnnnnnnnnnnnnnnnnnnnnnnnnnnnnnnnnnnnnnnnnnnnnnnnnnnnnnnnnnnnnnnnnnnnnnnnnnnnnnnnnnnnnnnnnnnnnnnnnnnnnnnnnnnnnnnnnnnnnnnnnnnnnnnnnnn

SEQ ID NO: 20351 - DNA, 664 bp, Macaca Mulatta
  misc_feature (1)...(664): n = A,T,C or G
aggacaaaaagaagacaagcaaggatgctttctgggaattgtaaccatcaggaagggacatctagtgatgatgaactgccttcagcagagatgattgacttccaaaaaagccaaggnnnnnnnnnnnnnnnnnnnnnnnnnnnnnnnnnnnnnnnnnnnnnnnnnnnnnnnnnnnnnnnnnnnnnnnnnnnnnnnnnnnnnnnnnnnnnnnnnnnnnnnnnnnnnnnnnnnnnnnnnnnnnnnnnnnnnnnnnnnnnnnnnnnnnnnnnnnnnnnnnnnnnnnnnnnnnnnnnnnnnnnnnnnnnnnnnnnnnnnnnnnnnnnnnnnnnnnnnnnnnnnnnnnnnnnnnnnnnnnnnnnnnnnnnnnnnnnnnnnnnnnnnnnnnnnnnnnnnnnnnnnnnnnnnnnnnnnnnnnnnnnnnnnnnnnnnnnnnnnnnnnnnnnnnnnnnnnnnnnnnnnnnnnnnnnnnnnnnnnnnnnnnnnnnnnnnnnnnnnnnnnnnnnnnnnnnnnnnnnnnnnnnnnnnnnnnnnnnnnnnnnnnnnnnnnnnnnnnnnnnnnnnnnnnnnnnnnnnnnnnnnnnnnnnggatttacttaaatccattgtttcaagaatgaagaaggcagcagaagatgatgtttttattcctctgtatccaaagagn

SEQ ID NO: 20352 - DNA, 962 bp, Macaca Mulatta
  misc_feature (1)...(962): n = A,T,C or G
caggaagatgtggacatgagcagtggctcaagtggacatgagaccaacgaaaactgctccacggggcgggactcgcagggcagtgactgtgatgacagcgggaaggagctggggatgctggtggagccaccggatgcccaccagagnnnnnnnnnnnnnnnnnnnnnnnnnnnnnnnnnnnnnnnnnnnnnnnnnnnnnnnnnnnnnnnnnnnnnnnnnnnnnnnnnnnnnnnnnnnnnnnnnnnnnnnnnnnnnnnnnnnnnnnnnnnnnnnnnnnnnnnnnnnnnnnnnnnnnnnnnnnnnnnnnnnnnnnnnnnnnnnnnnnnnnnnnnnnnnnnnnnnnnnnnnnnnnnnnnnnnnnnnnnnnnnnnnnnnnnnnnnnnnnnnnnnnnnnnnnnnnnnnnnnnnnnnnnnnnnnnnnnnnnnnnnnnnnnnnnnnnnnnnnnnnnnnnnnnnnnnnnnnnnnnnnnnnnnnnnnnnnnnnnngatatgtttgctgtggccgtgtccctggtgtctgggaagatcctgtacatctctgaccaggttgcatccatatttcactataaaagagatgccttcagcgacaccaagtttgtggagttcctggcgcctcacgatgtgggcgtgttccacagcttcacctccccgtacaagcttcccttgtggagcgtgtgcaacggagcangattcttttactcaagaatgcatggaggagaaatctttcttttgccgtgtcagnnnnnnnnnnnnnnnnnnnnnnnnnnnnnnnnnnnnnnnnnnnnnnnnnnnnnnnnnnnnnnnnnnnnnnnnnnnnnnnnnnnnnnnnnnnnnnnnnnnnnnnnnnnnnnnnnnnnnnnnnnnnnnnnnnnnnnnnnnnnnagcccctagaatacctcctgaaaagagaatttttacaaccacccatacaccaaattgtttgttccaggatgtggatgaaa

SEQ ID NO: 20353 - DNA, 249 bp, Macaca Mulatta
aggtgagtttggcgaggtgtgccgcggccggctcaaggccccagggaagaaggagagctgtgtggcaattaaaaccctgaagggtggctacacggagcggcagcggcgcgagttcctgagcgaggcctccatcatgggccagttcgagcacccgaatatcatccgcctggagggcgtggtcaccaacagcatgcctgtcatgattctcacggagttcatggagaacggcgccctggactccttcctgcg

SEQ ID NO: 20354 - DNA, 2635 bp, Macaca Mulatta
  misc_feature (1)...(2635): n = A,T,C or G
ggttgttccttttggtgcaaacaatgcttttaccatgcctctgcatatgactttttggggaaaagaggaaaatagaaaagcggtttcagatcagttgaagaaacatggatttaaattgggtcctgcaccaaaaannnnnnnnnnnnnnnnnnnnnnnnnnnnnnnnnnnnnnnnnnnnnnnnnnnnnnnnnnnnnnnnnnnnnnnnnnnnnnnnnnnnnnnnnnnnnnnnnnnnnnnnnnnnnnnnnnnnnnnnnnnnnnnnnnnnnnnnnnnnnnnnnnnnnnnnnnnnnnnnnnnnnnnnnnnnnnnnnnnnnnnnnnnnnnnnnnnnnnnnnnnnnnnnnnnnnnnnnnnnnnnnnnnnnnnnnnnnnnnnnnnnnnnnnnnnnnnnnnnnnnnnnnnnnnnnnnnnnnnnnnnnnnnnnnnnnnnnnnnnnnnnnnnnnnnnnnnnnnnnnnnnnnnnnnnnnnnnnnnnnnnnnnnnnnnnnnnnnnnnnnnnnnnnnnnnnnnnnnnnnnnnnnnnnnnnnnnnnnnnnnnnnnnnnnnnnnnnnnnnnnnnnnnnnnnnnnnnnnnnnnnnnnnnnnnnnnnnnnnnnnnnnnnnnnnnnnnnnnnnnnnnnnnnnnnnnnnnnnnnnnnnnnnnnnnnnnnnnnnnnnnnnnnnnnnnnnnnnnnnnnnnnnnnnnnnnnnnnnnnnnnnnnnnnnnnnnnnnnnnnnnnnnnnnnnnnnnnnnnnnnnnnnnnnnnnnnnnnnnnnnnnnnnnnnnnnnnnnnnnnnnnnnnnnnnnnnnnnnnnnnnnnnnnnnnnnnnnnnnnnnnnnnnnnnnnnnnnnnnnnnnnnnnnnnnnnnnnnnnnnnnnnnnnnnnnnnnnnnnnnnnnnnnnnnnnnnnnnnnnnnnnnnnnnnnnnnnnnnnnnnnnnnnnnnnnnnnnnnnnnnnnnnnnnnnnnnnnnnnnnnnnnnnnnnnnnnnnnnnnnnnnnnnnnnnnnnnnnnnnnnnnnnnnnnnnnnnnnnnnnnnnnnnnnnnnnnnnnnnnnnnnnnnnnnnnnnnnnnnnnnnnnnnnnnnnnnnnnnnnnnnnnnnnnnnnnnnnnnnnnnnnnnnnnnnnnnnnnnnnnnnnnnnnnnnnnnnnnnnnnnnnnnnnnnnnnnnnnnnnnnnnnnnnnnnnnnnnnnnnnnnnnnnnnnnnnnnnnnnnnnnnnnnnnnnnnnnnnnnnnnnnnnnnnnnnnnnnnnnnnnnnnnnnnnnnnnnnnnnnnnnnnnnnnnnnnnnnnnnnnnnnnnnnnnnnnnnnnnnnnnnnnnnnnnnnnnnnnnnnnnnnnnnnnnnnnnnnnnnnnnnnnnnnnnnnnnnnnnnnnnnnnnnnnnnnnnnnnnnnnnnnnnnnnnnnnnnnnnnnnnnnnnnnnnnnnnnnnnnnnnnnnnnnnnnnnnnnnnnnnnnnnnnnnnnnnnnnnnnnnnnnnnnnnnnnnnnnnnnnnnnnnnnnnnnnnnnnnnnnnnnnnnnnnnnnnnnnnnnnnnnnnnnnnnnnnnnnnnnnnnnnnnnnnnnnnnnnnnnnnnnnnnnnnnnnnnnnnnnnnnnnnnnnnnnnnnnnnnnnnnnnnnnnnnnnnnnnnnnnnnnnnnnnnnnnnnnnnnnnnnnnnnnnnnnnnnnnnnnnnnnnnnnnnnnnnnnnnnnnnnnnnnnnnnnnnnnnnnnnnnnnnnnnnnnnnnnnnnnnnnnnnnnnnnnnnnnnnnnnnnnnnnnnnnnnnnnnnnnnnnnnnnnnnnnnnnnnnnnnnnnnnnnnnnnnnnnnnnnnnnnnnnnnnnnnnnnnnnnnnnnnnnnnnnnnnnnnnnnnnnnnnnnnnnnnnnnnnnnnnnnnnnnnnnnnnnnnnnnnnnnnnnnnnnnnnnnnnnnnnnnnnnnnnnnnnnnnnnnnnnnnnnnnnnnnnnnnnnnnnnnnnnnnnnnnnnnnnnnnnnnnnnnnnnnnnnnnnnnnnnnnngccacatgctaaatgccctttatgcagaaatgatatacatgaagataatttattagaatgtcctccagaagaattagcatgtgacagtgagaaaaagtctgatatggaatggacatccagttcaaagnnnnnnnnnnnnnnnnnnnnnnnnnnnnnnnnnnnnnnnnnnnnnnnnnnnnnnnnnnnnnnnnnnnnnnnnnnnnnnnnnnnnnnnnnnnnnnnnnnnnnnnnnnnnnnnnnnnnnnnnnnnnnnnnnnnnnnnnnnnnnnnnnnnnnnnnnnnnnnnnnnnnnnnnnnnnnnnnnnnnnnnnnnnnnnnnnnnnnnnnnnnnnnnnnnnnnnnnnnnnnnnnnnnnnnnnnnnnnnnnnnnnnnnnnnnnnnnnnnnnnnnnnnnnnnnnnnnnnnnnnnnnnnnnnnnnnnnnnnnnnnnnnnnnnnnnnnnnnnnnnnnnnnnnnnnnnnnnnnnnnnnnnnnnnnnnnnnnnnnnnnnnnnnnnnnnnnnnnnnnnnnnnnnnnnnnnnngaagaaaatatgggctgaatatacaaaacaaaaagagagaacttgcagcaggagcctttggaactaaaaaaccaaatgctgacgaaatgaaacaagccaaaattaatgaaatcagaacattaattgatttataa

SEQ ID NO: 20355 - DNA, 1835 bp, Macaca Mulatta
  misc_feature (1)...(1835): n = A,T,C or G
atcgcttgaacccgggaggcggaggttgcagtgagcccagatcacaccatcacactccagcccgggcgacagggtgagactccgtctnnnnnnnnnnnnnntgcagcctgacagttaagatacagcaaccccaaatccctatgctagaaggtgagaatggcccagtaaagttcgtatctcttagctccctgctttttcacatcattcgccagaagggaagacattacataatccatcctcctgctccaggcggctggacgaggctggctgcctcagggccatacactgggacttgnnnnnnnnnnnnnnnnnnnnnnnnnnnnnnnnnnnnnnnnnnnnnnnnnnnnnnnnnnnnnnnnnnnnnnnnnnnnnnnnnnnnnnnnnnnnnnnnnnnnnnnnnnnnnnnnnnnnnnnnnnnnnnnnnnnnnnnnnnnnnnnnnnnnnnnnnnnnnnnnnnnnnnnnnnnnnnnnnnnnnnnnnnnnnnnnnnnnnnnnnnnnnnnnnnnnnnnnnnnnnnnnnnnnnnnnnnnnnnnnnnnnnnnnnnnnnnnnnnnnnnnnnnnnnnnnnnnnnnnnnnnnnnnnnnnnnnnnnnnnnnnnnnnnnnnnnnnnnnnnnnnnnnnnnnnnnnnnnnnnnnnnnnnnnnnnnnnnnnnnnnnnnnnnnnnnnnnnnnnnnnnnnnnnnnnnnnnnnnnnntgaagacggacagccctgaggaaccgcggggcgcccggatggaactcgttagctccccgagtgcagacaatcccggtgggggaaaggccaacagcgggcagacagcccagtgcgcgccaacagcgcgggcgcctcggaacggcccgcccaccttgatttctcattggcgcctcccacttcctcctcggattggctacctctaggtcaaatacgcagtgcttgagcactacttccggtggtggcgtggtcggccactggagaactcagaagaacacagctgtgcgcgcccagaggctcggggggcgggagaggataagtcggaaggaggaggcgggacctacacctcaggaaagccggaggattggggcacgaagcggggctttgatgacccgcaaagggcgaggcatgcaggaggtggaggaattaagtgaaacgaggaaggtcgttaatcaggaccctgtgggctaggccttaaggggcatggtccttgtctgggcggggtctttgggcgccgactaggcctggttctgggtgggcggggctgctgtgggcggctcctgctgtggaaatgccggcccgcgcgcttctgaacaggcgcatggggcatcgtactctagcctccgctcctgccctgtgggcctctatcccgtgccctcgctctaaagtgcgcctggacctggttctgccttctggacagtccttccggtgnggtggagggagcaaagtcctgcacactggagtggtgtactagcggatcaagtatggacactgactcagactgaggagcagctccactgcactgtgtaccgaggagacaagagccagcctggcaggcccacaccagacgagctggaggccgtgcgcaagtacttccagctagatgtcaccctggctcaactgtatcaccactggggttctgtggactcccacttccaagaggtggctcagaaattccaaggtgnnnnnnnnnnnnnnnnnnnnnnnnnnnnnnnnnnnnnnnnnnnnnnnnnnnnnnncaacaacaacatcgcctgcatcactggcatggtggagcggctgtgccaggctttttggacctcggctcatccagcttgatgatgtcacctaccatggcttccccagcctgcaggccctggctg

SEQ ID NO: 20356 - DNA, 738 bp, Macaca Mulatta
  misc_feature (1)...(738): n = A,T,C or G
gacaaaatttgacaaacagggaaatgttacttcttttgnnnnnnnnnnnnnnnnnnnnnnnnnnnnnnnnnnnnnnnnnnnnnnnnnnnnnnnnnnnnnnnnnnnnnnnnnnnnnnnnnnnnnnnnnnnnnnnnnnnnnnnnnnnnnnnnnnnnnnnnnnnnnnnnnnnnnnnnnnnnnnnnnnnnnnnnnnnnnnnnnnnnnnnnnnnnnnnnnnnnnnnnnnnnnnnnnnnnnnnnnnnnnnnnnnnnnnnnnnnnnnnnnnnnnnnnnnnnnnnnnnnnnnnnnnnnnnnnnnnnnnnnnnnnnnnnnnnnnnnnnnnnnnnnnnnnnnnnnnnnnnngtctctcagagttagaaacagatattaaaattttcaaagagtcaattttggagatcttggatgaggaagagttgctagaagagctctgtctatcaaaatggagcgacccgcaagtcttntgaaaagagcagtgctgggattgaccatgcagaagagatggagttgctgttggaaaactactaccgattggctgacgatctctccaatgcagctcgggagcttagggtgctgattgatgattcacaaagtattattttcatcaatctggacagncagccaccgtaacgtgatgatgaggttgaatctacagctgaccatgggaaccttctctctttcgctctttggactaatgggagttgcttttggaatgaatttggaatcttcccttgaagaggtg

SEQ ID NO: 20357 - DNA, 1663 bp, Macaca Mulatta
  misc_feature (1)...(1663): n = A,T,C or G
gcactccgaggcggcttctccagagcacgggctggaactggcgggcaccgcgagcccctggcacccgacaagctaagtgtacaagacgtgtccccaccacacccaccccacggccgctgaatgaggcttccaggagtccgctcgctgcccgcagagccccgccgggggtccgcccgctgaggcgcctgcagacagtgcgctcacctgccagactgcgcgccatggggcaacccggggacggcagcgccttcttgctggcacccaacggaagccatgcgccggaccacgatgtcacgcaggaacgggacgaggcgtgggtggtgggcatgggcatcgtcatgtctctcatcgtcctggccatcgtgtttggcaatgtgctggtcatcacagccattgccaagttcgagcgtctgcagacggtcaccaactacttcatcacttcactggcctgtgctgacttagtcatgggcttggcagtggtgccctttggggccgcccatattctcatgaaaatgtggacttttggcaacttctggtgcgagttttggacttccattgatgtgctgtgcgtcacagccagcattgagaccctgtgcgtgannnnnnnnnnnnnnnnnnnnnnnnnnnnnnnnnnnnnnnnnnnnnnnnnnnnnnnnnnnnnnnnnnnnnnnnnnnnnnnnnnnnnnnnnnnnnnnnnnnnnnnnnnnnnnnnnnnnnnnnnnnnnnnnnnnnnnnnnnnnnnnnnnnnnnnnnnnnnnnnnnnnnnnnnnnnnnnnnnnnnnnnnnnnnnnnnnnnnnnnnnnnnnnnnnnnnnnnnnnnnnnnnnnnnnnnnnnnnnnnnnnnnnnnnnnnnnnnnnnnnnnnnnnnnnnnnnnnnnnnnagggtctttcaggaggccaaaaggcagctccagaagattgacaaatctgagggccgcttccatgcccagaaccttagccaggtggagcaggatgggcggacagggcatggactccgcagatcttccaagttctgcttgaaggagcacaaagccctcaagacgttaggcatcatcatgggcactttcaccctctgctggctgcccttcttcatcgttaacattgtgcatgtgatccaggataacctcatccctaaggaagtttacatcctcctaaattgggtgggctatgtcaattctggtttcaatccccttatctactgccggagcccagatttcaggattgccttccaggagcttctgtgtctgcgcaggtcttctttgaaggcctgtgggaatggctactccagcaacagcaatggcaacacaggggagcagagtggatatcacctggaacaggagaaagaaaataaactgctgtgtgaagacctcccaggcacggaagactttgtgggccatcaaggtactgtgcctagcgataacattgattcacaagggaggagttgtagtacaaatgactcactgctgtaaagcagtttttctactttttaagacnnnnnnnnnaacagaacactaaacagactatttaacttgagggtaataaacttagaataaaattgtatagagatatgcaggaggaggggcatccttctgcnnnnnnnnnnnnnnaagctgtaaaaagagagaagacttatttggtgattatttgttatttgtacagttca

SEQ ID NO: 20358 - DNA, 505 bp, Macaca Mulatta
ttaggatgctgctagctgagaatctgccttgcattgattaccccaatgtctggtgcccaagtcccttgagtcctccagcaggaactcctgtggcatcactcgggagtctagtctaagaagatagctctgaccagggcactggtggccaggcttccgtgggtgggccagcctcccccgggaaggacacaagccataccagctgggctgtatgtgaactgtggaaaatagagagcaaactgggtagatgggtgtagggtgctgttttcctggaaatatctacctaatcttgctcttctcttacctccaggtatttgtaaattttgctaaacagcagaatgaaattcatgacctccctttgcaccctcgagctgctggagccagccgacaagcccaggtacccctgctgcttacgcagtccacagcttgaggcagctcctcggctcagagcccagctggttcattgggcttgagttgcttcaaggcctcagatatgcctcctgcagag

SEQ ID NO: 20359 - DNA, 319 bp, Macaca Mulatta
  misc_feature (1)...(319): n = A,T,C or G
gtgtacctccaggattcctttaaaccgcttgtctgcctttctcctaatgccagncagcttgtttgatgctgtctcttcattaattcggaacaagatccacaggctgccagttattgacccagaatcaggcaatactttgtatatcctcacccacaagcgcattctgaagttcctcaaattgtttnatcactgagttccccaagccagagttcatgtccaagtctctggaagagctgcagattggcacctatgccaatattgctatggttcgcactaccacccccgtctatgtggctctggggatttttgtacagcatcn

SEQ ID NO: 20360 - DNA, 442 bp, Macaca Mulatta
ctcagcagctactccccatcctctgcgtctcgggaggcgccggggcttgcgtcgggaccgggagctcatacccgacggccaccatcagctacctcccacacgcgccacccttcgccggtggccacccggcgcagctgggcttgggccgcagcgcctccacctttaaggaagaaccgcagaccgtgccggaggcgcgcagccgggacgccacgccgccggtgtcccccatcaacatggaagaccaagagcgcatcaaagtggagcgcaagcggctgcggaaccggctgtcggccaccaagtgccggaagcggaagctggagcgcatcgggcgcctggaggacaaggtgaagacgctcaaggccgagaccgcggggctgtcgaggtcccgccggcctcctccgggaccaggtggccaagctcaaccagagggtctgacccatgt

SEQ ID NO: 20361 - DNA, 771 bp, Macaca Mulatta
  misc_feature (1)...(771): n = A,T,C or G
gggggtgtggcaaggccttcatcagggattaccatctgagccgccacattctgactcacactggagaaaagccgtttgtttgtgcagctaatggctgtggtcaaaaattcaacacaaaatcaaacttgaagaaacattttgaacgcaaacatgaaaatcaacaaaaacaatacatatgcagttttgaagactgtaggaaggcctttaagaaacatcagcagctgaaaatccatcagtgccagcataccagtgaacctctgttcaagtgtacccaggaaggatgtgggaaacactttgcatcacccagcaagctgaaacgacacgccaagacccacgagggctatgtatgtcaaaaaggatgttcctttgtggcaaaaacatggacagaacttctgaaacatgtgagagaaacccataaagaggaaatactatgtgaagtatgccagaaaacatttaaacgcaaagattaccttaagcaacacatgaaaactcatgccccagagagggaggtatgtcgctgtccaagagaaggctgtggaagaacctacacaactgtatttaatctccaaagccatatcctctccttccacgaagaaaggcgccctttttgtgtgtgaacacgcccggctgtggcaaaacatttgccattgaaacaaagtctcactagggcatgctgtttgtacatgaatccctgaacagaaagaaaatggaagctcnnnnnnnnnnnnnnnnnnngtggaaaaaaccggagtttgggccctcttcattcta

SEQ ID NO: 20362 - DNA, 311 bp, Macaca Mulatta
tgtgtgctattcgtaagttctgtgcagtttggtatgaaacaaatatactcatttggatataaatcttacccttcaatgttaaatctacaaacttttataaatgttttaaaagaagtccatgtgataaatgtaaaggtgatgaatttaccatcaaacaaatcattttgatgtattattatatatgtatatctgtgtaagacacgtgcaacagactgccttatattattttctgtaattcttctcctttgtcaaatggtattttttgtgaatggttgcaaagtgttgtcttattcctaattcctgtatgttat

SEQ ID NO: 20363 - DNA, 143 bp, Macaca Mulatta
aggtagatcagatgaataaaatagtggaagttctgggtattccacctgctcatattcttgaccaagcaccaaaagcaagaaagttctttgagaagttgccagatggcacttggaacttaaagaagaccaaagatggaaaacgg

SEQ ID NO: 20364 - DNA, 1281 bp, Macaca Mulatta
  misc_feature (1)...(1281): n = A,T,C or G
tgccgcgggtgtacatcggccgcctgagctaccaggcccgggagcgcgatgtggagcgcttctttaagggctacgggaagattctggaggtggatctgaagaacggnnnnnnnnnnnnnnnnnnnnnnnnnnnnnnnnnnnnnnnnnnnnnnnnnnnnnnnnnnnnnnnnnnnnnnnnnnnnnnnnnnnnnnnnnnnnnnnnnnnnnnnnnnnnnnnnnnnnnnnnnnnnnnnnnnnnnnnnnnnnnnnnnnnnnnnnnnnnnnnnnnnnnnnnnnnnnnnnnnnnnnnnnnnnnnnnnnnnnnnnnnnnnnnnnnnnnnnnnnnnnnnnnnnnnnnnnnnnnnnnnnnnnnnnnnnnnnnnnnnnnnnnnnnnnnnnnnnnnnnnnnnnnnnnnnnnnnnnnnnnnnnnnnnnnnnnnnnnnnnnnnnnnnnnnnnnnnnnnnnnnnnnnnnnnnnnnnnnnnnnnnnnnnnnnnnnnnnnnnnnnnnnnnnnnnnnnnnnnnnnnnnnnnnnnnnnnnnnnnnnnnnnnnnnnnnnnnnnnnnnnnnnnnnnnnnnnnnnnnnnnnnnnnnnnnnnnnnnnnnnnnnnnnnnnnnnnnnnnnnnnnnnnnnnnnnnnnnnnnnnnnnnnnnnnnnnnnnnnnnnnnnnnnnnnnnnnnnnnnaggtcgggctcccgctcccggagcaagagccggagccggagccagagtcggagccggagcaagaaggagaaaagcaggagccccagcaaggacaagagccgcagccgcagccgtagcgctggcaagagccgcagcaagagcaaagaccaagctgaagagaagatccaaaacaatgacaatgccgggaaacccaagagccggagtcctagccggcataaaagtaagagcaaaagtcnnnnnnnnnnnnnnnnnnnnnnnnnnnnnnnnnnnnnnnnnnnnnngtgagcaggggcaggagccaggagaagagcctccgccagagtcggagccggagccggagcaaagggggcagcaggagccggagcaggagccgcagcaagagcaaggacaagaggaagggcaggaagagaagcagggaggaaagccgtagtcgcagccgcagccgcagcaaaagtgagaggagcagaaagcgaggcagcaagcgagacagcaaggccggcagcagcaagaagaagaagaaggaagacactgaccgctcccagtccagatctccatcccgctccatgtcaaaggagcgggaacatgccaagtctgaatccagccagagggaaggtcga

SEQ ID NO: 20365 - DNA, 1615 bp, Macaca Mulatta
gtgcgattgtatgggacggcctggggcagcccagcagcggctgactttctgcctgcgggaaagggagtcgcgagtgggccgtcatggcggtgtcggagagccagctcaagaaaatggtgtccaagtacaaatacagagacctaactgtacgtgaaactgtcaatgttattactctatacaaagatctcaaacctgttttggattcatatgtttttaatgatggcagttccagggaactaatgaacctcactggaacaattcctgtgccttatagaggtaatacatataatattccaatatgcctatggctactggacacatacccatataatccccctatctgttttgttaagcctactagttcaatgactattaaaacgggaaagcatgttgatgcaaatgggaagatatatcttccttatctacatgaatggaaacacccacagtcagacttgttggggcttattcaggtcatgattgtggtatttggagatgaacctccagtcttctctcggtcctaatttcggcatcctaatccaccataccaggcaacggggccaccaaatacttcctacatgccaggcatgccaggtggaatctctccatacccatccggataccctcccaatcccagtggttacccaggctgtccttacccacctggtggtccatatcctgccacaacaagttctcagtacccttcccagcctcctgtgaccactgttggtcccagtagggatggcacaatcagcgaggacaccatccgagcctctctcatctcagcggtcagtgacaaactgagatggcggatgaaggaggaaatggatcgtgcccaggcagagctcaatgccttgaaacgaacagaagaagacctgaaaaagggtcaccaaaaactggaagagatggttacccgtttagatcaagaagtagccgaggttgataaaaacatagaacttttgaaaaagaaggatgaagaactcagttctgctctggagaaaatggaaaatcagtctgaaaacaatgatatcgatgaagttatcattcccacagctcccttatacaaacagatcctgaatttgtatgcagaagaaaacgctattgaagacactatcttttacttgggagaagccttgagaaggggagtgatagacctggatgtcttcctgaagcatgtacgtcttctgtcccgtaaacagttccagctgagggcactaatgcaaaaagcaagaaagactgccggtctcagtgacctctactgacttctctgataccagctggaagttgagctcttcttaaagtattcttttcttctctcccttctcttatcataggtgccagaatagttatgcagttatcatccgctgtaatattcgatcactatatattccggaccttggtaagacggattaataggacctcaactcgtaacatgtgccgagtggccgcacaaatgtgctcacacacaacccggggccgccacgccaagagctaaacgggcaaagagaggcgacaccccacacacaaagaccaccaccgcacggagaggaagcgagcagcgacaacaccgcagcgtttagcaggtgtcgaacagaaacagagcgtacgaacgacaaca

SEQ ID NO: 20366 - DNA, 807 bp, Macaca Mulatta
  misc_feature (1)...(807): n = A,T,C or G
gggagggaggtgtcggtctccaagatggcggccgcgtggccgtcaggttcgtctgctccggaggccgcgactgctagactcctcggtgtcctgtggttcgtctcagtcactacaggaccctggggggctgttgccacctctgccgggggcgaggagttgcctaagtgcgaggacctcaaagtgggacaatatatttgtaaagatccaaaaataaatgatgctacgcaagaaccagttaactgtacaaactacacagctcatgtttcctgttttccagcacctaacataacttgtaaggattccagtggcaatgaaacacattttactgggaatgaagttggttttttcaagcccatatcttgccgaaatgtaaatggctattcatacaaagtggcagtcgcattgtctctttttcttggatggttgggagcagatcgattttacctgggataccctgccttgggtttgttaaagttttgcactgtaggattttgtggaattgggagcctaattgatttcattcttatttcaatgcagattgttggaccttcagatggaagtagttacatcatagattactatggaaccagactgacaagactaagtattactaatgaaacatatagaaaaacgcaattatatccannnnnnnnnnnnnnnnnnnncagatttgagcgtccttgattttaatagagaactttctagtgtctgggatttaaatattttctcttttttcattcatataccaattttattgagtttctgtaataaatttttttggtgggttttttggtttttggnttgaac

SEQ ID NO: 20367 - DNA, 703 bp, Macaca Mulatta
agcattgtgagtccccgggtcagagtgaaagaagaaggcctgccccagtggggtctgtgaattcccggtggtgatttcactccccgggggctgtcccaggcttgtccctgctacccccatccagccttccctgaggccctgagcctgcccccaagcccccagctccttctcccccaaggaacccaaacgcaggcctcaggactcaacacagcttttctccctccaaccccattttctctacctcaaggactcagctttctgaagcccctcccagttctagttctatctttttcctgcatcctgtctggaaatcagagggaaacagaccacagacctggtccccagaagaaatggaggcaataggctttgaggggcaggaggacgggattcaacctccagagtcccacacacaaatcagtcagaggcccagaagacccccctcggaatcggagcagggatggtggggagagtgaggagtatccttgatgcttgggtgtccccaactttccaaatccccgcccccgcgatggagaagaaaccaagacagaaggtgcagggcccactaccgcttcctccagatgagctcatgggtttctccaccaaggaagttttccgctggttgaatgattctatccccgccctctcgccccagggacatataaacgcagttgtttgcacacccagccagcagacgctccctcag

SEQ ID NO: 20368 - DNA, 3914 bp, Macaca Mulatta
  misc_feature (1)...(3914): n = A,T,C or G
ggcagggataacagtgtgcctggttaatattcatattcccactttgttaataatatttatgttgggtcaagtgttaggtcaataacactgtattttaatatacttgaaaaatatttttatttttgttctattgttgacagactatttgataagtgtataatgtgcagaaaatatttaatatcaaaagaaannnnnnnnnnnnnnnnnnnnnnnnnnnnnnnnnnnnnnnnnnnnnnnnnnnnnnnnnnnnnnnnnnnnnnnnnnnnnnnnnnnnnnnnnnnnnnnnnnnnnnnnnnnnnnnnnnnnnnnnnnnnnnnnnnnnnnnnnnnnnnnnnnnnnnnnnnnnnnnnnnnnnnnnnnnnnnnnnnnnnnnnnnnnnnnnnnnnnnnnnnnnnnnnnnnnnnnnnnnnnnnnnnnnnnnnnnnnnnnnnnnnnnnnnnnnnnnnnnnnnnnnnnnnnnnnnnnnnnnnnnnnnnnnnnnnnnnnnnnnnnnnnnnnnnnnnnnnnnnnnnnnnnnnnnnnnnnnnnnnnnnnnnnnnnnnnnnnnnnnnnnnnnnnnnnnnnnnnnnnnnnnnnnnnnnnnnnnnnnnnnnnnnnnnnnnnnnnnnnnnnnnnnnnnnnnnnnnnnnnnnnnnnnnnnnnnnnnnnnnnnnnnnnnnnnnnnnnnnnnnnnnnnnnnnnnnnnnnnnnnnnnnnnnnnnnnnnnnnnnnnnnnnnnnnnnnnnnnnnnnnnnnnnnnnnnnnnnnnnnnnnnnnnnnnnnnnnnnnnnnnnnnnnnnnnnnnnnnnnnnnnnnnnnnnnnnnnnnnnnnnnnnnnnnnnnnnnnnnnnnnnnnnnnnnnnnnnnnnnnnnnnnnnnnnnnnnnnnnnnnnnnnnnnnnnnnnnnnnnnnnnnnnnnnnnnnnnnnnnnnnnnnnnnnnnnnnnnnnnnnnnnnnnnnnnnnnnnnnnnnnnnnnnnnnnnnnnnnnnnnnnnnnnnnnnnnnnnnnnnnnnnnnnnnnnnnnnnnnnnnnnnnnnnnnnnnnnnnnnnnnnnnnnnnnnnnnnnnnnnnnnnnnnnnnnnnnnnnnnnnnnnnnnnnnnnnnnnnnnnnnnnnnnnnnnnnnnnnnnnnnnnnnnnnnnnnnnnnnnnnnnnnnnnnnnnnnnnnnnnnnnnnnnnnnnnnnnnnnnnnnnnnnnnnnnnnnnnnnnnnnnnnnnnnnnnnnnnnnnnnnnnnnnnnnnnnnnnnnnnnnnnnnnnnnnnnnnnnnnnnnnnnnnnnnnnnnnnnnnnnnnnnnnnnnnnnnnnnnnnnnnnnnnnnnnnnnnnnnnnnnnnnnnnnnnnnnnnnnnnnnnnnnnnnnnnnnnnnnnnnnnnnnnnnnnnnnnnnnnnnnnnnnnnnnnnnnnnnnnnnnnnnnnnnnnnnnnnnnnnnnnnnnnnnnnnnnnnnnnnnnnnnnnnnnnnnnnnnnnnnnnnnnnnnnnnnnnnnnnnnnnnnnnnnnnnnnnnnnnnnnnnnnnnnnnnnnnnnnnnnnnnnnnnnnnnnnnnnnnnnnnnnnnnnnnnnnnnnnnnnnnnnnnnnnnnnnnnnnnnnnnnnnnnnnnnnnnnnnnnnnnnnnnnnnnnnnnnnnnnnnnnnnnnnnnnnnnnnnnnnnnnnnnnnnnnnnnnnnnnnnnnnnnnnnnnnnnnnnnnnnnnnnnnnnnnnnnnnnnnnnnnnnnnnnnnnnnnnnnnnnnnnnnnnnnnnnnnnnnnnnnnnnnnnnnnnnnnnnnnnnnnnnnnnnnnnnnnnnnnnnnnnnnnnnttatttctgtttcctgttaatatagctgaagtcaaagtatgtaagaacacattttaagtactctacttacagttggccctctgtggttagttcttcatctgtggattcaaccaaccaaggatggaaaatactttaaaaataatacaacaannnnnnnnnnnnnnnnnnnnnnnnnnnnnnnnnnnnnnnnnnnnnnnnnagatggagtcttgctctgtcacccaggttggagtgcagtggcacaatctcggctcactgcaacctccacctcctgggttcaagtgatcctcctgcctcagcctcatgagtagctgggtctacaggtgcacgccaccacgcccagctaatttttatattcttagtagagacggggtttcaccatattggccaggatggtctcaatctcctgacctcgtgatccacccgccacagcctcccaaagtgctgggattacaggcgtgagccaccgcacatagcatttacattaggtattataagtaatgtaaagatgatttaagtatacaggaggatgtgaataggttatatgcaaacactatgccgttttgtataagtgacttgaacatctgtgcccgattttagtatgtgcaggagggcgatttaggaatcagtcccctgtggataccaaggtacaactgtatttattaaacttactagatgtgannnnnnnnnnnnnnnnnnnnnnnnnnnnnnnnnnnnnnnnnnnnnnnnnnnnnnnnnnnnnnnnnnnnnnnnnnnnnnnnnnnnnnnnnnnnnnnnnnnnnnnnnnnnnnnnnnnnnnnnnnnnnnnnnnnnnnnnnnnnnnnnnnnnnnnnnnnnnnnnnnnnnnnnnnnnnnnnnnnnnnnnnnnnnnnnnnnnnnnnnnnnnnnnnnnnnnnnnnnnnnnnnnnnnnnnnnnnnnnnnnnnnnnnnnnnnnnnnnnnnnnnnnnnnnnnnnnnnnnnnnnnnnnnnnnnnnnnnnnnnnnnnnnnnnnnnnnnnnnnnnnnnnnnnnnnnnnnnnnnnnnnnnnnnnnnnnnnnnnnnnnnnnnnnnnnnnnnnnnnnnnnnnnnnnnnnnnnnnnnnnnnnnnnnnnnnnnnnnnnnnnnnnnnnnnnnnnnnnnnnnnnnnnnnnnnnnnnnnnnnnnnnnnnnnnnnnnnnnnnnnnnnnnnnnnnnnnnnnnnnnnnnnnnnnnnnnnnnnnnnnnnnnnnnnnnnnnnnnnnnnnnnnnnnnnnnnnnnnnnnnnnnnnnnnnnnnnnnnnnnnnnnnnnnnnnnnnnnnnnnnnnnnnnnnnnnnnnnnnnnnnnnnnnnnnnnnnnnnnnnnnnnnnnnnnnnnnnnnnnnnnnnnnnnnnnnnnnnnnnnnnnnnnnnnnnnnnnnnnnnnnnnnnnnnnnnnnnnnnnnnnnnnnnnnnnnnnnnnnnnnnnnnnnnnnnnnnnnnnnnnnnnnnnnnnnnnnnnnnnnnnnnnnnnnnnnnnnnnnnnnnnnnnnnnnnnnnnnnnnnnnnnnnnnnnnnnnnnnnnnnnnnnnnnnnnnnnnnnnnnnnnaaattcaataatgcagtttttaaaaacctgtatctgacccactttgtaatttttgctccaatatctattctgtaaacttttgaaaacaaagtttttaattcgatgctcaatatattcttttaaaaaattcttgttcatatgggagaagagggagtaacaacttgtacaaacagtatttgtggtgtgtattttaatgttttaaagaagaataattttatttaaatatctgttattcaaacttaatgatgttaaatgtaatataatgtattttccttttattttgcactctgtaattgcactttttaagtttgagagccattttggtatacactttgtattaaagatgctatggaacataaagttgtattgcatgcagtttaaagtaacttatttgactatgaatgttatcagagtactgaattgtatcaatttgtttgtgttcaatatcagctttgataattgtgtaccttaagatattgaaggagaaaatagataatttacaaaatattattaatttttatttattttcttgggaactgaaaacaattgaaataaataaaaatgcattgaacatcatgcattcaaaatc

SEQ ID NO: 20369 - DNA, 738 bp, Macaca Mulatta
gcaaccaactttagtacggtacatttagaagaaaatattctcatttctgatcttgagaagagtgaccaataataatgaggtcagagaatgtcccagccaccagggtgagtaaagaagactaaacaggagtctcatctgcctttccctttacagcccacatgctattagaatgtgaattgggtcactattttaattattcttgaagtgattactggttttgaattttaaccaaatcagatgggttttgatttattcatttccctaaactgtgatccattcttaaaaaggggaaattatgcattggttatttttcagaaagacaagaactattaaaagaaactccctattgaaaattctcaaatcaatatgagtaatagtttttgcattaatgtgtctctactaaaatttgggggattaaaactaatctggtatctattcagacatttacccacacttataccattaagaaagacagaaagaagcaaaaaacaattaatcttgtatatgagaggaaaaggaaagggcttctgagaggattcttagttgtttcttttgaattcacttttaatagcaggatttgaaaaatactaatttctatgcttaaggatcacaggttctgggctctcaactgatatgtaaggtgacattcatttttattaggtctaacatctcaagctaaaggagaaaaaaataccttcttttaaatggcaaagaccttcgttagcagcacacttttat

SEQ ID NO: 20370 - DNA, 779 bp, Macaca Mulatta
  misc_feature (1)...(779): n = A,T,C or G
gggtgactgaccgttcccaaatcctcaagaacgtccgcaacgccatccggggcaggttcccgctctacaacctgggtttcggccacaatgtggactttaactttctggaggtcatgtccatggagaacaacggacgggcccagagaatctacgaggaccgtgatgccacccagcagctgcaggnnnnnnnnnnnnnnnnnnnnnnnnnnnnnnnnnnnnnnnnnnnnnnnnnnnnnnnnnnnnnnnnnnnnnnnnnnnnnnnnnnnnnnnnnnnnnnnnnnnnnnnnnnnnnnnnnnnnnnnnnnnnnnnnnnnnnnnnnnnnnnnnnnnnnnnnnnnnnnnnnnnnnnnnnnnnnnnnnnnnnnnnggagggacaagaattcagtacaacctgcctagtggatgaggaggagatgaagaaactgctccgagagcgtggccacatgctggagaaccacgtcgagcgcctctgggcctacctcaccatccaggagctgctggccaagcgnnnnnnnnnnnnnnnnnnnnnnnnnnnnnnnnnnnnnnnnnnnnnnnnnnnnnnnnnnnnnnnnnnnnnnnnnnnnnnnnnnnnnnnnnnnnnnnnnnnnnnnnnnnnnnnnnnnnnnnnnnnnnnnnnnnnnnnnnnnnnnnnnnnnnnnnnnnnnnnnnnnnnnnnnnnnnnnnnnnnnnnnnnnnnnncgttcgtgctgtcagccttgcagccttctcctactcgttccagctccaatacccagcggctgccagaccgagtgaccggc

SEQ ID NO: 20371 - DNA, 129 bp, Macaca Mulatta
tgtccctgcttcatcccaggctggccctgcataactcccgtttcctgagtctcgtctctgagctagatggtcgagtccggcccctcgtgtacaccctccgctgctgggctcagggtcgggggctttcag

SEQ ID NO: 20372 - DNA, 632 bp, Macaca Mulatta
tctgctagtctgtcagggccttggcccagggggtcagcagagcttcagaggtggccccacctgagcccccacccaggagcagtgtcctgcgctttctgcatgctcagagcatgttctcggaacatggaattttataagctgaataaagtttttgacttcctttaccatggcctttttgcttgggtgggacccccggccacagggaagagggggagctggggctgcgctggagctcgtctctgcgggatctgcctgggctgccttctccacacagggctggatccggctggggctgccccacgcttcctgggacgctcctgaagccctgcaggagatgaacagagcaaccctgggtgccaccctggagcccacactggcgcagacccagctggggccgtgggcttcggcagagggagggggtcctgtccacttcccatggcttccgggatgctcagcccgggcccttgaatggctgggcccacaaccagtgtctaatgcctagtcctgcccaatgcgtggccctcagctggttttacccaggacagagctgggggtgctgactgccccgtcccccaaaggcccaggcttgtggcagccttactgcaccagggatagccaccacaaacacccag

SEQ ID NO: 20373 - DNA, 161 bp, Macaca Mulatta
tttttcttctggggtggatctttccatgacttctccaaagctgttgatttccgacacagctgcagggagaatcagagatattctccaagacctagaagaaattcaggaaaaattacgagaaaacgtcgcccggaaagaggctcctgaagcacaaacgcagg

SEQ ID NO: 20374 - DNA, 1337 bp, Macaca Mulatta
  misc_feature (1)...(1337): n = A,T,C or G
gaaggccagaaatgctcacatcaggatccgattgagagctctgactcctatggtgacctctcagatgccagcgacctgaagacgccggagaagcagagtgccaatggctctttctcctgcgacatggcagttcccaaaaacaaaatggagtctgatggggagaagaagtacccatgccccgaatgtgggagcttcttccgctctaagtcctacttgaacaaacacatccagaaggtgcatgtccgggctcttgggggccccctgggggacctgggccctgcccttggctcacctttctctcctcagcagaacatgtctctcctcgagtcctttgggtttcagattgttcagtcggcatttgcgtcatctttagtagatcctgaggttgaccagcagcccatggggcctgaagggaaatgaggcagctgctctgtccccacggcaacagccatttggggactgctgggaaatgctgtgaatgcggagggaagtgatgtttgggttctgtagctgagagatttttattcatttttaactgccccccaaccccacccaactccttctctaccacccattctcccaatggtctttagaaatagattttcatctgatattctacagaaatatcaatgagacttggtatgggacaggggcagaannnnnnnnnnnnnnnnnnnnnnnnnnnnnnnnnnnnnnnnnnnnnnnnnnnnnnnnnnnnnnnnnnnnnnnnnnnnnnnnnnnnnnnnnnnnnnnnnnnnnnnnnnnnnnnnnnnnnnnnnnnnnnnnnnnnnnnnnnnnnnnnnnnnnnnnnnnnnnnnnnnnnnnnnnnnnnnnnnnnnnnnnnnnnnnnnnnnnnnnnnnnnnnnnnnnnnnnnnnnnnnnnnnnnnnnnnnnnnnnnnnnnnnnnnnnnnnnnnnnnnnnnnnnnnnnnnnnnnnnnnnnnnnnnnnnnnnnnnnnnnnnnnnnnnnnnnnnnnnnnnnnnnnnnnnnnnnnnnnnnnnnnnnnnnnnnnnnnnnnnnnnnnnnnnnnnnnnnnnnnnnnnnnnnnnnnnnnnnnnnnnnnnnnnnnnnnnnnnnnnnnnnnnnnnnnnnnnnnnnnnnnnnnnnnnnnnnnnnnnnnnnnnnnnnnnnnnnnnnnnnnnnnnnnnnnggaccagttgtagtgaattgctactgaaagctatcccaggtgatacagagctctttgtaaaccgcagtcacacattagggttagtattaaactttgtttagatgtaccataattaacttggctagttgattgtttgaagtctatggaagaaatagttttatgcaaaattttaaaaaatgccagactg

SEQ ID NO: 20375 - DNA, 3522 bp, Macaca Mulatta
atgatttgtcaaaaattctgtgtggttttgttacattgggagtttatttgtgtgataactgcatttaacttgtcatatccaattactccttggagatttaagttgtcttgcatgccaccaaattcaacctatgactacttccttttgcctgctggactctcaaagaatacttcaaatttgaatggacattatgagacagctgttgagtttaattcaagtgatactcacttttctaacttatccaaaacaactttccactgttgctttcggagtgagcaagatagaaactgctctttgtgtgcagacaacattgaaggaaagacatttgtttcaacagtaaattcttcagtttttcaacaaatgggtgcaaactggaacatacagtgctggctaaaaggagacttgaaattattcatctgttatgtggagtcattatttaagaatccattcaagaattacaaacataaggtccatcttttatatgttctgccggaagtgttagaagattcacctctggttccccaaaaaggcagttttcagatggttcattgcaattgcagtgttcatgaacgttgtgaatgtcttgtgcctgtgccaacagccaaactcaacgacactctccttatgtgtttgaaaatcacatctggtggagtaattttccagtcacctctaatgtcagttcagcccataaatatggtgaagcctgatccaccattaggtttgcgtatggaaatcacagatgatggtaatttaaagatttcttggtccagcccaccattggtaccatttccacttcaatatgaagtgaaatattcagagaattctacaacagttatcagagaagctgacaagattgtctcagctacatccctgctggtagacggtatacttcctgggtcttcatatgaggttcaggtgaggggcaagagactggatggcccaggaatctggagtgactggagtactcctcatgtctttaccacacaagatgtcatatactttccacctaaaattctgacaagtgttggatctaatgtttcttttcactgcatctataagaatgaaaacaagattgtttcctcaaaaaagattgtttggtggatgaatttagctgagaaaatccctcaaagccagtatgatgttgtgagtgatcatgttagcaaagttacttttttcaatctgaatgaaaccaaacctcgaggaaagtttacctatgatgcagtgtactgctgcaatgaacatgaatgccatcatcgctatgctgaattatatgtgattgatgtcaatatcaatatctcatgtgaaactgatgggcacttaactaaaatgacttgcagatggtcaaccaatacaatccagtcacttgcgggaagcactttgcaattgaggtatcgtaggagcagcctttactgttttgatattccatctattcatcccatatctaagcctaaagattgctatttgcagagcgatggtttttatgaatgcgttttccagccaatctttctattatctggctatacaatgtggattaggatcaatcaccctctaggttcacttgactctccaccgacatgtgtccttcctgattctgtggtgaagccactgcctccatccagtgtgaaagcagaaattattaaaaacattggattattgaaaatatcttgggaaaagccagtctttccagagaataaccttcaattccagattcgctatggtttgagtggaaaagaaatacaatggaagatgtatgatgtttatgatgcaaaatcaaaatctgtcagtctcccagttccagacttctgtgcagtttatgctgttcaggtgcgctgtaagaggtcagatggattgggactttggagtaattggagcaatccagcctacacagttgtcatggatataaaagttcctatgagaggacctgagttttggagaataattaatggagatactatgaaaaaggagaaaaatgtgactttactttggaagcccctgatgaaaaatgaatcattgtgcagtgttcagagatatgtgataaaccatcatacttcctgcaatggaacatggtcagaagatgtgggaaatcacactaaattcactttcctgtggacagagcaagcacacactgttacggttctggccatcaattcaattggtgcttctgttgcaaattttaatttaaccttttcatggcctatgagcaaagtaaatatcgtgcagtcactcagtgcttatcctttaaacagcagttgtgtgattctttcctggatactatcacccagtgattacaagctaatgtattttattattgagtggaaaaatcttaatgaagatggagaaataaaatggcttagaatctcttcatctgttaagaagtattatatccatgatcattttatccccattgagaagtaccagttcagtctttacccaatatttatggaaggagtgggaaaaccaaagataattaatagtttcgctcaagataatactgaaaaacaccagaatgatgcaggtttatatgtgattgtgccagtaattatttcctcttccatcttattgcttggaacattattaatattgcaccaaagaatgaaaaaactgttttgggaagatgttccaaaccccaagaattgttcctgggcgcaaggacttaattttcagaagatacggggttttgtccaacccaaattacagccagaacgtttgagcatctttttatcaagcatacagcatcagtgacatgtggtcctcttcttttggagcctgaaacaatttcagaagatatcagtgttgatacatcatggaaaaataaagatgagatggtgccaacaactgtggtctctctactttcaacaacagatcttgaaaagggttctgtttgtattagtgaccagttcaacagtgttaacttctctgaggctgagggtaccgaggtaacctgtgaggatgaaagccagagacaaccctttgttaaatatgccacgctgatcagcaactctaaaccaagtgaaactgatgaagaacaagggcttataaatagttcagttaccaagtgcttctctagcaaaaattctccattgaaggattctttctctaatagctcatgggagatagaggcccaggcattttttatattatcagatcagcgtcccaacataattttaccacacctcacattctcagaaggattggatgaacttttgagactggagggaaatttccctgaagaaaataatgatgaaaagtctatctattatttaggggtcacctcaatcaaaaagagagagagtggtgtgcttttgactgacaagtcaagggtattgtgcccattcccagccccctgtttattcacggacatcagagttctccaggacagttgctcacactttgtagaaaataatttcaacttaggaacttctagtaagaagacttttgcatcttacatgcctcaattccaaacttgctctactcagactcataagatcatggaaaacaagatgtgtgacctaactgtgtaat

SEQ ID NO: 20376 - DNA, 503 bp, Macaca Mulatta
gtagaaactgcatgagtcccagtgccccagcaccctttaacaccaccagatgggtgttttcccccatccaccactggcagggttgccccttccctccaatcatcactgtgctcctttttttctggcctacgaggcagctcctgccaccatctttagagccaataaagagaattaaaaacctgtgcaccaggagcatcttttaaatacactagccattctcttgctttacaaaaacaacctaaccatcaaaagaaagcctgatgaagtccagccgtgctccagcctcactttccctgcttggaagcgtggggtctccctggctctcccaggataccatgctgtcctcttagtgacctcgtcgccctgcaacctccagtggggaagagtcacagagagcacctaagcagaggtggagacggcgcggtaagaggagggggagccaggctcaagtattggcaccaagttaggtctcagaggaaagaatggaaaccaatcactttacg

SEQ ID NO: 20377 - DNA, 96 bp, Macaca Mulatta
gattatccttctattgctcaccttgtccagaaactgagtgaaaataatattcagacaatttttgcagttactgaagaatttcagcccgtttacaag

SEQ ID NO: 20378 - DNA, 145 bp, Macaca Mulatta
tcgctgccaaaactacgtaatggccagcttctacagtgcgtccactccctttctgtctctgcctgaataagagcatgctcagttggtgctgctttcttgttgctgcatctcccctcatattccacctagagctagatgtgtctta

SEQ ID NO: 20379 - DNA, 1391 bp, Macaca Mulatta
  misc_feature (1)...(1391): n = A,T,C or G
ggggcttctctcgccaggcgtcctcgtggaagtgacatcgtctttaaaccctgcgtggcaatccctgacgcaccgccgtgatgcccagggaagacagggcgacctggaagtccaactacttccttaagatcatccaactattggatgattatccgaaatgtttcatcgtgggagcggacaatgtgggctccaagcagatgcagcagatccgcatgtcccttcgagggaaggccgtggtgctgatgggcaagaacaccatgatgcgcaaggccatccgagggcacctggaaaacaacccagctctggagaaactgctgcctcatatccgggggaatgtgggctttgtgttcaccaaggaggatctcactgagatcagggacatgttgctggccaataaggtgccagctgctgcccgtgctggtgccattgctccatgtgaagtcactgtgccagcccagaacactggactcgggcccgagaagacctcctttttccaggctttaggtatcaccactaaaatctccaggggcaccattgaaatcctgagtgatgtgcagctgatcaagactggagacaaagtgggagccagcgaagccacgctgctgaacatgctcaacatctcccccttctcctttgggctggtcatccagcaggtgtttgacaatggcagcatctacaatcctgaagtgcttgacatcacagaggaaactctgcattctcgcttcctggagggtgtccgcaatgttgccagtgtctgtctgcagattggctacccaactgttgcatcagtaccccattctatcatcaacgggtacaaacgagtcctggccttgtctgtggagacggattacaccttcccacttgctgaaaaggtcaaggccttcttggctgatccatctgcctttgtggctgctgcccctgtggctgctgccaccacagctgctcctgctgctgctgctgcagccccagctaaggttgaagccaacgaagagtcggaggagtcggacgaggatatgggatttgggctctttgactaatcaccaaaaaagcaaacaattaagcagcttttttgcaaaccagaaataagggctatnnnnnnnnnnnnnnnnnnnnnnnggggggccgggacaaattgccatataggtgataaacacgccgcgtaaacgttgtgaactgtaatcccctatatagtacggaaagaagcaaagacggatggaaaagaaaaaaacgagggtcaataagtgtaacgtncaattcaccttcgccccccgtgctgcttcntgataatccctcataaacaacagcaatacaacgccaacaagacacatacaccgacacgaataaaaccaaacaagcagaacaccaacacgccaacagacaacaagcaaaca

SEQ ID NO: 20380 - DNA, 153 bp, Macaca Mulatta
  misc_feature (1)...(153): n = A,T,C or G
aggctctgctctgaatgactctcctgtgggtctggctgcctatattctagagaagttttccacctggaccaatacggaattccgatacctggaggatggaggcctggaaagnnaggaagttctccctggatgacctgctgaccaacgtcatgc

SEQ ID NO: 20381 - DNA, 644 bp, Macaca Mulatta
  misc_feature (1)...(644): n = A,T,C or G
aggccccttccctgccccagctggtgacaagggggacctcctgctctaggcagtgcagcagagctgcctggcggaccatctgctgacagcgtcatggggggcagacccagtcccagcccaggctcctggagagggacaagagggtcttcccctgactggggcctgtgctggaggnnnnnnnnnnnnnnnnnnnnnnnnnnnnnnnnnnnnnnnnnnnnnnnnnnnnnnnnnnnnnnnnnnnnnnnnnnnnngaagngcccagcccagaggcgctggacgtgaccatcatgtacaagggccgcacagtgctgcagaaggtggtggggcacccgagctgcatgttcctgtacggccccccagacccagctgtccgggccacagacccccagcaggtagcattccccagccctgctgagctccccgaccagaagcagctgcgctacacggaggaactgctgaggcacgtggcccctgggctgcagctggagcttcgggggccacagctgtgggcccggcgcatgggcaagtgcaaggtgtactgggaggtgggtggccccccgggctccgccagcccctccaccccagcctgcctgctgcctcggaactgcgacacccccatctttgacttcagagtcttcttccaa

SEQ ID NO: 20382 - DNA, 206 bp, Macaca Mulatta
catgtggagaagaaaggggctctaagttctggctcttcctcccctggggttctctgtacctgaggataccaggccctgggcaactttgcagatctgcttaccccaggtgagcaacagtgtcagccatgcaagcaggacagaatggtgactgggtgcccttagtgagctgtgtatttcctaggaggtagaaaactgtgggaaactgt

SEQ ID NO: 20383 - DNA, 650 bp, Macaca Mulatta
  misc_feature (1)...(650): n = A,T,C or G
ggcaacatttcatttgttgcatttccagtttccaataccaactcacctacaaagattttaccaaaaaccttaggaccaataaatgtgaatgttggaccccaaatgnnnnnnnnnnnnnnnnnnnnnnnnnnnnnnnnnnnnnnnnnnnnnnnnnnnnnnnnnnnnnnnnnnnnnnnnnnnnnnnnnnnnnnnnnnnnnnnnnnnnnnnnnnnnnnnnnnnnnnnnnnnnnnnnnnnnnnnnnnnnnnnnnnnnnnnnnnnnnnnnnnnnnnnnnnnnnnnnnnnnnnnnnnnnnnnnnnnnnnnnnnnnnnnnnnnnnnnnnnnnnnnnnnnnnnnnnnnnnnnnnnnnnnnnnnnnnnnnnnnnnnnnnnnnnnnnnnnnnnnnnnnnnnnnnnnnnnnnnnnnnnnnnnnnnnnnnnnnnnnnnnnnnnnnnnnnnnnnnnnnnnnnnnnnnnnnnnnnnnnnnnnnnnnnnnnnnnnnnnnnnnnnnnnnnnnnnnnnnnnnnnnnnnnnnnnnnnnnnnnnnnnnnnnnnnnnnnnnnnnnnnnnnnnnnnnnnnnnnnnnnnnnnnnnnnnnnnnnnnnnngaagcagaggcggatagaacggataaagcagaagcgggcccagttgcaagaacttcttctacag

SEQ ID NO: 20384 - DNA, 353 bp, Macaca Mulatta
tccccttgtgtgctgtcaagttttggtatcagaaataaacattgaaattgcaaagtgaattagatgtgctctctgcttctttttttccctatatttggggagcgagcaacatgtttatgtgggagagacaggacctcggctctagtttgaagggggtagatcagctttcagcaggtggaaatatgggaagatccagctactggattgggatacaaaggcagtatcaatgaacacgagacccaagaacttgtatagtttattcaataaatatcacttaagtgattctcatgtgacagatatgctgctaggtgtcctggagtgacattgcgagaattgcatagtgagagagggta

SEQ ID NO: 20385 - DNA, 1842 bp, Macaca Mulatta
  misc_feature (1)...(1842): n = A,T,C or G
ttctgggattagaattcaagtctctttactcctacagcagctatgtctccaatgttgagacttctcagatggcacagactccatggataataggtaaacttgaggccaggcacagtggctcacgcctataatcccagtattttgggaggccgaggtggaaggattgcttgagcccaggggttcaggaccagcctgggctacatgacaaaaccccatctctatcaaaaatacaaaaaaattagctaggtgtggtgctgcatgcctgtggtcccagctactcaggaggctaaggtgggaggatcatttgagcccagaggtagaggctgcagtgagccgtgatcataccactgcactctggcctgggtaacagagtgagaccctgtctcaaaaattaattaattaattaaaataaacgaggtaaactcagtaggcagtagatatttttgcccacccgaggaggaactcagtcaagctgttgcttaaccgcttgatccagggcatgaaagattagttgagnnnnnnnnnnnnnnnnnnnnnnagaacatcacttttaaccttgctttggtgaagggagtcggaaagctgagtctccatggagagggggtgatcttgctttcagtgttcccttagcttttgtnnnnnnnnnnnnnnnnnnnnnnnnnnnnnnnnnnnnnnnnnnnnnnnnnnnnnnnnnnnnnnnnnnnnnnnnnnnnnnnnnnnnnnnnnnnnnnnnnnnnnnnnnnnnnnnnnnnnnnnnnnnnnnnnnnnnnnnnnnnnnnnnnnnnnnnnnnnnnnnnnnnnnnnnnnnnnnnnnnnnnnnnnnnnnnnnnnnnnnnnnnnnnnnnnnnnnnnnnnnnnnnnnnnnnnnnnnnnnnnnnnnnnnnnnnnnnnnnnnnnnnnnnnnnnnnnnnnnnnnnnnnnnnnnnnnnnnnnnnnnnnnnnnnnnnnnnnnnnnnnnnnnnnnnnnnnnnnnnnnnnnnnnnnnnnnnnnnnnnnnnnnnnnnnnnnnnnnnnnnnnnnnnnnnnnnnnnnnnnnnnnnnnnnnnnnnnnnnnnnnnnnnnnnnnnnnnnnnnnnnnnnnnnnnnnnnnnnnnnnnnnnnnnnnnnnnnnnnnnnnnnnnnnnnnnnnnnnnnnnnnnnnnnnnnnnnnnnnnnnnnnnnnnnnnnnnnnnnnnnnnnnnnnntactgagcagtgggtgctgaggtgacagcggaggaaccaattgttctgtagcctaggaactgcctcagtgtctttgccagaaaaaggcaaagaggcggacagtacagggctccttcctcctacctcaggcctgatccatcgtgcccttgactttgctgtcccaaagtttcttagctgactttggctttcacatttgttctttccagagctaactgataagagtggaggaggaatgcctcctcctaagagtcagttgaaagaaagacaagagagtcacatcttagcttttgcacaaggcattcgtggtcaggaataggttagggaatggtcactcctgattttccaacagtcgctccttctctgcagatatcttcctttgggaagacaagaatttttcttaataacaaagatccctttacgagttattccttctttcagttcatctcactggagcacagccaagatggacatgtttatggatagtgctctagatgtgaaaacagaactggtttgtgggacaggggcagcttgcttaggagagggaataacgcaggtcccttttcttggaaggcttgcactatggccatgacagtgacattgcccttaccatgatccgtctccgaagtggttgtctttctttaccttgtgtcttctcttg

SEQ ID NO: 20386 - DNA, 736 bp, Macaca Mulatta
agcgataccaagaggtctcaatctatgggagtcgtcagattatactggggagaaagaggagacagaagagctaaaacgatttgatgatccaggtttgatgctcatgggtttcaagccgttggtactgctgaagaaacaccattacctgaggccctccctgttcgtgtacccagaggagtcgttggtgattgggagctcaaccttgttcagtgctctgctcatcaagtgtctggagaaggaggttgcagcattgtgcagatacacaccccgcaggaacatccccccttattttgtggctttggtgccacaggacgaagagttggatgaccagaaaattcaggtgactcctccaggcttccagctggtctttttaccctttgctgatgataaaaggaagatgccctttactgaaaaaatcatggcaactccagagcaggtggacaagatgaaggctatcgttgagaagcttcgcttcacatacagaagtgacagctttgagaaccccgtgctgcagcagcacttcaggaacctggaggccttggctttggatttgatggagccggaacaagcagtggacctgacattgcccaaggttgaagcaatgaataaaagactgggctccttggtggatgagtttaaggagcttgtttacccaccagattacaatcctgaagggaaagttaccaagagaaaaccgataatgatgctctggaagcaaaggccacgtggagtattc

SEQ ID NO: 20387 - DNA, 3162 bp, Macaca Mulatta
  misc_feature (1)...(3162): n = A,T,C or G
gattcgggtgctgtgtttacatttgggaaaagtaaatttgctgaaaataatcccagtaaaattctggtttaaaaatgatgtccctgtacatnnnnnnnnnnnnnnnnnnnnnnnnnnnnnnnnnnnnnnnnnnnnnnnnnnnnnnnnnnnnnnnnnnnnnnnnnnnnnnnnnnnnnnnnnnnnnnnnnnnnnnnnnnnnnnnnnnnnnnnnnnnnnnnnnnnncagaaggaggcaatgtatatgcaactggtggaaaatgatgaaggacagttggggctgggggacactgaagaaagaaacacttttcatgtaattagcttttttacatccgagcataagattaaacagctctctgctggatctaacacttcagctgccctaactgnnnnnnnnnnnnnnnnnnnnnnnnnnnnnnnnnnnnnnnnnnnnnnnnnnnnnnnnnnnnnnnnnnnnnnnnnnnnnnnnnnnnnnnnnnnnnnnnnnnnnnnnnnnnnnnnnnnnnnnnnnnnnnnnnnnnnnnnnnnnnnnnnnnnnncagatggtgagctatatatgtttggagaacctgagaatgggaagttaggtcttcctaatcagctcctgagcaatcacagaacaccgcagctggtgtctgaaattcctgagaaggtgatccaagtagcttgtggcggagagcatactgtggttctcacnnnnnnnnnnnnnnnnnnnnnnnnnnnnnnnnnnnnnnnnnnnnnnnnnnnnnnnnnnnnnnnnnnnnnnnnnnnnnnnnnnnnnnnnnnnnnnnnnnnnnnnnnnnnnnnnnnnnnnnnnnnnnnnnnnnnnnnnnnnnnnnnnnnnnnnnnnnnnnnnnnnnnnnnnnnnnnnnnnnnnnnnnnnnnnnnnnnnnnnnnnnnnnnnnnnnnnnnnnnnnnnnnnnnnnnnnnnnnnnnnnnnnnnnnnnnnnnnnnnnnnnnnnnnnnnnnnnnnnnnnnnnnnnnnnnnnnnnnnnnnnnnnnnnnnnnnnnnnnnnnnnnnnnnnnnnnnnnnnnnnnnnnnnnnnnnnnnnnnnnnnnnnnnnnnnnnnnnnnnnnnnnnnnnnnnnnnnnnnnnnnnnnnnnnnnnnnnnnnnnnnnnnnnnnnnnnnnnnnnnnnnnnnnnnnnnnnnnnnnnnnnnnnnnggagaggtctccagattctatttcaatgatgagaacactacctccaatagaagggactcttggcctttctgcttgttttccccccaattcagtctttgcacgttgttctgagagtaacctcctaccgagcgtcttatctgaacaggacctcatgcacccagaggaaccagncagattattttctagatgaaatgaccaaagaagcagagatagataattcttcaaccgtagaaagccttggagaaactactgatatcttnnnnnnnnnnnnnnnnnnnnnnnnnnnnnnnnnnnnnnnnnnnnnnnnnnnnnnnnnnnnnnnnnnnnnnnnnnnncaacaaacaattgggggaactgatgcagcatacagcttctactgaaaaacgatgatagtgatgaatagaagaaatgtcagaaatgaaagaagggaaagcatgtgagcaacatgtgtcacgagggattttcatgacgcaacaagctacgcctatcgaagcattttcagatgaggaactaggtaatgactcaggccaggtgggacctcaggctgacactgatggagagggtttacaaaaagaggtatttagacatgaaaataataatggtgttgatcaacttgatgccaaggaaatagaaaaggaaagtgatggaggacacagtcagaaggaatcagaagcagaagaaatagtcagtgagaaggaaactaaactggcagaaatagcaggtatgaaggatttaagaaaaagggaaaagagcacaaaaaatatgagttctttctttggcaacttaccagatagaggtatgaatactgagagtgaagaaaataaagattttgttaagaaaagggaaagttgcaagcaagatgtgatctttgacagtgaaagagaatcagtagaaaagctagacgttacatggaaagtgcaagtgagagtcagcagggtatagctgatggattccagcagccggaggcaatagaatttagtagtggagagaaagaggatgatgaagtggaaactgaccaaaacatatggtatggcaggaaattgattgaacaaggaaatgaaaaagagactaaacccgtaatatccaaatccatggcaaagtatgattttaaatgtgatcgcttgtcagagatcccagaggagaaggaaggagcagaggattcaaaaggaaatggaatagaggagcaagaggtagaagcaaatgaggaaaatgtgaaggtgcatggaggaagacaggaggaaacagagatcctatcagatgaccttacagacaaagcagaggnnnnnnnnnnnnnnnnnnnnnnnnnnnnnnnnnnnnnnnnnnnnnnnnnnnnnnnnnnnnnnnnnnnnnnnnnnnnnnnnnnnnnnnnnnnnnnnnnnnnnnnnnnnnnnnnnnnnnnnnnnnnnnnnnnnnnnnnnnnnnnnnnnnnnnnnnnnnnnnnnnnnnnnnnnnnnnnnnnnnnnnagaaagaaaaagccaacctggaggaacgggccatttgtgaatacaatgaaaacccaaaaggnaggatacatgcttggtgatgcagagagcagttcattagaaatcctagaaaatagtgaatcaacagcaagcaacgacatgnnnnnnnnnnnnnagatttttctattcaaaagggtcccctcaataaatcaaaagatggtcaaggataacgatgagccgctctcagagataaaatccaaaggagagcagatcattttaaaaagcgataataaagatgctgaccagaaccacatgagtcagaatcatcagaatattccaccagcaaatacagagagaagatcaaaatcctgtacaatactataaatatatatttatgttttcacagtcaccaagtgtactgtaatttatacttgaaaaacattataatttatgaaggaaagtttctgatggtaatcttttaaagatataagtcaacatgttttattcggcttctatcagtgtgaccagttttgatatttatttaatgctaatattttt

SEQ ID NO: 20388 - DNA, 752 bp, Macaca Mulatta
  misc_feature (1)...(752): n = A,T,C or G
cgcactcgacccagaaactgaataggtgatgtacacgaannnnnnnnnnnnnnnnnnnnnnnnnnnnnnnnnnnnnnnnnnnnnnnnnnnnnnnnnnnnnnnnnnnnnnnnnnnnnnnnnnnnnnnnnnnnnnnnnnnnnnnnnnnnnnnnnnnnnnnnnnnnnnnnnnnnnnnnnnnnnnnnnnnnnnnnnnnnnnnnnnnnnnnnnnnnnnnnnnnnnnnnnnnnnnnnnnnnnnnnnnnnnnnnnnnnnnnnnnnnnnnnnnnnnnnnnnnnnnnnnnnnnnnnnnnnnnnnnnnnnnnnnnnnnnnnnnnnnnnnnnnnnnnnnnnnnnnnnnnnnnnnnnnnnnnnnnnnnnnnnnnnnnnnnnnnnnnnnnnnnnnnnnnnnnnnnnnnnnnnnnnnnnnnnnnnnnnnnnnnnnnnnnnnnnnnnnnnnnnnnnnnnnnnnnnnnnnnnnnnnnnnngacaaactaggacacctatggtatctttagttgtatctccttcagaagtttgcttcttacggtataataaagtatggaagaatatcgagtatatgtttactctgggcctgggagaacttaattttctagagcagtttgttgactcgtgtgcaatggggagaggtaccatgatgacactcacggagccactgttcactgacatttggaagtggtcattgttcatatcacgggcgtaacacttggacgatatagagatgcaccaacagttgacttagaagagcagtatgc

SEQ ID NO: 20389 - DNA, 495 bp, Macaca Mulatta
  misc_feature (1)...(495): n = A,T,C or G
cagcatatcttgtggccaactggttttccactcaaatcctgagttattgctgcatgctttaatttcttccctttcagcatctgagaaccttaaagccaacgtctgcaatctgtttttcgatatttatacttttagatatatagtacctttaagtagcagtatgggacaaggcttgtaaatgttttgtctaatgttctattgtcaccttttatgcatttatcacttccaaatctaactttgcacaagtaacccatgtaaaaaaaatgtacatttttcaaagttgtgaataaaaataaccttaaaannnnnnnnnnnnnnnnnnnnnnnnnnnnnnnnnnnnnnnnnnnnnnnnnnnnnnnnnnnnnnnnnnnnnnnnnnnnnnnnnnnnnnnnnnnnnnnnnnnnnnnnnnnngnnnnnnnnnnnnnnnnnnnnnnnnnnnnnnnnnnnnnnnnnnnnnnnnnnnnnnnnnnnnnnnnnnnnnnnnnnnnnnnnnn

SEQ ID NO: 20390 - DNA, 771 bp, Macaca Mulatta
gggtcttttcgaggaagacgcggtcgtaggacttgcggatctttggttcgcacgctcctgctcctgactcaccgctgttcgctctcgccgaggaacaagtcggtcaggaagccgcgcagcaggcatggcttttaaggatactggaaaaacacccgtggagccggaggtggcaattcaccgaattcgaatcaccctaacgagccgcaacgttaaatccttggaaaaggtgtgtgctgacttgatcagaggcgcgaaggaaaagaacctgaaagtgaaaggaccagttcgaatgcctaccaagactttgagaatcactacaagaaaaactccttgtggtgaaggttctaagacatgggatcgtttccagatgagaatccacaagcgactcattgacttgcacagtccttctgagattgttaagcagattacttccatcagtattgagccaggagttgaggtggaagtcaccattgcagatgcttaagtcaactattttaataaattgattaccagttgttaacttttgttggtttttattcggaatactagcagattttaggaatataaaagtgtaccctgagacttccactttttcggtggaatatatgggtatcttaaaatgggctatcttggttttccttgtcgtttgagtcctttgaaaactgaattccgttaactacctaatactgaaagacctgaaccagttgtatttggaccctgtcaagtttttaacatttgggctttacccctaggaattcggattggatctgg

SEQ ID NO: 20391 - DNA, 157 bp, Macaca Mulatta
  misc_feature (1)...(157): n = A,T,C or G
caggtaccggtatggccaattaattgaaataaatagccacagcctcttttctaagtggttttcggaanagtggcaagctggtaaccaagatgtttcagaagattcaggatttgattgatgataaagacgctctggtgtttgtgctgattgatgaggt

SEQ ID NO: 20392 - DNA, 1915 bp, Macaca Mulatta
  misc_feature (1)...(1915): n = A,T,C or G
tgatgactttcctctgaggaagccctgtagcgtgcctggaggaaggggctctccaaccccagccccgcctagccaccatgaacacctcagccccacctgctgtcagccccaacatcaccgtcctggcaccaggaaagggtccctggcaagtggccttcattgggatcaccacgggcctcctgtcgctagccacagtgacaggcaacctgctggtactcatctccttcaaggtcaacacggagctcaagacagtcaataactacttcctgctgagcctggcctgtgctgacctcatcatcggtaccttctccatgaacctctataccacgtacctgctcatgggccactgggctctgggcacactggcttgcgacctctggctggccctggactatgtggccagcaatgcttccgtcatgaatctgctgctcatcagttttgaccgctacttctccnnnnnnnnnnnnnnnnnnnnnnnnnnnnnnnnnnnnnnnnnnnnnnnnnnnnnnnnnnnnnnnnnnnnnnnnnnnnnnnnnnnnnnnnnnnnnnnnnnnnnnnnnnnnnnnnnnnnnnnnnnnnnnnnnnnnnnnnnnnnnnnnnnnnnnnnnnnnnnnnnnnnnnnnnnnnnnnnnnnnnnnnnnnnnnnnnnnnnnnnnnnnnnnnnnnnnnnnnnnnnnnnnnnnnnnnnnnnnnnnnnnnnnnnnnnnnnnnnnnnnnnnnnnnnnnnnnnnnnnnnnnnnnnnnnnnnnnnnnnnnnnnnnnnnnnnnnnnnnnnnnnnnnnnnnnnnnnnnnnnnnnnnnnnnnnnnnnnnnnnnnnnnnnnnnnnnnnnnnnnnnnnnnnnnnnnnnnnnnnnnnnnnnnnnnnnnnnnnnnnnnnnnnnnnnnnnnnnnnnnnnnnnnnnnnnnnnnnnnnnnnnnnnnnnnnnnnnnnnnnnnnnnnnnnnnnnnnnnnnnnnnnnnnnnnnnnnnnnnnnnnnnnnnnnnnnnnnnnnnnnnnnnnnnnnnnnnnnnnnnnnnnnnnnnnnnnnnnnnnnnnnnnnnnnnnnnnnnnnnnnnnnnnnnnnnnnnnnnnnnnnnnnnnnnnnnnnnnnnnnnnnnnnnnnnnnnnnnnnnnnnnnnnnnnnnnnnnnnnnnnnnnnnnnnnnnnnnnnnnnnnnnnnnnnnnnnnnnnnnnnnnnnnnnnnnnnnnnnnnnnnnnnnnnnnnnnnnnnnnnnnnnnnnnnnnnnnnnnnnnnnnnnnnnnnnnnnnnnnnnnnnnnnnnnnnnnnnnnnnnnnnnnnnnnnnnnnnnnnnnnnnnnnnnnnnnnnnnnnnnnnnnnnnnnnnnnnnnnnnnnnnnnnnnnnnnnnnnnnnnnnnnnnnttcgcctgctgctgctttgccgctgggacaagagacgctggcgcaagatccccaagcgccctggctccgtgcaccgcaccccgtcccgccaatgctgatggtcccctctcctgcatccctctaccccagtccccaggagaggccggtgggaagtgggcaggggctgcatcctcagccccagggccctgctcaggcctcacctggcttcccaggcccctgggtcaccttcctgggcagcccagagagaccctgccaactttccagacttcgctattcccaggcagggagggaaacctggggaactggtttttctgttccctgctgagtgagaatgggctcttcaccaggaagaaggcccgggaggaggatccgggctttggactccttgtttgcctttaggcaggaagtcaggagccagcagggcgggccaggagaaagaaggcttaacattaagtattccttggcccagcggccgcccgcccggattgtggtgtgagatggtgcgcgcgtggaaagcacagtcaggaactgaaccggccactgggagaaaagc

SEQ ID NO: 20393 - DNA, 853 bp, Macaca Mulatta
  misc_feature (1)...(853): n = A,T,C or G
gggacagagtgaagtgttacctaattaggcttgtcagattagtaataaactgaacagtaataaaactgtgaaagtaattggatcttcatttatgaaagacccattttcaggaccgaacctaggtcagagttctaaattggtccttctattttcaaacatatttaaagtaatatttctttctaatataatactgcatcctttgtgggaatgactataggtaaaatgtagtaagttacacagaaccagggttggctttatgtaaaagctagtgacctaaattgaaaacgaactttaagagaagttgttagtacagtggggaatgcttattacttacttcaaactgtttcccaaaataagtgcatttattttgacaataaaacttaaagctgttcatgaaaaggccttgaaaagttactctagaggaagaatgtcnnnnnnnnnnnnnnnnnnnnaaaaagtttacattaaattattcacntgttgtgagtaaaataaaaatgtgtgcctcgttactgtttttccatttttaaaggaatatcctcttaattatggaagccccgattttatttaaatagggaccattgaagatttttgtgtgnnnnnnnnnnnnnnnnnnnttccggaaacctttagggatgaaagtttaaatccttaaatcctccattaagttgaaatttgttaataaagggacgagtgaatgttctcggttaagcaaaaaatgtgaactttttttgggtaacccccctggttttttgggtttccaatacctttttcccaaaaccaaatttttttgtgttggttttttaaaaacacaattaaccaannnnnnnnnnnnnnnnnnnnnnnnccttaa

SEQ ID NO: 20394 - DNA, 133 bp, Macaca Mulatta
ttcaaagggtctcttactgcatttctttctttttgaaacagatatgaagtaatgctaaaatgctggcaccctaaagcagaaatgcgcccatccttttctgaactggtgtcccggatatcagcgatcttctcta

SEQ ID NO: 20395 - DNA, 379 bp, Macaca Mulatta
  misc_feature (1)...(379): n = A,T,C or G
ggattggggggaaagtgcatttttcttgcttatcatgcactctttctttttcttctcgcccccttttcccctccttttcttcttccttctttctttcctccctttaagggggaaatacatggtttttgtggaaatcattgtatgtttgctttagattttcttctgttttcaccatcataacacttaagttaaatcatgatgtaaaattttagtacttaaaggtttttaatcgtctcgaaggccaagcatcacatttgtaaacagtcctggtcagtagttaaataatgtttcaattaaagtgctgtaaaataaacttcaaagtggnnnnnnnnnnnnnnnnnnnnnnnnnnnnnnnnnnnnnnnnnnnnnnnnnnnnnnc

SEQ ID NO: 20396 - DNA, 161 bp, Macaca Mulatta
gagcctgtgcctctggaagaggtccaattggtggtagagccagaaggtggagcagtagctcctggtggaaccgtaaccctgacctgtgaagtccctgcccagccctctcctcaaatccactggatgaaggatgtgagtgacctggagagaggggctgggag

SEQ ID NO: 20397 - DNA, 2242 bp, Macaca Mulatta
tggacccgctgcacctgatattgtcttcttcttgtatcaaaggacatagagaataataatactactaataatactaatgatgatgaaagcagcaacagtagcaacatatggaatggcttgtcatcaactctgaagcaccagggccatccctggaaaagagggcctgttacataccgggcacccaaagccacagtcgttcctgcttcccccaccctggcctgatcctccttatgttggaaccctcaagggtggtcccagattcactagaggacacaaggtgagtgctgtgattcctactgtatccgatggagcagatgaccctctgctcctctccttggggaatcctgcaggccacttctgtctgtgaggtcccatcccattggacagaatacccccagactgctcgggcatcctggctcaaagacgccccatcctgacaccaggtcagagagatattctggagatagaagccagagtccagcatatcagggtcatgttgccctccagggccttgctgcaggtctattcatggtgggggaggggaggctggagaagaaagggcagagacaatcaggcacgtggccaaaccctgctcccctctaatggacatgcagggaacagggctggtccactccactgttccaactctggtagaagtcctcacagaccccagaccctctgcaagtctgtcctcaccctggggcccaattcctctaggctggcaggaggatgggtcttgagactgtgtctttatgctctgggatccctgcactgatgctgaggaggggaaggtcagggttgggctcctggtacatggggccagaggaactctttgggattggcaggctgggaggcagatggggcagccttggtcctgggctttccttcttccttgccttgacacccacccaggttcaggcttctgtcagagggcccactgcttcccagattatgacactggactcttcagtccttgaacccctgtctttttccagtggctctaacaggagagaaaaatcaggatataacacaccaacagaaaacacatgcatccatagcacaaggagagtttccctggacggagctggaggtaggggtgactctagtggaataacggagaggaaatcccctacccaggcccggtaccctgctctcctgacacccacacaggattccagatactgctgtagtttctgcccgaagtctgcccatacagagcaggagtgtgtcttggcctgcatagcatcttccttctagatatttgtgatgttcatagcaaaggtctgagctctggaggactgggatactggtcattcctgagtctccaggttgagagagaggaagagctacccataagagtaggactgcctgcggggctttccgcgctacctacagaagggtccatacggcgttgttctggattcccgtcgtaacttaaagggaaactttcacaatgtccggagcccttgatgtcctgcaaatgaaggaggaggatgtccttaagttccttgcagcaggaacccacttaggtggcaccaatcttgacttccagatggaacagtacatctataaaaggaaaagtgatggcatctacatcataaatctgaagaggacctgggagaagcttctgctggcggctcgtgccattgttgccattgaaaaccctgctgatgtcagtgttatatcctccaggaatactggccagagggccgtgctgaagtttgctgctgccactggagccactccaattgctggccgcttcactcctggaaccttcactaaccagatccaggcagccttccgggagccacggcttcttgtggttactgaccccagggctgaccaccagcctctcacggaggcatcttatgttaacctacctaccattgctctgtgtaacacagattctcctctgcgctatgtggacattgccatcccatgcaacaacaagggagctcactcagtggggtttgatgtgggggatgctgggctcggggaagttctgcgcaatgcgtggcaccattttcccgtgaacaccccgtgggaaggtcatggcctgaatctctaactttctacagaaaaatccctgaagaagaattggaaaaaagaaaaaaccaggccctgcctggcttataaaaaaggcgcgcagtgaaccccaggggagaggaaattttctccgggcggtgaatagaggagacacggcctctcaatggtcctctcgtagaagcgttgcgcgctggat

SEQ ID NO: 20398 - DNA, 1083 bp, Macaca Mulatta
  misc_feature (1)...(1083): n = A,T,C or G
gggggcgtgcgccttggcgtgcggagctggcaccttggcgccgtgggcggcggcggggacagctgtgaagtgtgaagttccttgtctgctggcagccagaggcgacgagtctggatgtcatggaagtgaaggatgccaattctgcgcttctcagtaactacaagacgttaaaatacatatcaaaatcaccatgcagacaccagagtcctgagactgtcagagaatttctcacagcaatgaaaagccataagttgaccaacaccgctgagagtgctggggaataaaaagggggtcttcactcggcagagacaaccaaaaggtgcagcgttccttttgcgagagagataatggaagattgccaatgaaaccaagtatccccgctcagaaaccaattctcagttgtttggaaaagcacccccatttaacttctgcaagaaatggacaccaaactggggtgttccccctttcccaaagccagaagtcaagggaccggaccttctcttatctgaccttatgtgaaaatgagacgttggtccatgtttttgaggaacatgggtgattccatccgggatttatattaaccctcgttatgtaaaaacagactnttctatccancgaagggggccgacattggggcgaggtgatatcttttttaacaagtggggggagccaatttcctcatgggtagatatcattgtaaaagataacagagtgtggggtatctcgcaaccacaatttgggggatatgggggcggagagaacgctatgagaaacagagtttttatatggccctctgatgggcaagagtgagaataaaaaaatataacaaatagcaaaaaaaagctacggaccccatataaagaacaaaaaaatctggctgcgcatacttgcgaaatcatagtgaacacaagttaaaagagagggaatgatagattatagagccacgcgattacgtctgatccctgttgatttatgtttgacgtgatgaaacaaaaataaattatgatgaatttattaaacacagtgatgtaaaacaagatagtgacaagacacaagagaattgcgagtaagtgggcgcgtata

SEQ ID NO: 20399 - DNA, 613 bp, Macaca Mulatta
  misc_feature (1)...(613): n = A,T,C or G
ggctgaaagcagaatacctgtttcaaagagtcaaccggtaactcctgaaaaacatcgagctagaaaaaaacaggcatggctttgggaagaagacaagaatttgagatctggcgtgaggaaatatggagagggaaactggtctaaaatactactgcattataaattcaacaaccggacaagtgtcatgttaaaagacagatggaggaaccattgaagaaactaaaaactgattttgcttcgaacaggcgaaaaaatggaattgggggnnnnnnnnnnnnnnnnnnnngattgaaaaagggggacccnnnnnnnnnnnnnnnnnnnnnnnnnnnnnnnnnnncaannnnnnnnnnnnnnnnnnnnnnnnnnnnnnnnnnnnnnnnannnnnnnnnnnnnnnnnnnnnnnnnnnnnnnnnnnnnnnnnnnnnnnnnnnnnnnnnnnnnnnnnnnnnnnnnnnnnnnnnnnnnnnnnnnnnnnnnnnnnnnnnnnnnnnnnnnnnnnnnnnnnnnnnnnaannnnnnnnnnnnnnnnnnnnnnnnnnnnnnnnnnnnngnnnnnnnnnnnnnnnnnnnnnnnnnnnnnnnnnnnnnnnnngagagggatttgtcttc

SEQ ID NO: 20400 - DNA, 1198 bp, Macaca Mulatta
  misc_feature (1)...(1198): n = A,T,C or G
tgggaacttctccacttcatctagcagcacagtatggtcattattccaccacagaggtactgctccgagctggtgtaagcagagatgccagaaccaaagtggaccgaacaccattacatatggcagcttctgaggacgatgccagcatagtagaggttttacttaannnnnnnnnnnnnnnnnnnnnnnnnnnnnnnnnnnnnnnnnnnnnnnnnnnnnnnnnnnnnnnnnnnnnnnnnnnnnnnnnnnnnnnnnnnnnnnnnnnnnnnnnnnnnnnnnnnnnnnnnnnnnnnnnnnnnnnnnnnnnnnnnnnnnnnnnnnnnnnnnnnnnnnnnnnnnnnnnnnnnnnnnnnnnnnnnnnnnnnnnnnnnnnnnnnnnnnnnnnnnnnnnnnnnnnnnnnnnnnnnnnnnnnnnnnnnnnnnnnnnnnnnnnnnnnnnnnnnnnnnnnnnnnnnnnnnnnnnnnnnnnnnnnnnnnnnnnnnnnnnnnnnnnnnnnnnnnnnnnnnnnnnnnnnnnnnnnnnnnnnnnnnnnnnnnnnnnnnnnnnnnnnnnnnnnnnnnnnnnnnnnnnnnnnnnnnnnnnnnnnnnnnnnnnnnnnnnnnnnnnnnnnnnnnnnnnnnnnnnnnnnnnnnnnnnnnnnnnnnnnnnnnnnnnnnnnnnnnnnnnnnnnnnnnnnnnnnnnnnnnnnnnnnnnnnnnnnnnnnnnnnnnnnnnnnnnnnnnnnnnnnnnnnnnnnnnnnnnnnnnnnnnnnnnnnnnnnnnnnnnnnnnnnnnnnnnnnnnnnnnnnnnnnnnnnnnnnnnnnnnnnnnnnnnnnnnnnnnnnnnnnnnnnnnnnnnnnnnnnnnnnnnnnnnnnnnnnnnnnnnnnnnnnnnnnnnnnnnnnnnnnnnnnnnnnnnnnnnnnnnnnnnnnnnnnnnnnnnnngagagagaagctcttcagaaacagctggatgaagcaaatcgagaagcacaaaaatatcgacagcagctcctaaagaaagaacaggaagcagaggcctacagacagaagttggaagctatgactcgtcttcagactaataaagaagctgtttaattgaaacgaacatgtagtttgattttacttttggtcaagaaagaatacagtcttgaactgtacacaacaaaggtacagccatgggaatacagaatgatagaagagactacagattgataa

SEQ ID NO: 20401 - DNA, 222 bp, Macaca Mulatta
  misc_feature (1)...(222): n = A,T,C or G
agaaggacaaccgttggcaaggtagcgttcccagtccgaacacctgcacgctcccacatgagggagagggcagattgaggaggtgggaaaatgtgccatgcgtcaggcatcaacgtgtaactctgggatcttcgttgccttcagtaatcagggtctgaaaaaagcagacaagtnnnnnnnnnnnnnnnngtctaataaaacttgtgtgcttttcaaaaaggc

SEQ ID NO: 20402 - DNA, 440 bp, Macaca Mulatta
tgttttggggtgaggttttttagggcatggtccagggtaaattcctgtaaggcctgggtgccctgcctgctgtgagattaaaggggaatgggactaagactgcagagccctggctcccccactacctgccaattgcccgcgatttgtgggggtctcttccactttctctggtctgggagcggctggggtgtctctgatcccaaggccgctggtgggtggcacatggattttcagtgccagagggtgctgtgggcactaggggaagcttaggcgcctcctcccaggctctctcggtgcctcctcatctgttccttcagcttctggatcttgagcaccagggcttgggcctcccaggctccctcctgtccttccaggagggcctggtatagctccagctgctgttccagcaactcttcagcttgggccagctcagccgtgcg

SEQ ID NO: 20403 - DNA, 3549 bp, Macaca Mulatta
  misc_feature (1)...(3549): n = A,T,C or G
tgcttctcattaaagagagtggagcctggtcttacaacacctccacagaagctatgacttatgatgaggccagtgcttattgccagcaaaggtacacgcatctggttgcaattcaaaacaaagaagagattgagtacctaaactccatattgagctattcaccaagttattactggattggaatcagaaaagtcaacaatgtgtgggtctgggtaggaacccannnnnnnnnnnnnnnnnnnnnnnnnnnnnnnnnnnnnnnnnnnnnnnnnnnnnnnnnnnnnnnnnnnnnnnnnnnnnnnnnnnnnnnnnnnnnnnnnnnnnnnnnnnnnnnnnnnnnnnnnnnnnnnnnnnnnnnnnnnnnnnnnnnnnnnnnnnnnncagctgcctgtaccaatacatcctgcagtggccacggtgaatgtgtagagaccatcaataattacacttgcaagtgtgaccctggcttcagtggactcgagtgtgagcaannnnnnnnnnnnnnnnnnnnnnnnnnnnnnnnnnnnnnnnnnnnnnnnnnnnnnnnnnnnnnnnnnnnnnnnnnnnnnnnnnnnnnnnnnnnnnnnnnnnnnnnnnnnnnnnnnnnnnnnnnnnnnnnnnnnnnnnnnnnnnnnnnnnnnnnnnnnnnnnnnnnnnnnnnnnnnnnnnnnnnnnnngtggttgagtgtgatgctgtgacaaatccagccaatgggtttgtggaatgtttccaaaaccctggaagtttcccatggaacacaacctgtacatttgactgtgaagaaggatttgaactaatgggagcccagagccttcagtgtacctcatctgggaattgggacaatgagaagccaacgtgtaaannnnnnnnnnnnnnnnnnnnnnnnnnnnnnnnnnnnnnnnnnnnnnnnnnnnnnnnnnnnnnnnnnnnnnnnnnnnnnnnnnnnnnnnnnnnnnnnnnnnnnnnnnnnnnnnnnnnnnnnnnnnnnnnnnnnnnnnnnnnnnnnnnnnnnnnnnnnnnnnnnnnnnnnnnnnnnnnnnnnnnnnnnnnagctttccagtgcacagccttgtccaaccccgagcgcggctacatgaattgtcttcctagcgcttctggcagtttccgtaatgggtccagctgtgagttttcctgtgagcagggatttgtgttgaagggatccaaaaggctccaatgtggccccacaggggagtgggacaatgagaagcccacatgtgaannnnnnnnnnnnnnnnnnnnnnnnnnnnnnnnnnnnnnnnnnnnnnnnnnnnnnnnnnnnnnnnnnnnnnnnnnnnnnnnnnnnnnnnnnnnnnnnnnnnnnnnnnnnnnnnnnnnnnnnnnnnnnnnnnnnnnnnnnnnnnnnnnnnnnnnnnnnnnnnnnnnnnnnnnnnnnnnnnnnnnnnnnnnnnnnnnnnnnnnnnnnnnnnnnnnnnnnnnnnnnnnnnnnnnnnnnnnnnnnnnnnnnnnnnnnnnnnnnnnnnnnnnnnnnnnnnnnnnnnnnnnnnnnnnnnnnnnnnnnnnnnnnnnnnnnnnnnnnnnnnnnnnnnnnnnnnnnnnnnnnnnnnnnnnnnnnnnnnnnnnnnnnnnnnnnnnnnnnnnnnnnnnnnnnnnnnnnnnnnnnnnnnnnnnnnnnnnnnnnnnnnnnnnnnnnnnnnnnnnnnnnnnnnnnnnnnnnnnnnnnnnnnnnnnnnnnnnnnnnnnnnnnnnnnnnnagcagctgccaaaggcttgaatcagatggaagctaccaaaagccttcttacatcctttaacttcccaagaatcannnacaggtgcgtctggggaactagagggatacattgaagttaacagagacagataactctcctcgggtgtctggcccttcttgcctactatgccaggtgtctttatggctgaaaccgcaacacccaccaccacttcaacagatcaaagtccagtgggcaaggtcagccttcaactgaaaagactcagtgttctctttcctattctcaggattaagagagtgttggctaatgaagggaaaggatattttcttccaagaaaaggtgaagagaccaagactctgaaatctcagaattccttttctaactctcccttgctcgctataaaatcttggcacagaaacacaatgttttgtggctttctttcttttgcccttcacagtgtttcgacagctgattacacagttgctgtcacaagaatgaataataattatcaagagtttagaggaaaaaatggcttaaaatattataacttaaaaaaataacagatgttgaatgcccacaggcaaatgcatggagggttgttaatggtgcaaatcctactgaagactctgtgtgagggttgctatgtacagtttaatcactttcatccctatgggattcagtgtttcttaaagagttcttaaagattgtgatctttttacttgcattgaatatattataatcttccataattcttcattcaatacaagtgttgtagggacttaaaaaacttgtaaatgttgtaaactatgatctggtaaaagttacttattctagattaccccctcgttgtttattaataaattatgttacannnnnnnnnnnnnnnnnnnnnnnnnnnnnnnnnnnnnnnnnnnnnnnnnnnnnnnnnnnnnnnnnnnnnnnnnnnnnnnnnnnnnnnnnnnnnnnnnnnnnnnnnnnnnnnnnnnnnnnnnnnnnnnnnnnnnnnnnnnnnnnnnnnnnnnnnnnnnnnnnnnnnnnnnnnnnnnnnnnnnnnnnnnnnnnnnnnnnnnnnnnnnnnnnnnnnnnnnnnnnnnnnnnnnnnnnnnnnnnnnnnnnnnnnnnnnnnnnnnnnnnnnnnnnnnnnnnnnnnnnnnnnnnnnnnnnnnnnnnnnnnnnnnnnnnnnnnnnnnnnnnnnnnnnnnnnnnnnnnnnnnnnnnnnnnnnnnnnnnnnnnnnnnnnnnnnnnnnnnnnnnnnnnnnnnnnnnnnnnnnnnngagtcatctggtagatttttaacgaatgaagatgtctaatagttattctctatttgttttcttctgtatgttagggtgctctggaagagaggaatgcctgtgtgagcaagcatttatgtttatttataagcagatttaacaattccaaaggaatctccagttttcagttgattactggcaatgagaaattctcagtcagtaattgccaaagctgctctagccttgcggagtgtgagaatcaaaactctcctacacttccattagcttagcatgtgttgaaaaaaaaagtttcagagaagttctggctgaacactggcaatgacaaagccaacagtcaaaacagagatgtgataaggatcagaacagcagaggttcttttaaaggggcagaaaaactctgggaaataagcgagaacaactactgtgatcaggctatgcatggaataaattgttattttctttgaaattgtttaagtgttgtaaatatttatgtaaactccattagaaattagctgtgtgaaataccaatgtggtttgtgtttga

SEQ ID NO: 20404 - DNA, 609 bp, Macaca Mulatta
  misc_feature (1)...(609): n = A,T,C or G
aggggtggcctatgtatgcacagctactgattgatttattcaaatatttagcgcctttccttagaaatgtggaactcaccaaacctatgcaaannnnnnnnnnnnnnnnnnnnnnnnnnnnnnnnnnnnnnnnnnnnnnnnnnnnnnnnnnnnnnnnnnnnnnnnnnnnnnnnnnnnnnnnnnnnnnnnnnnnnnnnnnnnnnnnnnnnnnnnnnnnnnnnnnnnnnnnnnnnnnnnnnnnnnnnnnnnnnnnnnnnnnnnnnnnnnnnnnnnnnnnnnnnnnnnnnnnnnnnnnnnnnnnnnnnnnnnnnnnnnnnnnnnnnnnnnnnnnnnnnnnnnnnnnnnnnnnnnnnnnnnnnnnnnnnnnnnnnnnnnnnnnnnnnnnnnnnnnnnnnnnnnnnnnnnnnnnnnnnnnnnnnnnnnnnggtatccaatgaacctgggaatcgctacaacctccagcttatcaatgcactggtgctctatgtcgggactcaggccattgcacacatccacaacaagggcagcacgccttcaatgagcaccatcactcactcagcacacatggatatcttccagaatttggctgtggacttggacactgagggt

SEQ ID NO: 20405 - DNA, 222 bp, Macaca Mulatta
gttccgggccgaggctgtggtgccggcgcgcatggcggagatgacccgctgcatccgggagcgagacttccccggcttcgcccagctgaccatgaaggacagcaaccagttccacgccacctgcctcgacaccttcccgcccatctcgtacctcaatgctgtctcctggcgcatcatccacctggtgcaccgcttcaacgcccaccacggggacaccaaggt

SEQ ID NO: 20406 - DNA, 783 bp, Macaca Mulatta
  misc_feature (1)...(783): n = A,T,C or G
ggtactttgaaaggagatgtcttggaacatcggaatgttctcagatttctggttgttatgtgatcatgtgtggaagttattaactttaatgttttttgccacagcttttgcaacttaatactcaaatgagtaacatttgctgttttaaacattaatagcagcctttctctctttatacagttgtattgtctgaacttgcattgtgattggcctgtagagttgctgagagggctcgaggggtgggctggtatctcagaaagtgcctgacacactaaccaagctgagtttcctatgggaacaattgaagtaaactttttgttctggtcctttttggtcgaggagtaacaatacaaatggattttgggagtgactcaagaagtgaagaatgcacaagaatggatcacaagatggaatttatcaaaccctagccttgcttgnnnnnnnnnnnnnnnnnnnnnnnntgtgtaatggtactgagtttgcttgctttgaagtagctcggtaannnnnnnnnnnnnnnnnnncagagacgggtaaggtaaggcgctggtgagggttgagggtaaagggaatactgggtgcggcaattttggaattgttttaggaatgggaaagggggggggaagggcccgaggtccgctaatgccgccgagagaaatgggaggtgccggaagggagggggaaccatttggtggcagcggcgttttggtgatagcgaggaagccgagatgggacaaaggggggccaaatgggagggtcgccttgtggcgaggggcaccgaaa

SEQ ID NO: 20407 - DNA, 1743 bp, Macaca Mulatta
  misc_feature (1)...(1743): n = A,T,C or G
gactttcaggtttaggcgccagttgtgggtcttccccttgtgggagcccatcttccctaagatgcctgcagccagccctccctcatgatttgtctcaccctgagtaggaatcatgcttctcccctatccttttcctttctcccataattaacatgtgtcctttccagtaagtctgtgcctctggcaggggatgaagaagtactcaaattagctaccatctttgcagcatccctgataacttgaaaaatttgggtctggtgctgttcactgagtctttgtgtaacggcaaaagcaggaaaggaagtcaagactgttgccttgtgtttagcaaagcagtccttatcctttatactctgttcttgggttttgtttttgttttgttttatacccaggctaaattgcttagtagcaannnnnnnnnnnnnnnnnnnnnnnnnnnnnnnnnnnnnnnnnnnnnnnnnnnnnnnnnnnnnnnnnnnnnnnnnnnnnnnnnnnnnnnnnnnnnnnnnnnnnnnnnnnnnnnnnnnnnnnnnnnnnnnnnnnnnnnnnnnnnnnnnnnnnnnnnnnnnnnnnnnnnnnnnnnnnnnnnnnnnnnnnnnnnnnnnnnnnnnnnnnnnnnnnnnnnnnnnnnnnnnnnnnnnnnnnnnnnnnnnnnnnnnnnnnnnnnnnnnnnnnnnnnnnnnnnnnnnnnnnnnnnnnnnnnnnnnnnnnnnnnnnnnnnnnnnnnnnnnnnnnnnnnnnnnnnnnnnnnnnnnnnnnnnnnnnnnnnnnnnnnnnnnnnnnnnnnnnnnnnnnnnnngtgtgaaaccataggtcttaacactctggagcagcacattgctgtggatgtggctaggagaccttagatatggcttaaaggcttttaagatgaggacagaaattgctcacaattgctcactttctcaacagaaagacttgtaagagtgccagcacggggtgtatgcagtgaagctgggtgggaagcatcatctgcacagtcgctgtcctagcaggatttttctcttatcttttcataccatgggatttttggatatcagtgtattttggttcttgaaatagcctaatagctgctcacacattgggtaagaaaattataccaatgtcatccctaaaggaagggtgagttgaatggaaattaagcccggtcattttatttgatctatcagctctattatcagtgcatgatcacccagatcacccttctcagcccccacagtgctgaaccatcttccttcctcttctccatggctattaatagtaccgctaaatttagagtccagagccagataaaagtattttgggattatctcccagtttgtggtagaagctgactggaatacaggttgagtatctcttatccaaaatgcttgggaccagaaaggtttcaggtgtcacattttggaatacctaacagttaagtacccgaaatctgaaaggcttttgaacatcatgtcggcactcaaaaaaaaaaaagactttggagcacttcagattttggatttttggatttgggatgctcatcctgtgtaggagaggctactcaattccatgtaatgacctagtcataatcatccaaagttaaaagccgggtagatttgaaagctctttccagggctgaagaagtgttcttatgttctctacgtatgactggcatcactgtggaaattaatactctgttcttcactaggatgtagtaagtggttaaattgagctatcccccac

SEQ ID NO: 20408 - DNA, 116 bp, Macaca Mulatta
agattgggatttggaattccaacagtgggcttaacatgacggacagcaacaaagacaagtccagcaatattactgattcactggccaatcgaacactcattgtcaccaccattctg

SEQ ID NO: 20409 - DNA, 3456 bp, Macaca Mulatta
  misc_feature (1)...(3456): n = A,T,C or G
ggtgtaattacttcaagcctgcaggatggcaatccagttccgttcgctcttccccttggcattgcctgggatgctggcacttctcggctggtggtggtttttctctcgtaaaaaaggccacgtcagcagccatgatgagcaggtggaggctggtgctgtacagctgagggctgactctgccatcaaagaacctcttcccatggaagacgtctgtcccgaagtggtgtccatgccccccagcgtcacagagccgccagaaaaggaactgtccaccatgagcaagctgcctgcagagccaccagcattgctccgggcacacccacctcgccgaagatcagagtcctcgggcagtcttcctaacaccatagacatgagattgcgaccagaaacacgcagagacaacagtgcaaagctggagctagccctgacaggtggtgaaaccaaattgattcctctagagtgccccctttcatctccaaagggtgtactattcccccacaaatcagctgaggtgtgtaagcaagagtccccgttcagtagggtgccaggaaggggccagccaggctaccctgcagcgcccccagagaagcatggctctggggagagggcaagagagacaggtggggccgaagggaccggtgatgctgtgttgggggaaaaggtgcttgaagaagatctgttgtctcaggagcatgtcttggaattggagaacagcaaggcccccaacctagcctctttagaaggggaagaagagaaggggaagagcagctcatcccaggtggggccggtgcaggaggaagagtatgtagcagagaagttgccaagtaggttcatcaagtcggctcacacagagctgccaaaggacgatgcggcaccagcacccccaatcacagatgccaaagcccaggacagagatgtcgagggagaactgggcaatgaggagagcttggatagaaatgaggagaacttggatagaaatgatgagaggtaggatagaaatgaggagggtctggatagaaatgaggnnnnnnnnnnnnnnnnnnnnnnnnnnnnnnnnnnnnnnnnnnnnnnnnnnnnnnnnnnnnnnnnnnnnnnnnnnnnnnnnnnnnnnnnnnnnnnnnnnnnnnnnnnnnnnnnnnnnnnnnnnnnnnnnnnnnnnnnnnnnnnnnnnnnnnnnnnnnnnnnnnnnnnnnnnnnnnnnnnnnnnnnnnnnnnnnnnnnnnnnnnnnnnnnnnnnnnnnnnnnnnnnnnnnnnnnnnnnnnnnnnnnnnnnnnnnnnnnnnnnnnnnnnnnnnnnnnnnnnnnnnnnnnnnnnnnnnnnnnnnnnnnnnnnnnnnnnnnnnnnnnnnnnnnnnnnnnnnnnnnnnnnnnnnnnnnnnnnnnnnnnnnnnnnnnnnnnnnnnnnnnnnnnnnnnnnnnnnnnnnnnnnnnnnnnnnnnnnnnnnnnnnnnnnnnnnnnnnnnnnnnnnnnnnnnnnnnnnnnnnnnnnnnnnnnnnnnnnnnnnnnnnnnnnnnnnnnnnnnnnnnnnnnnnnnnnnctcggattctctcagcacttcagggcttgaagactcttgcacagagaccagctcaagccccagggacaaggccatcaccccgccactgccagaaagtactgtgcccttcagcaatggggtgctgaagggggagttgtcagacttgggggctgaggatggatggaccatggatgtggaagcagatcattcaggaggtnnnnnnnnnnnnnnnnnnnnnnnnnnnnnnnnnnnnnnnnnnnnnnnnnnnnnnnnnnnnnnnnnnnnnnnnnnnnnnnnnnnnnnnnnnnnnnnnnnnnnnnnnnnnnnnnnnnnnnnnnnnnnnnnnnnnnnnnnnnnnnnnnnnnnnnnnnnnnnnnnnnnnnnnnnnnnnnnnnnnnnnnnnnnnnnnnnnnnnnnnnnnnnnnnnnnnnnnnnnnnnnnnnnnnnnnnnnnnnnnnnnnnnnnnnnnnnnnnnggctctcagcatcatgtagacaaagcgctgaacttgattgggaagaagttcaaggagctgaacctcaccaatatctacgctcccccattgccttcactggcgctgccttctctgccaatgacatcctggnnnnnnnnnnnnnnnnnnnnnnnnnnnnnnnnnnnnnnnnnnnnnnnnnnnnnnnnnnnnnnnnnnnnnnnnnnnnnnnnnnnnnnnnnnnnnnnnnnnnnnnnnnnnnnnnnnnnnnnnnnnnnnnnnnnnnnnnnnnnnnnnnnnnnnnnnnnnnnnnnnnnnnnnnnnnnnnnnnnnnnnnnnnnnnnnnnnnnnnnnnnnnnnnnnnnnnnnnnnnnnnnnnnnnnnnnnnnnnnnnnnnnnnnnnnnnnnnnnnnnnnnnnnnnnnnnnnnnnnnnnnnnnnnnnnnnnnnnnnnnnnnnnnnnnnnnnnnnnnnnnnnnnnnnnnnnnnnnnnnnnnnnnnnnnnnnnnnnnnnnnnnnnnnnnnnnnnnnnnnnnnnnnnnnnnnnnnnagacgatgaccagttttcacctgaagcagatgccgccatgagcgagatgacagggaatacagcactgcttgctcaggtnnnnnnnnnnnnnnnnnnnnnnnnnnnnnnnnnnnnnnnnnnnnnnnnnnnnnnnnnnnnnnnnnnnnnnnnnnnnnnnnnnnnnnnnnnnnnnnnnnnnnnnnnnnnnnnnnnnnnnnnnnnnnnnnnnnnnnnnnnnnnnnnnnnnnnnnnnnnnnnnnnnnnnnnnctgttgaaaccgggcttggccctcaagtcaaagattaacatcagaataacaaacattgccttctccagaaagtcctttcttcctccatactgtagtcctattgagaagacgtttcgtctctgagaaaaaaggatgaaaccgtgggttctcttctcaaagctaaaggatagtgtttaacaagccagctggcttatcctggttttcaactgtnnnnnnnnnnnnnnnnnnngaatagaancagtctcaaccagatngtcctcttcccctgttccattcccttcttccttctatctccttccccggcaatatccaaacaaactggcagacaggccagggatgtgtgttgcttgcttgagagggtttcttttacttcaaatctttcttcagggagcaagacatgaactgactaattggtatccactacttgtacagcttacataaatgaattgatgatatttaaccagtttttataaacttcatctaggtctctaaatacagactttttaaattgccgctgtaaatatgaagtggtcatcactcctgaccttggtcagtggggaggggaactggtatccttcgaagcctggttgtaatttgtacccattttctatttgtgcaaactctgtaaatatgagtttaaacaaatgtaatattttgtacaagatacactggagaacagagggaactcaaga

SEQ ID NO: 20410 - DNA, 298 bp, Macaca Mulatta
tcaaacacaccctcctaagcctgcctgtatttccttcagtgcctggcccctgaggcccactgccctgtccccttcactgagcagatgttccacaggctgtgtgatgggaccataactaaacagcttgacatcactttgccatcttgaatttattcacacattttgaaaggagcgccatcttgttagctagctatcaggactcaaagaagatacggttcttggccttggtgagcccccaaaatgccacagcccagcctaacatttataaagcttcacttttgatccttaaaatccatgc

SEQ ID NO: 20411 - DNA, 3445 bp, Macaca Mulatta
  misc_feature (1)...(3445): n = A,T,C or G
agaaaatgcttgactacctcaaggagaaaaaggatgtgggctttctttcagagcctggctggcctgatgcagtcatgtagntagtgtccttgacctaaatgcatttgagcgacaaaacaaagctgaaggtcttgggatggtgacagaggaaggatcaggnnnnnnnnnnnnnnnnnnnnnnnnnnnnnnnnnnnnnnnnnnnnnnnnnnnnnnnnnnnnnnnnnnnnnnnnnnnnnnnnnnnnnnnnnnnnnnnnnnnnnnnnnnnnnnnnnnnnnnnnnnnnnnnnnnnnnnnnnnnnnnnnnnnnnnnnnnnnnnnnnnnnnnnnnnnnnnnnnnnnnnnnnnnnnnnnnnnnnnnnnnnnnnnnnnnnnnnnnnnnnnnnnnnnnnnnnnnnnnnnnnnnnnnnnnnnnnnnnnnnnnnnnnnnnnnnnnnnnnnnnnnnnnnnnnnnnnncagggtccttgcactgggaattcaacagagtttggcacacagcaggctgtgggatgcctgtggtcggctttctttcatgtatttgcccacatgcacatgatgctgtcgcannnnnnnnnnnnnnnnnnnnnnnnnnnnnnnnnnnnnnnnnnnnnnnnnnnnnnnnnnnnnnnnnnnnnnnnnnnnnnnnnnnnnnnnnnnnnnnnnnnnnnnnnnnnnnnnnnnnnnnnnnnnnnnnnnnnnnnnnnnnnnnnnnnnnnnnnnnnnnnnnnnnnnnnnnnnnnnnnnnnnnnnnnnnnnnnnnnnnnnnnnnnnnnnnnnnnnnnnnnnnnnnnnnnnnnnnnnnnnnnnnnnnnnnnnnnnnnnnnnnnnnnnnnnnnnnnnnnnnnnnnnnnnnnnnnnnnnnnnnnnnnnnnnnnnnnnnnnnnnnnnnnnnnnnnnnnnnnnnnnnnnnnnnnnnnnnnnnnnnnnnnnnnnnnnnnnnnnnnnnnnnnnnnnnnnnnnnnnnnnnnnnnnnnnnnnnnnnnnnnnnnnnnnnnnnnnnnnnnnnnnnnnnnnnnnnnnnnnnnnnnnnnnnnnnnnnnnnnnnnnnnnnnnnnnnnnnnnnnnnnnnnnnnnnnnnnnnnnnnnnnnnnnnnnnnnnnnnnnnnnnnnnnnnnnnnnnnnnnnnnnnnnnnnnnnnnnnnnnnnnnnnnnnnnnnnnnnnnnnnnnnnnnnnnnnnnnnnnnnnnnnnnnnnnnnnnnnnnnnnnnnnnnnnnnnnnnnnnnnnnnnnnnnnnnnnnnnnnnnnnnnnnnnnnnnnnnnnnnnnnnnnnnnnnnnnnnnnnnnnnnnnnnnnnnnnnnnnnnnnnnnnnnnnnnnnnnnnnnnnnnnnnnnnnnnnnnnnnnnnnnnnnnnnnnnnnnnnnnnnnnnnnnnnnnnnnnnnnnnnnnnnnnnnnnnnnnnnnnnnnnnnnnnnnnnnnnnnnnnnnnnnnnnnnnnnnnnnnnnnnnnnnnnnnnnnnnnnnnnnnnnnnnnnnnnnnnnnnnnnnnnnnnnnnnnnnnnnnnnnnnnnnnnnnnnnnnnnnnnnnnnnnnnnnnnnnnnnnnnnnnnnnnnnnnnnnnnnnnnnnnnnnnnnnnnnnnnnnnnnnnnnnnnnnnnnnnnnnnnnnnnnnnnnnnnnnnnnnnnnnnnnnnnnnnnnnnnnnnnnnnnnnnnnnnnnnnnnnnnnnnnnnnnnnnnnnnnnnnnnnnnnnnnnnnnnnnnnnnnnnnnnnnnnnnnnnnnnnnnnnnnnnnnnnnnnnnnnnnnnnnnnnnnnnnnnnnnnnnnnnnnnnnnnnnnnnnnnnnnnnnnnnnnnnnnnnnnnnnnnnnnnnnnnnnnnnnnnnnnnnnnnnnnnnnnnnnnnnnnnnnnnnnnnnnnnnnnnnnnnnnnnnnnnnnnnnnnnnnnnnnnnnnnnnnnnnnnnnnnnnnnnnnnnnnnnnnnnnnnnnnnnnnnnnnnnnnnnnnnnnnnnnnnnnnnnnnnnnnnnnnnnnnnnnnnnnnnnnnnnnnnnnnnnnnnnnnnnnnnnnnnnnnnnnnnnnnnnnnnnnnnnnnnnnnnnnnnnnnnnnnnnnnnnnnnnnnnnnnnnnnnnnnnnnnnnnnnnnnnnnnnnnnnnnnnnnnnnnnnnnnnnnnnnnnnnnnnnnnnnnnnnnnnnnnnnnnnnnnnnnnnnnnnnnnnnnnnnnnnnnnnnnnnnnnnnnnnnnnnnnnnnnnnnnnnnnnnnnnnnnnnnnnnnnnnnnnnnnnnnnnnnnnnnnnnnnnnnnnnnnnnnnnnnnnnnnnnnnnnnnnnnnnnnnnnnnnnnnnnnnnnnnnnnnnnnnnnnnnnnnnnnnnnnnnnnnnnnnnnnnnnnnnnnnnnnnnnnnnnnnnnnnnnnnnnnnnnnnnnnnnnnnnnnnnnnnnnnnnnnnnnnnnnnnnnnnnnnnnnnnnnnnnnnnnnnnnnnnnnnnnnnnnnnnnnnnnnnnnnnnnnnnnnnnnnnnnnnnnnnnnnnnnnnnnnnnnnnnnnnnnnnnnnnnnnnnnnnnnnnnnnnnnnnnnnnnnnnnnnnnnnnnnnnnnnnnnnnnnnnnnnnnnnnnnnnnnnnnnnnnnnnnnnnnnnnnnnnnnnnnnnnnnnnnnnnnnnnnnnnnnnnnnnnnnnnnnnnnnnnnnnnnnnnnnnnnnnnnnnnnnnnnnnnnnnnnnnnnnnnnnnnnnnnnnnnnnnnnnnnnnnnnnnnnnnnnnnnnnnnnnnnnnnnnnnnnnnnnnnnnnnnnnnnnnnnnnnnnnnnnnnnnnnnnnnnnnnnnnnnnnnnnnnnnnnnnnnnnnnnnnnnnnnnnnnnnnnnnnnnnnnnnnnnnnnnnnnnnnnnnnnnnntccttcctctacctagcctggtatatgactatgtctgttcttggacactataacaactttttttttgctgctcaccttctcgacattgctatgggattcaagacattaagaaccatcttgtcctcagtaactcacaatggcaaacagnnnnnnnnnnnnnnnnnnnnnnnnnnnnnnnnnnnnnnnnnnnnnnnnnnnnnnnnnnnnnnnnnnnnnnnnnnnnnnnnnnnnnnnnnnnnnnnnnnnnnnnnnnnnnnnnnnnnnnnnnnnnnnnnnnnnnnntgctatatgttccacatgtatgttggagttcgtgctggaggagggatcggggatgaaatcgaagacccagcaggagatgaatatgagatctatcgaatcatctttgacatcactttcttcttctttgttattgtcattctcttggccataatacaaggtnaggtctaattatcgatgcttttggagaactaagagaccaacaggaacaagtcaaagaagacatggagnagaccaaatgcttcatctgtgggataggcaatgattacttcgacacagtgccacatggctttgaaacccacactttacaggagcacaacttggctaattacttgt

SEQ ID NO: 20412 - DNA, 322 bp, Macaca Mulatta
cacgcagaagcctggggtcaggatgggtagcccagagtctactcaaccctgatacagaaggggaaactgaggcagggggtgcggggtgcagaggaaccctagaggagctgtaccagcacccaggtccaggaggcttgcctggtcgctgaccgtactgtctgtgtctgtcagcagatgaagctgggatggaggctctgaccccaccaccggtaagaacctcactgtgtgattctgggctgccctctggagctggaagatcaagccttattgtgatccccagagcttggcacgtggctagcacagggtagacctagtagacaga

SEQ ID NO: 20413 - DNA, 475 bp, Macaca Mulatta
tggagccggggcgtcggggggtcgcggcgctgctggcgctgctgtgcgtggcctgtgcgctgcgcgccgggcgcgcccagtacgaacgctacagcttccgcagcttcccacgggacgagctgatgccgctcgagtcggcctaccggcacgcgctggacaagtatagtggcgagcactgggctgagagcgtgggctacctggagatcagcctgcggctgcaccgcctgctgcgcgacagcgaggccttctgccaccgcaactgcagcgccgcgccgcagcccgagcccgcctccggcctcgccagctatccagagctgcgcctcttcgggggcctgctgcgccgcgcgcactgcctcaagcgctgcaagcaaggcctgccagccttccgccagtcccagcccagccgcgaggtgctggctgacttccagcgccgcgagccctacaagttcctgcagttcgcctacttcaaggcaag

SEQ ID NO: 20414 - DNA, 631 bp, Macaca Mulatta
  misc_feature (1)...(631): n = A,T,C or G
accattgttcttatcccatggtagcagttggttacacgattcttattttataagaaacacagctgagaggcattatggattagtctgctgaagtgaagggaatatagatgtcacctaagtgatagttaannnnnnnnnnnnnnnnnnnnnnnnnagtagaagccagttcagggtccatgttatttagtgaccaacattttaaagtatagcagcaacctggtacttaaacacaaagtaaattgcccattaacaatcgtttttatctttagcatgaaaactttccacaggtctaaaaattgcttccattttttaatttgaggtgttgcatgggaattctaagctgatccatcatgatgtaaagttcacaatatggttcaaatgtaacagtgcagaattgaatatggaggcatgcataaccttcctcttagaaaatgggaggagttgtaatttcaaatttttgtgcaattagattaaatcataatgcaacagtcttgtggcttagtttccttaaatatgctctttcaagatagttttggattatgctgtattgactgtcttaaatatgaaagataagtcattgcattaagagttcaagctatatgaatatattaagatacatggccgaaataat

SEQ ID NO: 20415 - DNA, 326 bp, Macaca Mulatta
cttgaatgactgaataaacaaaccagtgaggggagagtgggtggcaggatggggaaatcctgacattgagcttttgcctgaaccttgaaagtgtttgtgcagattggtgcctgggaatagaagtgatgcccaactttctgccaaatgtagatcttaaactcccacagaggggaccgtctgtatcaaggtgcccgggtggtccagaggacagcagtgtgtataaaaaagcccaatgacaacaactctgtgagcctctgggctttcctgttgggatcaacagaggggaaattgtgaccttttttgttttgacacgtaatcaggtcata

SEQ ID NO: 20416 - DNA, 983 bp, Macaca Mulatta
  misc_feature (1)...(983): n = A,T,C or G
tcatagcatcctgggctcaggccctgggtatgagaggtgcatgcatagcgcttgaggttgccgaagtcacaggtgctgtcctccaggcagaaactggccttgtggccctcagccaccttcttgcctgtgctccacatctccctgctgctcatccagtcgtggctggagcccgtgcagttactcaggagtgtgtttgccaaccacctggtgcataccaactcgaacttcgacatctatctctacctaaagaaactagaggaaggcatccaaacgctgatggggaggctggaagacggcagcccccggactgggcagatcttcaaggagacctacagcaagtatgacacaaactcgcacaacgatgacacactgctcaagaactacaggctgctctactgcttcaggaaggacatgaacaaggtcgagacattcctgcgcaccgtgcggtgccgcgctgtggagggcagctgtggcttctagatgcctgggtggcatcccttgtgacccctcccaattgccactcctggccatggaaggtgccactccagtgtccaacagccttgtcctaataaaattaagttgcatcaaacnnnnnnnnnnnnnnnnnnngacnnnnnnnnnnnnnnnannnnnngcctataatgagtcagtattccaattcactggccgtagtattacaannnnnnnnnnnnnnncnnnnnnnnnnnnnnnnnnnnnnnnnnnnnnnnnnnnnnnnnnnnnnnnnnnnnnnnnnnnnnnnnnnnnnnnnnnnnnnnnnnnnnnnnnnnnnnnnnnnnnnnnnnnnnnnnnnnnnnnnnnnnnnnnnnnnnnnnnnnnnnnnnnnnnnnnnnnnnnnnnnnnnnnnnnnnnnnnnnnnnnnnnnnnnnnnnnnnnnnnnnnnnnnnnnnnnnnnnnnnnnnnnnnnnnnnnnnnnnnnnnnnnnnnnnnnnnnnnnnnnnnnnnnnnnnnnnnnnnnnnnngaa

SEQ ID NO: 20417 - DNA, 1659 bp, Macaca Mulatta
  misc_feature (1)...(1659): n = A,T,C or G
agcacagctgacagccatcattaccaccctggtttctccagccagcataatggaatcagacaagggatggacatctacatctacatcagggaagcccaggaannnnnnnnnnnnnnnnnnnnnnnnnnnnnnnnnnnnnnnnnnnnnnnnnnnnnnnnnnnnnnnnnnnnnnnnnnnnnnnnnnnnnnnnnnnnnnnnnnnnnnnnnnnnnnnnnnnnnnnnnnnnnnnnnnnnnnnnnnnnnnnnnnnnnnnnnnnnnnnnnnnnnnnnnnnnnnnnnnnnnnnnnnnnnnnnnnnnnnnnnnnnnnnnnnnnnnnnnnnnnnnnnnnnnnnnnnnnnnnnnnnnnnnnnnnnnnnnnnnnnnnnnnnnnnnnnnnnnnnnnnnnnnnnnnnnnnnnnnnnnnnnnnnnnnnnnnnnnnnnnnnnnnnnnnnnnnnnnnnnnnnnnnnnnnnnnnnnnnnnnnnnnnnnnnnnnnnnnnnnnnnnnnnnnnnnnnnnnnnnnnnnnnnnnnnnnnnnnnnnnnnnnnnnnnnnnnnnnnnnnnnnnnnnnnnnnnnnnnnnnnnnnnnnnnnnnnnnnnnnnnnnnnnnnnnnnnnnnnnnnnnnnnnnnnnnnnnnnnnnnnnnnnnnnnnnnnnnnnnnnnnnnnnnnnnnnnnnnnnnnnnnnnnnnnnnnnnnnnnnnnnnnnnnnnnnnnnnnnnnnnnnnnnnnnnnnnnnnnnnnnnnnnnnnnnnnnnnnnnnnnnnnnnnnnnnnnnnnnnnnnnnnnnnnnnnnnnnnnnnnnnnnnnnnnnnnnnnnnnnnnnnnnnnnnnnnnnnnnnnnnnnnnnnnnnnnnnnnnnnnnnnnnnnnnnnnnnnnnnnnnnnnnnnnnnnnnnnnnnnnnnnnnnnnnnnnnnnnnnnnnnnnnnnnnnnnnnnnnnnnnnnnnnnnnnnnnnnnnnnnnnnnnnnnnnnnnnnnnnnnnnnnnnnnnnnnnnnnnnnnnnnnnnnnnnnnnnnnnnnnnnnnnnnnnnnnnnnnnnnnnnnnnnnnnnnnnnnnnnnnnnnnnnnnnnnnnnnnnnnnnnnnnnnnnnnnnnnnnnnnnnnnnnnnnnnnnnnnnnnnnnnnnnnnnnnnnnnnnnnnnnnnnnnnnnnnnnnnnnnnnnnnnnnnnnnnnnnnnnnnnnnnnnnnnnnnnnnnnnnnnnnnnnnnnnnnnnnnnnnnnnnnnnnnnnnnnnnnnnnnnnnnnnnnnnnnnnnnnnnnnnnnnnnnnnnnnnnnnnnnnnnnnnnnnnnnnnnnnnnnnnnnnnnnnnnnnnnnnnnnnnnnnnnnnnnnnnnnnnnnnnnnnnnnnnnnnnnnnnnnnnnnnggggaagtagcttggccctgacctacttgccccgctggcccaggaagctgctcaaatccacgctggtgctcatgcccctctttggcgtccactacatcgtcttcatggccacaccatacaccgaggtctcagggacgctctggcaagtccagatgcactatgagatgctcttcaactccttccaggtgcgcaatgctggccctggcctggctgagggtgggaagggttccggggacaggccctgattccagacacccctcttcacagggattttttgtcgccatcatatactgtttctgcaatggcgaggt

SEQ ID NO: 20418 - DNA, 624 bp, Macaca Mulatta
  misc_feature (1)...(624): n = A,T,C or G
atgacaagaattttatcggcattatttttcagtgtagtttgttgtttaaaataatgtaatcatcaaaatgatgcatattgttacactactattaactaggcttcaatatatcagtgtttatttcattgtgttaatgtatacttgtaaataaaatagctgcaaacnnnnnnnnnnnnnnnnnnnnnnnnnnnnnnnnnnnnnnnnnnnnnnnnnnnnnnnnnnnnnnnnnnnnnnnnnnnnnnnnnnnnnnnnnnnnnnnnnnnnnnnnnnnnnnnnnnnnnnnnnnnnnnnnnnnnnnnnnnnnnnnnnnnnnnnnnnnnnnnnnnnnnnnnnnnnnnnnnnnnnnnnnnnnnnnnnnnnnnnnnnnnnnnnnnnnnnnnnnnnnnnnnnnnnnnnnnnnnnnnnnnnnnnnnnnnnnnnnnnnnnnnnnnnnnnnnnnnnnnnnnnnnnnnnnnnnnnnnnnnnnnnnnnnnnnnnnnnnnnnnnnnnnnnnnnnnnnnnnnnnnnnnnnnnnnnnnnnnnnnnnnnnnnnnnnnnnnnnnnnnnnnnnnnnnnnnnnnnnnnnnnnnnnnnnnnnnnnnnnnnnnnnnnnnnnnnnnnnnnnnnnnnnnnnnnnnnnnnnnn

SEQ ID NO: 20419 - DNA, 325 bp, Macaca Mulatta
agacagagttcagttcttagtgagaatcagaggatgaacaatccagacagaccatttgagcgtactgggcatggaaaaactttcaatcagaacacagcttttaaccagcaccagagaattcatagtggagagaagccctatgagtgcaatgaatgtggaaaagcttttagtcggccctctatcctcagtaaacatcagagaatccacaatggtaagaaaccctacacatgtgaggattgtggcaaatctttcagtgctcactcatactttattcagcactgtaaaattcacactggacaaaagccctatgagtgtattaaatgtg

SEQ ID NO: 20420 - DNA, 1148 bp, Macaca Mulatta
ttctaacatgaggggtgggtttggtttatctggtgtgaaggccaaataccgtggaggtgaaatccgagaacagaatggagacagtcttgtccatgctgctcttgtagcagagagtgctgtcgcgggaagtgcagaggcaaatgcgtttagtgttcttcagcatgtcctcggtgctgggccacatgtcaagaggggcagcaacaccaccagccatctgcaccaggctgttgccaaggcgactcagcagccatttgatgtttccgcatttaatgccagttactcagattctggactcttcgggatttatactatttcccaggccacagctgctggagatgtaatcaaggctgcatataatcaagtcaaaacaatagctcaaggaaacctttccaacacagatgtccaagctgccaagaacaagctgaaagctggatacctaatgtcagtggagtcttctgaacgtttcctggaagaagtcgggtcgcaggctctagttgctggttcttacgtgccaccatccacagtccttcagcagattgattcagtggctaacgctgatatcataaatgctgcaaagaagtttgtttctggccagaagtcgatggcagcaagtggaaatttgggacatacaccttttgttgatgagctgtaatactgacgcacacattacgggagagagctgaacattctctcagcccagagcagcaaacacatgaaagtcagaaatctctaatataacatttgtcttttttccagtgaggtaaaataaggcataaatgcaggtaattattctcagctgacctaaagtcaataaaacattctgcttaggtgtttttcttacgtttttctcaatgagttaatcaacaagtatttattatgtgctgatatttttgttttggatgctttaaaggagacaggaatataattattgagcatagaagcattagaaactattaaaattaaggctaagtggctatcagtataaatagtgccaggttactattggtggcttttcagatgaaagcaagttcaaaatttgtcattttgggtatcaatagctaaatggtctggtttttacccctgttttgccttttttgcaataacattattgcgaaaaactaatttcctatcatcatttctatattcca

SEQ ID NO: 20421 - DNA, 839 bp, Macaca Mulatta
attactcttttggaaagtgtgcatttatttgatgctgatttactactgttaattgtgcattatttttataatgtcattattaaacattaaacttttttattctgtaagtaaaataagtaggtaagatattttcgaggctttatagtttgctttgaaagatttatatagcctgggagaaaaatctcatatacctattactttgtagtagttgttattactaaagtgttataatgtgtctgcaactatatttcatgtttatatgagtcttgtgaaaagtaatccttttgtctgtttgtagacacagaaacgtaaaatggatggagcacctgacggtcgaggaagaaaaaagaagctgaaactatgaatatgtttttgtttcataatcactaactttaaaccagtagttctttaatttacgggtcttcataagatgtactgtacaatgctcaattgttatgtcatttaaagacatcaggttcatctgtttactgagctagaaacatagtatgtagtttcacttttttaaatgcaacagctgtgctgaaatttttttatcattaacacttgaagtaataaaataggcttcatttattactaagtgtttcatttgatttatttttctgttgtagttccatttgtgaagattgtgactttttgtttattagctataatttctatccttgtaaggtttaaaaacaagttaaaaagaaaattgcaaataacatttgtccctttcagtcttcatttagttgtataaagattttaattcactttgcctttgcagaaatttgggtataattgttgtagtgctattgagtctcatctggaaagattatata

SEQ ID NO: 20422 - DNA, 772 bp, Macaca Mulatta
gggctgtggtgtctcagcgtctgacagaatctccatgtgctttggtggccagccagtatggatggtctggcaacatggagagaatcatgaaagcacaagcgtaccaaacaggcaaggacatctctacaaattactatgcgagtcagaagaaaacatttgaaattaatcccagacacccgctgatcagagacatgcttcgacgaattaaggaagatgaagatgataaaacagttttggatcttgctgtggttttgtttgaaacagcaacgcttcggtcaggatatcttttaccagacactaaagcatatggagatagaaatataaagaatgcttcgcctcagttttgaacattgacccctgatgcaaaggtggaatatgagccccaacaaaaaccctgaaaaagactacaggaagaccccaacagaaaaaccacccacccaaaactaatgatcaaacaaaatgggattgtggggaaaccgtattgaaataaataaaaccagaaaatcggccataagggaaatcccttcccccctgaaaacaaacaaattcaaattttgctacaaatttttttccctcccccccccactatttttgaatttccctttttttgtggcccaaaaagggcaaaacggttcgaaaatttcgtcagcaccaccatattccttctttccgggcggaaaaaaaaaacattcatttctatcctcgtatatgccctccccgcccctgtgaagaatgttttcccactcttttttttgcccccccccacgttgcc

SEQ ID NO: 20423 - DNA, 555 bp, Macaca Mulatta
caaagacatgattttttaatggtttttcttgacagtgaagagaaaaacaatattatcaaatgaaataggcacttaaaatatcctgtctttcctatataacaatgcttttttctgactttccatgaggaaagaaatagccaagcatgtttccagtagccccattgaaattgtgaatctgtcctatactccctagggactgcacccattgatattcaaggttggtggtcattatatatggagcagaactaaaataaccatggtagaactgaatgtgtaatgttggctttattctagctggtacgacatggtacacagtttcaaaacataagttcacctacgggaaagctcagaccggtaaaacagagcatgggaactgctggtctaaacgcagttgttcctgctggaacagacctctggtcaaactggcaagcagttaacattttctttcagggccctcctctctatggcctcaacttcctcctctctcttccagcaacttcccctttcatcattcctttccctggggacttggcattcagtgatcctgtagatatg

SEQ ID NO: 20424 - DNA, 1255 bp, Macaca Mulatta
  misc_feature (1)...(1255): n = A,T,C or G
ggggcagaaatgcacgaaggagagagagtgagaagtctctagaaaatgaaacactcaataaggaggaagattgtcactctccaacttctaaacctcccaaacctgatcagcccctaaaggtaatgccagcccctccaccaaaggagaatgcttgggtgaagcgaagttctaaccctccagctcgatctcagagctcagacacagagcagcaatcccctacaagtggtgggagaaaagtagctccagctcaaccgtctgaggaaggaccagcaaggaaagatgaaaataaagtagatgggatgaatgtcccaaaaggccaggctgggacctctagccgtggaccaggagacggagggaacaaagaccactggaaggagtcagataggaaagatggcaaaaaggatcaagactccagatctgcacctgagccaaagaaacctgaggaaaatccagcttcgaagttcagttctgcaagcaagtatgctgctctctctgttgatggtgaagatgaaaacgagggagaagattatgccgaatagacctctacatcctgtgctttctcctagtttctctccaccctggaacattcgagagcaaatcaaaacctctatccagacaagacaaaataaaactcaccatctcctgaagacctttcttagcttttttttaagaccaggggtgaaattattttgcatgctgctgcagcctttaaagtattaaagtaactggagaatcgccaatatagccagagagaaagggactacagctttttagaggaagagttgtggtgtgttaggtcaccacacagttgccagtgtgattagtgcctaggggcctccatttagcagaaatggtaatgacagtgatataacgtctggaacctggttgggcagtaggggagggaggtagcaggaaaatcgtgacatttctaacttgaagtggaatcttattgtggaatttgcatctcaaacatatctgaattcatttccatctggcaagtcaattgancaagatgatgaaatcagaagagcacactcattataatcgagcacagaccaacagggaacataaacaaaccagggtaatgataacagacgaaaaaaggagcacaaataacggcacagagagaataacgcgatgatcaattactctccttttctctttttctttcggcggcagcgcgcctagaaaaagacaagnnnnnnnnnnnnnnnnnnnnnnnnnnnnnnnnnnnnnnnnnnnnnnnnnnnnnnag

SEQ ID NO: 20425 - DNA, 790 bp, Macaca Mulatta
  misc_feature (1)...(790): n = A,T,C or G
ttaaacttttttatatttggcccctgggaaaaaaggcaaaaattagcgttccttagatggcccagtaaaattggtgaaccgatggaccccatggatgttttttatatagtggtgaccaggataccaatttcttctgggattcagnnnnnnnnnnnnnnnnnnnnnnnngggcacaaaaataaattggtttgagggtatgtgaaacactagaggtcaactttacatagtatatagaactgatggttttacccagctacccagtagcataacttttcacagctcggggataacttaacatggctgaaataaaactaaaaggatggtttttaaactttggcatttcatgatttatcatctcactctactctaaaactggttgtttcttactgaaggtgttcgccatttgaaattttctcttcaaagtatttttaagtagtatcttaagacacgacttgttagtaataaaagtgttactagttggaagagtagttctcaaatttgtcttaatgtaaatcacctgggaatttttcaagttattttgaaatttaaaccaccgtctgagggtggaacgcagacatcctcagtaatccttagtttccccaggtgattccaggtttggtcaccattatcttagagcatctactcacttcctctagcctctgggttatttgtccaaggtcttgtagtgagttacagaatactaaagtggatgtagaagtggtcagattgactgaaaccataccctgaattagatgtgagtttagattttgtttatatggatcctgatccc

SEQ ID NO: 20426 - DNA, 470 bp, Macaca Mulatta
gtcctggccgtgtagcacgtggccttggccctgatggagatcaaggtctgcgatggtcaagagcacatggtcaccatctcgctgagggagggtgaggccaccctggaggtggacggcaccaggggccagagcgaggtgagcgctgcgcagctgcaggagaggctggccgtgctcgagaagcacctgcggagccccgtgctcacctttgccggtggcctgccagatgtgccggtgacttcagcgccagtcaccgcattctaccgtggctgcatgacactggaggtcaaccggaggctgctggacctggacgaggcggcatacaagcacagtgacatcaccgcccactcctgcccacccgtggagcccgccgcagcctaggcccccatgggacgcagcaggctcctcagcctctgtccgaaacagcggaggagcatgggggctcctcaccacgtggggccacctgagagctg

SEQ ID NO: 20427 - DNA, 2853 bp, Macaca Mulatta
  misc_feature (1)...(2853): n = A,T,C or G
gcatttcgtttcggccagtgccgggggctacccaccctggggcgcgggatccttggggcccgtgaggcccactcttagcggccagggcctaccgcggcccgccgccggccctcatgaggcatagcctgaccaagctgctggcagcctcgggcagcaactccccaacccgcagtgagagcccagccccggctgcaacctgctcgctgccctcggacctcacccgggcggcagcgggggaggagacagcagcggccggatctcccggccgcaagcagcagcttggcgacgaaggggagttggaagccgggagggggagccgcggcagggtggccgtgcgcgcgccctcgcccgaggagatggaggaggaagcgatcgccagcctccccggagaagaaacggaggatatggactttctgtctgggctggaactggcggatctcctggacccccggcaaccggactggcacctggaccccgggcttagctcgccggggcctctctcctcgtctggcggaggctcggatagcggcggcctgtggagaggggaggatgacgatgaggccgcggctgctgaaatgcagcgcttctctgacctgctgcagaggcatgttaaacggtatnnnnnnnnnnnnnnnnnnnnnnnnnnnnnnnnnnnnnnnnnnnnnnnnnnnnnnnnnnnnnnnnnnnnnnnnnnnnnnnnnnnnnnnnnnnnnnnnnaccaggcggcgacaaagagtccccggaaggcggcggcggccgctgcccgccttaatcggctgaagaagaaggagtacgtgatggggctggagagtcgagtacggggtctggcagccgagaaccaggaactgcgggccgagaatcgggagctgggcaaacgcgtacaggcactgcaggaggagagtcgctacctacgggcagtcttagccaacgagactggactggctcgcttgctgagccggctgagcggcgtgggactgcggctgaccacctcgctcttcagagactcgcccgccggtgaccacgactacgctctgccggtgggaaagcagaagcaggacctgctggaagaggacgactcggcgggaggagtctgtctccatgtggacaaggataaggtgtcggtggagttctgctcggcgtgcgcccggaaggcgtcgtcttctcttaaaatgtagggtcaagtaatctgctctttatccgcgtttacccctttcaactcccttacaccatgtcaaacttaccttagtgggacatcttcaccggacacatttcagaggagagaaaaaaagtaatattgaatcttaaagtgtttagctaaaagcatgaatgagccacagtaaccaactcgtaatgataacatnnnnnnnnnnnnnnnnnnnnnnnnnnnnnnnnnnnnnnnnnnnnnnnnnnnnnnnnnnnnnnnnnnnnnnnnnnnnnnnnnnnnnnnnnnnnnnnnnnnnnnnnnnnnnnnnnnnnnnnnnnnnnnnnnnnnnnnnnnnnnnnnnnnnnnnnnnnnnnnnnnnnnnnnnnnnnnnnnnnnnnnnnnnnnnnnnnnnnnnnnnnnnnnnnnnnnnnnnnnnnnnnnnnnnnnnnnnnnnnnnnnnnnnnnnnnnnnnnnnnnnnnnnnnnnnnnnnnnnnnnnnnnnnnnnnnnnnnnnnnnnnnnnnnnnnnnnnnnnnnnnnnnnnnnnnnnnnnnnnnnnnnnnnnnnnnnnnnnnnnnnnnnnnnnnnnnnnnnnnnnnnnnnnnnnnnnnnnnnnnnnnnnnnnnnnnnnnnnnnnnnnnnnnnnnnnnnnnnnnnnnnnnnnnnnnnnnnnnnnnnnnnnnnnnnnnnnnnnnnnnnnnnnnnnnnnnnnnnnnnnnnnnnnnnnnnnnnnnnnnnnnnnnnnnnnnnnnnnnnnnnnnnnnnnnnnnnnnnnnnnnnnnnnnnnnnnnnnnnnnnnnnnnnnnnnnnnnnnnnnnnnnnnnnnnnnnnnnnnnnnnnnnnnnnnnnnnnnnnnnnnnnnnnnnnnnnnnnnnnnnnnnnnnnnnnnnnnnnnnnnnnnnnnnnnnnnnnnnnnnnnnnnnnnnnnnnnnnnnnnnnnnnnnnnnnnnnnnnnnnnnnnnnnnnnnnnnnnnnnnnnnnnnnnnnnnnnnnnnnnnnnnnnnnnnnnnnnnnnnnnnnnnntagttatgggctcaaagaatttattcatctctaacatgacattggaaaataatggatgaaaataggaaaaatgattgttgttaatgctgactgtgggtcttaaaaggttctggaaagcagtaagttcatttttctaaaaactataacattctcttggaatattttcttccttacgtcaatacttttcctgcattatttgaagttgtgggctggggagaaaacagcagtcaaagctttctgaattgagatgctttgaaattccaagtgtagatttttagaatgtcattttataaatggcagtttttggaattacttgataaagaacttttgaaaatggaaagattagtatggcctatttttaaagctgctttgttaggttccttatgttttattaactgtctttcctcagtttccatttcnnnnnnnnnnnctagttttggtgacttagtgattttgtcattttttacatcaacttcatggtctggtttttacatggtaattgcatgtatttaggatctatctaataggggctttaaataaatttggtcatatttatgtgtaagcacattttactgtaaatgtttgggtttctgaatttaaacagatctgtttatttcagtatgtagtaaacaatatcttaaagtgtccgactcactacttgttaattaaaaaagttatgattaatgt

SEQ ID NO: 20428 - DNA, 1189 bp, Macaca Mulatta
  misc_feature (1)...(1189): n = A,T,C or G
ttgtgggaaatcaacacctgaaaaagaggnagggggagcttgaaggaactactactaagcccctggccccaaccccaaacttcagtcccactccaggcttcacccccaccctgggcttcagtcccatgcccagttccaccttcacctccagctccacctatacccccggtgactgtcccaacttcgcggcttcccgcagagagatggcaccaccctacctaggggctgaccccatccttgcaacagccctcgcctctgcccccatccccactccccttcagaagtgggaggacagcgcccacaagccacagagcctagannnnnnnnnnnnnnnnnnnnnnnnnnnnnnnnnnnnnnnnnnnnnnnnnnnnnnnnnnnnnnnnnnnnnnnnnnnnnnnnnnnnnnnnnnnnnnnnnnnnnnnnnnnnnnnnnnnnnnnnnnnnnnnnnnnnnnnnnnnnnnnnnnnnnnnnnnnnnnnnnnnnnnnnnnnnnnnnnnnnnnnnnnnnnnnnnnnnnnnnnnnnnnnnnnnnnnnnnnnnnnnnnnnnnnnnnnnnnnnnnnnnnnnnnnnnnnnnnnnnnnnnnnnnnnnnnnnnnnnnnnnnnnnnnnnnnnnnnnnnnnnnnnnnnnnnnnnnnnnnnnnnnnnnnnnnnnnnnnnnnnnnnnnnnnnnnnnnnnnnnnnnnnnnnnnnnnnnnnnnnnnnnnnnnnnnnnnnnnnnnnnnnnnnnnnnnnnnnnnnnnnnnnnnnnnnnnnnnnnnnnnnnnnnnnnnnnnnnnnnnnnnnnnnnnnnnnnnnnnnnnnnnnnnnnnnnnnnnnnnnnnnnnnnnnnnnnnnnnnnnnnnnnnnnnnnnnnnnnnnnnnnnnnnnnnnnnnnnnnnnnnnnnnnnnnnnnnnnnnnnnnnnnnnnnnnnnnnnnnnnnnnnnnnnnnnnnnnnnnnnnnnnnnnnnnnnnnnnnnnnnnnnnnnnnnnnnnnnnnnnnnnnnnnnnnnnnnnnnnnnnnnntttaaaatcaatcatgttacactaatagaaacttggcagtcctatgccctctgcctggacaagcacaaagcaagctgaactgtcccaaggcgggggcgagcacggaacaatggggccttcagctggagctgtggacttttgtaaatacactaaaacttctgaaattaaagctctgctcttagaga

SEQ ID NO: 20429 - DNA, 708 bp, Macaca Mulatta
caaaacatgaaggaaactaactagcaactgatattatgtttcctttgattcaaataatactttattgccttacttatgtaaaattgatatcacttcttctttcgcctcattttaattgcagattgaggaacagttgactttggaaaagctgcacgagtggaccaaacctgagaatcttgatttcattgaagttaatgtcagcttgcccaggttcaaactggaagagagttacaccctcaactcagaccttgcccgcctaggtgtacaggatctctttgacagtagcaaggctgatctgtctggcatgtcaggagccagagatatttttatatcaaaaattgtccacaagtccttcgtggaagtgaatgaagagggaacagaggcggcagccgctacagcgggcgtcgccaccttctgcatgttgatgccagaggaatacttcactgccgaccatccattccttttctttattcggcacaattcctcaggtagcatcctgttcttgggcagattttcttccccttagaagaaagagactgtagcaatacaaaaatcaagcttagagctttattacctgagtttttaatggtgccaacgttcttctatctttaccaataaaaccaatatccagaaacaaatcttttattttctttttaagttcggctctgttggctgtttacacccatgaattttggcatgggtatctac

SEQ ID NO: 20430 - DNA, 1569 bp, Macaca Mulatta
  misc_feature (1)...(1569): n = A,T,C or G
tgtttggcttcatagagattcagcatcctgtcataggccttccatgtcttttaacgtatgcaatgcaaagaacaagcaaataaaggcagaagtttttctaactccgtcttttctctcttttcttcccctagactatgtcagagagtcacaatgaccttgcacaataacagtacaacctcgcctttgtttccaaacatcagctcctcctggatacacagcccctccgatgcagggctgcccccaggaaccgtcactcatttgggcagctacaatgcttctcgagcagccgggaatttctcctctctaaacggtaccaccgatgaccctctgggaggtcataccgtctggcaggtggtcttcatcgctttcttaacgggcatcctggccttggtgaccatcatcggcaacatcctggtaattgtgtcatttaaggtcaacaagcagctgaagacagtcaacaactacttcctcttaagcctggcgtgtgccgatctgataattggggtcatttcaatgaatctgtttacgacctacatcatcatgaatcgatgggccttagggaacttggcctgtgacctctggcttgccattgactatgtagccagcaatgcctctgttatgaatcttctggtcatcagctttgacagatacttttccatcacgaggccgctcacgtaccgagccaaacgaacaacaaagagagctggtgtgatgatcggnnnnnnnnnnnnnnnnnnnnnnnnnnnnnnnnnnnnnnnnnnnnnnnnnnnnnnnnnnnnnnnnnnnnnnnnnnnnnnnnnnnnnnnnnnnnnnnnnnnnnnnnnnnnnnnnnnnnnnnnnnnnnnnnnnnnnnnnnnnnnnnnnnnnnnntatatgcctgtcaccattatgactattttatactggaggatctataaggaaactgaaaagcgtaccaaagagcttgctgggctgcaagcctctgggacagaggcagagacagaaaactttgtccaccccacgggcagttctcgaagctgcagcagttacgaacttcaacagcaaagcatgaaacgctccaacaggaggaagtacagccgctgccacttctggttcacaaccaagagctggaaacccagctccgagcagatggaccaagaccacagcagcagtgacagttggaacaacaatgatgctgctgcctccctggagaactccgcctcctccgatgaggaggacattggctccgagacgagagccatctactccatcgtgctcaagcttccaggtcacagcaccatcctcaactccaccaagttaccctcgtccgacaacctgcaggtgcctgaggaggagctggggatggtggacttggagaggaaaactaacaagctgcaggcccagaagagtgtggacgatggaggcagttttccaaaaagcttctccaagcttcccatccagctagagtcagccgtggacacagccaagacttctgacgtcgactcctcagtgggtaagaccacggccactctacgtgtgtaattcaaggaagccactctggccaagaggtttgctctgaagaccagaagt

SEQ ID NO: 20431 - DNA, 294 bp, Macaca Mulatta
caggtgccaaacaaaaggagacggaaacagagtgaccgccgtgaatgtagacgccctaggaggagaacttgaacaaagtttctgggtcaacgttttgcctcatgaacactggctgcaagtggttaagaatgtatatcagggtttaatgatgggtatttcttcccagtgatgttggaattaagcttaaaaaagaaagattttatgtgcttgaagattcaggcttgcattaaaagactgttttcagacctttgtctgacggattttaaatgctgtatgtcattaaagtgcacggtg

SEQ ID NO: 20432 - DNA, 648 bp, Macaca Mulatta
gagtgcttttctcatgtacatgaatttttacagcagcacagcattcctcacctgcattgccattgataggtatttggctgttgtctaccctttgaagttttttttcctaaggacaagaaaatttgcactcatggtcagcctgtccatctggacactggaaaccatcttcaatgctgtcatgttgtgggaagatgaaacagttgttgaatattgcgatgacaaaaaatctaattttactttatgctatgacagataccctttagagaaatggcaaatcaacctcaacttgttcaggacgtgtacaggctatgcagtacccttggtcaccatcctgatctgcaaccggaaagtctaccaagctgtgcggcacaataaagccacggaaaacaaggagaagaagagaatcataaaactactggtcagcatcacagttacttttgtcttatgctttactccctttcatgtgatgttgctgattcgctgcattttagagcatgatgtgtacttcaaagaccacagcaagtctgggaagcaaacttacacaatgtatagaatcacggttgcattaacaagtttaaattgtgttgctgatccaattctgtactgttttgtaaccgaaacaggaagatatgatatgtggaatatatt

SEQ ID NO: 20433 - DNA, 313 bp, Macaca Mulatta
tcctggcagtggacacccagctgctgttggggaacaagcagctgtccctgagcccggaagagtacgtgtttgccgcgctgaacctgtacacagacatcatcaacatcttcctgtacatcctcaccatcattggccgcgccaaggagtagcccagctccagctctctgtgcccgctcaggtggcatggctggcctggaccctgcccctggcacggcagtgccagctgtccttcccctctctcttgtccccaggcacagcctggggcagaggacgcccctctccaaccctcccatatgtacactgcagatacttc

SEQ ID NO: 20434 - DNA, 834 bp, Macaca Mulatta
  misc_feature (1)...(834): n = A,T,C or G
caaccgcnnnnnnnnnnnnnnnnnnnnnnnnnnnnnnnnnnnnnnnnnnnnnnnnnnnnnnnnnnnnnnnnnnnnnnnnnnnnnnnnnnnnnnnnnnnnnnnnnnnnnnnnnnnnnnngtttttcagacaaaatgatgcaacttaattttattaggacaaggctgttggacactggagtggcaccttccatggccaggagtggcaattgggaggggtcacaagggatgccacccaggcatctagaagccacagctgccctccacagcgcggcaccgcacggtgcgcaggaatgtctcgaccttgttcatgtccttcctgaagcagtagagcagcctgtagttcttgagcagtgtgtcatcgttgtgcgagtttgtgtcatacttgctgtaggtctgcttgaagatctgcccagtccgggggctgccgtcttccagcctccccatcagcgtttggatgccttcctctagtttctttaggtagagatagatgtcgaagttcgagttggtatgcaccaggtggttggcaaacacactcctgaggaactgcacgggctccagccacgactggatgagcagcagggagatgtggagcagctctaggttggatttctgctgtgtttcctccttgttggagggtgtcggaatagactctgagaagcagagggagttaacttcgggtacgtgtcaaaagccagcatcgtgcaggtgatgggcgcggaccacagcggatgcagacagccaggaataagggaatggttgggaaaggcactgccctcggaagccaaggtagacagagcaggcatagccagattaggcaatccaggaggcctgcag

SEQ ID NO: 20435 - DNA, 345 bp, Macaca Mulatta
  misc_feature (1)...(345): n = A,T,C or G
ggacggttccccctctccccagcctgggaagatgtctcactgtccacttcccagtgggctgggggagcacggggttggacaggacagcgaccctgggagaaaggggctactctgcccacgtcggggagagatgtgagcatcccgggtcactggatcctgctgctgtaatgggaacccctcccccatttacttctccacctcccgtccttcccctcattggttttttttttgtgtgtcaactgtgccatttttattttattccttttattttcccccttttcacagagaaataaaggtctagaagtannnnnnnnnnnnnnnnnnnnnnnnnnnnnnnnnnnnnnn

SEQ ID NO: 20436 - DNA, 1095 bp, Macaca Mulatta
  misc_feature (1)...(1095): n = A,T,C or G
atagcaccatgcctgctgtcgcctaggctcgctagccgggcctccttggcctgctgctattcggctttaccctagtcccaggcacaggagcagagaagacgggcgtgtgccccaagctccaggcggaccagaactgcacgcaggagtgcgtctcggacagcgaatgcgcggacaacctcaagtgctgcagcgcgggctgcgccaccttctgctctctgcccaatgataaggagggttcctgcccccgggtgaacaggaacttcccccagctcggcctctgtcgggaccagtgccaggtggacagccagtgtcctggccggatgaaatgctgccacaatggctgtgggaaagtgtcctgtgtcactcccaatttctgagctccagccaccaccaggctgagcagtggggagagaaagtttctgcctggccctgcatctggttccagcccacctgccctcccctttttctgacctctgtattccctcctgggctgaccacagcttctcccttttccaaccaataaagtaaccactttcaggnnnnnnnnnnnnnnnnnnntccaaggggggggcccgggtaacccaattcgcccttttatgaattcgtattaccattcactggcccgcgttatacaaaggtcctgacttgggaaaaacctgtgcgtttaccaactttatcggcttgtgagcacaattcccctttnnnnnnnnnnnnnnnnnnnnnnnnnnnnnnnnnnnnnnnnnnnnnnnnnnnnnnnnnnnnnnnnnnnnnnnnnnnnnnnnnnnnnnnnnnnnnnnnnnnnnnnnnnnnnnnnnnnnnnnnnnnnnnnnnnnnnnnnnnnnnnnnnnnnnnnnnnnnnnnnnnnnnnnnnnnnnnnnnnnnnnnnnnnnnnnnnnnnnnnnnnnnnnnnnnnnnnnnnnnnnnnnnnnnnnnnnnnnnnnnnnnnnnnnnnnnnnnnnnnnnnnnnnnnnnnnnnnnnnnnnnnnnnnnnnnnnnnnnnnnnnnnnnnnnnnnnnnnnnnnnnnnnnnnnnnnnnnnnnnnnnnnnnnnnnnnnnnnnnnnnnnnnnnnnnnnnnnnnnnnnnnnngcggcgac

SEQ ID NO: 20437 - DNA, 268 bp, Macaca Mulatta
  misc_feature (1)...(268): n = A,T,C or G
aggtgctgctctccgaattccggcccagtggggagctgttcgccatcaaggctctgaagaaaggggacattgtggcccgagacgaggtggagannnnnnnnnnnnnnnnnnnnnnnnnnnnnnnnnnnnnnnnnnnnnnnnnnnnnnnnnnnnnnnnnnnnnnnnnntgtttccagacaccggagcacgtgtgcttcgtgatggagtactcggccggtgaggacctgatgcttcacatccacagcgacgtgttctctgagcctcgtgc

SEQ ID NO: 20438 - DNA, 786 bp, Macaca Mulatta
  misc_feature (1)...(786): n = A,T,C or G
aaacttcatggaatttgtagaaaattatggannnnnnggtgagaaagaacagtcgtcaaaactcacatggatagtgtttgtttttagccaaaaatgccccagattttttcccaaacctcaaaaacgatttggaaaaattgtaaaagtttgataacagaaacatctttaggatatttttgcctgacatattttgcttctaatatgtgcctactgtgatttttttcatgtggaaaatgcaaaatttgtaacaaaatggttatatggaacatgcctattaaatgagttttactatcttccttaactttggtatgtgtatgtgtgtgtgcgttttactttaatatgaattatacaaaatactagtggttttacactctcttttcttattcttagggcttttgtgtatgtctgatttgcttttaaataccttcctcaggaatgcagatcttaatttttatatttttttaaagtagctaacatagcagtaggcacttaagcatttagtcaatgatgctggtagaaatagtaaaatacatcctttaaacatatgtatctaaacatatattttaaaaagagcaaaagtaaaactaaagtgttagtaaattctgttttattagacattttagaaaaataatagaattctgaagttttaaaaatgtcagtgatttattttcattttcagaaatatatgcatgcagttatattttatttgattgttgacttaggccacgtctgtatacagtaaccgaataaactcttttgctgctaaagagatttgttactgacaca

SEQ ID NO: 20439 - DNA, 1104 bp, Macaca Mulatta
  misc_feature (1)...(1104): n = A,T,C or G
gggaagacgcacacaatgctgggcagtccagagcaacctggggtgatcccgcgggctctcatggacctcctgcagctcacaagggaggagggcgccgagggccggccatgggccctttctgtcactatgtcctacctagagatctaccaggagaaggnnnnnnnnnnnnnnnnnnnnnnnnnnnnnnnnnnnnnnnnnnnnnnnnnnnnnnnnnnnnnnnnnnnnnnnnnnnnnnnnnnnnnnnnnnnnnnnnnnnnnnnnnnnnnnnnnnnnnnnnnnnnnnnnnnnnnnnnnnnnnnnnnnnnnnnnnnnnnnnnnnnnnnnnnnnnnnnnnnnnnnnnnnnnnnnnnnnnnnnnnnnnnnnnnnnnnnnnnnnnnnnnnnnnnnnnnnnnnnnnnnnnnnnnnnnnnnnnnnnnnnnnnnnnnnnnnnnnnnnnnnnnnnnnnnnnnnnnnnnnnnnnnnnnnnnnnnnnnnnnnnnnnnnnnnnnnnnnnnnnnnnnnnnnnnnnnnnnnnnnnnnnnnnnnnnnnnnnnnnnnnnnnnnnnnnnnnnnnnnnnnnnnnnnnnnnnnnnnnnnnnnnnnnnnnnnnnnnnnnnnnnnnnnnnnnnnnnnnnnnnnnnnnnnnnnnnnnnnnnnnnnnnnnnnnnnnnnnnnnnnnnnnnnnnnnnnnnnnnnnnnnnnnnnnnnnnnnnnnnnnnnnnnnnnnnnnnnnnnnnnnnnnnnnnnnnnnnnnnnnnnnnnnnnnnnnnnnnnnnnnnnnnnnnnnnnnnnnnnnnnnnnnnnnnnnnnnnnnnnnnnnnnnnnnnnnnnnnnnnnnnnnnnnnnnnnnnnnnnnnnnnnnnnnnnnnnnnnnnnnnnnnnnnnnnnnnnnnnnnnnnnntcagccccctgcagaagctaaccatcatggacccggccatgctggagcgcctcctgagcttggaccgtctgctggcctcccaggggagccagggatcccctctgttgagtaccccaaagcgagagcggatggtgctcatgaagaccgtggaagagaaagacctggagattgagnagaggcttaagatgaaacaaaaagaactggaggccaaggtgttggccca

SEQ ID NO: 20440 - DNA, 3041 bp, Macaca Mulatta
  misc_feature (1)...(3041): n = A,T,C or G
agcccgacatgatctccatcttcataggcacctggaacatgggnggaagtgtaccacctccaaaaaatgtgacatcctggttcacatcgaggggtctggggaagaccctggacgaggtcacagtgaccataccccatgacatctatgtctttgggacccagnnnnnnnnnnnnnnnnnnnnnnnnnnnnnnnnnnnnnnnnnnnnnnnnnnnnnnnnnnnnnnnnnnnnnnnnnnnnnnnnnnnnnnnnnnnnnnnnnnnnnnnnnnnnnnnnnnnnnnnnnnnnnnnnnnnnnnnnnnnnnnnnnnnnnnnnnnnnnnnnnnnnnnnnnnnnnnnnnnnnnnnnnnnnnnnnnnnnnnnnnnnnnnnnnnnnnnnnnnnnnnnnnnnnnnnnnnnnnnnnnnnnnnnnnnnnnnnnnnnnnnnnnnnnnnnnnnnnnnnnnnnnnnnnnnnnnnnnggaggaaccagaactacttggacatcctgcggctgctctcgctgggcgaccggcagctcagtgcctttgacatctctctgcgtttcacacacctcttctggtttggggacctcaactaccgcctggacatggatatccagnnnnnnnnnnnnnnnnnnnnnnnnnnnnnnnnnnnnnnnnnnnnnnnnnnnnnnnnnnnnnnnnnnnnnnnnnnnnnnnnnnnnnnnnnnnnnnnnnnnnnnnnnnnnnnnnnnnnnnnnnnnnnnnnnnnnnnnnnnnnnnnnnnnnnnnnnnnnnnnnnnnnnnnnnnnnnnnnnnnnnnnnnnnnnnnnnnnnnnnnnnnnnnnnnnnnnnnnnnnnnnnnnnnnnnnnnnnnnnnnnnnnnnnnnnnnnnnnnnnnnnnnnnnnnnnnnnnnnnnnnnnnnnnnnnnnnnnnnnnnnnnnnnnnnnnnnnnnnnnnnnnnnnnnnnnnnnnnnnnnnnnnnnnnnnnnnnnnnngggctctcgaagacttcagaccaggcctacattgagtttgagagcatcgaggccattgtgaagacagccagccgcaccaagttcttcatcgagttctactctacctgcctggaggaatacaagaagagctccttgaaagatgcccaaagcagtgacaacatcaacttcctcaaagtgcagtggtcttcacgccagctgcccacgngctcaaaccaattctggctgatatcgagtacctgcaggaccagcacctcctgctcacagtcaagtccatggatggctatgaatcctatggnnnntgtgtggttgcactcaagtccatgattggcagcacggcccaacagttcctgaccttcctgtcccaccgtggcgaggagacaggcaatatcagaggctccatgaaggtgcgggtgcccacggagcgcctgggcacccgtgagcggctctacnnnnnnnnnnnnnnnnnnnnnnnnnnnnnnnnnnnnnnnnnnnnnnnnnnnnnnnnnnnnnnnnnnnnnnnnnnnncaggtcagggagccgcaagccagccttcacagaggcctcctgcccgctctccaggttattcgaagaaccagagaaacctccaccaactgggaggcccccagccccaccccgagcagctccccgggaggagcccttgacccccaggnnnnnnccaggttgaagccagagggaactcctgaaccagaaggngtggccgcccccccacccaagaacagcttcaataaccctgcctactacgtccttgaagnnnnnnnnnnnnnnnnnnnnnnnnnnnnnnnnnnnnnnnnnnnnnnnnnnnnnnnnnnnnnnnnnnnnnnnnnnnnnnnnnnnnnnnnnnnnnnnnnnnnnnnnnnnnnnnnnnnnnnnnnnnnnnnnnnnnnnnnnnnnnnnnnnnnnnnnnnnnnnnnnnnnnnnnnnnnnnnnnnncagacattccacctccaccactgccggactcagccatcttcctgtcacctagcctggatcctttaccagggccagtggtccggggccgtggtggggnnnnnnnnnnnnnnnnnnnnnnnnnnnnnnnnnnnnnnnnnnnnnnnnnnnnnnnnnnnnnncaccagccagcactttcctgggggaagtggccggtggggatgaccggtcctgctcggtgctgcagatggccaagacgctgagcgaggtggactacttccctgctgggcccgcacgctcagcactcctcccaggccccctggagctgcagccacaccggggactgtcctcggactatggccggcccctcagcttccctccaccccgcatccgggagagcatccaggaagacctggcagaggaggnnnnnnnnnnnnnnnnnnnnnnnnnnnnnnnnnnnnnnnnnnnnnnnnnnnnnnnnnnnnnnnnnnnnnnnnnnnnnnnnnnnnnnnnnnnnnnnnnnnnnnnnnnnnnnnnnnnnnnnnnnnnnnnnnnnnnnnnnnnnnnnnnnnnnnnnnnnnnnnnnnnnnnnnnnnnnnnnnnnnnnnnnnnnnnnnnnnnnnnnnnnnnnnnnnnnnnnnnnnnnnnnnnnnnnnnnnnnnnnnnnnnnnnnnnnnnnnnnnnnnnnnnnnnnnnnnnnnnnnnnnnnnnnnnnnnnnnnnnnnnnnnnnnnnnnnnnnnnnnnnnnnnnnnnnnnnnnnnnnnnnnnntgcctatttattggggatcagcattccccgctgcccaatcatttgcaatgccctaattagggcatcctgcccttcgccttttaggctcaggtcggaaggtcagttgccatggttaccgaggaccctggttactctggtgctgtccttttactggactccgcgtcccagccccaggggtacctgtgggggcccatttgggtacgtctgggcccccactttcaccagtgtttctgcagccttccaccgggcctgaaccacaggggaggcgcttcgctaagacctccccacccccgctgggggtgggggcgggtgtccctccggaaatgaaggaagagcccgagaaccgggctggggtttatttaaactgttctgtgtgggttggggaggga

SEQ ID NO: 20441 - DNA, 838 bp, Macaca Mulatta
gggggacaagtgatgttgaagtgaatgaaaagaaagacagagttacagatgcacttaatgctacaagagctgctgttgaagaaggcattgttttgggagggggttgtgccctgcttcgatgcattccagccttggactcattgactccagctaatgaagatcaaaaaattggtatagaaattattaaaagaacactcaaaattccagcaatgaccattgctaagaatgcaggtgttgaaggatctttgatagttgagaaaattatgcagagttcctcagaagttggttatgatgctatggctggagattttgtgaatatggtggaaaaaggaattattgacccaacaaaggttgtgagaactgctttattggatgctgctggtgtggcctctctgttaactacagcagaagttgtcgtcacagaaattcctaaagaaaagaaagaccctggaatgggtgcaatgggtggaatggggaggggtttgggcaggtgcctgtcttacaccccgcaatagcaaggccgcatcttgttttcgccgcccggtgaccgcgaatccgggggccgggcgccctcacacattcacctgcgaccagccttgttgcgtccgcttgcggacccacgggccggcctcggccataccccaacgccggcccgcccgcctgggctcaacgtggccacctccttcgaccggtgccgccccttcggttcttcccgcccggcgctcccgacctagcattatctccgcacccttcgtgggatgccacacatttcgcgcggctttcggcgccatacgccgccgccctcccagccccggtggcccctagatacccgctgccc

SEQ ID NO: 20442 - DNA, 382 bp, Macaca Mulatta
aaggttgttttctaccaccatattttaaagatatttttatgaccttcgtgtatactcacactttgcttgtattttaaaaggaggatatatttgcacttatgtatacttttacagtttgccaaaatattttgttgtaaaatttttttcaataaaatgtatataacaaatagttgttttaggggctgattttgtcttcgggcaccctgagagcaatggatgccaggttctactccctagcaggcagctgtgcaactctacccacaccccctccagtggtgtaattgacatggtgtggggtctgtgccttgagtaacacaggccaggttctgattgtgagtcttctcaggagaaagagtggaagaaacgttttctattatttctt

SEQ ID NO: 20443 - DNA, 742 bp, Macaca Mulatta
  misc_feature (1)...(742): n = A,T,C or G
ggtgagctgtatttgtttgaaatctgagacactatgttcaattggatgtatctgttcaaatttattcccatgtgacgtggaagtccttcgttggatgtcacaacactacatttgaggatggtaaggatgacttggaggtccatggttttcattaccaacattttaagattctgaatgttgatggagtctcactgaagagtcaccaaaggtgcctgccctcttcctctgctttccatctgagtgtgggatgggaggggcattcatgatcatttggatataggaatctactcctctgaggaatggaacacaagtagttacctgtcactttcatttataattccaaaagatgactacaaccatgtccatgctcagattcaaacagttttccatatcacttttgggtggtaagatgatttnnnnnnnnnnnnnnnnnnnggcagcaccactaaccattccttatattcttttttgtgtggttggtttttttctttttatttaacccacagctgacatcatagtttctttgttttgttttccagagcttcttgcatgactttacgtttaccattcctaaaaaaacccctgtttttaaacacttaggaattaaaattggtccttttttttatgaaaattaaggcctcttttttgaaaccaattccctatgtgttgggggaatggnnnnnnnnnnnnnnattggcaaacaaaaatttgtggtaagggcttgcaaaacattttaaaggta

SEQ ID NO: 20444 - DNA, 608 bp, Macaca Mulatta
  misc_feature (1)...(608): n = A,T,C or G
tatatgatatatacaaaagacaaggatgatgagctgtcatttatggagggtgcaatcatttatgttataaagaagaatgatgatggctggtatgaaggagtctgcaatcgagtgactggtctgttccctgggaactatgttgaatcaatcatgcactatactgannnnnnnnnnnnnnnnnnnnnnnnnnnntttaaagtagattcttattactcagtcatactgtgggacaattatggttaacagaactgtcttaatatgttttaaaatgtgcccatattttcagaacatgctgttttattggtaaattgaatgtctacctgtaagcataaatctttgaggcagtttgtgtattgctaaatagcaatttatacaagaagctgtccataactgattatgcttatgtacttacttacacatttttaactttatgaccagcctaaatattctgggggaagtggggtataatatttaacaaatcattattcagattgtaccattacatgtttcagtgcagcatgattactaacgctatgtcagactaatattaaaatccgaaaatttaaatgctggtgctggtcagacttttactcgttagattctctcat

SEQ ID NO: 20445 - DNA, 615 bp, Macaca Mulatta
atggggactgtcatggatgtctgaagggagacaatcgctttagcatgctggtagctgccatcgaggctgcaggactgacggagaccctcaaccgggaaggagtatacacagtcttcgctcccacaaatgaagccttccgagccctgccaccaagagaacggagcagactcttgggagatgccaaggaacttgccaacatcctgaaataccacgttggtgatgaaatcctggttagcggaggcatcggggccctggtgcggctaaagtctctccaaggcgacaagctggaagtcagcttgaaaaacaatgtggtgagtgtcaacaaagagcctgttgctgagcctgacatcatggccacaaatggcgtggtccatgtcatcaccaatgttctgcagcctccggccaacagacctcaggaaagaggggatgaacttgcagattctgcgcttgagatcttcaaacaagcatcagcgttttccagggcttcccagaggtctgtgcgactagcccctgtctatcagaggttattagagaggatgaagcattagcatgaaggactacaggaggaatgcaccacgggcgctccccggccatttctctcagatttccacagag

SEQ ID NO: 20446 - DNA, 1837 bp, Macaca Mulatta
  misc_feature (1)...(1837): n = A,T,C or G
cgcgatggcggcggctcctttaggcagctgaagggggatttaggcccggaagatccgagtccatccgcggcggggagagggcaagcggggtcgacaggggccggagcagcggcggcggcgctcggactgtcccatccgccccgtattgaggcgctgggagcggcggggtgacaggaaagcgatggtgaaagcggggccgtgaggggggcggagccggcagccggacccgcagtagcggcagcagcggcgccgcctcccggagttcagacccaggaagcggccgggagggcaggagcgaannnnnnnnnnnnnnnntggagctgagagtcgggaacaggtaccggctgggccggaagatcggcagcggctccttcggagacatctatctcggtnnnnnnnnnnnnnnnnnnnnnnnnnnnnnnnnnnnnnnnnnnnnnnnnnnnnnnnnnnnnnnnnnnnnnnnnnnnnnnnnnnnnnnnnnnnnnnnnnnnnnnnnnnnagtgggcatccccaccatcagatggtgcggggccgagggggactacaacgtcatggtgatggagctgctggggccgagcctggaggacctcttcaacttctgctccaggaaattcagcctcaaaaccgtcctgctgcttgccgaccaaatnnnnnnnnnnnnnnnnnnnnnnnnnnnnnnnnnnnnnnnnnnnnnnnnnnnnnnnnnnnnnnnnnnnnnnnnnnnnnnnnnnnnnnnnnnnnnnnnnnnnnnnnnnnnnnnnnnnnnnnnnnnnnnnnnnnnnnnnnnnnnnnnnnnnnnnnnnnnnnnnnnnnnnnnnnnnnnnnnnnnnnnnnnnnnnnnnnnnnnnnnnnnnnnnnnnnnnnnnnnnnnnnnnnnnnnnnnnnnnnnnnnnnnnnnnnnnnnnnnnnnnnnnnnnnnnnnnnnnnnnnnnnnnnnnnnnnnnnnnnnnnnnnnnnnnnnnnnnnnnnnnnnnnnnnnnnnnnnnnnnnnnnnnnnnnnnnnnnnnnnnnnnnnnnnnnnnnnnnnnnnnnnnnnnnnnnnnnnnnnnnnnnnnnnnnnnnnnnnnnnnnnnnnnnnnnnnnnnnnnnnnnnnnnnnnnnnnnnnnnnnnnnnnnnnnnnnnnnnnnnnnnnnnnnnnnnnnnnnnnnnnnnnnnnnnnnnnnnnnnnnnnnnnnnnnnnnnnnnnnnnnnnnnnnnnnnnnnnnnnnnnnnnnnnnnnnnnnnnnnnnnnnnnnnnnnnnnnnnnnnnnnnnnnnnnnnnnnnnnnnnnnnnnnnnnnnnnnnnnnnnnnnnnnnnnnnnnnnnnnnnnnnnnnnnnnnnnnnnnnnnnnnnnnnnnnnnnnnnnnnnnnnnnnnnnnnnnnnnnnnnnnnnnnnnnnnnnnnnnnnnnnnnnnnnnnnnnnnnnnnnnnnnnnnnnnnnnnnnnnnnnnnnnnnnnnnnnnnnnnnnnnnnnnnnnnnnnnnnnnnnnnnnnnnnnnnnnnnnnnnnnnnnnnnnnnnnnnnnacagattcctggtcgggtggcttccagtggtcttcagtctgtcgtgcaccgatgagaactctccttattgctgtgaagggcagacaatgcatggctgatctactctgttaccaatggctttactagtgacgcgtcccccggtctaggatcgaaatgttaacaccgggagctctccaggccactcacccagcgacgctcatgggggaaacagactaaacggacagactccaagagctgccaccgctggggctgcactgcggccctccacgtgaaatcggttgtaacggggctgggaagaaaagcagagagagaaatggagagagtcagactc

SEQ ID NO: 20447 - DNA, 368 bp, Macaca Mulatta
ttggaggcttttaaacattttgacacaaaattcttatggtatgtagccagctgtgcactttcttctctttcccaaccccaggaaaggaggttttccttattttgtgtgctttcccagtcccattcctcagcttcttcacaggcactcctggagatatgaaggattactctccatatcccttcctctcaggctctgactacttggaactaggctcttatgtgtgcctttgtttcccatcagactgtcaagaagaggaaagggaggaaacctagcagaggaaagtgtaattttggtttatgactcttaaccccttagaaagacagaagcttaaaatctgtgaagaaagaggttaggagtagatattgatt

SEQ ID NO: 20448 - DNA, 296 bp, Macaca Mulatta
gtctggaggagtgcgggcacatcagtgtctcagcccccatcgtccacctgggggatcccatcacagcctcctgcatcatcaagcagaactgcagccatctggacctggagccacagattctgtggagactgggagcagagcttcagcccgggggcaggcagcagcgtctctctgatgggagccagcaatctaccatcaccctgccccacctcaaccacactcgggcctttctctcctgctgcctgaactggggcaacagcctgcagatcctggaccaggttgagctgcgcgcaggc

SEQ ID NO: 20449 - DNA, 602 bp, Macaca Mulatta
  misc_feature (1)...(602): n = A,T,C or G
cgtacgtgacagaaatggctcagggaactgttggaggcgtgttcatcacgacggcaggttccacgtctaacggcacaaggttctctgccagtgacctgaccaacggcgcagatgggatgctggccacaagctccaatgggtctcagtacagcggctccagggtggagaccccggtgtcctacgtcggggaggacgatgaggaggacgatgacttcaatgagaatgacgaggacgactgatgtcctccccacttcaaattcagcttcaggaaaacgtttaggaaaagnnnnnnnnnnnnnnnnnngggttttctgttccttttggcctactcccaagaagatattggtaagctattgaatttagatatgcacctctaataagcaaggattgtttcccgtaggattaggatgtgctgtggatgtgtgttttgataccagtgtgctgatgcagagcgtttatttactttttaggattcggtgttttcatttgctatttttctttaagtgcagagttcatttttgcccctgaaaagtttttgctgagtttgctgaagcaattgtatttcatccacatccatgagaatgaaacaccctcctgttgtg

SEQ ID NO: 20450 - DNA, 803 bp, Macaca Mulatta
ggggcggccccagctcgggagacatggcgggcgttaaagctcttgtggcattatccttcagtggggctattgggctgacttttcttatgctgggatgtgccttagaggattatggcgtttactggcccttattcgtcctgattttccacgccatctcccccataccccatttcattgccaaaagagtcacctatgactcagacgcaaccagtagtgcctgtcgggaactggcatatttcttcactactggaattgttgtttctgcctttggatttcctgttattcttgctcgtgtggctgtgatcaaatggggagcctgtggccttgtgttggcaggcaatgcagtcattttccttacaattcaagggtttttccttatatttggaagaggagatgattttagctgggagcagtggtagcactttattctgattacagtgcattgaatttcttagaactcatactatctggatacttgtgcacatgcagcagtttactatgaaatttaatatgcttggggtttttaataccctttatatcgagggtcactttgaagaaagaccttcctaagtgaaaaaatgagttgtttgtccccgccaagaagacccgtggcaaaagttagaatgtaaggttaccgtccgaaataaaggtgacccccgtttttggggctgggtccaatgtgaagcccaggggggggccgctgggaccaaacagaaatagtgttatgccgggcaaattctctgtgggaaggaaaaggacctgggcaccaccggtaaacacgacagaatgggacgagtgagaat

SEQ ID NO: 20451 - DNA, 738 bp, Macaca Mulatta
gcccccgtggtgaggggcgcagagccaggagtatgtaacagccacttcctcaccccacttctcagatccaggagatggaggccggggcggaagtctcggaggagggtggatggggaaggcggggccttagggacccctcgcctaacgcgtgcccccgacctcaccgcagggacccgcaagaagctgcgcctgtaccagttcctgctggggctgctgacgcgcggggacatgcgtgagtgcgtgtggtgggtggagcagggcgccggcgtcttccagttctcctccaagcacaaggagctcctggcgcgccgctggggccagcagaaggggaaccgcaagcgcatgacctaccagaagctggcgcgcgccctccgaaactacgccaagaccggcgagatccgcaaggtcaagcgcaagctcacctaccagttcgatagcgcgctgcttcctgcagcccgccgggcctgagcacacccgaggctcccacctgtggagctgctgggggacctcacgtcccagccaggatccccctggaagaaaaagggcgtccccacaccctacctgatatgacttatgcatccctaccttttgggggtagggggagtgctgccctgccataatccccaagcccagcccgggcctgtctgggattccccacttgtatctggggtccctctgggatttctttgtcatgtacagactccccaggatcctcaggtttggggagacaggacctat

SEQ ID NO: 20452 - DNA, 848 bp, Macaca Mulatta
  misc_feature (1)...(848): n = A,T,C or G
gggatttggacacaaaagagttgataactgccttgtgaattccttgcctaatctaaactcattatgggttctgtgtttgagtaatcatcttcaaggttaaacctgtaggcagttgccccttttcacgaagtgcacagtgggaatcgagaatcgatggggttaattttggagcagtggcttataccattcacctctttttttgtgacttatttcacaggtaatgagaccttaataacaaataggtgtaaaaaaattttcacattgaaatgatacaaacatttgatgtaataaaaccttgttggcttggtattttaaggaattgaaacctagcagtcttaatggagagacaagaattggtttccagctgcctttgatagattcgggggcaggtggagcaggagccatatacctggagggattgtgctttgtcacccaaagaggattttttctcaacctagttgctagttaatctgccagtatctctagttagatnnnnnnnnnnnnnnnnnnnnnnnnnnnnnnnnnnnnnnnnnnnnnnnnnnnnnnnnnnnnnnnnnnnnnnnnnnnnnnnnnnnnnnnnnnnnnnnnnnnnnnnnnnnnnnnnnnnnnnnnnnnnnnnnnnnnnnnnnnnnnnnnnnnnnnnnnnnnnnnnnnnnnnnnnnnnnnnnnnnnnnnnnnnnnnnnnnnnnnnnnnnnnnnnnnnnnnnnnnnnnnnnnnnnnnnnnnnnnnnnnnnnnnnnnnnnnnnnnnnnnnnnnnnnnnnnnnnnnnnnnnnnnnnnnnnnnnnnnnnnnnnnnnnnnnnnnnnnnnnnnnnnnnnnnnnnnnnnnnnnnnnnnnnnnnnnnnnn

SEQ ID NO: 20453 - DNA, 643 bp, Macaca Mulatta
  misc_feature (1)...(643): n = A,T,C or G
aatagggatgaagagtcaaccttcggcctttcttcttttctaggcttctcccttgcagggtgttccgtagtttcttctcgagccaatgcatgtattatagcagcaggtgtctttgtgctttctcatcatagtaatgtactacttgtaaatacatttttctattttctannnnnnnnnnnnnnnnnnnnnnncattttgtttcattggtgtgctgtatattttccatgccctcactccttnnnnnnnnnnnnnnnnnnnnnnnnnnnnnnnnnnnnnnnnnnnnnnnnnncgtgccgaattcggcacgaggcctagaggaaggcatccaaacgctgatgtggaggctggaagacggcagcccccggactgggcagatcttcaagcagacctacagcaagtttgacacaaactcgcacaacgatgacacactgctcaagaactacaggctgctctactgcttcaggaaggacatgaacaaggtcgagacattcctgcgcaccgtgcggtgccgcgctgtggagggcagctgtggcttctagatgcctgggtggcatcccttgtgacccctcccaattgccactcctggccatggaaggtgccactccagtgtccaacagccttgtcctaataaaattaagttgca

SEQ ID NO: 20454 - DNA, 594 bp, Macaca Mulatta
ttcctgttcaacagcaacacatagcctgaccctcctccactccacctccacccactgtccgcctctgcccgcagagcccacgcccgactagcaggcatgccgcggtaggtaagggccgccggaccgcgtagagagccgggccccggacggacgttggttctgcactaaaacccatcttccccggatgtgtgtctcacccctcatccttttactttttgccccttccactttgagtaccaaatccacaagccattttttgaggagagtgaaagagtaccatgctggcggcgcagagggagggggcctgcacctgtctggaggctcgccccacccagggctccctcctggagcatcccaggcaggtggtacaccaacagcccccttgactcgcagggagcaactctccactccatatttatttaaacaatttttccccaaaggtgtccatagtgcactagcattttcttgaaccaataatgtattaaaaatttttgatgtcagccttgcatcaagggctttatcaaaaagtacaataataaatcctcaggtagtactgggaatggaagactttgccatgggcctgctgcgtcagac

SEQ ID NO: 20455 - DNA, 655 bp, Macaca Mulatta
gatatttcaaattgttttcagtgaaaccaaatccttcttccataatagtacagctccacagatttcctctctaaatttttatgcctgcttttagcaaccataaaattgtcataaagttaataaatttaggaaagaataaagatttatatattcattctttacatagaaaaacacacagctgagttcttagagttgattcctcaagttatgaaatacttttgtacttaatccatttcttgattaaagtgattgaaatggttttaatgttcttttgactgaagtctgaaactgggctcctgctttttattgtctctgtgactgaaagttagaaactgagggttttctttgacacagaattgtgtgcaatattcttaaatactactgctctaaaagttggaggagtcttacagttatcttagcattgtataaacagccttaagtatagcctaagaagagaattcctttttcttctttagtccttctgccattttttattttcagttatatgtgctgaaataattactggtaaaatttcagggttgtggattatcttccacacatgaattttctctctcctggcacgaatataaagcacatctcttaactgcatggtgccagtgctagtgcttcatcctgttgctgccactgcaatacc

SEQ ID NO: 20456 - DNA, 431 bp, Macaca Mulatta
  misc_feature (1)...(431): n = A,T,C or G
tgctgcccaaagtggagccttatgtctctctttgctccgcttgtgccgcagacagatatgcaaagagttcaccgacctgctggctcaggaccgatctcccctggggaactcacggcccaaccccatcctggaacccggcatccagagctgcttgacccacttcaacctcatctcccacggcttcggcagccccgcggtgtgtgccgcggtcacggccctgcagaactatctcaccgaggccctcaaggccatggacaaaatgtacctcagcaacaaccccaacagccacacggacaacaacgccaaaagcagtgacaaagaggagaagcacagaaagtgaggccctctcccgaactgtccctcccacgcctcaccagtccccgcgcgcccacccaccggcgggtgacagctccgggatcagncacccttcc

SEQ ID NO: 20457 - DNA, 639 bp, Macaca Mulatta
atgaactccttctccacaagcgccttcggtccagttgccttctccctggggctgctcctggtgttgcctgctgccttccccgccccagtactcccaggagaagattccaaaaatgtagccgccccacacagccagccactgacctcttcagaacgaattgacaaacacattcggtacatcctcgacggcatctcagccctgagaaaggagacatgtaacaggagtaacatgtgtgaaagcagcaaagaggcactggcagaaaacaacctgaaccttccaaagatggctgaaaaagatggatgcttccaatctggattcaatgaggacacttgcctggtgaaaatcatcactggtcttttggagtttgaggtatacctagagtacctccagaacaggtttgagagtagtgaggagcaagccagagctgtgcaaatgagtacaaaagtcctgatccagttcctgcagaaaaaggcaaagaatctagatgcaataaccacccctgaaccaaccacaaatgccagcctgctgacgaagctgcaggcacagaaccagtggctgcaggacatgacgacgcatctcatcctgcgcagctttaaggagttcctgcagtccaacctgagggctcttcggcaaatgtag

SEQ ID NO: 20458 - DNA, 351 bp, Macaca Mulatta
  misc_feature (1)...(351): n = A,T,C or G
acgcatcgcctgggggaaattcatgaacagtggccagacctgcgtggcccccgactacatcctctgtgacccctcgatccagaaccaaattgtggagaaactcaagaagtcactgaaagnnnnnnnnnnnnnnnnnnnnnnnnnnnnnnnnnnnnnnnnnnnnnnnnnnnnnnnnnnnnnnnnnnnnnnnnnnnnnnnnnnnnnnnnnnnnnnnnnnnnnnnnnnnnnnnnnnnnnnnnnnnnnnnnnnnnnnnnnnnagcccccaccatcctcacggacgtggacccccagtccccagtgatgcaggaggagatcatcgggcctgtgctgcccatcgtgtgcgtgcgcag

SEQ ID NO: 20459 - DNA, 3899 bp, Macaca Mulatta
  misc_feature (1)...(3899): n = A,T,C or G
tttgagagtgttttggacctgaagccctctgagcctgtgggcacaggaaacagcgccccccacccagatgtcatatcagcggcgagacacgcccaccctgagatctgcagcgaagcaacactatttgaagcactctcgatacttgcctggnnnnnnnnnnnnnnnnnnnnnnnnnnnnnnnnnnnnnnnnnnnnnnnnnnnnnnnnnnnnnnnnnnnnnnnnnnnnnnnnnnnnnnnnnnnnnnnnnnnnnnnnnnnnnnnnnnnnnnnnnnnnnnnnnnnnnnnnnnnnnnnnnnnnnnnnnnnnnnnnnnnnnnnnnnnnnnnnnnnnnnnnnnnnnnnnnnnnnnnnnnnnnnnnnnnnnnnnnnnnnnnnnnnnnnnnnnnnnnnnnnnnnnnnnnnnnnnnnnnnnnnnnnnnnnnnnnnnnnnnnnnnnnnnnnnnnnnnnnnnnnnnnnnnnnnnnnnnnnnnnnnnnnnnnnnnnnnnnnnnnnnnnnnnnnnnnnnnnnnnnnnnnnnnnnnnnnnnnnnnnnnnnnnnnnnnnnnnnnnnnnnnnnnnnnnnnnnnnnnnnnnnnnnnnnnnnnnnnnnnnnnnnnnnnnnnnnnnnnnnnnnnnnnnnnnnnnnnnnnnnnnnnnnnnnnnnnnnnnnnnnnnnnnnnnnnnnnnnnnnnnnnnnnnnnnnnnnnnnnnnnnnnnnnnnnnnnnnnnnnnnnnnnnnnnnnnnnnnnnnnnnnnnnnnnnnnnnnnnnnnnnnnnnnnnnnnnnnnnnnnnnnnnnnnnnnnnnnnnnnnnnnnnnnnnnnnnnnnnnnnnnnnnnnnnnnnnnnnnnnnnnnnnnnnnnnnnnnnnnnnnnnnnnnnnnnnnnnnnnnnnnnnnnnnnnnnnnnnnnnnnnnnnnnnnnnnnnnnnnnnnnnnnnnnnnnnnnnnnnnnnnnnnnnnnnnnnnnnnnnnnnnnnnnnnnnnnnnnnnnnnnnnnnnnnnnnnnnnnnnnnnnnnnnnnnnnnnnnnnnnnnnnnnnnnnnnnnnnnnnnnnnnnnnnnnnnnnnnnnnnnnnnnnnnnnnnnnnnnnnnnnnnnnnnnnnnnnnnnnnnnnnnnnnnnnnnnnnnnnnnnnnnnnnnnnnnnnnnnnnnnnnnnnnnnnnnnnnnnnnnnnnnnnnnnnnnnnnnnnnnnnnnnnnnnnnnnnnnnnnnnnnnnnnnnnnnnnnnnnnnnnnnnnnnnnnnnnnnnnnnnnnnnnnnnnnnnnnnnnnnnnnnnnnnnnnnnnnnnnnnnnnnnnnnnnnnnnnnnnnnnnnnnnnnnnnnnnnnnnnnnnnnnnnnnnnnnnnnnnnnnnnnnnnnnnnnnnnnnnnnnnnnnnnnnnnnnnnnnnnnnnnnnnnnnnnnnnnnnnnnnnnnnnnnnnnnnnnnnnnnnnnnnnnnnnnnnnnnnnnnnnnnnnnnnnnnnnnnnnnnnnnnnnnnnnnnnnnnnnnnnnnnnnnnnnnnnnnnnnnnnnnnnnnnnnnnnnnnnnnnnnnnnnnnnnnnnnnnnnnnnnnnnnnnnnnnnnnnnnnnnnnnnnnnnnnnnnnnnnnnnnnnnnnnnnnnnnnnnnnnnnnnnnnnnnnnnnnnnnnnnnnnnnnnnnnnnnnnnnnnnnnnnnnnnnnnnnnnnnnnnnnnnnnnnnnnnnnnnnnnnnnnnnnnnnnnnnnnnnnnnnnnnnnnnnnnnnnnnnnnnnnnnnnnnnnnnnnnnnnnnnnnnnnnnnnnnnnnnnnnnnnnnnnnnnnnnnnnnnnnnnnnnnnnnnnnnnnnnnnnnnnnnnnnnnnnnnnnnnnnnnnnnnnnnnnnnnnnnnnnnnnnnnnnnnnnnnnnnnnnnnnnnnnnnnnnnnnnnnnnnnnnnnnnnnnnnnnnnnnnnnnnnnnnnnnnnnnnnnnnnnnnnnnnnnnnnnnnnnnnnnnnnnnnnnnnnnnnnnnnnnnnnnnnnnnnnnnnnnnnnnnnnnnnnnnnnnnnnnnnnnnnnnnnnnnnnnnnnnnnnnnnnnnnnnnnnnnnnnnnnnnnnnnnnnnnnnnnnnnnnnnnnnnnnnnnnngcctcctgagtaggtgggactacagctgcccgccaccatgcccggctaatttttnnnnnnnnnnnnnnnnnnnnnnnnnnnnnnnnnnnnnnnnnnnnnnnnnnnnnnnnnnnnnnnnnnnnnnnnnnnnnnnnnnnnnnnnnnnnnnnnnnnnnnnnnnnnnnnnnnnnnnnnnnnnnnnnnnnnnnnnnnnnnnnnnnnnnnnnnnnnnnnnnnnnnnnnnnnnnnnnnnnnnnnnnnnnnnnnnnnnnnnnnnnnnnnnnnnnnnnnnnnnnnnnnnnnnnnnnnnnnnnnnnnnnnnnnnnnnnnnnnnnnnnnnnnnnnnnnnnnnnnnnnnnnnnnnnnnnnnnnnnnnnnnnnnnnnnnnnnnnnnnnnnnnnnnnnnnnnnnnnnnnnnnnnnnnnnnnnnnnnnnnnnnnnnnnnnnnnnnnnnnnnnnnnnnnnnnnnnnnnnnnnnnnnnnnnnnnnnnnnnnnnnnnnnnnnnnnnnnnnnnnnnnnnnnnnnnnnnnnnnnnnnnnnnnnnnnnnnnnnnnnnnnnnnnnnnnnnnnnnnnnnnnnnnnnnnnnnnnnnnnnnnnnnnnnnnnnnnnnnnnnnnnnnnnnnnnnnnnnnnnnnnnnnnnnnnnnnnnnnnnnnnnnnnnnnnnnnnnnnnnnnnnnnnnnnnnnnnnnnnnnnnnnnnnnnnnnnnnnnnnnnnnnnnnnnnnnnnnnnnnnnnnnnnnnnnnnnnnnnnnnnnnnnnnnnnnnnnnnnnnnnnnnnnnnnnnnnnnnnnnnnnnnnnnnnnnnnnnnnnnnnnnnnnnnnnnnnnnnnnnnnnnnnnnnnnnnnnnnnnnnnnnnnnnnnnnnnnnnnnnnnnnnnnnnnnnnnnnnnnnnnnnnnnnnnnnnnnnnnnnnnnnnnnnnnnnnnnnnnnnnnnnnnnnnnnnnnnnnnnnnnnnnnnnnnnnnnnnnnnnnnnnnnnnnnnnnnnnnnnnnnnnnnnnnnnnnnnnnnnnnnnnnnnnnnnnnnnnnnnnnnnnnnnnnnnnnnnnnnnnnnnnnnnnnnnnnnnnnnnnnnnnnnnnnnnnnnnnnnnnnnnnnnnnnnnnnnnnnnnnnnnnnnnnnnnnnnnnnnnnnnnnctgactgagaatctgtgcagccatttcttgttctttgaaaacaaaatgctacttgtgacctctattttttgttactgtagaattataaaatgtaatgtaagacaccaacagaaatgatatacctgtaactgtacctatcaggactatacctcatttacagtcagaaagcttactgggacgtcaggaaatgatacagggttggttctcatttcgtgctgaaatgagacagaagttcagtgacaaaggtgcgctgtgggggtatcgaggtcccccaggtagagccagcagagcagggaaaactgcatttgcataaaaactactcttaatttgattgttcattttacagtaaaattccattaattaccaagccctcacccagctcatgtatgataaaatttatgttggaagaaacgtgattttcaaataattttttaaatttatctcttgcctaaaggactatatacatctaatatggtaacactatgtcatcttctggagttatcaaaaattgtatgcaatcaagacaacacaaaataagaattattttatttttaagtgcacatacaggtactgttggagttgatgggcaccatgctttctcatgaagtagcatttccctaccatcaagccattgttttgtgccattcagcagatgaaaaaaaggaatttatgctgtacatttcagttcagtgtatgaccaaaagcatatgtttata

SEQ ID NO: 20460 - DNA, 5229 bp, Macaca Mulatta
  misc_feature (1)...(5229): n = A,T,C or G
agcctggggaggtcgagggcagcgagctgtgatcatgctactgcactccagcctgggcaacacagagagaccctgtctnnnnnnnnnnnnnnnnnnnnnnnnnnnnnnnnnnnnnnnnnnnnnnnnnnnnnnnnnnnnnnnnnnnnnnnnnnnnnnnnnnnnnnnnnnnnnnnnnnnnnnnnnnnnnnnnnnnnnnnnnnnnnnnnnnnnnnnnnnnnnnnnnnnnnnnnnnnnnnnnnnnnnnnnnnnnnnnnnnnnngaaaaatacaaaaattagccgggtgtggtggcgggcacctgtaatcccagctgcttaggaggctgaggcagagaattccttcaacctgggaggcggatgttgcagtgatccgagatcgagtcactgcactccannnnnnnnnnnnnnnnnnnnnnnnnnnnnnnnnnnnnnnnnnnnnnnnnnnnnnnnggagtcggggtggagctctcattggctcattgcatgtgagtgtccctacggcctagaaataccagataagctcatcggaacgggctggaaatccacccagctgaccagagggctttgaaccttttattaatttggaggttgactctcctctcaactcggttcccttttgtctgtttggcagggtcagcgagacatcccctgggtcgctcgaccccgtaggacggttcagggagccctccaggtcttcgtttcccctcttccccgcagtgttgttatccagctgggggacccaacgcacacttaaggctccagcaaagnnnnnnnnnnnnnnnnnnnnnnnnnnnnnnnnnnnnnnnnnnnnnnnnnnnnnnnnnnnnnnnnnnnnnnnnnnnnnnnnnnnnnnnnnnnnnnnnnnnnnnnnnnnnnnnnnnnnnnnnnnnnnnnnnnnnnnnnnnnnnnnnnnnnnnnnnnnnnnnnnnnnnnnnnnnnnnnnnnnnnnnnnnnnnnnnnnnnnnnnnnnnnnnnnnnnnnnnnnnnnnnnnnnnnnnnnnnnnnnnnnnnnnnnnnnnnnnnnnnnnnnnnnnnnnnnnnnnnnnnnnnnnnnnnnnnnnnnnnnnnnnnnnnnnnnnnnnnnnnnnnnnnnnnnnnnnnnnnnnnnnnnnnnnnnnnnnnnnnnnnnnnnnnnnnnnnnnnnnnnnnnnnnnnnnnnnnnnnnnnnnnnnnnnnnnnnnnnnnnnnnnnnnnnnnnnnnnnnnnnnnnnnnnnnnnnnnnnnnnnnnnnnnnnnnnnnnnnnnnnnnnnnnnnnnnnnnnnnnnnnnnnnnnnnnnnnnnnnnnnnnnnnnnnnnnnnnnnnnnnnnnnnnnnnnnnnnnnnnnnnnnnnnnnnnnnnngggctcatatggtgtcgtcaagttggcctacaatgaaaatgacaatacctactatgnnnnnnnnnnnnnnnnnnnnnnnnnnnnnnnnnnnnnnnnnnnnnnnnnnnnnnnnnnnnnnnnnnnnnnnnnnnnnnnnnnnnnnnnnnnnnnnnnnnnnnnnnnnnnnnnnnnnnnnnnnnnnnnnnnnnnnnnnnnnnnnnnnnnnnnnnnnnnnnnnnnnnnnnnnnnnnnnnnnnnnnnnnnnnnnnnnnnnnnnnnnnnnnnnnnnnnnnnnnnnnnnnnnnnnnnnnnnnnnnnnnnnnnnnnnnnnnnnnnnnnnnnnnnnnnnnnnnnnnnnnnnnnnnnnnnnnnnnnnnnnnnnnnnnnnnnnnnnnnnnnnnnnnnnnnnnnnnnnnnnnnnnnnnnnnnnnnnnnnnnnnnnnnnnnnnnnnnnnnnnnnnnnnnnnnnnnnnnnnnnnnnnnnnnnnnnnnnnnnnnnnnnnnnnnnnnnnnnnnnnnnnnnnnnnnnnnnnnnnnnnnnnnnnnnnnnnnnnnnnnnnnnnnnnnnnnnnnnnnnnnnnnnnnnnnnnnnnnnnnnnnnnnnnnnnaggccttggatgtttgggccatgggcgtgacactatactgctttgtcnnnnnnnnnnnnnnnnnnnnnnnnnnnnnnnnnnnnnnnnnnnnnnnnnnnnnnnnnnnnnnnnnnnnnnnnnnnnnnnnnnnnnnnnnnnnnnnnnnnnnnnnnnnnnnnnnnnnnnnnnnnnnnnnnnnnnnnnnnnnnnnnnnnnnnnnnnnnnnnnnnnnnnnnnnnnnnnnnnnnnnnnnnnnnnnnnnnnnnnnnnnnnnnnnnnnnnnnnnnnnnnnnnnnnnnnnnnnnnnnnnnnnnnnnnnnnnnnnnnnnnnnnnnnnnnnnnnnnnnnnnnnnnnnnnnnnnnnnnnnnnnnnnnnnnnnnnnnnnnnnnnnnnnnnnnnnnnnnnnnnnnnnnnnnnnnnnnnnnnnnnnnnnnnnnnnnnnnnnnnnnnnnnnnnnnnnnnnnnnnnnnnnnnnnnnnnnnnnnnnnnnnnnnnnnnnnnnnnnnnnggaagcaaggcagcgaagacaacctccagggcaccgacccgccccccgtnnnnnnnnnnnnnnnnnnnnnnnnnnnnnnnnnnnnnnnnnnnnnnnnnnnnnnnnnnnnnnnnnnnnnnnnnnnnnnnnnnnnnnnnnnnnnnnnnnnnnnnnnnnnnnnnnnnnnnnnnnnnnnnnnnnnnnnnnnnnnnnnnnnnnnnnnnnnnnnnnnnnnnnnnnnnnnnnnnnnnnnnnnnnnnnnnnnnnnnnnnnnnnnnnnnnnnnnnnnnnnnnnnnnnnnnnnnnnnnnnnnnnnnnnnnnnnnnnnnnnnnnnnnnnnnnnnnnnnnnnnnnnnnnnnnnnnnnaggacttgactccatgacgtcgatcttggccgctggctggctgaacaggcgggtgtgaggagttgcagacccaaacccatgtgcattttgggacaattgctttttaaaacgtttttatgccaaaaatccttcattgtgattttcagaaccgtgtcagatataccaagtgactgtgtgtggggtttgacaactgtggaaaggtgagcaggaaactccagtggtctcaggccatggaggtgtttgctgcatttgatagggagtagagagctagatgtggctccttgtacaaaccccaaaccatggcaccttccagagccatggtctcaaggagtcagagcagggctggccctcagtagctgcagggagctttgatgcaacttatttgtaagaaggatttttaaattttttaatgggtagaattgtcaggaaggcggaaagggcttgaaatttaataagtgcttctggaaggggattttccaagcctggaagggtattcagcagctgtggtgggaaaaagtttctcctgaaagactgaacgtgtttcttcatgacagctgttcaaagtaggtttctgagattgttgaccgagctctggtaaatctctttgtccaattacaaaaacttcagggtgaaatcctatgcttccatgtacattacatggcttaagattaaacaaaaaaacattttcaagtctctaactagactgaactctaaagcacagtagttcagaaattatttagagcttccaggatatatttcacggcttcagacatgtgatcagttagagcagatgaaacctatgcccgcctgtatatattagcagcttagctagttcataacctgnnnnnnnnnnnnnnnnnnnnnnnnnnnnnnnnnnnnnnnnnnnnnnnnnnnnnnnnnnnnnnnnnnnnnnnnnnnnnnnnnnnnnnnnnnnnnnnnnnnnnnnnnnnnnnnnnnnnnnnnnnnnnnnnnnnnnnnnnnnnnnnnnnnnnnnnnnnnnnnnnnnnnnnnnnnnnnnnnnnnnnnnnnnnnnnnnnnnnnnnnnnnnnnnnnnnnnnnnnntatgaggaaaccagggcttggcacaggaagttcccctttgtagctaacagtccagcaagaaagggttcatctttttgacttccaattaatattgggaagtttggttgaggttcaagtgtgactcctttcagagtcacaggtaggggagtgtgaagttgacggggaggaaagctggaaggactctgggagatttccagctctgctttccagggcttggcagaatctggactggggaaagacggcaccgggaaactctgcttccccgtcgtttacatctgatcagctctggtgtgaggatttctcagacaagggcaagaccgtgtgcccctgcccagcccattcatggagccctgggccttcttggcttccatagatcctaagctcttgactatagtttagccagacttgttttgctatcttataagcagttcagaattagggaatgctggttttgaaaagcaaaggacaggtagtctagagagggccatctggcctgcttgctgggtctttgtaacccagcacttcctcttgccctcctgactttacgtttatggggagaggactcaatagctccaccccttctggcaccagaaggggcttggttagtttgcaataagcaccttgcagaggttaaagccagctggtccctagtcttaggcccagcctgcttgtgtgggctctggcctggcccggtggctggcccagggggcggcagtgctcagagcttctgcagggcttctcttgtttacacagctgcatcagacaatgccatatgtccccaccatggaaccttccatctaagatttcttccagggaatgccagcaatcaggcagcacccagctgtgggggcagtggggtgggggaggcccacattgatgannnnnnnnnnnnnnnnnnngaagaaacaccaaagcaagctgtggaaaggacccaccccacatgaaaaggataagccaagatagctgtaaacacaaagcatttgagctgccactctcttggagcacattgatttttcaaaagccagctctgtcaggaaaggaggtgctgttatgagcagctcttccaggggggcaaagaggatgcccataatttcttccattgctggctcatctgtgggaccaatctggtgtaagcaacctgtggcctgcacctgtggcctcgaaggaagcacaaaccctccatccactcccatttcctctacccttttccacctcccctttccatcccaccagctgccagtggctcccagaaagccttattgagccccttgttgacacttagggctgcagaggcctctccccactggcttggcctttcctgagaggcagggctcccatcctcagagcctttctggaacaaggagaatgcctgtgcaggtggacacaggcctggcctgtcgctgtcact

SEQ ID NO: 20461 - DNA, 464 bp, Macaca Mulatta
ataatttaaatttcgttaaatatgtacaaaggcacttcgggtctatgtgactatattttttgtatataaatgtatttatggaatattgtgcaaatgttatttgagttttttacatgttttgttaatgaagtaaattccatttttaaaatatttttccaaaataaattttatgaatgacaaccagaaggcgtaattacttggctttgccttagcgtggacctgcgctcacctgcggcctgagaggctgagggcagaggtggccttggtgtttctcttttcaaggctttggtttccctggatccatgaaaagcaacccattcctctgctccatcaggaagctgcctgctggccatcatgaggtggtgatggtaagagcaggcacggtcatgaagcagacccgattttctaattccatctccctgatgcatttattagttctttccacagaaagaataagcattcct

SEQ ID NO: 20462 - DNA, 839 bp, Macaca Mulatta
  misc_feature (1)...(839): n = A,T,C or G
ttgtctacaaaccattgaacccccctgtacacaactcactctttttaaagaaaaaaattgaaatgtaaggctgtgtaagatttgtttttaaactgcacagtatcttttttttgtatagttaacacactaccgaatatgtctttagatagccctgtcctggtggtattttcaatagccactaaccttgcctggtacagtatgggggttgtaaattggcatggaaatttaaagcaggttcttgttggtgcacagcacaaattagttatatatggggatggtagttttttcattttcagttgtctctgatgcagcttatacgaaataattgttgttctattaactgaataccactctgtaattgcnnnnnnnnnnnnnnngttgcagctgttttgttgacattctgaatgcttttaagtaaatacaattatttttattagtattgttgtgcttttcataggtctaaaatttttcttcttgaggggaagctagtgttttgcttttgcccattttgaatcatatgaattattacagcgtttatcctttcatatagttagctaataaaaagcttttgtctacacaccctgcataccataataggggtaaagttaaattgagataggtttcatgcataactgaacatccaaaatcttgatcagttaagaaatttcacatagcccacttacatttacaaactgaagagtaatcaatctactcaaagcatgggattattagaatcaaacattttgaaagtctgtccttgaaggactaatagaaaaatatgtcctaacttttacatgaggactctattctttaactgccattaccatgcaatggcagtt

SEQ ID NO: 20463 - DNA, 2996 bp, Macaca Mulatta
  misc_feature (1)...(2996): n = A,T,C or G
ggacacatgttcaaagagcataattaactttttaaaagaagctagtaannnnnnnnnnnnnnnnnnnnnnnnnnnnnnnnnnnnnnnnnnnnnnnnnnnnnnnnnnnnnnnnnnnnnnnngttgcaccttctgtaggaattacaagattaattaactcatcaacggcagaaccagttaaagaagaggccaaaacttcaaatccaacttcttcactaacttctctttctgtggcaccaacattcagcccaaatataactctgggacccacctatttaaccactgtcaattcttcagactctgacaatgggaccacaagaacagcaagcaccaattctataggcactacaattttaccaaatgaaacgtggcttccagataaccagttcacggatgccagaacagaaccctgggaggggaattccagcactgcagcaaccactccagaagctttccctccttcaggtannnnnnnnnnnnnnnnnnnnnnagatgagacaccaattattgcggtgatggtggccctgtcctctctgctagtgatcgtgtttattatcatagttttgtacatgttaaggnnnnnnnnnnnnnnnnnnnnnnnnnnnnnnnnnnnnnnnnnnnnnnnnnnnnnnnnnnnnnnnnnnnnnnnngagccccagagtgtgccacttctggccagatccccaagcaccaacaggaagtacccacccctgcccgtggacaagctggaagaggaaattaaccggagaatggcagacgacaataagctcttcagggaggaattcaannnnnnnnnnnnnnnnnnnnnnnnnnnnnnnnnnnnnnnnnnnnnnnnnnnnnnnnnnnnnnnnnnnnnnnnnnnnnnnnnnnnnnnnnnnnnnnnnnnnnnnnnnnnnnnnnnnnnnnnnnnnnnnnnnnnnnnnnnnnnnnnnnnnnnnnnnnnnnnnnnnnnnnnnnnnnnnnnnnnnnnnnnnnnnnnnnnnnnnnnnnnnnnnnnnnnnnnnnnnnnnnnnnnnnnnnnnnnnnnnnnnnnnnnnnnnnnnnnnnnnnnnnnnnnnnnnnnnnnnnnnnnnnnnnnnnnnnnnnnnnnnnnnnnnnnnnnnnnnnnnnnnnnnnnnnnnnnnnnnnnnnnnnnnnnnnnnnnnnnnnnnnnnnnnnnnnnnnnnnnnnnnnnnnnnnnnnnnnnnnnnnnnnnnnnnnnnnnnnnnnnnnnnnnnnnnnnnnnnnnnnnnnnnnnnnnnnnnnnnnnnnnnnnnnnnnnnnnnnnnnnnnnnnnnnnnnnnnnnnnnnnnnnnnnnnnnnnnnnnnnnnnnnntccacaagaaggtgaaggcctgtaaccctcagtatgcaggggccatcgtggtccactgcagncagtgcaggtgtagggcgtacaggtacctttgtcgtcattgatgccatgctggacatgatgcatacagaacggaaggtggacgtgtatggctttgtgagccggatccgggcacagcgctgccagatggtgcaaacnnnnnnnnnnnnnnnnnnnnnnnnnnnnnnnnnnnnnnnnnnnnnnnnnnnnnnnnnnnnnnnnnnnnnnnnnnnnnnnnnnnnnnnnnnnnnnnnnnnnnnnnnnnnnnnnnnnnnnnnnnnnnnnnnnnnnnnnnnnnnnnnnnnnnnnnagaagttaacatcaatcaaaatccagaatgacaagatgcggactggaaaccttccagccaacatgaagaagaaccgtgttttacagatcattccatgaattcaacagagtgatcattccagttttttttgtcgaagagaatacagactatgtgaatgcatcctttattnnnnnnnnnnnnnnnnnnnnnnnnnnnnnnnnnnnnnnnnnnnnnnnnnnnnnnnnnnnnnnnnnnnnnnnnnnnnnnnnnnnnnnnnnnnnnnnnnnnnnnnnnnnnnnnnnnnnnnnnnnnnnnnnnnnnnnnnnnnnnnnnnnnnnnnnnnnnnnnnnnnnnnnnnnnnnnnnnnnnnnnnnnnnnnnnnnnnnnnnnnnnnnnnnnnnnnnnnnnnnnnnnnnnnnnnnnnnnnnnnnnnnnnnnnnnnnnnnnnnnnnnnnnnnnnnnnnnnnnnnnnnnnnnnnnnnnnnnnnnnnnnnnnnnnnnnnnnnnnnnnnnnnnnnnnnnnnnnnnnnnnnnnnnnnnnnnnnnnnnnnnnnnnnnnnnnnnnnnnnnnnnnnnnnnnnnnnnnnnnnnnnnnnnnnnnnnnnnnnnnnnnnnnnnnnnnnnnnnnnnnnnnnnnnnnnnnnnnnnnnnnnnnnnnnnnnnnnnnnnnnnnnnnnnnnnnnnnnnnnnnnnnnnnnnnnnnnnnnnnnnnnnnnnnnnnnnnnnnnnnnnnnnnnnnnnnnnnnnnnnnnnnnnnnnnnnnnnnnnnnnnnnnnnnnnnnnnnnnnnnnnnnnnnnnnnnnnnnnnnnnnnnnnnnnnnnnnnnnnnnnnnnnnnnnnnnnnnnnnnnnnnnnnnnnnnnnnnnnnnnnnnnnnnnnnnnntaccccaaattgtgtatataccttataactgttttagaaattggtacataggcttctattacctattaggtggaaattttatatgtaaatgtgttagcactgatagtcctttttccaatgttttattggggaattaaatagtgtgatgtttggactgatatcgtgaaatcctcagccaggaaattgggctggattgtgctttggttaatatatctttccctaaagaagataaacataaaatccattccaggtagcttggcaccaactaagaaaaaaagcacaaagtactcagagctctagaggaaagtggttgtccccataccatcatgcactgtaaatannnnnnnnnnnnnnnnnnnnnnnnnnnnnnnnnnnnnnnnnnnnnnnnnnnnggagtaataggaccagagcggtatctctggcaccacactagggactatcaggtaataaaagctttgactccctgaggaaa

SEQ ID NO: 20464 - DNA, 765 bp, Macaca Mulatta
ctgcttccctccaccttttccgcaatgattttatttatttatagctgacacaaggaagatggacccttccaaaccgtcttccagtgtggctggagtagtcatcattgtgatcctcctgattttaacgggtgctggccttgctgcctatttcttttataagaaaagacgtgtgcacctacctcaagagggcgcctttgaaaacactctgtatttcaatagtcagtcaagcccaggaactagtgatatgaaagatctcgtgggcaacattgaacagaatgaacacgcagtcatctagtacctcaatgcgattctgagatattggaatgtcataaaattgtaactgaaattaaaaatttttagttcgatgtgattgttttctttaaaatgagtactgaattgtactgttctgtcctttttttctttgcctaattgaagaaataattgcttgttttctagcctggcaagatattctcataaaagagggataataatgctgattactaccttttaaaatatcttagataaacgcacagcaccacagtaccaacatctaggcactagtgatgtgtagctgatgtcagcttcatgtggattttaagcactctagaaatgatgaggcttcttggcatattttaaggagctctgaaaatgtgttacctattcaattgttactcggcaagtagaagaccatttgaaaaatcaggtacaaagatcctcaggtggcataaaaatgtagtcagttttctcttttaccggtttttattt

SEQ ID NO: 20465 - DNA, 310 bp, Macaca Mulatta
  misc_feature (1)...(310): n = A,T,C or G
tgctgaagacccaccccgggnagaccccgcttccagtgcagcctctggcatctctatcccctatgaggcaccacgtatgacctcctgcccttggctctcttgctcctcacccaagaatctcaggacagaagcaagagcccattgctcctgctcagctcagccccgctgcggaggaacccttggcaggcagaacctggaggtgtcagaggctcaactcctccatctaaccagcaggctctcagagaccccctggaagagcctgtgcagcttaagcagagtgcttctagatggagagtggtcactggggaaa

SEQ ID NO: 20466 - DNA, 695 bp, Macaca Mulatta
cggtcgactgctccacgctgacctccaagtgtctgctgctcaaggcgcgcatgagcgcccccaagaacgcccgcacgctggtgcggccgaatgagcacgcgctcgtggacaacgatggtctctacgaccccgactgcgacccagagggccgcttcaaggcgcgccagtgcaaccagacgtcggtgtgctggtgcgtgaactcggtgggcgtgcggcgcaccgacaagggcgacctgagcctgcgctgcgatgagctggtgcgcacccaccacatcctcattgacctccgtcaccgccccaccgccggcgccttcaaccactcggacctggacgcggagctgaggcggctcttccgcgagcgctatcggctgcaccccaagtttgtggcggccgtgcactacgagcagcccaccatccagatcgagctgcggcagaacacgtcgcagaaggccgcaggtgacgtggacatcggtgatgcagcctactacttcgagagggacgtcaagggcgagtctctattccagggccgcggcggcctggacttgcgcgtgcgcggagagcccctgcaggtggagcgcacgctcatctattacctggacgagattcccccgaagttctccatgaagcgcctcaccgccggcctcatcgccgtcatcgtggtggtggtggtggccctcgtcgcaggcgtggccgtc

SEQ ID NO: 20467 - DNA, 2993 bp, Macaca Mulatta
  misc_feature (1)...(2993): n = A,T,C or G
tagaaacctgctctacgaactgtcacaaggcattgactcagaggacttaaagaacatgatcttccttctgaacgactctcttcccaaaaccgaaatgnnnnnnnnnnnnnnnnnnnnnnnnnnnnnnnnnnnnnnnnnnnnnnnnnnnnnnnnnnnnnnnnnnnnnnnnnnnnnnnnnnnnnnnnnnnnnnnnnnnnnnnnnnnnnnnnnnnnnnnnnnnnnnnnnnnnnnnnnnnnnnnnnnnnnnnnnnnnnnnnnnnnnnnnnnnnnnnnnnnnnnnnnnnnnnnnnnnnnnnnnnnnnnnnnnnnnnnnnnnnnnnnnnnnnnnnnnnnnnnnnnnnnnnnnnnnnnnnnnnnnnnnnnnnnnnnnnnnnnnnnnnnnnnnnnnnnnnnnnnnnnnnnnnnnnnnnnnnnnnnnnnnnnnnnnnnnnnnnnnnnnnnnnnnnnnnnnnnnnnnnnnnnnnnnnnnnnnnnnnnnnnnnnnnnnnnnnnnnnnnnnnnnnnnnnnnnnnnnnnnnnnnnnnnnnnnnnnnnnnnnnnnnnnnnnnnnnnnnnnnnnnnnnnnnnnnnnnnnnnnnnnnnnnnnnnnnnnnnnnnnnnnnnnnnnnnnnnnnnnnnnnnnnnnnnnnnnnnnnnnnnnnnnnnnnnnnnnnnnnnnnnnnnnnnnnnnnnnnnnnnnnnnnnnnnnnnnnnnnnnnnnnnnnnnnnnnnnnnnnnnnnnnnnnnnnnnnnnnnnnnnnnnnnnnnnnnnnnnnnnnnnnnnnnnnnnnnnnnnnnnnnnnnnnnnnnnnnnnnnnnnnnnnnnnnnnnnnnnnnnnnnnnnnnnnnnnnnnnnnnnnnnnnnnnnnnnnnnnnnnnnnnnnnnnnnnnnnnnnnnnnnnnnnnnnnnnnnnnnnnnnnnnnnnnnnnnnnnnnnnnnnnnnnnnnnnnnnnnnnnnnnnnnnnnnnnnnnnnnnnnnnnnnnnnnnnnnnnnnnnnnnnnnnnnnnnnnnnnnnnnnnnnnnnnnnnnnnnnnnnnnnnnnnnnnnnnnnnnnnnnnnnnnnnnnnnnnnnnnnnnnnnnnnnnnnnnnnnnnnnnnnnnnnnnnnnnnnnnnnnnnnnnnnnnnnnnnnnnnnnnnnnnnnnnnnnnnnnnnnnnnnnnnnnnnnnnnnnnnnnnnnnnnnnnnnnnnnnnnnnnnnnnnnnnnnnnnnnnnnnnnnnnnnnnnnnnnnnnnnnnnnnnnnnnnnnnnnnnnnnnnnnnnnnnnnnnnnnnnnnnnnnnnnnnnnnnnnnnnnnnnnnnnnnnnnnnnnnnnnnnnnnnnnnnnnnnnnnnnnnnnnnnnnnnnnnnnnnnnnnnnnnnnnnnnnnnnnnnnnnnnnnnnnnnnnnnnnnnnnnnnnnnnnnnnnnnnnnnnnnnnncctcagcctcccaagtagctgggattacaggtgcccgccaccacgcctggctaatttttgtgtttttagtagtgaagaggtttcgccgtattggccaggctggtattgaactcctgacctcaagtgatctgcctgcctcagcctcccaaagtactgggattacaggcatgagccaccgcacccagtccaacatggaatatgacatcaggttataaagtttctgcttgcagagcagctgagtgtaaatgagccatcatcttcctacagggaaacctgtctctaaccaaataaaaacttcctatgtgagcaccttccttacacaaaagcaggaaatgggcctggcatagaccaaatgttcacctcactagatatgcagaagagaagtcttaggaagggggagagtagagagagggtggctggactgtaacctcattgtccaatgttcaaggccatgcagaggggacacagaattataactaaggggtagttgtctaaagaggcaatctaaactcagtctagcctaagaacgtggttctttgaacaccagggaatcttaaaatgtccctggtccccaggtcagacacagtatttcacaagtatagtcccagaactttgagaaggtgaggtgggaggatcacttgagcccaggagtttgagaccagcttggacgacatagtgaaaccccatctnnnnnnnnnnnnnnnnnnnnnnnnnnnnnnnnnnnnnnnnnnnnnnnnnnnnnnnnnnnnnnnnnnnnnnnnnnnnnnnnnnnnnnnnnnnnnnnnnnnnnnnnnnnnnnnnnnnnnnnnnnnnnnnnnnnnnnnnnnnnnnnnnnnnnnnnnnnnnnnnnnnnnnnnnnnnnnnnnnnnnnnnnnnnnnnnnnnnnnnnnnnnnnnnnnnnnnnnnnnnnnnnnnnnnnnnnnnnnnnnnnnnnnnnnnnnnnnnnnnnnnnnnnnnnnnnnnnnnnnnnnnnnnnnnnnnnnnnnnnnnnnnnnnnnnnnnnnnnnnnnnnnnnnnnnnnnnnnnnnnnnnnnnnnnnnnnnnnnnnnnnnnnnnnnnnnnnnnnnnnnnnnnnnnnnnnnnnnnnnnnnnnnnnnnnnnnnnnnnnnnnnnnnnnnnnnnnnnnnnnnnnnnnnnnnnnnnnnnnnnnnnnnnnnnnnnnnnnnnnnnnnnnnnnnnnnnnnnnnnnnnnnnnnnnnnnnnnnnnnnnnnnnnnnnnnnnnnnnnnnnnnnnnnnnncaatttctagaggaacttttctttgttaattcctggaactgtattttgaacccttgaaggtgagccctcatagggagatccaaagtcctgtggttaacgcctttgtttatagacgaggcagctaagtcctggggatgtgaacaacctgctggcagacctcatttactggattttccttcagccaggtgaactggaatggcttggggcgtggaagggcattaggagcgtttcatttgatatgtgaatgctcataaaaaatgttgaggaatgaagaaaaacaattctcagtggtgcctgcatttataggtattaatgtgaaagtcaaattcatgtacagtacatttgttataagaa

SEQ ID NO: 20468 - DNA, 486 bp, Macaca Mulatta
ttctgctgggtgccattgaagaaagtcctcttagatttcaatggctaaaactgcttctcttcttgtgggaaactggatcatagtagaacttcaaagtgaataacccaaacccagtgattttaagggcaaagggaaatgttttccataataacctactttctctgggctctcagttcctttaaatatgttctagtaaaacaaaataataaataacaagggatgttcttagagttacttaaaatttgttcatctgaccatgggcatgaatagtttaaatttccttagaactttggaggagaaatattttcagaaagctttcacagttgccagattcttttgctttcatttttgaaccccaggtgacttctgtaaaggaagtcactttctaaatatttgataaatgccctcaacagcaccttctacagcaggatgtatatacgcccttctaggctgttggcatcagctctcgcatctgccttcccatcg

SEQ ID NO: 20469 - DNA, 2448 bp, Macaca Mulatta
  misc_feature (1)...(2448): n = A,T,C or G
agaagctgcgggcgtcgggcgcgggcaaggccatcggcgtcctgaccagcggcggcgacgcgcaaggnnnnnnnnnnnnnnnnnnnnnnnnnnnnnnnnnnnnnnnnnnnnnnnnnnnnnnnnnnnnnnnnnnnnnnnnnnnnnnnnnnnnnnnnnnnnnnnnnnnnnnnnnnnnnnnnnnnnnnnnnnnnnnnnnnnnnnnnnnnnnnnnnnnnnnnnnnnnnnnnnnnnnnnnnnnnnnnnnnnnnnnnnnnnnnnnnnnnnnnnnnnnnnnnnnnnnnnnnnnnnnnnnnnnnnnnnnnnnnnnnnnnnnnnnnnnnnnnnnnnnnnnnnnnnnnnnnnnnnnnnnnnnnnnnnnnnnnnnnnnnnnnnnnnnnnnnnnnnnnnnnnnnnnnnnnnnnnnnnnnnnnnnnnnnnnnnnnnnnnnnnnnnnnnnnnnnnnnnnnnnnnnnnnnnnnnnnnnnnnnnnnnnnnnnnnnnnnnnnnnnnnnnnnnnnnnnnnnnnnnnnnnnnnnnnnnnnnnnnnnnnnnnnnnnnnnnnnnnnnnnnnnnnnnnnnnnnnnnnnnnnnnnnnnnnnnnnnnnnnnnnnnnnnnnnnnnnnnnnnnnnnnnnnnnnnnnnnnnnnnnnnnnnnnnnnnnnnnnnnnnnnnnnnnnnnnnnnnnnnnnnnnnnnnnnnnnnnnnnnnnnnnnnnnnnnnnnnnnnnnnnnnnnnnnnnnnnnnnnnnnnnnnnnnnnnnnnnnnnnnnnnnnnnnnnnnnnnnnnnnnnnnnnnnnnnnnnnnnnnnnnnnnnnnnnnnnnnnnnnnnnnnnnnnnnnnnnnnnnnnnnnnnnnnnnnnnnnnnnnnnnnnnnnnnnnnnnnnnnnnnnnnnnnnnnnnnnnnnnnnnnnnnnnnnnnnnnnnnnnnnnnnnnnnnnnnnnnnnnnnnnnnnnnnnnnnnnnnnnnnnnnnnnnnnnnnnnnnnnnnnnnnnnnnnnnnnnnnnnnnnnnnnnnnnnnnnnnnnnnnnnnnnnnnnnnnnnnnnnnnnnnnnnnnnnnnnnnnnnnnnnnnnnnnnnnnnnnnnnnnnnnnnnnnnnnnnnnnnnnnnnnnnnnnnnnnnnnnnnnnnnnnnnnnnnnnnnnnnnnnnnnnnnnnnnnnnnnnnnnnnnnnnnnnnnnnnnnnnnnnnnnnnnnnnnnnnnnnnnnnnnnnnnnnnnnnnnnnnagactcggagccgcgggtcccgactgaacatcatcattatcgctgagggtgccatcgaccgcaacgggaagcccatctcgtccagctacgtgaaggannnnnnnnnnnnnnnnnnnnnnnnnnnnnnnnnnnnnnnnnnnnnnnnnnnnnnnnnnnnnnnnnnnnnnnnnnnnnnnnnnnnnnnnnnnnnnnnnnnnnnnnnnnnnnnnnnnnnnnnnnnnnnnnnnnnnnnnnnnnnnnnnnnnnnnnnnnnnnnnnnnnnnnnnnnnnnnnnnnnnnnnnnnnnnnnnnnnnnnnnnnnnnnnnnnnnnnnnnnnnnnnnnnnnnnnnnnnnnnnnnnnnnnnnnnnnnnnnnnnnnnnnnnnnnnnnnnnnnnnnnnnnnnnnnnnnnnnnnnnnnnnnnnnnnnnnnnnnnnnnnnnnnnnnnnnnnnnnnnnnnnnnnnnnnnnnnnnnnnnnnnnnnnnnnnnnnnnnnnnnnnnnnnnnnnnnnnnnnnnnnnnnnnnnnnnnnnnnnnnnnnnnnnnnnnnnnnnnnnnnnnnnnnnnnnnnnnnnnnnnnnnnnnnnnnnnnnnnnnnnnnnnnnnnnnnnnnnnnnnnnnnnnnnnnnnnnnnnnnnnnnnnnnnnnnnnnnnnnnnnnnnnnnnnnnnnnnnnnnnnnnnnnnnnnnnnnnnnnnnnnnnnnnnnnnnnnnnnnnnnnnnnnnnnnnnnnnnnnnnnnnnnnnnnnnnnnnnnnnnnnnnnnnnnnnnaggcctatgaaggggtgctgcagctggtggaggctcgagggcgttacgaggagctctgcatcgtcatgtgcgtcatcccagccaccatcagcaacaacgtccctggcaccgacttcagcctgggctctgacactgctgtaaacgctgccatggangagctgtgaccgcatcaaacagtctgcctcggggaccaagcgccgtgtgttcatcgtggagaccatggggggttactgtggctacctggccaccgtgactggcatcgctgtgggggccgacgccgcctacgtctttgaggaccctttcaacatccatgacttaaaggtnnnnnnnnnnnnnnnnnnnnnnnnnnnnnnnnnnnnnnnnnnnnnnnnnnnnnnnnnnngaacgagaagtgccatgactactacaccacggagttcctgtacaacctgtactcatcagagggcaagggtgtcttcgactgcaggaccaacgtcctgggccacctgcagcagg

SEQ ID NO: 20470 - DNA, 2051 bp, Macaca Mulatta
  misc_feature (1)...(2051): n = A,T,C or G
agctcaaattggtcctccagaagtacatttagaagctgaagataaggcaatagtgatatacatctctcctcctggaacagaagatagtgtcatgtgggctttggatcgttcaagctttacatatagcttagttatctggaaaaactcttcaagtgtagaagtaagcattnnnnnnnnnnnnnnnnnnnnnnnnnnnnnnnnnnnnnnnnnnnnnnnnnnnnnnnnnnnnnnnnnnnnnnnnnnnnnnnnnnnnnnnnnnnnnnnnnnnnnnnnnnnnnnnnnnnnnnnnnnnnnnnnnnnnnnnnnnnnnnnnnnnnnnnnnnnnnnnnnnnnnnnnnnnnnnnnnnnnnnnnnnnnnnnnnnnnnnnnnnnnnnnnnnnnnnnnnnnnnnnnnnnnnnnnnnnnnnnnnnnnnnnnnnnnnnnnnnnnnnnnnnnnnnnnnnnnnnnnnnnnnnnnnnnnnnnnnnnnnnnnnnnnnnnnnnnnnnnnnnnnnnnnnnnnnnnnnnnnnnnnnnnnnnnnnnnnnnnnnnnnnnnnnnnnnnnnnnnnnnnnnnnnnnnnnnnnnnnnnnnnnnnnnnnnnnnnnnnnnnnnnnnnnnnnnnnnnnnnnnnnnnnnnnnnnnnnnnnnnnnnnnnnnnnnnnnnnnnnnnnnnnnnnnnnnnnnnnnnnnnnnnnnnnnnnnnnnnnnnnnnnnnnnnnnnnnnnnnnnnnnnnnnnnnnnnnnnnnnnnnnnnnnnnnnnnnnnnnnnnnnnnnnnnnnnnnnnnnnnnnnnnnnnnnnnnnnnnnnnnnnctgatgttactattcctaatttgaaaccactgactgtatattgtgtgaaagccagagcacacagcatggatgaaaagctgaataaaagcagtgtttttagtgatgttgtgtgtgaggaaacaaaatcagnnnnnnnnnnnnnnnnnnnnnnnnnnnnnnnnnnnnnnnnnnnnnnnnnnnnnnnnnnnnnnnnnnnnnnnnnnnnnnnnnnnnnnnnnnnnnnnnnnnnnnnnnnnnnnnnnnnnnnnnnnnnnnnnnnnnnnnnnnnnnnnnnnnnnnnnnnnnnnnnnnnnnnnnnnnnnnnnnnnnnnnnnnnnnnnnnnnnnnnnnnnnnnnnnnnnnnnnnnnnnnnnnnnnnnnnnnnnnnnnnnnnnnnnnnnnnnnnnnnnnnnnnnnnnnnnnnnnnnnnnnnnnnnnnnnnnnnnnnnnnnnnnnnnnnnnnnnnnnnnnnnnnnnnnnnnnnnnnnnnnnnnnnnnnnnnnnnnnnnnnnnnnnnnnnnnnnnnnnnnnnnnnnnnnnnnnnnnnnnnnnnnnnnnnnnnnnnnnnnnnnnnnnnnnnnnnnnnnnnnnnnnnnnnnnnnnnnnnnnactacaaagagaacatttccctgtttcggggaagaaaaaacatcttcagatcataggtcctaaaaatacaggcaagcactttactatttaaaaatgaaattacaggctcaggcgcagtggctcatgcctgtatcccagcactttgggaggccaaggcaggcagatcatgaggtcaaaagattgagaccatcctggccaacatggtgaaaccccatctcaactaaaagtataaaaattagctgggcatggtggcatgtgcctgtagtctcagctactcaggagactgaggcaggagaatcacttgaacccaggaggtggaggttgcagtgagccgagatagcgccactgcactccagcctggcaacaaagtgagactctnnnnnnaagcaattataagagttgagacaaacgtttcctacattattttccacgtgtaaaatcttgaaaaagcctgtcattggacctgcattggatgagatgagtcagatcaaaacgatggccacccgtctccctcttgcgagcctaagtgcaactgtgctcgctgtgcactgtggctaaggatggtgtgtgtgttcctgtctgtcactgatgctgctggttactgcatgtgccacacctatttgttcgccattcctagcattctatttcattcctcctctggagatatttc

SEQ ID NO: 20471 - DNA, 78 bp, Macaca Mulatta
aatctttatgtatatgttccttgctggtcttgggcttctggttattgttggccttcatcaactcctagaatctagaaa

SEQ ID NO: 20472 - DNA, 2087 bp, Macaca Mulatta
  misc_feature (1)...(2087): n = A,T,C or G
agttccctctacagtggtttggagtccctgccattctgaaaggctggtttgagcgagtgttcgtaggagagtttgcttacacgctcgctgccatgtatgacaaaggacccttccnnnnnnnnnnnnnnnnnnnnnnnnnnnnnnnnnnnnnnnnnnnnnnnnnnnnnnnnnnnnnnnnnnnnnnnnnnnnnnnnnnnnnnnnnnnnnnnnnnnnnnnnnnnnnnnnnnnnnnnnnnnnnnnnnnnnnnnnnnnnnnnnnnnnnnnnnnnnnnnnnnnnnnnnnnnnnnnnnnnnnnnnnnnnnnnnnnnnnnnnnnnnnnnnnnnnnnnnnnnnnnnnnnnnnnnnnnnnnnnnnnnnnnnnnnnnnnnnnnnnnnnnnnnnnnnnnnnnnnnnnnnnnnnnnnnnnnnnnnnnnnnnnnnnnnnnnnnnnnnnnnnnnnnnnnnnnnnnnnnnnnnnnnnnnnnnnnnnnnnnnnnnnnnnnnnnnnnnnnnnnnnnnnnnnnnnnnnnnnnnnnnnnnnnnnnnnnnnnnnnnnnnnnnnnnnnnnnnnnnnnnnnnnnnnnnnnnnnnnnnnnnnnnnnnnnnnnnnnnnnnnnnnnnnnnnnnnnnnnnnnnnnnnnnnnnnnnnnnnnnnnnnnnnnnnnnnnnnnnnnnnnnnnnnnnnnnnnnnnnnnnnnnnnnnnnnnnnnnnnnnnnnnnnnnnnnnnnnnnnnnnnnnnnnnnnnnnnnnnnnnnnnnnnnnnnnnnnnnnnnnnnnnnnnnnnnnnnnnnnnnnnnnnnnnnnnnnnnnnnnnnnnnnnnnnnnnnnnnnnnnnnnnnnnnnnnnnnnnnnnnnnnnnnnnnnnnnnnnnnnnnnnnnnnnnnnnnnnnnnnnnnnnnnnnnnnnnnnnnnnnnnnnnnnnnnnnnnnnnnnnnnnnnnnnnnnnnnnnnnnnnnnnnnnnnnnnnnnnnnnnnnnnnnnnnnnnnnnnnnnnnnnnnnnnnnnnnnnnnnnnnnnnnnnnnnnnnnnnnnnnnnnnnnnnnnnnnnnnnnnnnnnnnnnnnnnnnnnnnnnnnnnnnnnnnnnnnnnnnnnnnnnnnnnnnnnnnnnnnnnnnnnnnnnnnnnnnnnnnnnnnnnnnnnnnnnnnnnnnnnnnnnnnnnnnnnnnnnnnnnnnnnnnnnnnnnnnnnnnnnnnnnnnnnnnnnnnnnnnnnnnnnnnnnnnnnnnnnnnnnnnnnnnnnnnnnnnnnnnnnnnnnnnnnnnnnnnnnnnnnnnnnnnnnnnnnnnnnnnnnnnnnnnnnnnnnnnnnnnnnnnnnnnnnnnnnnnnnnnnnnnnnnnnnnnnnnnnnnnnnnnnnnnnnnnnnnnnnnnnnnnnnnnnnnnnnnnnnnnnnnnnnnnnnnnnnnnnnnnnnnnnnnnnnnnnnnnnnnnnnnnnnnnnnnnnnnnnnnnnnnnnnnnnnnnnnnnnnnnnnnnnnnnnnnnnnnnnnnnnnnnnnnnnnnnnnnnnnnnnnnnnnnnnnnnnnnnnnnnnnnnnnnnnnnnnnnnnnnnnnnnnnnnnnnnnnnntaaaaacagccttccacaaaaaatactttatttctaatctacacaaactttcggaaggttatcttctttatcattgctaaactgatgacttaccacgagatggggtccagtcccatgactttggggtacaattgtaaacttgagttttatcaactttggtgaacagttttggcataatagtcaatttctacttctggaagtcatctcgtcccactgttggtattatataattcaaggagactatgataaaacactgccctcttgtggtgcattgaaagaagatcttataaataatgaaaacgttgcctgaaaaatgggagacagcctcttacttgccaagaaaaaggaagggaatggaccgagctggagaacctcctttaccagatgctgattggcactggtggtttttgctctcgacagtatccacaatagctgatggctgggtgtttcagtttgaaaatattttctgttgccttcaacttcactgcaattttgtgtcaatttctgaaagatccgaataaataaaattcatttctaca

SEQ ID NO: 20473 - DNA, 142 bp, Macaca Mulatta
aggctttgtcttctgagtctatagaaaaacttccagtctttaacatgtcagccttcaaacattatcagatgagctctgaggctgatgactggtgtatcccaagcagggaaccaaagaacctggcaaaagaagcggccatgtg

SEQ ID NO: 20474 - DNA, 121 bp, Macaca Mulatta
gtattcacagagacttggcagccagaaatatcctccttactcatggtcggatcacaaagatttgtgattttggcctagccagagacatcaagaatgattctaattatgtggttaaaggaaa

SEQ ID NO: 20475 - DNA, 253 bp, Macaca Mulatta
gcccattaactcatctgttatcctgctagctgtagaaatgtatcttgataaacattaaacactgtaatcttaagagtgtaattgtgtgacgtttgcttagtacctgtaatgagaaactggttgatgatcacttggaagatttgtatagttttataaaactcaattaaaatgtctgtttcaatgacctgtattttgccagacttaatcacagatgggtattaaacttgtcagaatttcttcaattctcattcaa

SEQ ID NO: 20476 - DNA, 222 bp, Macaca Mulatta
gtgtgatgattacttctttatagcccatcgtggagagcggcgcggcattggtggtatcttttttgatgatcttgactctccgtccaaggaggaggtgtttcgctttgtacagagctgtgccaaggctgtagttccttcttatattccccttgtgaaaaagcactgtgatgactcattcacgccccaggagaagctgtggcagcagctcagaagaggacggta

SEQ ID NO: 20477 - DNA, 2264 bp, Macaca Mulatta
  misc_feature (1)...(2264): n = A,T,C or G
ctttgctgtctgcatgccgacatgctgggctcactgggccccaaggaggccaagaaggccttcctggacttctatcacagcttcctggagaagacagcgnggttctgcgggtgccggtccctcccaatgtcgcctttgaacttgnnnnnnnnnnnnnnnnnnnnnnnnnnnnnnnnnnnnnnnnnnnnnnnnnnnnnnnnnnnnnnnnnnnnnnnnnnnnnnnnnnnnnnnnnnnnnnnnnnnnnnnnnnnnnnnnnnnnnnnnnnnnnnnnnnnnnnnnnnnnnnnnnnnnnnnnnnnnnnnnnnnnnnnnnnnnnnnnnnnnnnnnnnnnnnnnnnnnnnnnnnnnnnnnnnnnnnnnnnnnnnnnnnnnnnnnnnnnnnnnnnnnnnnnnnnnnnnnnnnnnnnnnnnnnnnnnnnnnnnnnnnnnnnnnnnnnnnnnnnnnnnnnnnnnnnnnnnnnnnnnnnnnnnnnnnnnnnnnnnnnnnnnnnnnnnnnnnnnnnnnnnnnnnnnnnnnnnnnnnnnnnnnnnnnnnnnnnnnnnnnnnnnnnnnnnnnnnnnnnnnnnnnnnnnnnnnnnnnnnnnnnnnnnnnnnnnnnnnnnnnnnnnnnnnnnnnnnnnnnnnnnnnnnnnnnnnnnnnnnnnnnnnnnnnnnngagaagccaggtgctacagaccggaagggaggcctggggatgccctctcgggaccggaatgttggggctcctgggcaggacacccctggagtctctctgcaccctctgtccctggacagcccagaccgggaaccaggtnnnnnnnnnnnnnnnnnnnnnnnnnnnnnnnnnnnnnnnnnnnnnnnnnnnnnnnnnnnnnnnnnnnnnnnnnnnnnnnnnnnnnnnnnnnnnnnnnnnnnnnnnnnnnnnnnnnnnnnnnnnnnnnnnnnnnnnnnnnnnnnnnnnnnnnnnnnnnnnnnnnnnnnnnnnnnnnnnnnnnnnnnnnnnnnnnnnnnnnnnnnnnnnnnnnnnnnnnnnnnnnnnnnnnnnnnnnnnnnnnnnnnnnnagctgctggtgacggaagcggcccacgtgcgcatgctgcgggtgctgcacgacctcttcttccagcccatggcggacggcctcttcttctccctggaggagctgcagaacatcttccccagcctggacgagctcatcgaggtgcattnccctgttcctcgatcgcctgatgaagcggaggcaggagagtggctacctcatcgaggagattggagacgtgctgctggcccggnnnnnnnnnnnnnnnnnnnnnnnnnnnnnnnnnnnnnnnnnnnnnnnnnnnnnnnnnnnnnnnnnnnnnnnnnnnnnnnnnnnnnnnnnnnnnnnnnnnnnnnnnnnnnnnnnnnnnnnnnnnnnnnnnnnnnnnnnnnnnnnnnnnnnnnnnnnnnnnnnnnnnnnnnnnnnnnnnnnnnnnnnnnnnnnnnnnnnnnnnnnnnnnnnnnnnnnnnnnnnnnnnnnnnnnnnnnnnnnnnnnnnnnnnnnnnnnnnnnnnnnnnnnnnnnnnnnnnnnnnnnnnnnnnnnnnnnnnnnnnnnnnnnnnnnnnnnnnnnnnnnnnnnnnnnnnnnnnnnnnnnnnnnnnnnnnnnnnnnnnnnnnnnnnnnnnnnnnnnnnnnnnnnnnnnnnnnnnnnnnnnnnnnnnnnnnnnnnngaacctggacatcaccaagaagaaattggtccacgagggcccactgacgtggcgggtgacaaaggacaaggctgtggnnnnnnnnnnnnnnnnnnnnnnnnnnnnnnnnnnnnnnnncagcgccaggatgagcggctgctgctcaagtcccatagccggacgctgacgcccacgcccgacggcaagaccatgctgcggcctgtgctgcggctcacctctgccatgacccgcgaggtggccaccgnnnnnnnnnnnnnnnnnnnnnnnnnnnnnnnnnnnnnnnnnnnnnnnnnnnnnnnnnnnnnnnnnnnnnnnnnnnnnnnnnnnnnnnnnnnnnnnnnnnnnnnnnnnnnnnnnnnnnnnnnnnnnnnnnnnnnnnnnnnnnnnnnnnnnnnnnnnnnnnnnnnnnnnnnnnnnnnnnnnnnnnnnnnnnnnnnnnnnnnnnnnnnnnnnnnnnnnnnnnnnnnnnnnnnnnnnnnnnnnnnngcccggaccgagagaatcctcagtgacctcctgcccttctgcagaccaggccccgagggccagctcgctgccacggcccttcggaaa

SEQ ID NO: 20478 - DNA, 991 bp, Macaca Mulatta
gggattattggtggcggaatggcttttaccttccttaaggtgctcaacaacatggagattggcacttctctgtttgatgaagagggagccaagattgtcaaagacctaatgtccaaagctgagaagaatggtgtgaagattaccttgcctgttgactttgtcactgctgacaagtttgatgagaatgccaagactggccaagccactgtggcttctggcatacctgctggctggatgggtttggactgtggtcctgaaagcagcaagaagtatgctgaggctgtcactcgggctaagcagattgtgtggaatggtcctgtgggggtatttgaatgggaagcttttgcccagggaaccaaagccctcatggatgaggtggtgaaagccacttctaggggctgcatcaccatcataggtggtggagacactgccacttgctgtgccaaatggaacacggaggataaagtcagccatgtgagcactgggggtggtgccagtttggagctcctggaaggtaaagtccttcctggggtggatgctctcagcaatatttagtactttcctgccttttagttcctgtgcacagcccctaagtcaacttagcattttctgcaactccacttggcattagctaaaaccttccatgtcaaggttcagctagtggccaagagatgcagtgccaggaacccttaaacagttgcacagcatctcagctcatctttactgcaccctggatttgcctacattcttcaagatcccatttgaatttcttagtgactaaacattgtgcattctagagtgcatatatttatattttgcctgttaaaaccaagtgagctgtgttagcttagttctcttttgatgtaggctattatgattagctttgtcactgtttcactactcagcatggaaacaagatgaaatccatttgtaggtagggagacaaaattgataatccattaaataaacaataaaagtgtccactgaaacc

SEQ ID NO: 20479 - DNA, 443 bp, Macaca Mulatta
ataagtgcacaaaactggcattaaatcgggacgtgagttaagattaccatttatagtctgatttagtttaatgtcctcataattttcctttgatcaggaaactgttttgatggaagggatagggaggatagtagctggatatcacacaaaataacaggaacttggaactagacctgttcattaaatgactactattgggcatctcctcagcacaagtgggtctattggagaaggaggaaaacgcaaataaaatcgcttgggtacctgattcatattaggtttcttaaagatattaattaacgtgcacaagcatgggaccttaatcagggatacaaactttaagtgagatcatgcctgcctatctatgcttgtccagtgactcaagtgaacttccagcacaaaattttttattcaccctttcagtatattattttgcactgtta

SEQ ID NO: 20480 - DNA, 780 bp, Macaca Mulatta
gggcctagttctttttctctgcctgcccttgggctcactaatgtcaccagtttcattaccaagaaaagattgagtttacctgattaaactttaaaagttattgtagatttaagttgtgtgaacctaatgatttttgcagttaaacctttactaattgaaagttgcatgttctgtaacatctgtgacttgggttgcagaatgtacatgaaactgtataattgagtcattcagcaaaggagaacagtatcttggttaattgctactgaaaggttgagaaagggatggtttcatatttaccacagcactcggcctttctacagtagaactggggtaaaggaaatggttttattgcccatagtcatttaggctggaaaagagttgaaaacttatgaaatattgccaagagattgtcatgtgtttggtcccaggctaaaagtgattttgtagtgttgaaatcatagctacttatatatcttttcacatttctttcttagttgtaggcactcttaggtcttaatacggatttatgtgtttgtgtgtgtagtttctcctcttgctactcatctttatctagagattgactaatacctcattctgtttgtaaaaccagccagtaatttctgtgcaaccttattatgtgcaatatttttaaatcgtgagaaatgtgtgctttttgttttcaaaaagaacttatttctttagttctgcaccttttccataattatacttccatatgaagtatttaatccctatgggaaaccttatttaaaaacaaaatgt

SEQ ID NO: 20481 - DNA, 167 bp, Macaca Mulatta
  misc_feature (1)...(167): n = A,T,C or G
ncccaggtggcactggagaactgttcagctgtggccgacacccgctgtggctgtaagccaggctggtttgtggagtgccaggtcagccaatgtgtcagcagttcacccttctactgccaaccatgcctagactgcagggccctgccccgccacacacggctactctg

SEQ ID NO: 20482 - DNA, 253 bp, Macaca Mulatta
  misc_feature (1)...(253): n = A,T,C or G
ttttaggtcttgcatatcagttttattactgcaccatgtttacttcaaaaagnnnnnnnnnnnnnnnnnnnnnnnnnnccagtctaccttggtccaggttatcggctctgtaagagctctattaattgccatgtttacaaacaaacaaaaagagagaagttaaataggtagatctttagcagtcttttctagttgccctgaattttactgatttattttttagggaaaatgaaaagaggaccttgctgtccac

SEQ ID NO: 20483 - DNA, 790 bp, Macaca Mulatta
  misc_feature (1)...(790): n = A,T,C or G
gggtctgcagaatccgcagcaaccagcaccatgcccatgacactggggtactggaacatccgcgggctggcccactccatccgcctgctcctggaatacacaggctcaagttacgaggaaaagaagtacacaatgggggatgctcctgactatgacagaagccagtggctgaatgaaaaattcaagctgggcctggactttcccattctgccctacttgattgatgggactcacaagatcacccagagcaacgccatcctgcgctacagtgcccgcaagcacaacctgtgtggggagaccgaaaaggagaagagtcgggaagacattttggagaaccagcttatggacaaccgcttgcagctggccagactctgctatgacccagattttgagaaactgaagctagaatacctggagggactgcctgaaaatgctgatgctctactcacattttctggggtaacaaccaatggtttcttggggacnaaatctcctttgtggatttcatcgccttataaagtctcttgaaaaaaaacaaagtattttaaccccaactgccctggatgccctttccaaaacctgaaaggaatttcctcccccccaatttttaaggggcttgggagaaataaattcccggccctaacattgaaaattctctgaccggccctttccctcccaaaaaaactctttgttttcaatcaacaaaaatggggttgttttttggggcacataacaaaaaaaatagccccttgaaaaaggccccagaaaaagtttggggaaattttgaaaa

SEQ ID NO: 20484 - DNA, 735 bp, Macaca Mulatta
  misc_feature (1)...(735): n = A,T,C or G
ggagggaaatgggcagactgtgaaccagtccaggtggtgaattttccaagaacatagtttaagttgattaaaaatgcttttagaatgcaggagcctacttctagctgtatttttttatatgcttaaataaaagtaaaaattccataaccaaagagaatcccacattagcttgttagtaatgctttgagcaagccgagatgcccattctcttagtgagggcggcattagggtttaagagaagggaatttggctcaacctcagttgagagggtgcagtccagacagcttgactgcttttaaatgaccaaagatgacctgtggtaagcaacctgggcatctcaggaagcagtccctggagaaggaatgttctcagaaaggtctttagaggaacaaactcagtaaaacgtaatgtttcatgaagaaaactgattactctctttatgacatgaaatgagaatttaaatgcatggttacaattactaatgtacgctgctgcaggtcattaataaagttgcttttttttaggctacagtgtcgtaatcagaacacacttttctctttcttccagcttcaaatgcaaattcatcactgggctcacttctaataattgcagtgtttcccaccttgngcttgcagcagaaaaacctgacaaaatagtgtgtgctaaagcaggtattttagactttaccnttaatttgtgattactataagtgattactggtaactacaaaggcac

SEQ ID NO: 20485 - DNA, 127 bp, Macaca Mulatta
  misc_feature (1)...(127): n = A,T,C or G
ncatccaagcgcggccgacgtttgtgggcgcgcaagaggcaggcagcgcacacgtgcgcgcacccgggttgcggcaagagctacaccaagagctcccacctgaaggcgcatctgcgcacgcacacag

SEQ ID NO: 20486 - DNA, 230 bp, Macaca Mulatta
  misc_feature (1)...(230): n = A,T,C or G
ggtctgggaggggctgaacgtggtgaagacaggccgagtgatgcttggggagaccaatccagcagattctaagccaggcaccattcgtggggacttctgcattcaggttggcagnnnnnnnnnnnnnnnnnnnnnnnnnnnnnnnnnnnnnnnnnngaaatcagcctatggtttaagcctgaagaactggttgactacaagtcttgtgctcatgactgggtctatgaata

SEQ ID NO: 20487 - DNA, 683 bp, Macaca Mulatta
  misc_feature (1)...(683): n = A,T,C or G
atatgacccgcttagcttcctggctctggccgctgctgcccgcccgtgtgcgcccgtgtcgcgccggggcaccgaggagccgttggggggtctgggcggaggcccgctcgtgtggaagtcgtcgacgccgctgctcgtccgtcctcccgtccgtcctcgatcccggccgccatcatgctggcgctcatctcccgcctgctggactggttccgttcgctcttctggaaggaggagatggagctgacgctcgtggggctgcagtaatcgggcaagaccaccttcgtcnnnnnnnnnnnnnnnnnnnnnnnnnnnnnnnnnnnnnnnnnnnnnnnnnnnnnnnnnnnnnnnnnnnnnnnnnnnnnnnnnnnnnnnnnnnnnnnnnnnnnnnnnnnnnnnnnnnnnnnnnnnnnnnnnnnnnnnnnnnnnnnnnnnnnnnnnnnnnnnnnnnnnnnnnnnnnnnnnnnnnnnnnnnnnnnnnnnnnnnnnnnnnnnnnnnnnnnnnnnnnnnnnnnnnnnnnnnnnnnnnnnnnnnnnnnnnnnnnnnnnnnnnnnnnnnnnnnnnnnnnnnnnnnnnnnnnnnnnnnnnnnnnnnnnnnnnnnnnnnnnnnnnnnnnnnnnnnnnnnnnnnnnnnnnnnnnnnnnnnnnnnnctattcaatgtcttgcaaagaaaaggataatata

SEQ ID NO: 20488 - DNA, 754 bp, Macaca Mulatta
ggccgtgccttaggaatgctttagaatctgaactttttaagacagacttaataatgtggcatattttctagataatcacttttattaggttgaactgaaagggtttttgtaaattttttggccaaaatttttttaaaacatagttactttggactatgggtacattcttacaaaataaataaacagtttttaaaattgtttagacacagatatttggaattagctatcttagtgccaactgctttttatttttttacttcatcaaggtgatgtaagtgactcacctttaaagtttttttaacgttattttttgtcactactctgggaaatggtttatcttcaaaatgcaatgcttttcttaggaaaggaaaaacagcattaaaagatacctggtttgccttgtacaagaaaaggcagtattagaggaagaaaatttaaagaaaagctagaggaaaaaagcaattttttttaatacttactagaagcaaactgcccttgcgtggaaaactgtttatttttttcagtgaaaaggaattctgctttcgtattttttgggaaagcaggaactgagttcattacatctttaatttggcagaaattagcctttctgtgaaccagaagtggtttggggcagatctgtagtaaacaatggtgattttatttatttttactctctggaaaaggagataataccattccaaaaagtgaactcatattttctaaagtttaagatttccctttttatttgcacctt

SEQ ID NO: 20489 - DNA, 898 bp, Macaca Mulatta
aagtgtgactgctggcgtcttcatgagctccagaggtcacagcacactaccaaggactctcatggcccctcggatgatttccgagggagacttaggaggcattgctcaaatcacctcctctctattcctgggcagaggcagtgtggcctccaatcggcacctcctccaggctcgtggcatcacctgcattgttaatgctaccattgagatccctaatttcaactggccccaatttgagtatgttaaagtgcctctggctgacatgccgcacgcccccattggactgtactttgacaccgtggctgacaagatccacagtgtgagcaggaagcacggggccaccctggtgcactgtgctgccggggtgagccgctcagccacgctctgtatcgcctacctgatgaaattccacaacgtgtgcctgctggaggcgtacaactgggtgaaagcccggcgacctgtcatcaggcccaacgtaggcttctggaggcagctgatagactacgagcgccagctctttgggaagtcgacagttaaaatggtacagacaccttacggcatagttcccgacgtctatgagaaggagtcccgacacctgatgccttactgggggatttagtgccaccgaagcctgcgtcagcagcccgagtgggaccagtgtctgctccccgccgtctgctccctctccactgtcttctcaaatggctgacttctggttctccctgaagtgttttttacactgggtgttcaaatttattttaagagagagggagggaggggacataaagggaatgcatacattgctagtcacatttttaaaattaacattttggaatagtgtttatgaaaatctttagcttttaatcatttttatcaatttgaacagtttaataaactg

SEQ ID NO: 20490 - DNA, 635 bp, Macaca Mulatta
atcaaaaaatcactacttggttcttagagcctggcaagtgtggttctggagcctccagacgtaaagaagccagtgaaccagacacctgagagaagtgggggtgggaagtgcattccaagcagagggcctagaagtgagggcattgtaagtcagttaacctagagaacttagaggaattaatgctttttgctttcatttttgaggaagaggtatatgagggtttcggccagataggctttttcatatgattacagaactggtgtcagcatatggggagttgctatgaaatatctctggagtaccattaacttttaaattcttcaaagagggccgtgctgaagtttgctgctgccactggagccactccaattgctggccgcttcactcctggaaccttcactaaccagatccaggcagccttccgggagccacggcttcttgtggttactgaccccagggctgaccaccagcctctcacggaggcatcttatgttaacctacctaccattgctctgtgtaacacagattctcctctgcgctatgtggacattgccatcccatgcaacaacaaggtaatgattttatgatctagaattgacgaatgcatgctctagaaaaaacattcctgtgcacat

SEQ ID NO: 20491 - DNA, 859 bp, Macaca Mulatta
  misc_feature (1)...(859): n = A,T,C or G
ggggagaaaagaagaggcctgtggacagaacaaccatgtctgactccctggtggtgtgcgaggtagacccagagctaacagaaaagctgaggaaattccgcttccggaaagagacagacaatgcagccatcataatgaaggtggacaaagaccggcagatggtggtactggaggaagaatttcagaacatttccccagaggagctcaaaatggaattgcctgagagacagcccaggttcgtggtttacagctacaagtacgtgcatgacgatggccgagtgtcctaccctttgtgtttcatcttctccagtcctgtgggctgcaagccggaacaacagatgatgtatgcagggagtaagaacaggctggtgcagacagcagagctcacaaaggtgtttgaaatccgcaccaccgatgacctcaccgaggcctggctccaagagaagttgtctttctttcgttgagttctgggctggggcctgaattcctgatgtctgagtcctcaaggtgattggggacttggacccctaggacctgaacaaccaagaactttaaataattttaaaaatgcgaaaacctcagagttgctgtgcgcacacttagtnagaactgccctgtgcgggcccgccctcggcccctcgaaaaagctttttctaaaccattacggtttggcgccccgcgggcctcactagggaaacccggaacaccgggtccacaagccgtgtttcccccacgggaaaatccccgggccccctggcccacggcgcgcttcggaattcccccccccacatccaaaaaccctcccccggtggggcccacatccgacggtgtgtcccttgcatcggacgttccaccatac

SEQ ID NO: 20492 - DNA, 1074 bp, Macaca Mulatta
  misc_feature (1)...(1074): n = A,T,C or G
gaatccctggaaatcgccgatggcagcggcgggggatcgcggcgcctgagaactgcttacaccaacacacagcttctagagctggaaaaagaatttcatttcaacaagtacctttgcagaccccgaagggtggagattgcagcgctactggatttgactgagagacaagtgaaagtgtggtttcagaaccggaggatgaagcacaagaggcagacccagtgcaaggaaaaccaaaatagcgaagggaaatgtaaaagccttgaggactccgagaaagtagaggaggacgnnnnnnnnnnnnnnnnnnnnnnnnnnnnnnnnnnnnnnnnnnnnnnnnnnnnnnnnnnnnnnnnnnnnnnnnnnnnnnnnnnnnnnnnnnnnnnnnnnnnnnnnnnnnnnnnnnnnnnnnnnnnnnnnnnnnnnnnnnnnnnnnnnnnnnnnnnnnnnnnnnnnnnnnnnnnnnnnnnnnnnnnnnnnnnnnnnnnnnnnnnnnnnnnnnnnnnnnnnnnnnnnnnnnnnnnnnnnnnnnnnnnnnnnnnnnnnnnnnnnnnnnnnnnnnnnnnnnnnnnnnnnnnnnnnnnnnnnnnnnnnnnnnnnnnnnnnnnnnnnnnnnnnnnnnnnnnnnnnnnnnnnnnnnnnnnnnnnnnnnnnnnnnnnnnnnnnnnnnnnnnnnnnnnnnnnnnnnnnnnnnnnnnnnnnnnnnnnnnnnnnnnnnnnnnnnnnnnnnnnnnnnnnnnnnnnnnnnnnnnnnnnnnnnnnnnnnnnnnnnnnnnnnnnnnnnnnnnnnnnnnnnnnnnnnnnnnnnnnnnnnnnnnnnnnnnnnnnnnnnnnnnnnnnnnnnnnnnnnnnnnnnnnnnnnnnnnnnnnnnnnnnnnnnnnnnnnnnnnnnnnnnnnnnnnnnnnnnnacagagccatcttttacagattattttggagttttagttgttttaaacctaactcaaccaccctttatgtgatttcctgagagcaatatngacctgcaagaaagtgatcatctaatagtatcttcactttctttttatttttgtattacattaggatgcattgtcatg

SEQ ID NO: 20493 - DNA, 422 bp, Macaca Mulatta
atcaccctctgtgacttcatcgtgccctgggacaccctgagcaccacccagaagaagagcctgaaccacaggtaccagatgggctgcgagtgtaagatcacgcgctgccccatgatcccgtgctacatctcctccccggacgagtgcctctggatggactgggtcacagagaagaacatcaacgggcaccaggccaagttcttcgcctgcatcaagagaagcgacggctcctgtgcgtggtaccgcggcgcggcgccccccaagcaggagtttcttgacatcgaggacccataagcaggcctacaacacccctgtggccaactgcaaaaacagcctccaagggtttcgactggtccagctctgacatcccttcctggaaacagcatgaataaaacactcatcccgtgggtccaaattagtcc

SEQ ID NO: 20494 - DNA, 642 bp, Macaca Mulatta
  misc_feature (1)...(642): n = A,T,C or G
gcagtggtgttggcagatggagccacaattgtggccaaccctattagcaatccattcagtgctgctccagcagcaacaaccgtggtgcagacccacagccagagtgctagcaccaacgctcctgcccagggctcatcgccacggccaagcatactccgcaagaaacctgccacagatggnnnnnnnnnnnnnnnnnnnnnnnnnnnnnnnnnnnnnnnnnnnnnnnnnnnnnnnnnnnnnnnnnnnnnnnnnnnnnnnnnnnnnnnnnnnnnnnnnnnnnnnntgccaaacccaagtctgaaatccacgtgtctatggccactcccgtcactgtgtccatggagactgtatccagtcaaaataatgatcagcctaccattgccgtccctccaactgcccagcagcctccaccgaccattccaactatgattgcagcagccagtcccccatcacaaccagccgttgccctttcaaccattcctggagcggtccccatcactccacccatcaccaccattgcagctgcaccacctccatcagtcactgtgggtggcagtctgtcctccgtcttgggccctcctgttcctgaaattaaagtgaaagaagaagtagaaccaatggatatcatgaggccagtttctg

SEQ ID NO: 20495 - DNA, 712 bp, Macaca Mulatta
  misc_feature (1)...(712): n = A,T,C or G
aatgatctattgagagccctctctcccattctgggatgggtacagcagagaccttcctactttttactggggactccagattttccccaaacttgcttctgttgagatttttccctcatcttgcctcccaggcacaataaatatagttataccactgcccatcagcccaagtctctttattggatctggaccctgctggccctggctcaggcatttccatttccattagtgggaccaacccactgggtgatttgagtgttgagccactggttggtccagtcctgccggatgtcgtcaaggtggcagtcaaagtccacaaggtgctggtgggcccgatcttccagtagagctcccaccatctgccgtgactcttcccagtccctccacatcactctgaaatagcaacccccatggaggtcaaacagcaagtagtggggccagacacagacttgacagagattgggtctagagaaagacccttggggcagggccaaggacagaggagacccaggaatcttgggcttctaagaagagagagagggagtggggtactcacaagttcttatccttagggacccagcggagaccttggttctccaggacgatgaccggnggcacacgaggctgaggcaccagtttctgattatccaactgagtggacaaagaagggcaagtgagagtttcaagggtcccctcaccctactttcttttt

SEQ ID NO: 20496 - DNA, 705 bp, Macaca Mulatta
agagtcttggtttatcctgtgtgtcagagagtgggcagaaataactgcctgaaggttactcaggaagaagcactggatgggagactgaaatggacaatcttggagcctgttaatcagctgatcaccttacacattcaataataaaacagctgtacctacactttgcctttacactgccccccctcaacatggtcaaatgacctagttcagttagtgatggggcttccccaggtttggctactgaactgtcacttcaggcccatcctacactgaaagctcctgggtctggctgttctctgtgaaacgctgtagtctctccctttccagaattcagtttcagggcacagaacccaggcttgtaccatggtggtgggagaaaatgaccactggccaagaggaatgctgacctctgcaccaggctagtactcatgactacaaattcttactgcttctctaatcaactctgagggaagagggcatctgatcattacaaaagggagggcttataagtgatctcccaagaaggctgtgatctgctagtgcctttggctctgtacctctgctgggcatctctccaaggtctaaggtaacataataaatgtttttgtcagctaatgcaggctcagtgactttaagtctgtaagttacccaggaagaaggattataagaaaaataactttcggtaagcttaaaaccaaacacatt

SEQ ID NO: 20497 - DNA, 183 bp, Macaca Mulatta
  misc_feature (1)...(183): n = A,T,C or G
tgctcagcttctggctcagtctgtcaaccatgggtttgaggcagtatatgagctcaccaaaatgtgtaccattcgaatgagttttgtcaaggnnagggttggggagcagaatatcaccggcaggatgtaaccagcaccccatgttggattgagattcatcttcctgggcctcttccgtggctg

SEQ ID NO: 20498 - DNA, 1057 bp, Macaca Mulatta
  misc_feature (1)...(1057): n = A,T,C or G
agccccgccgcgatgcccgcgcgcccaggacgcctcctcccgctgctggcccggccgtcggccttgannnnnnnnnnnnnnnnnnnnnnnnnnnnnnnnnnnnnnnnnnnnnnnnnnnnnnnnnnnnnnnnnnnnnnnnnnnnnnnnnnnnnnnnnnnnnnnnnnnnnnnnnnnnnnnnnnnnnggacccgcacagcaagcacctgtacacggccgacatgttcacgcacgggatccagagcgccgcgcnnnnnnnnnnnnnnnnnnnnnnnnnnnnnnnnnnnnnnnnnnnnnnnnnnnnnnnnnnnnnnnnnnnnnnnnnnnnnnnnnnnnnnnnnnnnnnnnnnnnnnnnnnnnnnnnnnnnnnnnnnnnnnnnnnnnnnnnnnnnnnnnnnnnnnnnnnnnnnnnnnnnnnnnnnnnnnnnnnnnnnnnnnnnnnnnnnnnnnnnnnnnnnnnnnnnnnnnnnnnnnnnnnnnnnnnnnnnnnnnnnnnnnnnnnnnnnnnnnnnnnnnnnnnnnnnnnnnnnnnnnnnnnnnnnnnnnnnnnnnnnnnnnnnnnnnnnnnnnnnnnnnnnnnnnnnnnnnnnnnnnnnnnnnnnnnnnnnnnnnnnnnnnnnnnnnnnnnnnnnnnnnnnnnnnnnnnnnnnnnnnnnnnnnnnnnnnnnnnnnnnnnnnnnnnnnnnnnnnnnnnnnnnnnnnnnnnnnnnnnnnnnnnnnnnnnnnnnnnnnnnnnnnnnnnnnnnnnnnnnnnnnnnnnnnnnnnnnnnnnnnnnnnnnnnnnnnnnnnnnnnnnnnnnnnnnnnnnnnnnnnnnnnnnnnnnnnnnnnnnnnnnnnnnnnnnnnnnnnnnnnnnnnnnnnnnnnnnnnnnnnnnnnnnnnnnnnnnnnnnnnnnnnnnnnnnnnnnnnnnnnnnnnnnnnnnnnnnnnnnnnnnnnnnnnnnnnnnnnnnnnnnnnnnnnnnnnnnnnnnnagggcactgtgttggcactcactgaaaataacttcgacgacaccattgcagaaggaataaccttcatcaagttttatgctccatggt

SEQ ID NO: 20499 - DNA, 769 bp, Macaca Mulatta
gggcaatgagggctttggttcctggcttctgggagccttttgacagttggtccctgcctcggttgattgtgcatggaactaaagtgttattgcctaatcactctgactctgcccctttctgtcccatccttcccaagaagagagaacttcttcgataaactaactactttagaagaagtgaacacttacctggaggctcaccttgcagaaccagtgacaatcttatgagtataatgaacactcaaccaggcctgtcatgactggctttatttctttcatcatccataaaagtttgcatgtgtttttattctctagatctgttaccaacatagttttctaactcctgtttggggagcaagtgttaataataacttattcctaaagcttggtttttcttatttgtgattttattgtgtatatgagtggtggatactttgggacattatttcaaatgaataactctaaattgttaagtatttatgtttctataaattagaattatctattctaagtgccttttcttaggaaaagagagtactggatcatggttttcttccttacttaccggttgcctcacactgagtgataaaattgtttctgtgtagaatcattgtctctactggttgccctgtctgtgtctgcacatataatgcctctctcgctttggtgaaatatccaaaaatgcaagtgcagtgtgcatatttaagaatttctgaactaacacttgaaaatcacattttataaaaagtttgttgggtactccagagaa

SEQ ID NO: 20500 - DNA, 841 bp, Macaca Mulatta
  misc_feature (1)...(841): n = A,T,C or G
ggataattgtgctgcccattatactcccaatgccggtgacncaacagtattgcagtatgatgacatctgtaaaatagactttggaacacatataagtggtaggattattgactgtgcttttactgtcacttttaatcccaaatatgatacattattaaaagctgtaaaagatgctactaacactggaataaagtgtgctggaattgatgttcgtctgtgtgatgttggtgaggccatccaagaagttatggagtcctatgaagttgaaatagatgggaagacatatcaagtgaaaccaatccgtaatctaaatggacattcaattgggcaatatagaatacatgctggaaaaacagtgccgattgtgaaaggaggggaggcaacaagaatggaggaaggagaagtatatgcaattganacctttggtagtacaggaaaaggtgttgttcatgatgatatggaatgttcacattacatgaaaaattttgatgttggacatgtgccaataaagcttccaagaacaaaacacttattaaatgtcatcaatgaaaacttttggcacctttgccttctgccgcagatggctggatcgcttggggagaaagtaaatactttgatggcctctgaagaaatctgtggtgactttgggcaattgtagatcccttaatccccccattatgttggacattaaaaggatcataataccagcggccaatttgaaacatacccatccctgttggccgtcccaccatggtaaaagaaattggtccccccgaagggaaaatgactttttaaaccttagtcccaaaagccacccttcaaaacctttttatattcccaa

SEQ ID NO: 20501 - DNA, 2344 bp, Macaca Mulatta
  misc_feature (1)...(2344): n = A,T,C or G
cattcagaaattgaacattgaantaaaaaagaaaagcaactggaagagaggtgactcacattcagtttaccagctggccagaccacggggtgcctgaggatcctcacttgctcctcaaactgagaaggagagtgaatgccttcagcaatttcttcagtggtcccattgtggtgcactgcagtgctggtgtcgggcgcacaggcacctatattggaattgatgccatgctagaaggcctggaagctgagaacaaagtagatgtttatggttacgttgtcaagctaaggcgacagagatgcctgatggttcaagtagaggcccagtacatcttgatccatcaggctttggttgaatacaatcagtttggagaaacagaagtgaatttgtctgaattacatccatatctacataacatgaagaaaagggatccacccagtgagccatctccactagaggctgaattccagagacttccttcatataggagctggaggacacagcacattggaaatcagnnnnnnnnnnnnnnnnnnnnnnggaattctaatgtcatcccatatgactataacagagtgccacttaaacatgagctggaaatgagtaaagagagtgaccatgattcagatgaatcctctgatgatgacagtgattcagaggaaccaagcaaatacatcaatgcatcttttataatgagctactggaaacctgaagtgatgattgctgctcagggaccactgaaggagaccattggtgacttttggcagatgatcttccaaagaaaagtcaaagttattgttatgctgacagaactgaaacacggagaccaggaaatctgtgctcagtactggggagaaggaaagcaaacatatggagatatcgaagttgacatgaaagacacaaacaaatcttcaacttacacccttcgtgtctttgaactgagacattccaagaggaaagactctcgaactgtgtaccagtaccaatatacaaactggagtgtggagcagcttcctgcagaacccaaggaattagtctctctgattcaggtcctcaaagaaaaacttccccagaagaattcctccgaagggaacaagcatcacaagagtacacctctcctcattcactgcagggatggatctcagcaaacgggaatattttgtgctttgttaaatctcttagaaagtgcggaaacagaagaggtagtggatatttttcaagtggtaaaagctctacgcaaagctaggcctggcatggtttccacatttgagcaataccaattcctatatgacatcattgccagcacctaccctgctcagaatggacaagtaaagaaaaacaaccatcaagaagataaaattgaatttgataatgaagtggacaaagtaaagcaggatgctaattgtgttaatccacttggtgccacagaaaagctccctgaagcaaaggaacaggctacaggttctgaacccacaagtggcactgaggggccagaacattctgtcaatggtcctgcaagtccagctttaaatcaaggttcataggaaaagacataaatggggaaactccaaacctcctgttagctgttatttctatttttctagaagtaggaagtgaaaatagtatacagtggattaattaaatgtattgaaccaatatttgtggaagggttctattttactactgtggaaaaatatttaagatagttttgccagaacagtttgtacagacgtatgcttattttaaaattttatttcttattcagtaagaaacaacttctttgtaacctttacatgtgtatgtatatgtgtgtatgcgtgtgtttgtgtgtgagagaaagagaattctttcaagtgaatctaaaagcttttgctttgcctttttgtttttatcacgaaaaaatacattttatattagaagtgtttacttagcttgaaggatctgtttttaaaatcataaactgtgtgcagactataaaatcatgtacatttctaaaatgacctcaagatgtcctccttgttctactcatatatatcttatatatcttatatagttccagattttacttctagagatagtacataaaagtggtatgtgtgtgtatagctactacaaaacagttaactaaattaacatttggaaatcttatattccatatattatcatttaatccaatatctttttaagcttatttaattaaaaaatttccagtgagcttatctggctgtctttacatggggtttacaattttttatcatctattattccctgtacaatatttaaaatttattgcttgatacttttgaccacgaattatgttttgtacaattgaacttaaataaacgtc

SEQ ID NO: 20502 - DNA, 544 bp, Macaca Mulatta
ctgaggaggggccctcctcctctgactgcctccaacgtaaaaatgtaaatataaatttggttgagatctggagggggggagggagctattagagaaggatgaggcagaccatgtacagttaaaattataaaatggggtagggaatactggagatatttgtacagaagaaaaggatatttatatattttcttaaaacagcagatttgctgcttgtgccataaaagtttgtataaaaaaataaatttgtactaaaagttttatttttgcaaactaaatacacaaagcatgccttaaacccagtgaagcaactgagtacaaaggaaacaggaattataaaggcatcactgaccaggaatatctgggctttattgataccaaaaacaaaaaagaggaagaagaaaaattaagtccatcttagagcagcaaaccatagatacttggatgtagccagctagccttcagttaactaacatttgagggccaacaagtaagaaataatgaaaggaaaaaaaaggaattaatactaaccttggacgaaaggctt

SEQ ID NO: 20503 - DNA, 365 bp, Macaca Mulatta
agctctgctgtatgtgaagccaagtgaggggcagtagggggagcatgctgcaagtacaacttaacctccctgtatcccctctgcccatttatccttactcctttttctacccagataaggagggttcctgcccccgggtgaacaggaacttcccccagctcggcctctgtcgggaccagtgccaggtggacagccagtgtcctggccggatgaaatgctgccacaatggctgtgggaaagtgtcctgtgtcactcccaatttctgaggtaggtgaatgggagacagaaagcacattgatggccaggtgttgtgggaaacaggagaaaacgtcacccaggcagaggtgaagggaggttagttgcag

SEQ ID NO: 20504 - DNA, 518 bp, Macaca Mulatta
actgggctgccactgcgtgggcagagtaaaaggtgccaggaggagcatgggtgtggaagtcctgtcagccaagaaataaaagtttacctcagagctgcacacatctgactccatctgcagtttagggcctttattgaccaaggagggtgcggaggtttgagggccagtgagcccactacagcggagcctgacctcagcaggccactagctggagctggaaggctggggggacactgcccaggccagtgaactgcaggtgacgttgatggtgccagggtttaccacagggagcaggaacctcggtagggtggctgtaaggaataggaagatctccaagtgggccaggcctgcgcccaggcacatctgctttcccaggtacacgggtgcatagtgagcaccatgcaccccagagccggtccaggctggtcgccttcctcccctgcccgcacctgaggcaaagggcatgaaagggtcattgccctggaacttgcccttgtccaggaagttggtagcgttgt

SEQ ID NO: 20505 - DNA, 710 bp, Macaca Mulatta
  misc_feature (1)...(710): n = A,T,C or G
gattctgtcagcttttaagaacaaatgcacnttatagctcatggaagaaaaaacacaaatcaagacgtttttgggttccaagttgccaaagtatggaacaaaatctgtaagaagtacattgcagccgatgccaaatgggacacctgttaatttattaggaacttccaagaatagtaatgtcaaaagttacatcaaaaataatggctctgattgtccatcatctcattcatttaattggagaaaagcaaataaatatcaaccttgtgcacaaggtgctggagagcctaacaattctcaaaattcacatgataaaataattgatcctggaaaacatgttcctactcaaggaatatttgataaaaatgggatgaagggaggtttgaaaagtgtttctttattcacatcaaagttagcaaagccatccactatgtttgtgtcatctacagaggagttaaaccaaaagtctttttctggaccatcaaatttgggtaaattcaccaaaggcacattattaggaaggacttcatattcttcggtcaatactccaaaatcacagttgaatggattttatggaaaccggtcggctggtagcatgcaaaggcctagagcaaactcctgtgccaccagaagcagttctggagaaagcttagctcaatccccagacagtagtaaatctgttaattctgaaaaaatggtaagatcacagagtt

SEQ ID NO: 20506 - DNA, 2683 bp, Macaca Mulatta
  misc_feature (1)...(2683): n = A,T,C or G
atgtccagtaaagaaagagaagaatcaaggagagaagttgcagtattggcaaacatgaagcatccaaatattgtccagtatagagaatcatttgaannnnnnnnnnnnnnnnnnnnnnnnnnnnnnnnnnnnnnnnnnnnnnnnnnnnnnnnnnnnnnnnnnnnnnnnnnnnnnnnnnnnnnnnnnnnnnnnnnnnnnnnnnnnnnnnnnnnnnnnnnnnnnnnnnnnnnnnnnnnnnnnnnnnnnnnnnnnnnnnnnnnnnnnnnnnnnnnnnnnnnnnnnnnnnnnnnnnnnnnnnnnnnnnnnnnnnnnnnnnnnnnnnnnnnnnnnnnnnnnnnnnnnnnnnnnnnnnnnnnnnnnnnnnnnnnnnnnnnnnnnnnnnnnnnnnnnnnnnnnnnnnnnnnnnnnnnnnnnnnnnnnnnnnnnnnnnnnnnnnnnnnnnnnnnnnnnnnnnnnnnnnnnnnnnnnnnnnnnnnnnnnnnnnnnnnnnnnnnnnnnnnnnnnnnnnnnnnnnnnnnnnnnnnnnnnnnnnnnnnnnnnnnnnnnnnnnnnnnnnnnnnnnnnnnnnnnnnnnnnnnnnnnnnnnnnnnnnnnnnnnnnnnnnnnnnnnnnnnnnnnnnnnnnnnnnnnnnnnnnnnnnnnnnnnnnnnnnnnnnnnnnnnnnnnnnnnnnnnnnnnnnnnnnnnnnnnnnnnnnnnnnnnnnnnnnnnnnnnnnnnnnnnnnnnnnnnnnnnnnnnnnnnnnnnnnnnnnnnnnnnnnnnnnnnnnnnnnnnnnnnnnnnnnnnnnnnnnnnnnnnnnnnnnnnnnnnnnnnnnnnnnnnnnnnnnnnnnnnnnnnnnnnnnnnnnnnnnnnnnnnnnnnnnnnnnnnnnnnnnnnnnnnnnnnnnnnnnnnnnnnnnnnnnnnnnnnnnnnnnnnnnnnnnnnnnnnnnnnnnnnnnnnnnnnnnnnnnnnnnnnnnnnnnnnnnnnnnnnnnnnnnnnnnnnnnnnnnnnnnnnnnnnnnnnnnnnnnnnnnnnnnnnnnnnnnnnnnnnnnnnnnnnnnnnnnnnnnnnnnnnnnnnnnnnnnnnnnnnnnnnnnnnnnnnnnnnnnnnnnnnnnnnnnnnnnnnnnnnnnnnnnnnnnnnnnnnnnnnnnnnnnnnnnnnnnnnnnnnnnnnnnnnnnnnnnnnnnnnnnnnnnnnnnnnnnnnnnnnnnnnnnnnnnnnnnnnnnnnnnnnnnnnnnnnnnnnnnnnnnnnnnnnnnnnnnnnnnnnnnnnnnnnnnnnnnnnnnnnnnnnnnnnnnnnnnnnnnnnnnnnnnnnnnnnnnnnnnnnnnnnnnnnnnnnnnnnnnnnnnnnnnnnnnnnnnnnnnnnnnnnnnnnnnnnnnnnnnnnnnnnnnnnnnnnnnnnnnnnnnnnnnnnnnnnnnnnnnnnnnnnnnnnnnnnnnnnnnnnnnnnnnnnaggcaaaaagggcagctagctgtagaaagagctaaacaagtagaagagttcctgcagcgaaaacgggaagctatgcagaataaagctcgagccgaaggacatatggnnnnnnnnnnnnnnnnnnnnnnnnnnnnnnnnnnnnnnnnnnnnnnnnnnnnnnnnnnnnnnnnnnnnnnnnnnnnnnnnnnnnnnnnnnnnnnnnnnnnnnnnnnnnnnnnnnnnnnnnnnnnnnnnnnnnnnnnnnnnnnnnnnnnnnnnnnnnnnnnnnnnnnnnnnnnnnnnnnnnnnnnnnnnnnnnnnnnnnnnnnnnnnnnnnnnnnnnnnnnnnnnnnnnnnnnnnnnnnnnnnnnnnnnnnnnnnnnnnnnnnnnnnnnnnnnnnnnnnnnnnnnnnnnnnnnnnnnnnnnnnnnnnnnnnnnnnnnnnnnnnnnnnnnnnnnnnnnnnnnnnnnnnnnnnnnnnnnnnnnnnnnnnnnnnnnnnnnnnnnnnnnnnnnnnnnnnnnnnnnnnnnnnnnnnnnnnnnnnnnnnnnnnnnnnnnnnnnnnnnnnnnnnnnnnnnnnnnnnnnnnnnnnnnnnnnnnnnnnnnnnnnnnnnnnnnnnnnnnnnnnnnnnnnnnnnnnnnnnnnnnnnnnnnnnnnnnnnnnnnnnnnnnnnnnnnnnnnnnnnnnnnnnnnnnnnnnnnnnnnnnnnnnnnnnnnnnnnnnnnnnnnnnnnnnnnnnnnnnnnnnnnnnnnnnnnnnnnnnnnnnnnnnnnnnnnnnnnnnnnnnnnnnnnnnnnnnnnnnnnnnnnnnnnnnnnnnnnnnnnnnnnnnnnnnnnnnnnnnnnnnnnnnnnnnnnnnnnnnnnnnnnnnnnnnnnnnnnnnnnnnnnnnnnnnnnnnnnnnnnnnnnnnnnnnnnnnnnnnnnnnnnnnnnnnnnnnnnnnnnnnnnnnnnnnnnnnnnnnnnnnnnnnnnnnnnnnnnnnnnnnnnnnnnnnnnnnnnnnnnnnnnnnnnnnnnnnnnnnnnnnnnnnnnnnnnnnnnnnnnnnnnnnnnnnnnnnnnnnnnnnnnnnnnnnnnnnnnnnnnnnnnnnnnnnnnnnnnnnnnnnnnnnnnnnnnnnnnnnnnnnnnnnnnnnngaacctgatgatttggaaacagaagttctacaagagccaagtggaacaaacaaagatgagagcttgccatgcactgttactgatgtgtggattagtgaggaaaaagaagcaaaggaaactcagt

SEQ ID NO: 20507 - DNA, 1093 bp, Macaca Mulatta
cactcgaatcgaacacgtcttgctaaacttcttaggtccagtcttctcatcatccaactgacattactagcctagaccaatatgtagaaagaatgaaggaaaaacaagacaaaatctacttcatggctgggtccagcagaaaagaggctgaatcttctccatttgttgagcgacttctgaaaaagggctatgaagttatttacctcacagaacctgtagatgaatactgcattcaggcccttcctgaatttgatgggaagaggttccacaatgttgcccaggaaggagtgaagtttgatgaaagtgataaaactaaggagagtcgtgaagcagttgagaaagaatttgagcctctgctgaactggatgaaagataaaggcccttaaggagcaagatttgtaaaggctgtggtgtctcagcgtctgacagaatctccatgtgctttggtggacagccagtatggatggtctggcgacactggagagaatcatgaaagcacaagcgtaccaaacaggcaaggacatctctacaaattactatgcgagtcagaagaaaacatttgaaattaatcccagacacccgctgatcagagacatgcttcgacgaattaaggaagatgaagatgataaaacagttttggatcttgctgtagttttgtttgaaacagcaacgcttcggtcaggatatcttttaccagacactaaagcatatggagatagaatagaaagaatgcttcgcctcagtttgaacattgaccctgatgcaaaggtggaagatgagcccgaagaagaacctgaagagacaacagaagacacgacagaagacacagagcaagacgaagatgaagaaatggatgtgggaacagatgaagaagaacaagaaacagcaaaggaatctacagctgaaaaagatgaattgtaaattatccctctcaccatttggatcctgtgtggagaggggaatgtgaaaattgacgtcatttcctctggggagagacttggtttggatgcccccccaccaatccccctttcttccctggaactggaaaaaatgtgggaattttggggtcccaagggaagaaaatgggggtttt

SEQ ID NO: 20508 - DNA, 2802 bp, Macaca Mulatta
  misc_feature (1)...(2802): n = A,T,C or G
caggggcgttccacatatgttgtcccgacacagcagtaccctgtgcagccaggagccccaggcttctatccaggtgcaagccctacagaatttgggacctacnnnnnnnnnnnnnnnnnnnnnnnnnnnnnnnnnnnnnnnnnnnnnnnnnnnnnnnnnnnnnnnnnnnnnnnnnnnnnnnnnnnnnnnnnnnnnnnnnnnnnnnnnnnnnnnnnnnnnnnnnnnnnnnnnnnnnnnnnnnnnnnnnnnnnnnnnnnnnnnnnnnnnnnnnnnnnnnnnnnnnnnnnnnnnnnnnnnnnnnnnnnnnnnnnnnnnnnnnnnnnnnnnnnnnnnnnnnnnnnnnnnnnnnnnnnnnnnnnnnnnnnnnnnnnnnnnnnnnnnnnnnnnnnnnnnnnnnnnnnnnnnnnnnnnnnnnnnnnnnnnnnnnnnnnnnnnnnnnnnnnnnnnnnnnnnnnnnnnnnnnnnnnnnnnnnnnnnnnnnnnnnnnnnnnnnnnnnnnnnnnnnnnnnnnnnnnnnnnnnnnnnnnnnnnnnnnnnnnnnnnnnnnnnnnnnnnnnnnnnnnnnnnnnnnnnnnnnnnnnnnnnnnnnnnnnnnnnnnnnnnnnnnnnnnnnnnnnnnnnnnnnnnnnnnnnnnnnnnnnnnnnnnnnnnnnnnnnnnnnnnnnnnnnnnnnnnnnnnnnnnnnnnnnnnnnnnnnnnnnnnnnnnnnnnnnnnnnnnnnnnnnnnnnnnnnnnnnnnnnnnnnnnnnnnnnnnnnnnnnnnnnnnnnnnnnnnnnnnnnnnnnnnnnnnnnnnnnnnnnnnnnnnnnnnnnnnnnnnnnnnnnnnnnnnnnnnnnnnnnnnnnnnnnnnnnnnnnnnnnnnnnnnnnnnnnnnnnnnnnnnnnnnnnnnnnnnnnnnnnnnnnnnnnnnnnnnnnnnnnnnnnnnnnnnnnnnnnnnnnnnnnnnnnnnnnnnnnnnnnnnnnnnnnnnnnnnnnnnnnnnnnnnnnnnnnnnnnnnnnnnnnnnnnnnnnnnnnnnnnnnnnnnnnnnnnnnnnnnnnnnnnnnnnnnnnnnnnnnnnnnnnnnnnnnnnnnnnnnnnnnnnnnnnnnnnnnnnnnnnnnnnnnnnnnnnnnnnnnnnnnnnnnnnnnnnnnnnnnnnnnnnnnnnnnnnnnnnnnnnnnnnnnnnnnnnnnnnnnnnnnnnnnnnnnnnnnnnnnnnnnnnnnnnnnnnnnnnnnnnnnnnnnnnnnnnnnnnnnnnnnnnnnnnnnnnnnnnnnnnnnnnnnnnnnnnnnnnnnnnnnnnnnnnnnnnnnnnnnnnnnnnnnnnnnnnnnnnnnnnnnnnnnnnnnnnnnnnnnnnnnnnnnnnnnnnnnnnnnnnnnnnnnnnnnnnnnnnnnnnnnnnnnnnnnnnnnnnnnnnnnnnnnnnnnnnnnnnnnnnnnnnnnnnnnnnnnnnnnnnnnnnnnnnnnnnnnnnnnnnnnnnnnnnnnnnnnnnnnnnnnnnnnnnnnnnnnnnnnnnnnnnnnnnnnnnnnnnnnnnnnnnnnnnnnnnnnnnnnnnnnnnnnnnnnnnnnnnnnnnnnnnnnnnnnnnnnnnnnnnnnnnnnnnnnnnnnnnnnnnnnnnnnnnnnnnnnnnnnnnnnnnnnnnnnnnnnnnnnnnnnnnnnnnnnnnnnnnnnnnnnnnnnnnnnnnnnnnnnnnnnnnnnnnnnnnnnnnnnnnnnnnnnnnnnnnnnnnnnnnnnnnnnnnnnnnnnnnnnnnnnnnnnnnnnnnnnnnnnnnnnnnnnnnnnnnnnnnnnnnnnnnnnnnnnnnnnnnnnnnnnnnnnnnnnnnnnnnnnnnnnnnnnnnnnnnnnnnnnnnnnnnnnnnnnnnnnnnnnnnnnnnnnnnnnnnnnnnnnnnnnnnnnnnnnnnnnnnnnnnnnnnnnnnnnnnnnnnnnnnnnnnnnnnnnnnnnnnnnnnnnnnnnnnnnnnnnnnnnnnnnnnnnnnnnnnnnnnnnnnnnnnnnnnnnnnnnnnnnnnnnnnnnnnnnnnnnnnnnnnnnnnnnnnnnnnnnnnnnnnnnnnnnnnnnnnnnnnnnnnnnnnnnnnnnnnnnnnnnnnnnnnnnnnnnnnnnnnnnnnnnnnnnnnnnnnnnnnnnnnnnnnnnnnnnnnnnnnnnnnnnnnnnnnnnnnnnnnnnnnnnnnnnnnnnnnnnnnnnnnnnnnnnnnnnnnnnnnnnnnnnnnnnnnnnnnnnnnnnnnnnnnnnnnnnnnnnnnnnnnnnnnnnnnnnnnnnnnnnnnnnnnnnnnnnnnnnnnnnnnnnnnnnnnnnnnnnnnnnnnnnnnnnnnnnnnnnnnnnnnnnnnnnnnnnnnnnnnnnnnnnnnnnnnnnnnnnnnnnnnnnnnnnnnnnnnnnnnnnnnnnnnnnnnnnnnnnnnnnnnnnnnnnnnnnnnnnnnnnnnnnnnnnnnnnnnnnnnnnnnnnnnnnnnnnnnnnnnnnnnnnnnnnnnnnnnnnnnnnnnnnnnnnnnnnnnnnnnnnnnnnnnnnnnnnnnnnnnnnnnnnnnnnnnnnnnnnnnnnnnnnnnnnnnnnnnnnnnnnnnnnnnnnnnnnnnnnnnnnnnnnnnnnnnnnnnnnnnnnnnnnnnnnnnnnnnnnnnnnnnnnnnnnnnnnnnnnnnnnnngagcaattgggtgccacgccgaggggatcagggtcccaagaccattgaccagatccataaggaggctgagatggaagaacatcgagagcacatcaaagtgcagcagctcatggccaagggcagtgacaagcgtcggggtggccctccaggcccgcccatca

SEQ ID NO: 20509 - DNA, 740 bp, Macaca Mulatta
  misc_feature (1)...(740): n = A,T,C or G
ctggaggagcaccggaactcacagaagcagatgaagctcctgcagaagaagcagagccagctggtgcaagagaaggaccatctgcgtggtgagcacagtaaggccgtcctggcccgtagcaagcttgagagcctatgccgtgagctgcagcggcacaaccgctccctcaaggnnaggaagaaggtgtgcagcgggcccgggaggaggaggagaagcgcaaggaggtgacctcacacttccaggtgacactgaatgacattcagctacagatggaacagcacaatgagcgcaactccaagctgcgccaagagaacatggagctggctgagaggctcaagaagctgattgagcagtatgagctgcgagaggannnnnnnnnnnnnnnnnnnnnnnnnnnnnnnnnnnnnnnnnnnnnnnnnnnnnnnnnnnnnnnnnnnnnnnnnnnnnnnnnnnnnnnnnnnnnnnnnnnnnnnnnnnnnnnnnnnnnnnnnnnnnnnnnnnnnnnnnnnnnnnnnnnnnnnnnnnnnnnnnnnnnnnnnnnnnnnnnnnnnnnnnnnnnnnnnnnnnnnnnnnnnnnnnnnnnnnnnnnnnnnnnnnnnnnnnnnnnnnnnnnnnnnnnnnnnnnnnnnnnnnnnnnnnnnnnnnnnnnnnnnnnngatgactaagaagatcaagaagctggagaaagaaaccacgatgtaccggtcccggtgggagagcagcaacaaggccctccttga

SEQ ID NO: 20510 - DNA, 2184 bp, Macaca Mulatta
  misc_feature (1)...(2184): n = A,T,C or G
ggacacttggcgtccgggctgggagcgtgctttccaagacggtgacacgcttccctgaggattggcagccagactgccttacgggtcactgccatggaggagccgcagtcagatcctagcatcgagccccctctgagtcaggaaacattttcagacctatggaaactacttcctgaaaacaacgttctgtcccccttgccgtcccaagcagtggatgatttgatgctgtctccagacgatcttgcacaatggttaactgaagacccaggtccagatgaagctccgagaatgtcagaggctgctccccccatggcccccacaccagcagctcctacaccggcggcccctgcaccagccccctcctggcccctgtcatcctctgtcccttcccagaaaacctaccatggcagctacggtttccgtctgggcttcctgcattctggaacagccaagtctgtgacttgcacgtactcccctgacctcaacaagatgttttgccagctggccaagacctgccccgtgcagctatgggttgattccacacccccacccggcagccgcgtccgcgccatggccatctacaagcagtcacagcacatgacggaggtcgtgaggcgctgcccccaccatgagcgctgctcagacagcgatggactggcccctcctcagcaccttatccgagtggaaggaaatttgcgtgtggagtattcggatgacagaaacacttttcgacatagtgtggtggtgccctatgagccgcctgaggttggctctgactgtaccaccatccactacaactacatgtgtaacagttcctgcatgggcggcatgaaccggaggcccatccttaccattatcacactggaagactccagtggtaatctactgggacggaacagctttgaggtgcgagtttgtgcctgtcctgggagagaccggcgcacagaggaagagaatttccgcaagaaaggggagccttgccaccagctgccccctgggagcactaagcgagcactgcccaacaacaccagctcctctccccagccaaagaagaaaccactggatggagaatatttcacccttcagatccgtgggcgtgagcgcttcgagatgttccgagagctgaatgaggccttggaactcaaggatgcccaggctgggaaagagccagcggggagcagggctcactccagccacctgaagtccaagaaggggcaatctacctcccgccataaaaaattcatgttcaagacagaggggcctgactcagactgacattctcagcttcttgttcccccactgagcctcccacccccatccctcccctgccattttgagttctgggtctttaaacccttgcttgcaataggtgtgcatcaggagcacccaggagttccgtttgctttgtcccggggctcgactgaacaagttggcctgcactggtgttttgttgtggggaggaggatggggggtaggacataaccagcttagattttaaggtttttactgtgagggatgtttgggagatgtaagaaatgttcttgcaggtaagggttagtttacaatcagccacattctaggtggcaccccacttcaccgtactaaccagggaagctgtccctcactgttgaatttcctctaacttcaaggcccatatctatgaaatgctggcatttgcacctacctcacagagtgcgttgtgaggtttaatgaaataatgtacatctggccttgaaaccaccttttattacatggggtctagaacttgacccccttgagggtgctcgttccctctccctgttggtcggtgggttggtagtttctacagctgggcagctgttaggtagagggagttgccaagtccctgttggcccggccaaacccttgtctgagaacctgttggtgaaccttagcacctaaaaggaaatctcaccccatcccacaccctgggggatttcatctcttgtctatgatgatctggatccaccaagacttgttttatgctcagggtcaannnnnnnnnnnnnnnnnnnnnnnnnnngactgggtctcactctgttgcccaggctgaagtggagtggcgtnnnnnnnnnnnnnnnnnnnnnttgcctccccggctcaagcagtcctgcccagactccggagtagctgggaccacaggttcatgccaccatggccagccaa

SEQ ID NO: 20511 - DNA, 368 bp, Macaca Mulatta
agtgtatcactcagggccgagtcctgcagcgaccccgcacgtgcccccaggaggtgtatgagctgttgctggggtgctggcagcgagagccccacatgaggaagaacatcaagggcatccataccctccttcagaactcggccaaggcatctccggtctacctggacattctaggctagggcccttttccccagaccgatccttcccaacatactcctcagacaggctgagaggatgaacatcttttaactgccgctggaggccaccaagctgctctccttcactctgacagtattaacatcaaagactccgagaagctctcgagggaagcagtgtgtacttcttcatccgtagacacagtattgact

SEQ ID NO: 20512 - DNA, 434 bp, Macaca Mulatta
cctccaggtgcagaggtacaccctgggtgtccctgctgctgtgcaacggcctcctgatgtgctgcagcaccaaggggcctttgttctggggggacccagtgcagaatgtaagtgggcccacccggtgggactctcgtggggcagggagctgggcccaacatggccccagcctctgcctttgcatcacgggacatcacagggtgggcctcaacccctcccacacccaaagctgagcctgcagggaagccccacgtgtcgagcaccttgttcctgggggtgttagtggcactgccccccgacctccaggctttcccagttcccaccctgcccctcagagactgaaattacgggtacctgaagatgggagcctctaccttttatccaaaaggtttattccagaaactagtgtacatttctataaatagatgctgtgt

SEQ ID NO: 20513 - DNA, 652 bp, Macaca Mulatta
  misc_feature (1)...(652): n = A,T,C or G
gggagaactcctggactttatcctnnnnnnnnnnnnnnnnnnnnnnttgggattataggagtgagtcaccgcaccggccaagacacttttcaaactgatacagctgacaatgggagcctcataaagatggcttttgtttcttcccttcaaggtcatttacttgtacgagacagaaaaagatagcaatggggacatgggatgcgggagggaggggaatagtggaagtttctttccatgggaaactttcccttttgtaagctgagggccaggggtagggatattttttagtttgtgattttacatttatctgtacatactttttcaagattgatcgtttttataaccatggttttcctgaaatcctcaattcatcaatatgaaggaaatgaaccagatagactttatgcaataataacagtgccagtgagcataactttaactgatgttccacaaaacattttttgatttcagtttgtatgcaggattttttattcccccctttctacttgcttcaaacaacccatctttatagtttcccccccttctcccttaatttcattcttaccatcttatttgatctttttacctatatctccgctccaattcgcttttgctgccactacgatgtcatctgctctctccctctcttctg

SEQ ID NO: 20514 - DNA, 1778 bp, Macaca Mulatta
  misc_feature (1)...(1778): n = A,T,C or G
ggtggaggaactgcaatgtctggtgggagaacagaaaccagagaggtactatgtgggtgtggacgttggaacaggcagtgtccgcgcagctctggtggaccagagtggggtcctgttggcttttgcagaccagccaattaagaagtgggagccccagttcaaccaccacgagcagtcctctgaggacatctggggctgcgtgctgtgttgttacaaaggnnnnnnnnnnnnnnnnnnnnnnnnnnnnnnnnnnnnnnnnnnnnnnnnnnnnnnnnnnnnnnnnnnnnnnnnnnnnnnnnnnnnnnnnnnnnnnnnnnnnnnnnnnnnnnnnnnnnnnnnnnnnnnnnnnnnnnnnnnnnnnnnnnnnnnnnnnnnnnnnnnnnnnnnnnnnnnnnnnnnnnnnnnnnnnnnnnnnnnnnnnnnnnnnnnnnnnnnnnnnnnnnnnnnnnnnnnnnnnnnnnnnnnnnnnnnnnnnnnnnnnnnnnnnnnnnnnnnnnnnnnnnnnnnnnnnnnnnnnnnnnnnnnnnnnnnnnnnnnnnnnnnnnnnnnnnnnnnnnnnnnnnnnnnnnnnnnnnnnnnnnnnnnnnnnnnnnnnnnnnnnnnnnnnnnnnnnnnnnnnnnnnnnnnnnnnnnnnnnnnnnnnnnnnnnnnnnnnnnnnnnnnnnnnnnnnnnnnnnnnnnnnnnnnnnnnnnnnnnnnnnnnnnnnnnnnnnnnnnnnnnnnnnnnnnnnnnnnnnnnnnnnnnnnnnnnnnnnnnnnnnnnnnnnnnnnnnnnnnnnnnnnnnnnnnnnnnnnnnnnnnnnnnnnnnnnnnnnnnnnnnnnnnnnnnnnnnnnnnnnnnnnnnnnnnnnnnnnnnnnnnnnnnnnnnnnnnnnnnnnnnnnnnnnnnnnnnnnnnnnnnnnnnnnnnnnnnnnnnnnnnccacatggtagaaggccatgctgctttcccagaactacaagtaaaagccacagccaggtaactgctgtctctgttccatctaaagctttccttgtgtgacctcattgagagcatttatgttgtgcagttgggtgattttcaggtcctacggacaatgaaaatgcctttagtgcttgaaagatagtcatctggatgatccagaaggtccatgtattaattctttaaataatgtaagagaacttagagaacctagagattccccaaggatatacccagggactatggataagaaactctgatgtagaaggaggaccatgtctggagtcaaaacttcttagtttcacatcccagccttactccttaatagatataggaccttaagctagttacttaacctctttatgcctgtctcttcatctgtaaaactgaagataataactgatacggagtgatttctagaatattttgaagcaagccaagtgcaaaaaagtatttacaatatactccctttcatgtgaaaagaaagacataagaaaataaatgtgtatctattcatttttgcaaaagacatacaggaagtggctaggcgcggtgactcactcctgtaatcctagcaccttgggaggccgaggcaggcagatcatgaggtcagagttccagaccagcctggccaacatggtgaaaccccatctctactaaaaatacaaaagttagctggacgtggtggtatgtggctataatccagcggctcgggaggttgaggcaggagaattgctcaaactcaggagttggaggttgcagtgagcagagattgcgccattgcactccagcctgggcaataagtgagactccatctc

SEQ ID NO: 20515 - DNA, 740 bp, Macaca Mulatta
  misc_feature (1)...(740): n = A,T,C or G
ggcatctataaaaggaaaagtgatggcatctacatcataaatctgaagaggacctgggagaagcttctgctggcggctcgtgccattgttgccattgaaaaccctgctgatgtcagcgttatatcctccaggaatactggccagggccgtgctgaagtttgctgctgccactggagccactccaattgctggccgcttcactcctggaaccttcactaaccagatccaggcagccttccgggagccacggcttcttgtggttactgaccccagggctgaccaccagcctctcacggaggcatcttatgttaacctacctaccattgctctgtgtaacacaaattctcctctgcgctatgtggaatttgccatcccatgcaacaacaaggggagctcccttccgtggggttttgaaggtgggggaaagcctggctccgggaaaatttctgccccttggcttgggcaccccattttccccgggaaaaccccccggggggaggggccttgccccgaaaattccaaacttctacnnnnnnnnnnnnnnnnnnnnnnnnnnnnnnnnnnnnnnnnnnnnnnnnnnnnnnnnnnnnnnnnnnnnnnngggggctttggtcccaccgggggggggaaatttttcccgggggggaaaaaaggggaatattgttttctaaaaaatttccgggggggagttattatagtggggggaaatacacacaaaccgttatgggggaggtttctcc

SEQ ID NO: 20516 - DNA, 483 bp, Macaca Mulatta
cagaagatgcagagctgggggatgagatgactgatgtgtgatgttgccctgcccagaaagggccctgccctagaccctgccagaaaagggggttcttcccccagagaaatggctcggagggaacttcccactcccattgcctgctttccccattcgagccctctctgccagagggtaggacagagcctggatccctggccccaacccccaccagacctcatgccctggacactgctgctgagttggctcagactctgcactggcactgagcttttcacaactggcctccccttgaggttcttccactctagggtttgaggggctggaatcagggccagggcctaacagcgtttcttctgcttggccccacggcccatactcacccattcaccggaggcttctcccctttcaacttgctattgatttcttttgagggggtaaatctgagaccgagttcattgaagcacagaggggaggtggtga

SEQ ID NO: 20517 - DNA, 709 bp, Macaca Mulatta
  misc_feature (1)...(709): n = A,T,C or G
gtgctgcccgggctgcggagatcgtgggcggacgcgaggcgcagccacactccaggccctacatggcctcgctgcagatacagagggacctgggcagccacttctgcgggggcaccttgatccaccccagcttcgtgctgacggccgcgcactgcctgcnnnnnnnnnnnnnnnnnnnnnnnnnnnnnnnnnnnnnnnnnnnnnnnnnnnnnnnnnnnnnnnnnnnnnnnnnnnnnnnnnnnnnnnnnnnnnnnnnnnnnnnnnnnnnnnnnnnnnnnnnnnnnnnnnnnnnnnnnnnnnnnnnnnnnnnnnnnnnnnnnnnnnnnnnnnnnnnnnnnnnnnnnnnnnnnnnnnnnnnnnnnnnnnnnnnnnnnnnnnnnnnnnnnnnnnnnnnnnnnnnnnnnnnnnnnnnnnnnnnnnnnnnnnnnnnnnnnnnnnnnnnnnnnnnnnnnnnnnnnnnnnnnnnnnnnnnnnnnnnnnnnnnnnnnnnnnnnnnnnnnnnnnnnnnnnnnnnnnnnnnnnnnnnnnnnnnnnnnnnnnnnnnnnnnnnnnnnnnnnnnnnnnnnnnnnnnnnnnnnnnnnnnnnnnnnnnnnnnnnnnnnnnnnnnnnnnnnnnnnnnnnnnnnnnnnnnnnnnnnncgcgggtagccctctacgtggactggatccgttccatactgcgccgcgtgggggctgagggccgcccctg

SEQ ID NO: 20518 - DNA, 777 bp, Macaca Mulatta
gggatggccaggtcatcaccatcggcaatgagcggttccggtgtccggaggcgctgttccagccgtctttcctgggcatggaatcttgtggcatccatgagaccacctttaactccatcatgaagtgtgacgtggacatccgcaaagacctgtatgccaacacggtgctgtctggtggcaccaccatgtacccaggcattgccgacaggatgcagaaggagatcaccgccctggcacccagcaccatgaagatcaagatcatcgcacccccagagcgcaagtactcagtgtggatcggtggctccatcttggcctcactgtccaccttccagcagatgtggattagcaagcaggagtacgacgagtcgggcccctccatcgtccatcgcaaatgcttctaaatggactgagcagatgcgtagcatttgctgcatgggttaattcagaagtataaatttgcccttggcaaatgcatacacctcatgctagcctcacaaaactggaaataaaccttttgaaaagaaatttgtccttgaaagctttgtatcctgaaatccgcacctggaattagtagaaacttgggtgctggaattttgaaccgtggtattcaaagttaaactggttccccctatgggtgaattagattaaaaataccccagggcaacaaaataccttttaaaattcccaaaccaattaaaataaaaaatgtttgggccttggggatacgattttccaaggggcccaaaaagaggttcaaaaaaaccatatgaccattac

SEQ ID NO: 20519 - DNA, 4769 bp, Macaca Mulatta
  misc_feature (1)...(4769): n = A,T,C or G
agagctgaagtattgataacaccaaggaaatctatcacgatttgaaaagataagcaaaagtttgatttccagacactacagaannnnnnnnnnnnnnnnnnnnnnnnnnnnnnnnnnnnnnnnnnnnnnnnnnnnnnnnnnnnnnnnnnnnnnnnnnnnnnnnnnnnnnnnnnnnnnnnnnnnnnnnnnnnnnnnnnnnnnnnnnnnnnnnnnnnnnnnnnnnnnnnnnnnnnnnnnnnnnnnnnnnnnnnnnnnnnnnnnnnnnnnnnnnnnnnnnnnnnnnnnnnnnnnnnnnnnnnnnnnnnnnnnnnnnnnnnnnnnnnnnnnnnnnnnnnnnnnnnnnnnnnnnnnnnnnnnnnnnnnnnnnnnnnnnnnnnnnnnnnnnnnnnnnnnnnnnnnnnnnnnnnnnnnnnnnnnnnnnnnnnnnnnnnnnnnnnnnnnnnnnnnnnnnnnnnnnnnnnnnnnnnnnnnnnnnnnnnnnnnnnnnnnnnnnnnnnnnnnnnnnnnnnnnnnnnnnnnnnnnnnnnnnnnnnnnnnnnnnnnnnnnnnnnnnnnnnnnnnnnnnnnnnnnnnnnnnnnnnnnnnnnnnnnnnnnnnnnnnnnnnnnnnnnnnnnnnnnnnnnnnnnnnnnnnnnnnnnnnnnnnnnnnnnnnnnnnnnnnnnnnnnnnnnnnnnnnnnnnnnnnnnnnnnnnnnnnnnnnnnnnnnnnnnnnnnnnnnnnnnnnnnnnnnnnnnnnnnnnnnnnngagccaacggactgaagtcctgtgtcattgtgatccgggtcctgagggacctgtgcactcgcgtgcccacctggggtcccctccgaggctgctctcgagctcctgtgtgagaaatccattggcacagccaacagaccgatgggtgctgacgaggccctgcgaagagtgctggagtgcctggcgtcgggcatcgtgatgccagncagatggttctggcatttatgacccttgtgaaaaagaagccactgatgctattgggcatctagacagacagcaacgggaagatatcacacagnnnnnnnnnnnnnnnnnnnnnnnnnnnnnnnnnnnnnnnnnnnnnnnnnnnnnnnnnnnnnnnnnnnnnnnnnnnnnnnnnnnnnnnnnnnnnnnnnnnnnnnnnnnnnnnnnnnnnnnnnnnnnnnnnnnnnnnnnnnnnnnnnnnnnnnnnnnnnnnnnnnnnnnnnnnnnnnnnnnnnnnnnnnnnnnnnnnnnnnnnnnnnnnnnnnnnnnnnnnnnnnnnnnnnnnnnnnnnnnnnnnnnnnnnnnnnnnnnnnnnnnnnnnnnnnnnnnnnnnnnnnnnnnnnnnnnnnnnnnnnnnnnnnnnnnnnnnnnnnnnnnnnnnnnnnnnnnnnnnnnnnnnnnnnnnnnnnnnnnnnnnnnnnnnnnnnnnnnnnnnnnnnnnnnnnnnnnnnnnnnnnnnnnnnnnnnnnnnnnnnnnnnnnnnnnnnnnnnnnnnnnatgggcttgccgacgggtgccgaaggcagggactctagcaagggggaggactcggctgaggagactgaggcgaagccagctgtggtggcccccgccccagtggtagaagctgtctcaacccctagtgcggcctttccctcagatgccactgccgagnnnnnnnnnnnnnnnnnnnnnnnnnnnnnnnnnnnnnnnnnnnnnnnnnnnnnnnnnnnnnnnnnnnnnnnnnnnnnnnnnnnnnnnnnnnnnnnnnnnnnnnnnnnnnnnnnnnnnnnnnnnnnnnnnnnnnnnnnnnnnnnnnnnnnnnnnnnnnnnnnnnnnnnnnnnnnnnnnnnnnnnnnnnnnnnnnnnttgctgccctagaaaagcttttccctgacacccctctcgcccttgatgccaacaaaaagaagagagccccagtacccgtcagagggggaccgaaatttgctgctaagnagccacataaccctggcttcggcatgggaggccccatgcacaatgaagtgnnnnnnnnnnnnnnnnnnnnnnnnnnnnnnnnnnnnnnnnnnnnnnnnnnnnnnnnnnnnnnnnnnnnnnnnnnnnnnnnnnnnnnnnnnnnnnnnnnnnnnnnnnnnnnnnnnnnnnnnnnnnnnnnnnnnnnnnnnnnnnnnnnnnnnnnnnnnnnnngtcagttctacagcaacggagggcattctgggaatgccggtggcggtggcggcgggggcggtggtggctcctccggctatggctcctactaccaaggtgacaactacaactcaccggtgcccccaaaacacgctgggaagaagcagccgcacgggggccagcagaagccctcctacggctcaggctaccagtcccaccagggccagcagcagtcctacaaccagagcccctacagcaactatggccccccgcagggcaagcagaaaggctataaccatggacaaggcagctactcctactcgaactcctacaactctcccgggggcgggggcggatccgactacaactacgagagcaaattcnnnnnnnnnnnnnnnnnnnnnnnnnnnnnnnnnnnnnnnnnnnnnnnnnnnnnnnnnnnnnnnnnnnnnnnnnnnnnnnnnnnnnnnnnnnnnnnnnnnnnnnnnnnnnnnnnnnnnnnnnnnnnnnggaggctactcacagtcgaactacaactccccggggtccggccagaactacagtggccctcccagctcctaccagtcctcacaaggcggctatggcagaaacgcagaccacagcatgaactaccagtacagataagcccccgcggggcggagatttctaccttctgcacttactccccatcagaagatcgagttttatgcatcacagttaacatgtcagctggccctccaggnnnnnnnnnnnnnnnntccacgttgctgtgtcgtgaggtgcagcgggtcaccctgtggcccgtcctgtgacccatatttagccgtgtttgggactccgtgtcttcaatggtttgttagttgccattacaactttgtctggnnnnnnnnnnnnnnnnnnnnnnnnnnnnnnnnnnnnnnnnnnnnnnnnnnnnnnnnnnnnnnnnnnnnnnnnnnnnnnnnnnnnnnnnnnnnnnnnnnnnnnnnnnnnnnnnnnnnnnnnnnnnnnnnnnnnnnnnnnnnnnnnnnnnnnnnnnnnnnnnnnnnnnnnnnnnnnnnnnnnnnnnnnnnnnnnnnnnnnnnnnnnnnnnnnnnnnnnnnnnnnnnnnnnnnnnnnnnnnnnnnnnnnnnnnnnnnnnnnnnnnnnnnnnnnnnnnnnnnnnnnnnnnnnnnnnnnnnnnnnnnnnnnnnnnnnnnnnnnnnnnnnnnnnnnnnnnnnnnnnnnnnnnnnnnnnnnnnnnnnnnnnnnnnnnnnnnnnnnnnnnnnnnnnnnnnnnnnnnnnnnnnnnnnnnnnnnnnnnnnnnnnnnnnnnnnnnnnnnnnnnnnnnnnnnnnnnnnnnnnnnnnnnnnnnnnnnnnnnnnnnnnnnnnnnnnnnnnnnnnnnnnnnnnnnnnnnnnnnnnnnnnnnnnnnnnnnnnnnnnnnnnnnnnnnnnnnnnnnnnnnnnnnnnnnnnnnnnnnnnnnnnnnnnnnnnnnnnnnnnnnnnnnnnnnnnnnnnnnnnnnnnnnnnnnnnnnnnnnnnnnnnnnnnnnnnnnnnnnnnnnnnnnnnnnnnnnnnnnnnnnnnnnnnnnnnnnnnnnnnnnnnnnnnnnnnnnnnnnnnnnnnnnnnnnnnnnnnnnnnnnnnnnnnnnnnnnnnnnnnnnnnnnnnnnnnnnnnnnnnnnnnnnnnnnnnnnnnnnnnnnnnnnnnnnnnnnnnnnnnnnnnnnnnnnnnnnnnnnnnnnnnnnnnnnnnnnnnnnnnnnnnnnnnnnnnnnnnnnnnnnnnnnnnnnnnnnnnnnnnnnnnnnnnnnnnnnnnnnnnnnnnnnnnnnnnnnnnnnnnnnnnnnnnnnnnnnnnnnnnnnnnnnnnnnnnnnnnnnnnnnnnnnnnnnnnnnnnnnnnnnnnnnnnnnnnnnnnnnnnnnnnnnnnnnnnnnnnnnnnnnnnnnnnnnnnnnnnnnnnnnnnnnnnnnnnnnnnnnnnnnnnnnnnnnnnnnnnnnnnnnnnnnnnnnnnnnnnnnccaggatccctgtcggccatccgggaagaactgtacttgccaagcctgggaccacacatctacagagatcctgctttgctgacctgagccccaggccttggcctcctgtgcttgggtaaccatggccactgggaaaagtgaggaccatttttgacnnnnnnnnnnnnnnnnagaggtgaaagaacaagttgtgtgctagaaaactgttgaggaattctcctttgtgttagagcagaggaggtcccagataccaagtggcccctcccaggaaagggtgggagaagaggacctgaagtaccttgagatcctagcagtgcacacagtggagggatgaggatggatgagtcctacccccaattttgatgggatgtgttcatgtcctgtctcctctcttggacatattaaggggttgggacaagaagagactcctgtgagatcagcagaccttgtatttgaggagagaataccagcctgtaacacccatggaagggatgcctcctggccccacctgccaaatacctccaaactccgggcaggcgcctgcattctcaacacaggactctacttgcagtttccagatcagtgatcgctaccagggttgtttctgaatgcagacccaccacgagggacggattcc

SEQ ID NO: 20520 - DNA, 547 bp, Macaca Mulatta
  misc_feature (1)...(547): n = A,T,C or G
ggtctgtgcccaccgctacacccaggtgctgtggtcggggtcagaagaccagcggcgcatggtgggcaagtgctacgtgcgaggcaatgacctagagttggaccccagtgacgactggcagacctaccacaacgagatgtgcaacagcaacactgactacctggagacgggcatgtgccagctgggcaccagcggtggcttcacccagaacactgtgtacttcggcgcccccggtgcctacaactggaaagnnnnnnnnnnnnnnnnnnnnnnnnnnnnnnnnnnnnnnnnnnnnnnnnnnnnnnnnnnnnnnnnnnnnnnnnnnnnnnnnnnnnngggtacacggtgcaggtaggcagcgccatcttgcaccccaaaaacatcaccattgtgacaggtgccccacggcaccgacatatgggcgcggtcttcttgctgagccaggaggcaggcggagacctgcggaggaggcaggtgctggagggctcgcaggtgggcgcctattttggcagtgccattgccctggcagacctgaacaacgatgggt

SEQ ID NO: 20521 - DNA, 260 bp, Macaca Mulatta
  misc_feature (1)...(260): n = A,T,C or G
gtctcttacagtacatcaatcagcggaagaagttcagaaagcgctgggtgggagctcttgcctctgtaactatccccanttcattttatctatgggccattggatcctgtaaatccctatccagagtttttggagctgtacaggnnnnnnnnnnnnnnnnnnnnnnnnnnnnnnnnnnnnnnnnnnnnnnnnnnnnnnnnacagctagaggatcccatgggcttcttgaatgcatatatgggcttcatcaactccttctg

SEQ ID NO: 20522 - DNA, 1039 bp, Macaca Mulatta
  misc_feature (1)...(1039): n = A,T,C or G
actgtggcctgcatggccaggcccccaaggtgccaccccaggacctgccccctaccgccacctcctcctccatggccagcttcctgtacagcacggcgctccccaaccacgccatccgagagctcaagcaagaagcaccttcctgcccccttgcccccagcgacctgggcctgagccggcccatgccagagcccaaggccactggtgcccaagacttctccgactgttgtggnnnnnnnnnnnnnnggcctggtgggcctctcatccagaaccttcatgcctccaagcgcattctcttctccatcgtccatgacaagtcagnnnnnnnnnnnnnnnnnnnnnnnnnnnnnnnnnnnnnnnnnnnnnnnnnnnnnnnnnnnnnnnnnnnnnnnnnnnnnnnnnnnnnnnnnnnnnnnnnnnnnnnnnnnnnnnnnnnnnnnnnnnnnnnnnnnnnnnnnnnnnnnnnnnnnnnnnnnnnnnnnnnnnnnnnnnnnnnnnnnnnnnnnnnnnnnnnnnnnnnnnnnnnnnnnnnnnnnnnnnnnnnnnnnnnnnnnnnnnnnnnnnnnnnnnnnnnnnnnnnnnnnnnnnnnnnnnnnnnnnnnnnnnnnnnacagggaacaagtttaccaaagacaccacgaagctggaaccagccagcccaccagaggacacctctgcagaggtctctagggccaccgtccttgaccttgctggaaatgctcggtnnnnnnnnnnnnnnnnnnnnnnnnnnnnnnnnnnnnnnnnnnnnnnnnnnnnnnnnnnnnnnnnnnnnnnnnnnnnnnnnnnnnnnnnnnnnnnnnnnnnnnnnnnnnnnnnnnnnnnnnnnnnnnnnnnnnnnnnnnnnnnnnnnnnnnnnnnnnnnnnnnnnnnnnnnnnnnnnnnnnnnnnnnnnnnnnnnnnnnnnnnnnnnnnnnnnnnnnnnnnnnnnnnnnnnnnnnnnnnnnnnnnnnnnnnnnnngacagccacagtgacgtgatccagcccctgtggaagcaggtggagctgctcgtcaacaca

SEQ ID NO: 20523 - DNA, 480 bp, Macaca Mulatta
ggaaaaataattacctgccttgattgttctgtgagcagataaaaagtacatatacagttcatacaataatcttatgtatgtaaaaccccgttacgatgtcggcgacggggcccatcagtaactattacgtggactcgctcatctctcacgacaatgaagacctcctagcgtccaggtttccggccacgggggctcaccccgccgccgccagacccagcggtttggtgccggactgtagcgattttccgtcctgtagcttcgcgcccaagccggccgtattcagcacgtcgtgggcgcccgtgccctcacagtcgtccgtggtatatcacccgtacggcccccagccccacctcggcgccgacacgcgctacatgcggacttggctcgagccgctgtccggcgccgtctctttccccagcttcccggccgggggccgtcactacgccctcaagccggacgcctaccccgggcgccgcgcgg

SEQ ID NO: 20524 - DNA, 585 bp, Macaca Mulatta
  misc_feature (1)...(585): n = A,T,C or G
acattattttgctaaatcttgtgtcatgtgtaggctgtaatatgtgtacattgtgtttnnnnnnnnnnnnnnnnnnnncccacatgccgccattttcctgaatcaaattctacagtggaatggagaggaaaatacttctaggcaagcagctagactggtgaattgggggaactagaaggaactagtaactgagactcctccagcctcctccctattggaatcccaattgttcctggagtaggaaaaatgtttaaagtacattcatgttcttgttctgtgtcacccggccctgggcagtctaccatttacttcaccccaagtcctgttgcccttccagttgggaagccatgatttttctaagaatccagggccacaggagatacaattccaagttctcgctgcctcctttgggcatctcttctgcctgccaatcgaagctccacgcccaggctctcagctctcaggccagtgctctgctctgtccagggtaggtaataccgaggctcctgtcttttaccctcccctagttccagaccagcctcatggtggcaacatggttcttgaacaattaaagaaacatgactt

SEQ ID NO: 20525 - DNA, 2042 bp, Macaca Mulatta
  misc_feature (1)...(2042): n = A,T,C or G
tcccactccctccgctggggcttactccaggactggcattgtgaagaccatgacaggaagccgagcgcagagcactggcaggaggggtaaggtggaacagttatctccagaagaagaagagaaaaggagaatccgaagggaaaggaataagatggctgcagccaaatgccgcaaccggaggagggagctgactgatacactccaagcggagacagaccaactagaagatgagaagtctgctttgcagaccgagattgccaacctgctgaaggagaaggaaaaactagaattcatcctggcagctcaccgacctgcctgcaagatccctgatgacctgggctttccagaagagatgtctgtggcttcccttgatctgactgggggcctgccagaggctgccaccccagagtctgaggaggccttcaccctgcctctcctcaatgacccagagcccaagccctcagtggagcctgtcaagagcatcagcagcatggagctgaaggctgagccctttgatgacttcctgttcccagcatcatccaggcccagcggctctgagacagcccgctctgtaccagacatggacctatctgggtccttctatgcagcagactgggagcccctgcacagtggctccctggggatggggcccatggccacagagctggagcccctgtgcactccggtggtcacctgtactcccagctgcactgcttacacgtcttccttcgtcttcacctaccccgaggctgactccttccccagctgcgcagctgcccaccgcaaaggcagcagcagcaatgagccctcctctgactcgctcagctcacccacgctgctggccctgtgagcgggcagggaagggaggcagccggcacccacaagtgccactgcccgagctggtgcattacagagaggagaaacacgtcttccctagagggttcctgtagacctagggaggaccttatctgtgcgtgaaacacaccaggctgtgggcctcaaggacttgaaagcatccatgtgtggactcaagtccttacctcttccggagatgtagcaaaacgcatggagtgtgtattgttcccagtgacacttcagagagctggtagttagtagcatgttgagccaggcctgggtctgtgtctcttttctctttctccttagtcttctcatagcattaactaatctattgggttcattattggaattaacctggtgctggatattttcaaattgtatctagtgcagctgattttaacaataactactgtgttcctggcaatagtgtgttctgattagaaatgaccaatattaaactaagaaaagatatgactttattttctggtagatagaaataaatagctatatccatgtactgtagtttttcttcaacatcaatgttcattgtaatgttactgatcatgcattgttgaggtggtctgaatgttctgacattaacagttttccatgaaaacgttttattgtgtttttaatttatttattaagatggattctcagatatttannnnnnnnnnnnnnnnnnnnntaccttgaggtcttttgacatgtggaaagtgaatttgaatgaaaaatttaagcattgtttgcttattgttccaagacattgtcaataaaagcatttaagttgaatgcgccnncananaaaaaccaaaacaaaaaaacacaacataaaatcacaaaaacaatagaaaacaaaaaaattgtggggccccctctcggccctccaaaaagtttttccaaaaccatttcctttttgggcacccgcgggcccacatatggtaaaggtaacacgggggccccaaactctgtttttcccaaaaggacaatacccaaagggtacaagaccgtatgtgggtcttgaggaattctctccaccccaacaataataatataacctccccgtggatgggaccaatacctatttatgggtctttcttctgacaagacacatgcacctccaggaatggagagaggtatcttcttaagagngggctgccaaacctaccaccgcggagtttcta

SEQ ID NO: 20526 - DNA, 1557 bp, Macaca Mulatta
  misc_feature (1)...(1557): n = A,T,C or G
naggacttcttcaagaagttcttatatgagccattgccagtggagtctcatctggaccactgtatgcatgaccacttcaatgctgagatcgtcaccaagaccattgagaacaagcaggatgctgtggactacctcacctggacctttctgtaccgccgcatgacacagaaccccaattactacaacctgcaggnnnnnnnnnnnnnnnnnnnnnnnnnnnnnnnnnnnnnnnnnnnnnnnnnnnnnnnnnnnnnnnnnnnnnnnnnnnnnnnnnnnnnnnnnnnnnnnnnnnnnnnnnnnnnnnnnnnnnnnnnnnnnnnnnnnnnnnnnnnnnnnnnnnnnnnnnnnnnnnnnnnnnnnnnnnnnnnnnnnnnnnnnnnnnnnnnnnnnnnnnnnnnnnnnnnnnnnnnnnnnnnnnnnnnnnnnnnnnnnnnnnnnnnnnnnnnnnnnnnnnnnnnnnnnnnnnnnnnnnnnnnngttggctcagaaggtcccccacaagctgaataaccctaagttcaatgatccgcacgtcaagaccaacctgctcctgcaggctcacctgtcgcgcatgcagctgagtgctgagttgcagtcagatacggaggaaatccttagtaaggnnnnnnnnnnnnnnnnnnnnnnnnnnnnnnnnnnnnnnnnnnnnnnnnnnnnnnnnnnnnnnnnnnnnnnnnnnnnnnnnnnnnnnnnnnnnnnnnnnnnnnnnnnnnnnnnnnnnnnnnnnnnnnnnnnnnnnnnnnnnnnnnnnnnnnnnnnnnnnnnnnnnnnnnnnnnnnnnnnnnnnnnnnnnnnnnnnnnnnnnnnnnnnnnnnnnnnnnnnnnnnnnnnnnnnnnnnnnnnnnnnnnnnnnnnnnnnnnnnnnnnnnnnnnnnnnnnnnnnnnnnnnnnnnnnnnnnnnnnnnnnnnnnnnnnnnnnnnnnnnnnnnnnnnnnnnnnnnnnnnnnnnnnnnnnnnnnnnnnnnnnnnnnnnnnnnnnnnnnnnnnnnnnnnnnnnnnnnnnnnnnnnnnnnnnnnnnnnnnnnnnnnnnnnnnnnnnnnnnnnnnnnnnnnnnnnnnnnnnnnnnnnnnnnnnnnnnnnnnnnnnnnnnnnnnnnnnnnnnnnnnnnnnnnnnnnnnnnnnnnnnnnnnnnnnnnnnnnnnnnnnnnnnnnnnnnnnnnnnnnnnnnnnnnnnnnnnnnnnnnnnnnnnnnnnnnnnnnnnnnnnnnnnnnnnnnnnnnnnnnnnnnnnnnnnnnnnnnnnnnnnnnnnnnnnnnnnnnnnnnnnnnnnnnnnnnnnnnnnnnnnnnnnnnnnnnnnnnnnnnnnnnnnnnnnnnnnnnnnnnnnnnnnnnnnnnnnnnnnnnnnnnnnnnnnnnnnnnnnnnnnnnnnnnnnnnnnnnnnnnnnnnnnnnnnnnnnnnnnnnnnnnttttcccttgctcactctggatccagtgacagcaggtgtcacgggtgaagcataaatcatatatagcattttcaggcatgttcctggtagttcttttgagtttgatattctaataaaataatttgtagaa

SEQ ID NO: 20527 - DNA, 763 bp, Macaca Mulatta
ttccagccgtcatcagcagcaccagtgctggggcaggaggagctggcttcagcatgggctttggcacctcgagcagttatagctacaaaactgcagctgcagacgtcaagaccaaaggcagctgtggcagcgagctcaaggatccccttgccaaaacctcggggagcagttgtgccaccaaaaagtcctccagatgatggacaagtggttggctctgtgagcagaaggcttcccaacctgtccatttcctccctctccttccctgggctccctttccaagtcaagaaatgctttgtctgtcactacagtcccaactccatttcctctccctgttgtcctcaaggtgtgatgcttcgatgcaaggagtccagtcatgagctctctcagtggcctccttcttagtcccgtttcgttgggtcattgcctgaaatgcaaagacaacacacatacccaggatgtttccccatggccagctacaagcccctctgcctccatgcctttctaaggcctttgctgccaagggactctcttcatcttctgattgggattgtgtccagtcctctgcttctcctgcaataaatgagtaaatctgtttggttctcagttgaatctgttgcccagaatgtcactatctgcagggccttaacttttcttcatctgacaattgtttcactctgggtcctgggctcatgtggctcttcactggttttagccaggtaagtactgggagagggctgatccttgtaaacagttgaaatgtatt

SEQ ID NO: 20528 - DNA, 1879 bp, Macaca Mulatta
  misc_feature (1)...(1879): n = A,T,C or G
ggtttttggtcagacaccattttatactgttgaaaattcacagtggagcttgtggccagaaataccttgtaannnnnnnnnnnnnnnnnnnnnnnnnnnnnnnnnnnnnnnnnnnnnnnnnnnnnnnnnnnnnnnnnnnnnnnnnnnnnnnnnnnnnnnnnnnnnnnnnnnnnnnnnnnnnnnnnnnnnnnnnnnnnnnnnnnagccaagatgatgagatggaaaaaggcagaccagtggctactccagaaatgcattggcggggtcagagggatgtggcgcttctattcctacctcacaggcagtgcaggtnnnnnnnnnnnnnnnnnnnnnnnnnnnnnnnnnnnnnnnnnnnnnnnnnnnnnnnnnnnnnnnnnnnnnnnnnnnnnnnnnnnnnnnnnnnnnnnnnnnnnnnnnnnnnnnnnnnnnnnnnnnnnnnnnnnnnnnnnnnnnnnnnnnnnnnnnnnnnnnnnnnnnnnnnnnnnnnnnnnnnnnnnnnnnnnnnnnnnnnnnnnnnnnnnnnnnnnnnnnnnnnnnnnnnnnnnnnnnnnnnnnnnnnnnnnnnnnnnnnnnnnnnnnnnnnnnnnnnnnnnnnnnnnnnnnnnnnnnnnnnnnnnnnnnnnnnnnnnnnnnnnnnnnnnnnnnnnnnnnnnnnnnnnnnnnnnnnnnnnnnnnnnnnnnnnnnnnnnnnnnnnnnnnnnnnnnnnnnnnnnnnnnnnnnnnnnnnnnnnnnnnnnnnnnnnnnnnnnnnnnnnnnnnnnnnnnnnnnnnnnnnnnnnnnnnnnnnnnnnnnnnnnnnnnnnnnnnnnnnnnnnnnnnnnnnnnnnnnnnnnnnnnnnnnnnnnnnnnnnnnnnnnnnnnnnnnnnnnnnnnnnnnnnnnnnnnnnnnnnnnnnnnnnnnnnnnnnnnnnnnnnnnnnnnnnnnnnnnnnnnnnnnnnnnnnnnnnnnnnnnnnnnnnnnnnnnnnnnnnnnnaagccaagagccacctccacatggaaggcctctttgagacaaaggtctctactcgcctgaggaccgtcacccccatcatccatcactcctccaagatgacaattcagaaggccatcaagcaaagcttttctttaggatacatccacttggccttgtgtgctgactcctatgcagggaatcctttccgggaccacctgaagaagctgaatttgaaagtggagatccaacttcttgacctttggcaggacctgcaccatttcctcagtgtccttgtgaataacaagaacaatgggaatgcaatctttcgtcacttgctgggtgacagaatctgcgagctctacctgaatgagcagattggtccacgcttgccactcanatcccaaaccattcagggcctaaaggaactgttgccttctggagatgtgatcccctggattcccnnnnnnnnnnnnnnnnnnnnnngatgctgagtccctggtatgatgagttcctggatgaagaggactactggtttctcctttttacggtaggaaggactttggattgggaaggaatcatgaggatgagggaagaagagagagtaattgctgttttaaaaggcttatatgttaaagtaaatgaaattgttatttttcctagagtcaaccaaagattggcatggtccctgttgttctaaagctaaacctctcaaggaaaaggactcagtgcataagatgactttgnnnnnnnnnnnnnnnnnnnnnnnnnnnnnnnnnnnnnnnnnnnnnnnnnnnnnnnnnnnnnnnnnnnnnnnnnnnnnnnnnnnnnnnnnnnnnnnnnnntgaacctgggaggcggagcttgcagtgagccgagatcacgccaccacactgcagcctgggcgactaagtgagactctgtctcaa

SEQ ID NO: 20529 - DNA, 237 bp, Macaca Mulatta
  misc_feature (1)...(237): n = A,T,C or G
gaggctcgtgctgaattcggcacgaggcaagaactacgaagctgtccactgcttcaggaaggacatggatantggtcgagacattcctgcgcatggtgcagtgccgcactgtggagggcagctgtggcttctaggtgcccgcgtggcatcctgtgacccctccccagtgcctgtcctggccccnggaaggtgccactccagtgcccaccaaccttgtcctaataaaattaagttgta

SEQ ID NO: 20530 - DNA, 1100 bp, Macaca Mulatta
  misc_feature (1)...(1100): n = A,T,C or G
ncagcagccctttggagagatgtttgagattgaaatagacaccctggagaccacctgccatgtgctggaccccacccctgtggcaggatgcagagtgaggcagctgaaggagcatnnnnnnnnnnnnnnnnnnnnnnnnnnnnnnnnnnnnnnnnnnnnnnnnnnnnnnnnnnnnnnnnnnnnnnnnnnnnnnnnnnnnnnnnnnnnnnnnnnnnnnnnnnnnnnnnnnnnnnnnnnnnnnnnnnnnnnnnnnnnnnnnnnnnnnnnnnnnnnnnnnnnnnnnnnnnnnnnnnnnnnnnnnnnnnnnnnnnnnnnnnnnnnnnnnnnnnnnnnnnnnnnnnnnnnnnnnnnnnnnnnnnnnnnnnnnnnnnnnnnnnnnnnnnnnnnnnnnnnnnnnnnnnnnnnnnnnnnnnnnnnnnnnnnnnnnnnnnnnnnnnnnnnnnnnnnnnnnnnnnnnnnnnnnnnnnnnnnnnnnnnnnnnnnnnnnnnnnnnnnnnnnnnnnnnnnnnnnnnnnnnnnnnnnnnnnnnnnnnnnnnnnnnnnnnncagcccgcgacctcacagccccaaccagaaggtgccaatgaagcagtccccacccccgtggtggatgcagatgcacctgcgtcctatccagttggcgcatctggaccccttccaactggctcacccatatacgcccatgtgttggcggcagctcccccagtggtcccgatacactcgtcacactatgacctgcgccacctcttcatgggtgtggtctcattgaggtccccctcaggagaagcgttgcacccccggaaaacacgctcagtggtgcagcctagtgttggtgctgctgctgggccagtggttcctccatgtccggggagggtcagacacttcaaggtctaggctagacatggcagagatgaggaggtttggcagagaaaacatagccaccattttgtccaagcctgggcatgggtggggggccttgtctgctgaccacgcaagtgtcacatgtgatctacattaatatcaagtcttgaatccctacttcctgtcattcctcacaggacagaagcagagggaatggtggttatgtttgatagaaggca

SEQ ID NO: 20531 - DNA, 4087 bp, Macaca Mulatta
  misc_feature (1)...(4087): n = A,T,C or G
atgacggccgccgcgggttcggcgggccgcgccgcggtgcccttcctgctgtgtgcgctgctggcgcccggcggcgcgtacgtgctcgacgactccgacgggctgggccgggagttcgacggcatcggcgcggtcagcggcggcggggcaacctcccgacttctagtaaattacccagagccctatcgttctcagatattggattatctctttaagccgaattttggtgcctctttgcatattctaaaagtggaaataggtggtgatgggcagacaacagatggcactgagccctcccacatgcactatgcactagatgagaattattttcgaggatatgagtggtggttaatgaaggaagctaagaagaggaatcccaatattacactcattgggttgccatggtcattccctggatggctgggaaaaggttttgactggccttatgtcaatcttcagctgactgcctattatgtcgtgacctggattgtgggtgccaagcgttatcatgatttggacattgattatattggaatttggaatgagaggtcatataatgccaattacattaagatattaagaaaaatgctgaactctcaaggtctccagcgagtgaaaatcatagcaagtgataatctctgggagtccatctctgcagccatgctacttgatgctgaactcttcaaggtggttgatgttataggggctcattatcctggaacccattcagtaaaagatgcaaggttgactgggaagaagctttggtcttctgaagactttagcactttaaatagtgacacgggtgcaggctgctggggtcgcattttaaatcagaattatgtcaatggctatatgacttccacaatcgcatggaatttagtggctagttactatgaacagttgccttatgggagatgcgggttgatgacagcccaggagccatggagtggtcactacgtggtagaatctcctgtctgggtgtcagctcataccactcagtttactcaacctggctggtattacctgaagacagttggccatttagagaaaggaggaagctatgtagctctgactgatggcttagggaacctcaccatcatcattgaaaccatgagtcataaacattctaagtgcatacggccatttcttccttatttcaatgtgtcacaacaatttgctacctttgttcttaagggatcttttagtgaaataccagagctacaggtgtggtataccaaacttggaaaaacatctgaaagatttctttttaagcagctggattctctatggctcctcgacagcaatggcagtttcacactgaaactgcaagaagatgagctgttcacactcaccactctcaccactggtcgcaaaggcagctacctgcctcctccaaaatcccagcgcttcccaagtacctataaggatgatttcaatgttgattacccattttttagtgaagctccaaactttgctgatcaaactggtgtatttgaatattttacaaatatggaagaccctggtgagcatcacttcacgctacgccaagttctcaaccagagacccattacgtgggctgccgatgcatccaacacaatcagtattataggagactacaactggacgaatctgactataaaatgtgatgtttacatagagacccctgacacaggaggtgtgttcattgcaggaagagtaaataaaggtggtattttgattagaagtgccagaggaattttcttctggatttttgcaaatggatcttacagggttacaggggatttagctggatggattatatatgctttaggacatgttgaagttacagcaaaaacatggtatacactcacattaactattaagggtcgttttgcctctggcatgctgaatgacaagtctctgtggacagacatccctgtgaattttccgaagaatggctgggctgcaattggaactcactcctttgaatttgcacagtttgacaactttcatgtggaagccacacgctaatacttacagggcatcatagaatactctggattttcttcccttctttttggttttggttcagagccaattcttgtatcattggaacagtatatgagcctttcgaggctaaaaataatgaagagtaaatggggagagnnnnnnnnnnnnnnnnnnncctggaagattttgttagaattaattccaaggggaaaactggtgaatctttaacattacctggtatgttcaaactgtgcattggccctacccttaggagtggtttgagtagtacagacctcgaagccttgctgctaacactaaggtagctctcttcatcttacttgcaagcggtcctgcacatggcagtaacttgatcatcatggagatgtatttatgcatgctgaccgtgtgtccaaatgagccagtgtcttcagcacaagatgatgctgccataatagaaagctgaagaacactggaagtagctttttgaaaaccacttcaacctgttatgttttatgctctaaaaagtatttttttttattttcctttttaagataatacttttgaaatgcaggatatgatgagtggaatgattgaaaaaaatgcctgtttaataaactacctcggccgnnnnnnnnnnnnnnnnnnnnnnnnnnnnnnnnnnnnnnnnnnnnnnacgggcgnnnnnnnnnnnnnnnnnnnnnnnnnnnnnnnnnntaacacggtgaaactnnnnnnnnnnnnnnnnnnnnnnnnnnctagccaggcgaagtggcggctctgtgnnnnnnnnnnnnnnnnnnnnnnnnnnnnnnncctggcgnnnnnnnnnnnnnngnnnnnnnnnnnnnnnnnnnnnncgnnnnnnnnnnnnnnnnnnnnnnncagagccagactcannnnnnnnnnnnnnnnnnnnnnnnnnnnnnnnnnnnnnnnnnnnnnnnnnnnnnctacctctaacactacttctgcagtaatagatattatcagattaattgggttatttgcattatttaattcttttgattccaagttttggtcttgtaaccactataactctctgtgaacatttttccaggtggctggaagaaggaagaaaacctgatctagccaatgctgttgtaggcatttcctctgcctcatctcactgtgctgtggtctgtcctcacatgtggcactggtaacagactcacacagctgatgaatgattttctctccttatgtgtggaaggaggggagcacttagccgtttgctaactcccagaattggatcatctcctaagatgtacttactttttaaagtccaaatatgtttatatttaaatatatgtgagcatgtttatcatgtagtatgatttatactaagcattaatgtggctctaagtagcaaatccgttattcatgtgggtaaagtaaatctagaattatttgtaagaattactcattgaactaattctactctttaggaatttgtaagagtctaacataggcttagctacagtgaagttttacattgcttttgaagacaagaagctaagtactagaataaataaggttacagagaacatttttcagttaaaaccaagtgatttccagttgatatatctaatattttaaaaactaacattgtagagtcataatttatttacaataaaatgttcccactttaagtatacaattcagtgagttttgataaatggatatacccatgtaaccaacactccagtcaagtttcagaatatttccatcaccctctagaaagttctcttgtatacctgctcagtcagttcctttcactcccaattgttggcagtcattgatacgaattctatcactataggttagttttctttgttctagaacgtcatgaaagtggcatcatgtactatgtattcttatgaatggtttctttctgtcagcataatgatttgagatttgtcctcatgttgtgtgattcagtggtttattccttcttatttctgaagagttttcacacattgtgtgaatataccacaatttgtctcctccccaccagtttctgctattacaattaaaactgtccacatttacaatctttgtgtcaaatatatttctattt

SEQ ID NO: 20532 - DNA, 1777 bp, Macaca Mulatta
  misc_feature (1)...(1777): n = A,T,C or G
ggttctagcctataggaacaagacattttcagtaatggaagaaagagcttccaggctggggaagatcatcgtttccagtggtagcttgacctgagatgatacctgaccacaacttctgggaaggcccagaatagatagaagagagagaacnnnnnnnnnnnnnnnnnnnnnnnnnnnnnnnnnnnnnnnnnnnnnnnnnnnnnnnnnnnnnnnnnnnnnnnnnnnnnnnnnnnnnnnnnnnnnnnnnnnnnnnnnnnnnnnnnnnnnnnnnnnnnnnnnnnnnnnnnnnnnnnnnnnnnnnnnnnnnnnnnnnnnnnnnnnnnnnnnnnnnnnnnnnnnnnnnnnnnnnnnnnnnnnnnnnnnnnnnnnnnnnnnnnnnnnnnnnnnnnnnnnnnnnnnnnnnnnnnnnnnnnnnnnnnnnnnnnnnnnnnnnnnnnnnnnnnnnnnnnnnnnnnnnnnnnnnnnnnnnnnnnnnnnnnnnnnnnnnnnnnnnnnnnnnnnnnnnnnnnnnnnnnnnnnnnnnnnnnnnnnnnnnnnnnnnnnnnnnnnnnnnnnnnnnnnnnnnnnnnnnnnnnnnnnnnnnnnnnnnnnnnnnnnnnnnnnnnnnnnnnnnnnnnnnnnnnnnnnnnnnnnnnnnnnnnnnnnnnnnnnnnnnnnnnnnnnnnnnnnnnnnnnnnnnnnnnnnnnnnnnnnnnnnnnnnnnnnnnnnnnnnnnnnnnnnnnnnnnnnnnnnnnnnnnnnnnnnnnnnnnnnnnnnnnnnnnnnnnnnnnnnnnnnnnnnnnnnnnnnnnnnnnnnnnnnnnnnnnnnnnnnnnnnnnnnnnnnnnnnnnnnnnnnnnnnnnnnnnnnnnnnnnnnnnnnnnnnnnnnnnnnnnnnnnnnnnnnnnnnnnnnnnnnnnnnnnnnnnnnnnnnnnnnnnnnnnnnnnnnnnnnnnnnnnnnnnnnnnnnnnnnnnnnnnnnnnnnnnnnnnnnnnnnnnnnnnnnnnnnnnnnnncatcagcgatcccatactggagagaaactctatgggtgcagtgtgtgtgggaaagccttttctcagaaggcatacctcattgcacaccagagacttcacacaggagagaagccttataaatgcagtgattgtgggagaaccttctattttaagtcagacctgaccagacatcagagaattcatacaggagagaaaccttacgaatgtcatgagtgtgaaaaagcctttagaagcaagtcaaagctcattcagcatcagcgtactcacactggagagagaccatattcatgcagcgaatgtggcaaagcctttgcccacatgtcagtcctcattaaacataagaaaactcacataagagagaaagccatacattcactgaaggtggagaaaccttcttcaaggagtcatacctccttatacatgagtgaacacatgcaagagcaaaagactgtacctatagaaatgcctgcctctggaaccccggcattgttaaacaagagtgagcgcctagtgggtagaaatgtagtgattgtagaacaaccttttccaagaaatcaagcctttgtagttaatcaggaatttgaacagggaataagcctcgcaaatgaagtgaatgtggccccatcagtaataaattatatcttgtatgttacagatattgtataagaataaatctgataccagaaaggtgggaaaatctttagtaggaatcctgcagccactgtatgctggagagctcatttagggctgaaacactggaggcagtggtcgtggaggacatt

SEQ ID NO: 20533 - DNA, 251 bp, Macaca Mulatta
ggttccatactgctgggagtcggtgcaagaatcggacaggcgctgagcacctgtggctgactcggcatctcagggacccgtttgtgaaggctgcgaaggtggcgagctaccggtgtcgaagcgccttcaagctcctggaggtgaacgagaggcaccagattctgcgacctggccttcgggtattagactgcggagcagctcctggggcctggagtcaggtggcggtgcagaaggtcaatgccgcaggcaca

SEQ ID NO: 20534 - DNA, 2101 bp, Macaca Mulatta
  misc_feature (1)...(2101): n = A,T,C or G
gaaatctccaaattagacatccagagcagcattcttgttctttctacatcttgaattagaaactaccaaggctctttaagtcctgaaaaggaaataaaaggtnnnggtgtgtccctacccgtgaggagaggtggccagtaaatgtcagctgaggcaccgaaggctgcgatgcaccagcccggtgccctgtgaggacggccnnnnnnnnnnnnnnnnnnnnnnnnnnnnnnnnnnnnnnnnnnnnnnnnnnnnnnnnnnnnnnnnnnnnnnnnnnnnnnnnnnnnnnnnnnnnnnnnnnnnnnnnnnnnnnnnnnnnnnnnnnnnnnnnnnnnnnnnnnnnnnnnnnnnnnnnnnnnnnnnnnnnnnnnnnnnnnnnnnnnnnnnnnnnnnnnnnnnnnnnnnnnnnnnnnnnnnnnnnnnnnnnnnnnnnnnnnnnnnnnnnnnnnnnnnnnnnnnnnnnnnnnnnnnnnnnnnnnnnnnnnnnnnnnnnnnnnnnnnnnnnnnnnnnnnnnnnnnnnnnnnnnnnnnnnnnnnnnnnnnnnnnnnnnnnnnnnnnnnnnnnnnnnnnnnnnnnnnnnnnnnnnnnnnnnnnnnnnnnnnnnnnnnnnnnnnnnnnnnnnnnnnnnnnnnncaccatgcccacggagaccctacagacaggtagcatggtgaagccggtcagccccgcgggcaccttcacctctgccgtgcccctacgtatcctgaacaagggaccagactacttccgcaggcaggccgagcccaaccccaagaggctcagcgccgtggagaggctggaggccgacaaggccaagtacgtcaagagccaggaggtgatcaacgccaagcaggagcccgtaaagcccgccgtgctggccaagcccccggtgtgcccggctgccaagcgcgcgctgggcagccccacgctcaaagtatttggcaaccacgccaagaccgagagtggcgtgcagagggagaacctcaagctggagatcctgaagaatatcatcaatagctccgagggctccagctcgggctcggggcacaagcacagctcccgcaactggccaccccaccggtcggaaaccaccgacctgcaccgtcactccttcgcggagtccctgaaagtctatcccacgcagggccgcggcagcccgcaggagggcggctcccacgtgagcaggagactgctggagcagtcagccgagtccttcctccacgtgtcccacagctcttcggacatccgcaaggtgaccagcgtgaagcccttcaaggccatcccctgcagtagctctgcccctcccctgcctcccaagcccaaaatcgcagccatcgccaccatgaagtcccccgaggccgaccctgtggaaccagcttgtggagtcagccgaagaccctccctccagcggtctaagtcagacttgagtgacagatatttccgagtggacgcggacgtagagaggttcttcaactactgtggacggacccggaagannnnnnnnnnnnnnnnnnnnnnnnnnnnnnnnnnnnnnnnnnnnnnnnnnnnnnnnnnnnnnnnnnnnnnnnnnnnnnnnnnnnnnnnnnnnnnnnnnnnnnnnnnnnnnnnnnnnnnnnnnnnnnnnnnnnnnnnnnnnnnnnnnnnnnnnnnnnnnnnnnnnnnnnnnnnnnnnnnnnnnnnnnnnnnnnnnnnnnnnnnnnnnnnnnnnnnnnnnnnnnnnnnnnnnnnnnnnnnnnnnnnnnnnnnnnnnnnnnnnnnnnnnnnagggagggtgggtctctgtgcttacgcagttgtaaaggttgtgaggtctccttgaagtgttgtgagcttctccactctttgtgttgcttgttgtgcaatgttttcaagttgcatgcctgtcaacatggggactgacctggcttccacgtcaccatcgctgcagagcctggcctaacacgcgtcatctgccaaaagtttcaggccagaatctaattagggctttgctcttaagcaaaactgtttacatgaaaatggtatacgacttcttcaatatttatgtggttcttgtgtttttatatcccgcgctattatgtcttaattaaaagttttatcaactgg

SEQ ID NO: 20535 - DNA, 500 bp, Macaca Mulatta
ctcctgtccctccctccccgtcagctatatcctcctgccccgaatcattgaagccaagtacttggatgtcatggatgctgagcacaggccttgactggcaggccctagccacgccccattcgctagcttcccatgtcctcccaggctggctctggggctgtgaggggaggtgtaggtgtgtgggtgactgctctgtgctgcaccttctcatggctgactcaggcctggggcatctgggcattgtaggggtgcagtggtatgtgcccacccctcccattatctctttagctttgtgccaagagcattgctcagggcaacttctgcccagggtgggtgggactgagcaggatggattttcttttgataaaagagtcgatgcctgaaagagaaaccatttccttgattgtgtaaggaacttgccgtacgcacattagagaataaagctcctgtttctaggctcctatgtgctacctctgtctctgctactgccaccccaccca

SEQ ID NO: 20536 - DNA, 308 bp, Macaca Mulatta
  misc_feature (1)...(308): n = A,T,C or G
tacctcacctatatgggacgaatctgtggtatccagggcccacccctcnnnnnnnnnnnnnnnnnncttttatattatacaacttaattttattaggacaagcctgatgggcactggagtggcaccttcccggggccaggagaggcactggggagggtcagcaggatgccacatgggcacatagaagccacagctgccctccacagtgcggcactgcaccatgcgcaggattctcgaccatatccatgtccttcctgaagcagtggagcagcccgagtcttggagcagctgagtcatcgttctgtgag

SEQ ID NO: 20537 - DNA, 2444 bp, Macaca Mulatta
  misc_feature (1)...(2444): n = A,T,C or G
gtggtcatattggttcatggagaattgcgaatagagnagacgaaaggtcaatatgacgaagaagagatgactgtgcaacaagctaaaagaaggcagaaacgtgaatgggtgaaatttgccaaaccctgcagannnnnnnnnnnnnnnnnnnnnnnnnnnnnnnnnnnnngattacttcagattaccaagcaacccagaaaattacctaccgaatctctggagtgggaattgatcagccaccttttggaatctttgttgttgacaaaaacactggcgatattaacataacagcgatagttgaccgagaggaaactccaagcttcctgnnnnnnnnnnnnnnnnnnnnnnnnnnaggactagaggtagagaagccacttatactaacggttaaaattttggatattaatgataatcctccagtattttcacaacaaattttcatgggtgaaattgaagaaaatagtgcctcannnnnnnnnnnnnnnnnnnnnnnnnnnnnnnnnnnnnnnnnnnnnnnnnnnnnnnnnnnnnnnnnnnnnnnnnnnnnnnnnnnnnnnnnnnnnnnnnnnnnnnnnnnnnnnnnnnnnnnnnnnnnnnnnnnnnnnnnnnnnnnnnnnnnnnnnnnnnnnnnnnnnnnnnnnnnnnnnnnnnnnnnnnnnnnnnnnnnnnnnnnnnnnnnnnnnnnnnnnnnnnnnnnnnnnnnnnnnnnnnnnnnnnnnnnnnnnnnnnnnnnnnnnnnnnnnnnnnnnnnnnnnnnnnnnnnnnnnnnnnnnnnnnnnnnnnnnnnnnnnnnnnnnnnnnnnnnnnnnnnnnnnnnnnnnnnnnnnnnnnnnnnnnnnnnnnnnnnnnnnnnnnnnnngcagtatatttctttacctctgggaatgaaggaaattggtttgaaatacaacctgatcccagaactaatgaaggcatcctgaaagtggtgaagnnnnnnnnnnnnnnnnnnnnnnnnnnnnnnnnnnnnnnnnnnnnnnnnnnnnnnnnnnnnnnnnnnnnnnnnnnnnnnnnnnnnnnnnnnnnnnnnnnnnnnnnnnnnnnnnnnnnnnnnnnnnnnnnnnnnnnnnnnnnnnnnnnnnnnnnnnnnnnnnnnnnnnnnnnnnnnnnnnnnnnnnnnnnnnnnnnnnnnnnnnnnnnnnnnnnnnnnnnnnnnnnnnnnnnnnnnnnnnnnnnnnnnnnnnnnnnnnnnnnnnnnnnnnnnnnnnnnnnnnnnnnnnnnnnnnnnnnnnnnnnnnnnnnnnnnnnnnnnnnnnnnnnnnnnnnnnnnnnnnnnnnnnnnnnnnnnnnnnnnnnnnnnnnnnnnnnnnnnnnnnnnnnnnnnnnnnnnnnnnnnnnnnnnnnnnnnnnnnnnnnnnnnnnnnnnnnnnnnnnnnnnnnnnnnnnnnnnnnnnnnnnnnnnnnnnnnnnnnnnnnnnnnnnnnnnnnnnnnnnnnnnnnnnnnnnnnnnnnnnnnnnnnnnnnnnnnnnnnnnnnnnnnnnnnnnnnnnnnnnnnnnnnnnnnnnnnnnnnnnnnnnnnnnnnnnnnnnnnnnnnnnnnnnnnnnnnnnnnnnnnnnnnnnnnnnnnnnnnnnnnnnnnnnnnnnnnnnnnnnnnnnnnnnnnnnnnnnnnnnnnnnnnnnnnnnnnnnnnnnnnnnnnnnnnnnnnnnnnnnnnnnnnnnnnnnnnnnnnnnnnnnnnnnnnnnnnnnnnnnnnnnnnnnnnnnnnnnnnnnnnnnnnnnnnnnnnnnnnnnnnnnnnnnnnnnnnnnnnnnnnnnnnnnnnnnnnnnnnnnnnnnnnnnnnnnnnnnnnnnnnnnnnnnnnnnnnnnnnnnnnnnnnnnnnnnnnnnnnnnnnnnnnnnnnnnnnnnnnnnnnnnnnnnnnnnnnnnnnnnnnnnnnnnnnnnnnnnnnnnnnnnnnnnnnnnnnnnnnnnnnnnnnnnnnnnnnnnnnnnnnnnnnnnnnnnnnnnnnnnnnnnnnnnnnnnnnnnnnnnnnnnnnnnnnnnnnnnnnnnnnnnnnnnnnnnnnnnnnnnnnnnnnnnnnnnnnnnnnnnnnnnnnnnnnnnnnnnnnnnnnnnnnnnnnnnnnnnnnnnnnnnnnnnnnnnnnnnnnnnnnnnnnnnnnnnnnnnnnnnnnnnnnnnnnnnnnnnnnnnnnnnnnnnnnnnnnnnnnnnnnnnnnnnnnnnnnnnnnnnnnnnnnnnnnnnnnnnnnnnnnnnnnnnnnnnnnnnnnnnnnnnnnnnnnnnnnnnnnnnnnnnnnnnnnnnnnnnnnnnnnnnnnnnnnnnnnnnnnnnnnnnnnnnnnnnnnnnnnnnnnnnnnnnnnnnnnnnnnnnnnnagaaagcgtttgcctgtgcggaggaagacgatggccaggaagcaaatgactgctaggtgatctatgataatgaaggcgcagatgctactggttcacctgtgggctccgt

SEQ ID NO: 20538 - DNA, 491 bp, Macaca Mulatta
gggtgccctctaaagtgcctttggggtgacgacgtcccactcatctttgtgtcttttctttcctagggatgctgtgaagaaatgttttgccgtgtgtcttgcataattcatggccagttttgcgaagctttggaaggcactatggacagaagctggtggacagttttgtaactatcttcgaaacctctgtcttacagacatgtgccttttatcttgcagcaatgtgttgcttgtgattcgaacatctgagtgttacttttggaagcaacaatacattcttgaacctgaatgtcagtagcacaggatgagaagtgggttctatatcttgcggaatggaatcttcctcacgtacctgtttcctctctggatgttgtcccactgaattcccatgaatacaaacctgttcagcagcagcagataacccttgggtgcaagtgattcccaggtggcaaaaggcagccccatcagagatcacaggggagcaacagtaa

SEQ ID NO: 20539 - DNA, 916 bp, Macaca Mulatta
  misc_feature (1)...(916): n = A,T,C or G
gaccggtcacggcccgcacgcatcggattacccgcgggagcgcgtgtgaggcgcgtagacgtcacaggtgtgactggggggcagtcccgaagggtgtaagggaagaggaggccgcgtgcagtggataccgcgggaatctgcagggcgaacatacgcgcttccgggggcaggggagtgaaaggagggtacggtctgggcggtaactaattttgccccacggtagtgtgcagacctcgcgggcaagtattggtgaaggtggttcgaaatgcccaaagacccggtctctaattgtggataaggggagggcggattagtttaaagtttgttgggaaggggggaatatgcagggtgtcttgagtaagaagatgagtttggagtctcaggcctgtgtgtcccgtgcaaagaagcgggagggtgggtcgattagttataattgagcccgcgaacaggggcattattccctctttcgtcggcttttcactgcaccaggtaagacagcttctttggagaaagatatatttgagtatcgcacccttttcatcgaggcctaaagattaatacatctgatttaaacaaccctaaaatctcttggaaggagagagatcattcatcttcttaaataaaacctccaatttcccctaattctcagcatctctggatgtcacaaaaatgtaaaattaaacttaaaaaacattattagcattatatagctgtgtcagtgtgcttatattactttcagcatcctgagtctttctctcatcagctcaattnnnnnnnnnnnnnnnnnncttttaacagaacttcccattaaaatcttactcatgttactattcaccatatatagtatttcgtcactgaagactttattcagaaaagataaacctctttttaattggatggaaactttctacctgcc

SEQ ID NO: 20540 - DNA, 195 bp, Macaca Mulatta
  misc_feature (1)...(195): n = A,T,C or G
gcatcaagcagatcctgccacaccagatgacaacggcggggcccgtgctgggcgagggccggggctctgatgccttcttcgacgcgctggaccacgtcatagacgtgcacgggcacatcattggcatgggcctgtcgcccgacaacaggtncaggtacctgtatgtgaacagccgcgcctggcccagtggtgcgg

SEQ ID NO: 20541 - DNA, 1284 bp, Macaca Mulatta
  misc_feature (1)...(1284): n = A,T,C or G
atggaggcaatggcagccagcacttccctgcctgaccctggagactttgaccggaatgtgccccggatctgtggggtgtgtggagatcgagccacgggctttcacttcaatgctatgacctgtgaaggctgcaaaggtttcttcaggnnnnnnnnnnnnnnnnnnnnnnnnnnnnnnnnnnnnnnnnnnnnnnnnnnnnnnnnnnnnnnnnnnnnnnnnnnnnnnnnnnnnnnnnnnnnnnnnnnnnnnnnnnnnnnnnnnnnnnnnnnnnnnnnnnnnnnnnnnnnnnnnnnnnnnnnnnnnnnnnnnnnnnnnnnnnnnnnnnnnnnnnnnnnnnnnnnnnnnnnnnnnnnnnnnnnnnnnnnnnnnnnnnnnnnnnnnnnnnnnnnnnnnnnnnnnnnnnnnnnnnnnnnnnnnnnnnnnnnnnnnnnnnnnnnnnnnnnnnnnnnnnnnnnnnnnnnnnnnnnnnnnnnnnnnnnnnnnnnnnnnnnnnnnnnnnnnnnnnnnnnnnnnnnnnnnnnnnnnnnnnnnnnnnnnnnnnnnnnnnnnnnnnnnnnnnnnnnnnnnnnnnnnnnnnnnnnnnnnnnnnnnnnnnnnnnnnnnnnnnnnnnnnnnnnnnnnnnnnnnnnnnnnnnnnnnnnnnnnnnnnnnnnnnnnnnnnnnnnnnnnnnnnnnnnnnnnnnnnnnnnnnnnnnnnnnnnnnnnnnnnnnnnnnnnnnnnnnnnnnnnnnnnnnnnnnnnnnnnnnnnnnnnnnnnnnnnnnnnnnnnnnnnnnnnnnnnnnnnnnnnnnnnnnnnnnnnnnnnnnnnnnnnnnnnnnnnnnnnnnnnnnnnnnnnnnnnnnnnnnnnnnnnnnnnnnnnnnnnnnnnnnnnnnnnnnnnnnnnnnnnnnnnnnnnnnnnnnnnnnnnnnnnnnnnnnnnnnnnnnnnnnnnnnnnnnnnnnnnnnnnnnnnnnnnnnnnnnnnnnnnnnnnnnnnnnnnnnnnnnnnnnnnnnnnnnnnnnnnnnnnnnnnnnnnnnnncagatcgtcccggggtgcaggacgccgcgctgatcgaggccatccaggaccgcctgtccaacactttgcagacctacatccgttgccgccacccgcccccgggcagccacctgctctatgccaagatgatccagaagctggccgacttgcgcagcctcaatgaggagcactccaagcagtaccgctgcctctccttccagcctgaatgcagcatgaagctcacgcccctcgtgctcgaagtgtttggcaatgagatctcctga

SEQ ID NO: 20542 - DNA, 3932 bp, Macaca Mulatta
  misc_feature (1)...(3932): n = A,T,C or G
atctgtgcgtgggggatgtggtctgtctccacaaggacaacattgtcccnnnnnnnnnnnnnnnnnnnnnnnnnnnnnnnnnnnnnnnnnnnnnnnnnnnnnnnnnnnnnnnnnnnnnnnnnnnnnnnnnnnnnnnnnnnnnnnnnnnnnnnnnnnnnnnnnnnnnnnnnnnnnnnnnnnnnnnnnnnnnnnnnnnnnnnnnnnnnnnnnnnnnnnnnnnnnnnnnnnnnnnnnnnnnnnnnnnnnnnnnnnnnnnnnnnnnnnnnnnnnnnnnnnnnnnnnnnnnnnnnnnnnnnnnnnnnnnnnnnnnnnnnnnnnnnnnnnnnnnnnnnnnnnnnnnnnnnnnnnnnnnnnnnnnnnnnnnnnnnnnnnnnnnnnnnnnnnnnnnnnnnnnnnnnnnnnnnnnnnnnnnnnnnnnnnnnnnnnnnnnnnnnnnnnnnnnnnnnnnnnnnnnnnnnnnnnnnnnnnnnnnnnnnnnnnnnnnnnnnnnnnnnnnnnnnnnnnnnnnnnnnnnnnnnnnnnnnnnnnnnnnnnnnnnnnnnnnnnnnnnnnnnnnnnnnnnnnnnnnnnnnnnnnnnnnnnnnnnnnnnnnnnnnnnnnnnnnnnnnnnnnnnnnnnnnnnnnnnnnnnnnnnnnnnnnnnnnnnnnnnnnnnnnnnnnnnnnnnnnnnnnnnnnnnnnnnnnnnnnnnnnnnnnnnnnnnnnnnnnnnnnnnnnnnnnnnnnnnnnnnnnnnnnnnnnnnnnnnnnnnnnnnnnnnnnnnnnnnnnnnnnnnnnnnnnnnnnnnnnnnnnnnnnnnnnnnnnnnnnnnnnnnnnnnnnnnnnnnnnnnnnnnnnnnnnnnnnnnnnnnnnnnnnnnnnnnnnnnnnnnnnnnnnnnnnnnnnnnnnnnnnnnnnnnnnnnnnnnnnnnnnnnnnnnnnnnnnnnnnnnnnnnnnnnnnnnnnnnnnnnnnnnnnnnnnnnnnnnnnnnnnnnnnnnnnnnnnnnnnnnnnnnnnnnnnnnnnnnnnnnnnnnnnnnnnnnnnnnnnnnnnnnnnnnnnnnnnnnnnnnnnnnnnnnnnnnnnnnnnnnnnnnnnnnnnnnnnnnnnnnnnnnnnnnnnnnnnnnnnnnnnnnnnnnnnnnnnnnnnnnnnnnnnnnnnnnnnnnnnnnnnnnnnnnnnnnnnnnnnnnnnnnnnnnnnnnnnnnnnnnnnnnnnnnnnnnnnnnnnnnnnnnnnnnnnnnnnnnnnnnnnnnnnnnnnnnnnnnnnnnnnnnnnnnnnnnnnnnnnnnnnnnnnnnnnnnnnnnnnnnnnnnnnnnnnnnnnnnnnnnnnnnnnnnnnnnnnnnnnnnnnnnnnnnnnnnnnnnnnnnnnnnnnnnnnnnnnnnnnnnnnnnnnnnnnnnnnnnnnnnnnnnnnnnnnnnnnnnnnnnnnnnnnnnnnnnnnnnnnnnnnnnnnnnnnnnnnnnnnnnnnnnnnnnnnnnnnnnnnnnnnnnnnnnnnnnnnnnnnnnnnnnnnnnnnnnnnnnnnnnnnnnnnnnnnnnnnnnnnnnnnnnnnnnnnnnnnnnnnnnnnnnnnnnnnnnnnnnnnnnnnnnnnnnnnnnnnnnnnnnnnnnnnnnnnnnnnnnnnnnnnnnnnnnnnnnnnnnnnnnnnnnnnnnnnnnnnnnnnnnnnnnnnnnnnnnnnnnnnnnnnnnnnnnnnnnnnnnnnnnnnnnnnnnnnnnnnnnnnnnnnnnnnnnnnnnnnnnnnnnnnnnnnnnnnnnnnnnnnnnnnnnnnnnnnnnnnnnnnnnnnnnnnnnnnnnnnnnnnnnnnnnnnnnnnnnnnnnnnnnnnnnnnnnnnnnnnnnnnnnnnnnnnnnnnnnnnnnnnnnnnnnnnnnnnnnnnnnnnnnnnnnnnnnnnnnnnnnnnnnnnnnnnnnnnnnnnnnnnnnnnnnnnnnnnnnnnnnnnnnnnnnnnnnnnnnnnnnnnnnnnnnnnnnnnnnnnnnnnnnnnnnnnnnnnnnnnnnnnnnnnnnnnnnnnnnnnnnnnnnnnnnnnnnnnnnnnnnnnnnnnnnnnnnnnnnnnnnnnnnnnnnnnnnnnnnnnnnnnnnnnnnnnnnnnnnnnnnnnnnnnnnnnnnnnnnnnnnnnnnnnnnnnnnnnnnnnnnnnnnnnnnnnnnnnnnnnnnnnnnnnnnnnnnnnnnnnnnnnnnnnnnnnnnnnnnnnnnnnnnnnnnnnnnnnnnnnnnnnnnnnnnnnnnnnnnnnnnnnnnnnnnnnnnnnnnnnnnnnnnnnnnnnnnnnnnnnnnnnnnnnnnnnnnnnnnnnnnnnnnnnnnnnnnnnnnnnnnnnnnnnnnnnnnnnnnnnnnnnnnnnnnnnnnnnnnnnnnnnnnnnnnnnnnnnnnnnnnnnnnnnnnnnnnnnnnnnnnnnnnnnnnnnnnnnnnnnnnnnnnnnnnnnnnnnnnnnnnnnnnnnnnnnnnnnnnnnnnnnnnnnnnnnnnnnnnnnnnnnnnnnnnnnnnnnnnnnnnnnnnnnnnnnnnnnnnnnnnnnnnnnnnnnnnnnnnnnnnnnnnnnnnnnnnnnnnnnnnnnnnnnnnnnnnnnnnnnnnnnnnnnnnnnnnnnnnnnnnnnnnnnnnnnnnnnnnnnnnnnnnnnnnnnnnnnnnnnnnnnnnnnnnnnnnnnnnnnnnnnnnnnnnnnnnnnnnnnnnnnnnnnnnnnnnnnnnnnnnnnnnnnnnnnnnnnnnnnnnnnnnnnnnnnnnnnnnnnnnnnnnnnnnnnnnnnnnnnnnnnnnnnnnnnnnnnnnnnnnnnnnnnnnnnnnnnnnnnnnnnnnnnnnnnnnnnnnnnnnnnnnnnnnnnnnnnnnnnnnnnnnnnnnnnnnnnnnnnnnnnnnnnnnnnnnnnnnnnnnnnnnnnnnnnnnnnnnnnnnnnnnnnnnnnnnnnnnnnnnnnnnnnnnnnnnnnnnnnnnnnnnnnnnnnnnnnnnnnnnnnnnnnnnnnnnnnnnnnnnnnnnnnnnnnnnnnnnaggaggagaaggtggaggagggcccgagcgaggagattttcgccgtggagcccttgcctcatttataccgcgagtctcgcacccggcgttccagctatgccttctcccaccgtgagggctacgcagacctcatcactcagggcacaattctgcggaggggaccaggggtcagcagtgacatagcatctgaatccatagacccatctgatgaagaggcattttcaagcccaaaggagtcgcactggcatctcaggaagatgtccttcctggggaagaagaagcgccagtcacaggggcagatgtccttcctggaagcacagcacttccctacaagtagctcatcattttctatggatagacaatctgctttttattcagaaaaccaacttgccctccccagatatgtgcttaccggcacccacaggctctctgggtctttccaggagcaattgccaagggtacaggagaggccactgtcacccaagcagaggccatcttctcctgagaagttgccgttgaccaaggagaggtcatattctcatcaggagaaaccgccgttgcacagagaaagccagctgtcatcttctgagagccagccacagcctccggggagccagtcattgctttcaggccagctgacattggagagccagccagactcctcagaggagaagtcagcattttcgaagccctccgcaccattatggaagagctggcaaaaggagcccctcacccccaaggaggggacggtgccacttccagacaagacccacgaatctcaggtggagactctgccaccaagtctggcggaatcgtccacgtccacgagcgagcagcctatggaggtggagccctggcctgtggagaacagtcatcatcatccatggagtggctgctgggtgcccggggaggagcagcnnnnnnnnnnnnnnnnnnnnnnnnnnnnnnnn

SEQ ID NO: 20543 - DNA, 1023 bp, Macaca Mulatta
  misc_feature (1)...(1023): n = A,T,C or G
ttccatgccatggacactctccacaagaacatctatgacatctccaaggccatctcagcgctggtgccacagggcgggcccgtgctctgcagggatgagatggaggagtggtctgcgtcagaggccaaccttttcgaggaagccctggaaaaatatgggaaggatttcacggacattcagcaagattttnnnnnnnnnnnnnnnnnnnnnnnnnnnnnnnnnnnnnnnnnnnnnnnnnnnnnnnnnnnnnnnnnnnnnnnnngaaacgcttgaaagcagctgaagctgagagcaagttaaagcaagtttatattcccaactannnnnnnnnnnnnnnnnnnnnnnnnnnnnnnnnnnnnnnnnnnnnnnnnnnnnnnnnnnnnnnnnnnnnnnnnnnnnnnnnnnnnnnnnnnnnnnnnnnnnnnnnnnnnnnnnnnnccacacagtcttaccagtggtattcttggggtccccctaacatgcagtgtcgtctctgcgcatcttgttggacatattggaagaaatatggtggcttgaaaatgccaacccggttagatggagagaggccaggaccaaaccgcagtaacatnnnnnnnnnnnnnnnnnnnnnnnnnnnnnnnnnnnnnnnnnnnnnnnnnnnnnnnnnnnnnnnnnnnnnnnnnnnnnnnnnnnnnnnnnnnnnnnnnnnnnnnnnnnnnnnnnnnnnnnnnnnnnnnnnnnnnnnnnnnnnnnnnnnnnnnnnnnnnnnnnnnnnnnnnnnnnnnnnnnnnnnnnnnnnnnnnnnnnnnnnnnnnnnnnnnnnnnnnnnnnnnnnnnnnnnnnnnnnnnnnnnnnnnnnnnnnnnnnnnnnnnnnnnnnnnnnnnnnnnngagacccacccccgtcccccgaagcctgaccccgtgaagagtgtgtccagcgtgctcagcagcctgacgcccgccaaggcggcccctgtcatcaacaacggctcccccaccatcctgggcaagcggagctatgagcagcacaacggggtggacg

SEQ ID NO: 20544 - DNA, 756 bp, Macaca Mulatta
  misc_feature (1)...(756): n = A,T,C or G
ggaagaaagctttctaccataagtcagccctcacagtacatcagagaactcacacaggtgagaagccatatgaatgtaaagaatgcaggaaaacttttgctcagaagtcaaaacttactgtacatcagagaactcacacaggagaaaaaccctatgaatgtaatgaatgtggaaaaacattttgcctgaattcagttctcattatacatcagagaactcacacaggtgagaaaccatatgaatgtaataaatgtggaaaaacctttagccagaagtcaaacctcaggatgcatcagggtactcacacaggtgaaaaaccctatgagtgtagtgaatgtgggaaaaccttctaccagaaggcagttctcactaaacatcagaggactcacacaggggaaaaaccctatgagtgtaatgaatgtgggagaacttttagccagaagtcaaacctgaggatgcatcaaagtactcacacaggggagaaaccctacgaatgtaatgaatgtggaaaatccttctaccagaagtcagtgctcaccacacatcagagaactcacacaggagaaaaacccttcaagtgtaacgaatgtggaaaaacctttcgtcagagggcgaactacagcaggcatcagaaaactcacacaggacagaagccttataaatgtaatggatgtagggaaaccttctttcagaagtcagccctcactgtacatgaaagaattcacatggggggaagaaatccccatgaatgtnaga

SEQ ID NO: 20545 - DNA, 236 bp, Macaca Mulatta
gttgcgatccgggaggtagcgtccatggcaaaagaaaagcttggagtatcttgtgaagtcattgatctgaggactataataccttgggatgtggacacagtttgtaaggtttttctgttcgtgtatggtatttgcagcaaccaacatcaacagctggtttgttccctcatttttcaagtctgtgatcaaaacagggcgactgctaatcagtcacgaggctcccttgacaagcggtc

SEQ ID NO: 20546 - DNA, 141 bp, Macaca Mulatta
ttgttttgcaggccacggtgtgaacacatgaatagaagaagaaaatttcttctagcctcagtacttgctctccagaattcaagttttatatatccatcatgtcagaagtgcttctctaggataatcctggtctccaaaagg

SEQ ID NO: 20547 - DNA, 380 bp, Macaca Mulatta
gaatagaattcatttgattattcatgtgtgtttagtatctgaatttgaaactcatcttgtggaaaccaagtttcaggggacatgagttttccagcttttgtacacacatatcccatttttatcaaaacattttgtttaatccaaaaagtacatatttcttccatgttgatttaattataagatgaaccaataaagacataattcttgtgacttttggacagatttatcagtctgtgaagcgaagccagcttcaaaacatattcccaagatttgtacttatattttcaaaagggcctggccagttatataaacctgtttttgaattataatgattaattaaaattgcaagtaggcattatttccagtgtagttagtaaaat

SEQ ID NO: 20548 - DNA, 4878 bp, Macaca Mulatta
  misc_feature (1)...(4878): n = A,T,C or G
gggtcgagtgataaaggggtcctataagtttcatgccatcatcactacatttgagatgattttgactgattgtcctgagctgcggaatattccatggcgctgtgtagtcattgatgaagcccacaggctgaagaacaggaactgcaagctgttggagggactcaagatgatggacttggnnnnnnnnnnnnnnnnnnnnnnnnnnnnnnnnnnnnnnnnnnnnnnnnnnnnnnnnnnnnnnnnnnnnnnnnnnnnnnnnnnnnnnnnnnnnnnnnnnnnnnnnnnnnnnnnnnnnnnnnnnnnnnnnnnnnnnnnnnnnnnnnnnnnnnnnnnnnnnnnnnnnnnnnnnnnnnnnnnnnnnnnnnnnnnnnnnnnnnnnnnnnnnnnnnnnnnnnnnnnnnnnnnnnnnnnnnnnnnnnnnnnnnnnnnnnnnnnnnnnnnnnnnnnnnnnnnnnnnnnnnnnnnnnnnnnnnnnnnnnnnnnnnnnnnnnnnnnnnnnnnnnnnnnnnnnnnnnnnnnnnnnnnnnnnnnnnnnnnnnnnnnnnnnnnnnnnnnnnnnnnnnnnnnnnnnnnnnnnnntgctgaagagaaaattttgaagagtttaaagaaacaccccaatgcagagtctccagattttcagctccaggcaatgatccaggctgctggcaagctagtgctgattgacaagctgctgccaaaactgagggctggtggccacagggtgcttatcttttcccagatggtgcgctgcttggacatactggaagactacctcattcaaagacggnnggtacccatatgaaaggattgacggccgagtaagaggcaacctccgccaggcagctatcgacagattctccaaacctgattctgataggtttgttttcctcctgtgtacaagggcaggaggtttaggcattaacctcactgctgctgatacctgcatcatctttgattcagactggaatccccaaaatgacctccagnnnnnnnnnnnnnnnnnnnnnnnnnnnnnnnnnnnnnnnnnnnnnnnnnnnnnnnnnnnnnnnnnnnnnnnnnnnnnnnnnnnnnnnnnnnnnnnnnnnnnnnnnnnnnnnnnnnnnnnnnnnnnnnnnnnnnnnnnnnnnnnnnnnnnnnnnnnnnnnnnnnnnnnnnnnnnnnnnnnnnnnnnnnnnnnnnnnnnnnnnnnnnnnnnnnnnnnnnnnnnnnnnnnnnnnnnnnnnnnnnnnnnnnnnnnnnnnnnnnnnnnnnnnnnnnnnnnnnnnnnnnnnnnnnnnnnnnnnnnnnnnnnnnnnnnnnnnnnnnnnnnnnnnnnnnnnnnnnnnnnnnnnnnnnnnnnnnnnnnnnnnnnnnnnnnnnnnnnnnnnnnnnnnnnnnnnnnnnnnnnnnnnnnnnnnnnnnnnnnnnnnnnnnnnnnnnnnnnnnnnnnnnnnnnnnnnnnnnnnnnnnnnnnnnnnnnnnnnnnnnnnnnnnnnnnnnnnnnnnnnnnnnnnnnnnnnnnnnnnnnnnnnnnnnnnnnnnnnnnnnnnnnnnnnnnnnnnnnnnnnnnnnnnnnnnnnnnnnnnnnnnnnnnnnnnnnnnnnnnnnnnnnnnnnnnnnnnnnnnnnnnnnnnnnnnnnnnnnnnnnnnnnnnnnnnnnnnnnnnnnnnnnnnnnnnnnnnnnnnnnnnnnnnnnnnnnnnnnnnnnnnnnnngccagctcactgagcaagatgtcgaaactatctgcagaaccatcctggtatactgtcttaatcattacaaaggcgatgagaatatcaaaagcttcatctgggatctgatcacacccacagcggatggccagactcgagccttggtcaaccattcnnnnnnnnnnnnnnnnnnnnnnnnnnnnnnnnnnnnnnnnnnnnnnnnnnnnnnnnnnnnnnnnnnnnnnnnnnnnnnnnnnnnnnnnnnnnnnnnnnnnnnnnnnnnnnnnnnnnnnnnnnnnnnnnnnnnnnnnnnnnnnnnnnnnnnnnnnnnnnnnnngtcctgctgcgtgtccgcatgctgtactacctaagacaagaagtgataggagaccaggcagataagatcttnnnnnnnnnnnnnnnnagtgaagccgatgtgtggatccctgaacctttccatgctgaagttcctgcagattggtgggataaggaagcagacaaatccctcttaattggagtgttcaaacatgnnnnnnnnnnnnnnnnnnnnnnnnnnnnnnnnnnnnnnnnnnnnnnnnnnnnnnnnnnnnnnnnnnnnnnnnnnnnnnnnnnnnnnnnnnnnnnnnnnnnnnnnnnnnnnnnnnnnnnnnnnnnnnnngggagaatttgatagagaagatgaagacccagaatataaaccaaccagaccaccattcaaagatgaaatagatgnnnnnnnnnnnnnnnnnnnnnnnnnnnnnnnnnnnnnnnnnnnnnnnnnnnnnncaggcaagcacagtggagagtaatgctgagttaggccaacttaactggcctaacacttcaacccctgactacacgtctgcgccggctcattactgcctatcagcgcagctataaaaggcaacagatgaggcaagaggccctaatgaagactgaccggcgcagacggcggcctcgagaggaagtgagagctctggaagcggaaagggaagctattatatctgagaagcggcaaaagtnnnnnnnnnnnnnnnnnnnnnnnnnnnnnnnnnnnnnnnnnnnnnnnnnnnnnnnnnnnnnnnnnnnnnnnnnnnnnnnnnnnnnnnnnnnnnnnnnnnnnnnnnnnnnnnnnnnnnnnnnnnnnnnnnnnnnnnnnnnnnnnnnnnnnnnnnnnnnnnnnnnnnnnnnnnnnnnnnnnnnnnnnnnnnnnnnnnnnnnnnnnnnnnnnnnnnnnnnnnnnnnnnnnnnnnnnnnnnnnnnnnnnnnnnnnnnnnnnnnnnnnnnnnnnnnnnnnnnnnnnnnnnnnnnnnnnnnnnnnnnnnnnnnnnnnnnnnnnnnnnnnnnnnnnnnnnnnnnnnnnnnnnnnnnnnnnnnnnnnnnnnnnnnnnnnnnnnnnnnnnnnnnnnnnnnnnnnnnnnnnnnnnnnnnnnnnnnnnnnnnnnnnnnnnnnnnnnnnnnnnnnnnnnnnnnnnnnnnnnnnnnnnnnnnnnnnnnnnnnnnnnnnnnnnnnnnnnnnnnnnnnnnnnnnnnnnnnnnnnnnnnnnnnnnnnnnnnnnnnnnnnnnnnnnnnnnnnnnnnnnnnnnnnnnnnnnnnnnnnnnnnnnnnnnnnnnnnnnnnnnnnnnnnnnnnnnnnnnnnnnnnnnnnnnnnnnnnnnnnnnnnnnnnnnnnnnnnnnnnnnnnnnnnnnnnnnnnnnnnnnnnnnnnnnnnnnnnnnnnnnnnnnnnnnnnnnnnnnnnnnnnnnnnnnnnnnnnnnnnnnnnnnnnnnnnnnnnnnnnnnnnnnnnnnnnnnnnnnnnnnnnnnnnnnnnnnnnnnnnnnnnnnnnnnnnnnnnnnnnnnnnnnnnnnnnnnnnnnnnnnnnnnnnnnnnnnnnnnnnnnnnnnnnnnnnnnnnnnnnnnnnnnnnnnnnnnnnnnnnnnnnnnnnnnnnnnnnnnnnnnnnnnnnnnnnnnnnnnnnnnnnnnnnnnnnnnnnnnnnnnnnnnnnnnnnnnnnnnnnnnnnnnnnnnnnnnnnnnnnnnnnnnnnnnnnnnnnnnnnnnnnnnnnnnnnnnnnnnnnnnnnnnnnnnnnnnnnnnnnnnnnnnnnnnnnnnnnnnnnnnnnnnnnnnnnnnnnnnnnnnnnnnnnnnnnnnnnnnnnnnnnnnnnnnnnnnnnnnnnnnnnnnnnnnnnnnnnnnnnnnnnnnnnnnnnnnnnnnnnnnnnnnnnnnnnnnnnnnnnnnnnnnnnnnnnnnnnnnnnnnnnnnnnnnnnnnnnnnnnnnnnnnnnnnnnnnnnnnnnnnnnnnnnnnnnnnnnnnnnnnnnnnnnnnnnnnnnnnnnnnnnnnnnnnnnnnnnnnnnnnnnnnnnnnnnnnnnnnnnnnnnnnnnnnnnnnnnnnnnnnnnnnnnnnnnnnnnnnnnnnnnnnnnnnnnnnnnnnnnnnnnnnnnnnnnnnnnnnnnnnnnnnnnnnnnnnnnnnnnnnnnnnnnnnnnnnnnnnnnnnnnnnnnnnnnnnnnnnnnnnnnnnnnnnnnnnnnnnnnnnnnnnnnnnnnnnnnnnnnnnnnnnnnnnnnnnnnnnnnnnnnnnnnnnnnnnnnnnnnnnnnnnnnnnnnnnnnnnnnnnnnnnnnnnnnnnnnnnnnnnnnnnnnnnnnnnnnnnnnnnnnnnnnnnnnnnnnnnnnnnnnnnnnnnnnnnnnnnnnnnnnnnnnnnnnnnnnnnnnnnnnnnnnnnnnnnnnnnnnnnnnnnnnnnnnnnnnnnnnnnnnnnnnnnnnnnnnnnnnnnnnnnnnnnnnnnnnnnnnnnnnnnnnnnnnnnnnnnnnnnnnnnnnnnnnnnnnnnnnnnnnnnnnnnnnnnnnnnnnnnnnnnnnnnnnnnnnnnnnnnnnnnnnnnnnnnnnnnnnnnnnnnnnnnnnnnnnnnnnnnnnnnnnnnnnnnnnnnnnnnnnnnnnnnnnnnnnnnnnnnnnnnnnnnnnnnagaatgcagatgtgctattttcctcatttcagaaaccgaaacagaaacgacatagatgtcgaaaccctaataaattggatataaacactttgacgggagaagaaagggtgcctgttgtcaataaacgaaatgggaagaagnagatgggtggagctatggcgcctccgatgaaggatctacccaggtggctagaagaaaatcctgaatttgcagttgctccagactggactgatatagttaagcaatct

SEQ ID NO: 20549 - DNA, 1432 bp, Macaca Mulatta
  misc_feature (1)...(1432): n = A,T,C or G
catgttttgtttttgttactgcctggatgaggcacttctgtcaattttttcaagaccttagttccagcagcagaatggaaaaatctttgaagcccaggctgatgcttgaagtagctgtggagggagtgttcaaaatactgctgacgcaggcaccttcttggcgctggagagtcaaagtcatctcccttcattagctgctctaagcatcgaaaattagaagtctttgggtggaattgtacaagagtccctttgaagattataatcttgactcagtttgtataaactgtcaaattttcaaataataggtagggggctttcactaggaaaatcatgtgctcagagaggagatgacttgtagtcaggttcagaagttagagtatttggactttggtaccactgtcttccagggtagctctaagttttgatgtgtgggcttctgagtttacattctgaaagtaaatatacttttgaacatccccactaggttcttttccattgtcaataaggagcatcagccaatgaatctgtttcaggtttccattctgcagaactcctccagaacatgtactagtggcaagacagtggttcttaggatcttttcccttaacttttccttgaatgttcttgggtggttcctaagggaaaaggaagcacatgatcatgggaatgctagcccagaacaaaaagaaatcttgtcttaccatggtggtttataggagnnnnnnnnnnnnnnnnnnnnnnnnnnnnnnnnnnnnnnnnnnnnnnnnnnnnnnnnnnnnnnnnnnnnnnnnnnnnnnnnnnnnnnnnnnnnnnnnnnnnnnnnnnnnnnnnnnnnnnnnnnnnnnnnnnnnnnnnnnnnnnnnnnnnnnnnnnnnnnnnnnnnnnnnnnnnnnnnnnnnnnnnnnnnnnnnnnnnnnnnnnnnnnnnnnnnnnnnnnnnnnnnnnnnnnnnnnnnnnnnnnnnnnnnnnnnnnnnnnnnnnnnnnnnnnnnnnnnnnnnnnnnnnnnnnnnnnnnnnnnnnnnnnnnnnnnnnnnnnnnnnnnnnnnnnnnnaagcaagtgcttttgtatgtgtggtgaatgtgtgttcatgcctgtatgtgtctacacacagatgacaaattatatttgaaattgttggaaaataaattcagatcaaaatatctttcaggccccttacctagaaatctatcttaaaacctgggtatgttcctaaggtcatttctttgcttatgctaaattaattacaattatgaatggaggatattctactgtacttttttaaaaagaaactatttttgtgtttgaaagtgaaaccaacatgcagatctatagcagagtccttattcttttcataaatctttttactttggctacaaatagatgatggtatgattctattatatattttatataaaatccatccaaattaa

SEQ ID NO: 20550 - DNA, 154 bp, Macaca Mulatta
caatgaatcaaggtgtgatcttgagttgcaaacgactgtatagatggaagcaacttgaagagagtcttgtaatatttgaagaaagtgatgatgagcaagagaaaggagataaaggagtttccaaaattaaaatgtacaatataaaaagtgcaat

SEQ ID NO: 20551 - DNA, 906 bp, Macaca Mulatta
  misc_feature (1)...(906): n = A,T,C or G
aggtgtcgtccttggagaagatggaagcggagaggcggccggcgccgggctcgccctccgagggcctgtttgcggacgggcacctgatcttgtggacgctgtgctcggtcttgcnnnnnnnnnnnnnnnnnnnnnnnnnnnnnnnnnnnnnnnnnnnnnnnnnnnnnnnnnnnnnnnnnnnnnnnnnnnnnnnnnnnnnnnnnnnnnnnnnnnnnnnnnnnnnnnnnnnnnnnnnnnnnnnnnnnnnnnnnnnnnnnnnnnnnnnnnnnnnnnnnnnnnnnnnnnnnnnnnnnnnnnnnnnnnnnnnnnnnnnnnnnnnnnnnnnnnnnnnnnnnnnnnnnnnnnnnnnnnnnnnnnnnnnnnnnnnnnnnnnnnnnnnnnnnnnnnnnnnnnnnnnnnnnnnnnnnnnnnnnnnnnnnnnnnnnnnnnnnnnnnnnnnnnnnnnnnnnnnnnnnnnnnnnnnnnnnnnnnnnnnnnnnnnnnnnnnnnnnnnnnnnnnnnnnnnnnnnnnnnnnnnnnnnnnnnnnnnnnnnnnnnnnnnnnnnnnnnnnnnnnnnnnnnnnnnnnnnnnnnnnnnnnnnnnnnnnnnnnnnnnnnnnnnnnnnnnnnnnnnnnnnnnnnnnnnnnnnnnnnnnnnnnnnnctagcctctaagcttggaaagcaatggacaccattaataatcctggccaactctcgtagtggaactaatatgggagaaggactgttgggagaatttaggatcttgttgaatccagtccaggtnnnngatgtaactaaaactcctcctatcaaagccctacaactctgtactcttcttccatattattcagctcgagtacttgtttgtggaggggatgggactgtagggtgggtcctggatgcagttgatgacatggaaattaag

SEQ ID NO: 20552 - DNA, 683 bp, Macaca Mulatta
  misc_feature (1)...(683): n = A,T,C or G
gggagcaggtttctatttccggtgtattgtagcatcacgtttccggagctcggcgttgctcttgtgttctcgcgagaggcgggaaagggcgcagggtttgaaacatggcggacgacgtagaccagcaacaaactaccaacactgtagaggagcccctggatcttatcaggctcagcctagatgagcgaatttatgtgaagatgagaaatgaccgagagcttcgaggcagattacatgcttatgatcagcatttaaatatgatcttgggagacgtggaagaaactgtgactactatagaaattgatgaagaaacatatgaagagatatataaatcaacgaaacggaatattccaatgctctttgtgcggggagatggcgttgtcctggttgcccctccattgagagttggctgaaacaaagaatttgtcctgtatggaaaacaggagactttgtacagtggcctttctaaatgtacaaaacattcaaaagagaaacctgcatacattttgatactaagaaataattctggggattcttccacgcctgaaatgagttgatttgcagataactcacaacttcttaagtgaaatggtattttcatttttcttaagctcttccaataaatatgacccaccaagatgcttnnnnnannnnnnannaannannnnannnncctgtcggcc

SEQ ID NO: 20553 - DNA, 1215 bp, Macaca Mulatta
atgagtgactccaaagaaccaagactgcagcagctggacctcctggaggaggaacagctgggaggcgttggattccgacagactcgaggctacaagagcttagcagggtgtcttggccatggccccctggtgctgcaactcctctccttcacgctcttggctgggctccttgtccaagtgtccaaagtccctagctccctaagtcagggacaatccaaacaagatgcgatctaccagaatctgacccagcttaaagttgcagtcagtgagctctcagagaaatccaagcagcaggagatctaccaggagctgacccggctgaaggctgcagtggatgagcttcctgagaaatccaagcagcaggagatctacgaggagctgacccggctcaaggctgcagtgggtgagcttccagagaaatccaagctgcaggagatctaccaggagctgacctggctgaaggctgcagtgggtgagcttccagagaaatctaagatgcaggagatctaccaggagctatcccggctgaaggctgcagtgggtgatctcccagagaaatccaagcagcaggagatctaccaggagctgacccggctgaaggctgcagtgggtgatctcccagagaaatccaagcagcaggagatctaccaaaagctgacccagctgaaggctgcagtcgatgggttgccagacaggtccaagcaacaggagatctaccaggagctgatccagctgaaggctgcagtggaacgcctgtgccacccctgtccctgggagtggacattcttccaaggaaactgttatttcatgtctaactcccagcggaactggcacgactccatcaccgcctgccaggaggtgggggcccagctcgtcgtaatcaaaagtgctgaggagcagaacttcctgcagctgcagtcttccagaagtaaccgcttcacctggatgggactttcagacctaaatcacgaaggcacatggcaatgggtggatggctcacctctgttgcccagcttcaagcagtattggaacaaaggagagcccaacaatattggggaggaagactgtgcggaatttagtggcaatggctggaacgatgacaaatgcaatcttgccaaattctggatctgcaaaaagtcagcggcctcctgctccggggatgaagaacggttgctctccccagcccctaccactccaaacccccctcctgcgtag

SEQ ID NO: 20554 - DNA, 2169 bp, Macaca Mulatta
  misc_feature (1)...(2169): n = A,T,C or G
gaggacccagatttttcttgtctaatttatactttcacccatgttgcagttaacaccagagaaggattgtgactgttgagcacagccactacccttgttggcactaaatttagaaatagggtgagaaggtttaaaagcctgtaaacacccatcttgattttattttcattccttttggttctctgtgtaataatagtaggctacatagtgacattccagttccaagaaggtacatcctgtccgtttgttaattgctttgattactaggaggatttttgttcagttttgtttttaaatgtcttgctgatctagttcttttagatggaataaccttccagtcctttagagagtggaactagttcatataacccagcttcagtatcacaagtagaagcccgcacatcttttcatttctccaagaggagtgtggggaaggttcccatgaccggctgggcagtgaggatttcactaggcattctaatgtgaaatcagtgtagattgctcttaaggaggcttcatgagatgtatagcatttgaatgtctaatgataatgagtgtcattagaatccaagctttgaaaatttctgattaatgctcatatatttnnnnnnnnnnnnnnnnnnnnnnnnnnnnnnnnnnnnnnnnnnnnnnnnnnnnnnnnnnnnnnnnnnnnnnnnnnnnnnnnnnnnnnnnnnnnnnnnnnnnnnnnnnnnnnnnnnnnnnnnnnnnnnnnnnnnnnnnnnnnnnnnnnnnnnnnnnnnnnnnnnnnnnnnnnnnnnnnnnnnnnnnnnnnnnnnnnnnnnnnnnnnnnnnnnnnnnnnnnnnnnnnnnnnnnnnnnnnnnnnnnnnnnnnnnnnnnnnnnnnnnnnnnnnnnnnnnnnnnnnnnnnnnnnnnnnnnnnnnnnnnnnnnnnnnnnnnnnnnnnnnnnnnnnnnnnnnnnnnnnnnnnnnnnnnnnnnnnnnnnnnnnnnnnnnnnnnnnnnnnnnnnnnnnnnnnnnnnnnnnnnnnnnnnnnnnnnnnnnnnnnnnnnnnnnnnnnnnnnnnnnnnnnnnnnnnnnnnnnnnnnnnnnnnnnnnnnnnnnnnnnnnnnnnnnnnnnnnnnnnnnnnnnnnnnnnnnnnnnnnnnnnnnnnnnnnnnnnnnnnnnnnnnnnnnnnnnnnnnnnnnnnnnnnnnnnnnnnnnnnnnnnnnnnnnnnnnnnnnnnnnnnnnnnnnnnnnnnnnnnnnnnnnnnnnnnnnnnnnnnnnnnnnnnnnnnnnnnnnnnnnnnnnnnnnnnnnnnnnnnnnnnnnnnnnnnnnnnnnnnnnnnnnnnnnnnnnnnnnnnnnnnnnnnnnnnnnnnnnnnnnnnnnnnnnnnnnnnnnnnnnnnnnnnnnnnnnnnnnnnnnnnnnnnnnnnnnnnnnnnnnnnnnnnnnnnnnnnnnnnnnnnnnnnnnnnnnnnnnnnnnnnnnnnnnnnnnnnnnnnnnnnnnnnnnnnnnnnnnnnnnnnnnnnnnnnnnnnnnnnnnnnnnnnnnnnnnnnnnnnnnnnnnnnnnnnnnnnnnnnnnnnnnnnnnnnnnnnnnnnnnnnnnnnnnnnnnnnnnnnnnnnnnnnnnnnnnnnnnnnnnnnnnnnnnnnnnnnnnnnnnnnnnnnnnnnnnnnnnnnnnnnnnnnnnnnnnnnnnnnnnnnnnnnnnnnnnnnnnnnnnnnnnnnnnnnnnnnnnnnnnnnnnnngaagttgtcagatgacctgggcttacaagcctgattcaaacaggctgtcagtctcctctctccccttaataccgtgcagcccaaacccctaggactcttgaacatccgggcagttttgtgctttgagccactttttgacaaaaatggctccatttttccacagcgtggttttcttaaactagttcaatggttcaatgttttatagtctcatagtagcagtgttgctttctaagctataacagtcgactttattcttctactctgaaaaatcttgacttgtttgagtgtatataatatatataaagggagccttaatggattggttttcataatttaatattttttgtatttgctcttgtataattgtttttaacggaaagtattaaagaattgagggtggaattcttagaaccaaagttattcttaataaaaatcaccacatgcttggaccatgca

SEQ ID NO: 20555 - DNA, 226 bp, Macaca Mulatta
  misc_feature (1)...(226): n = A,T,C or G
atcaagaagcagtacaaccccatcctgggggagaccttccgctgctgctgttccacccccacactgacagccgtacattctacatagcagagcaggtaagagcacctccgctgcacccggcctgggnggtgtcccaccaccctcccgtgtctgccttccacgtcagcaaccggaaggacggcttctgcatcagtggcagcatcacagccaagtccaggttctatgg

SEQ ID NO: 20556 - DNA, 890 bp, Macaca Mulatta
  misc_feature (1)...(890): n = A,T,C or G
gggcggtggcatggaacgtagtggaaagagcagaaatttggatctcagttcgcgcccaccccgcaggcgtcccccgccagccgggcctactgtgagtgagacaagctccccttactttgcgcgcctcacctggcgcgtggggcgaggtcggccgccctctgctgcagaacctccggaaggggtgtcctctgccctgtgcccctggccggggctgtggtccctccaggccgtcaaggggatgctgaggccggtccccagggagcatgacttggctggtccggaggagccctgagggcatgggcaatcttggctcacgcaatctccgcttcccgggtcaagcgagtctcctgcctcagcctcatgagtagctgggactacagnnnnnnnnnnnnnnnnnnnnnnnnnacagagcgggatgccaccagctggtccaaagggaagttccaggagctcctggtgggcatcgttgtggagaatgacactggccgcggcgagatcagcgagttgaagcaggtggaaggggaggcttcgtgcagtagtcgcaaaggaaagctgattttcttctatgagtggtacatcaaactgggctggaaaggnaggcatcgttaaagaatctggagtgaagcacaagggattgattgaaatacccaatctttctgaggaaaatgaagtagatgacactgagnnnnnnnnnnnnnnnnnnnnnnnnnnnnnnnnnnnnnnnnnnnnnnnnnnnnnnnnnnnnnnnnnnnnnnnnnnnnnnnnnnnnnnncaggttcaggcctcatctccagtggcactgggtgtaaggattcccactgtggctcttcacatgatggaactgtttgacacaactgtagagcagctgtatagcatcttcactgtgaagg

SEQ ID NO: 20557 - DNA, 4818 bp, Macaca Mulatta
  misc_feature (1)...(4818): n = A,T,C or G
gccatggacgcatcatatgatggtactgaggtaactgtcgtgatggaggaaattgaggaagcctattgttacacctctcctgggccacccaagaagaagaaaaagtataaaatacatggagagaaggccaagaaacccaggnnnnnnnnnnnnnnnnnnnnnnnnnnnnnnnnnnnnnnnnnnnnnnnnnnnnnnnnnnnnnnnnnnnnnnnnnnnnnnnnnnnnnnnnnnnnnnnnnnnnnnnnnnnnnnnnnnnnnnnnnnnnnnnnnnnnnnnnnnnnnnnnnnnnnnnnnnnnnnnnnnnnnnnnnnnnnnnnnnnnnnnnnnnnnnnnnnnnnnnnnnnnnnnnnnnnnnnnnnnnnnnnnnnnnnnnnnnnnnnnnnnnnnnnnnnnnnnnnnnnnnnnnnnnnnnnnnnnnnnnnnnnnnnnnnnnnnnnnnnnnnnnnnnnnnnnnnnnnnnnnnnnnnnnnnnnnnnnnnnnnnnnnnnnnnnnnnnnnnnnnnnnnnnnnnnnnnnnnnnnnnnnnnnnnnnnnnnnnnnnnnnnnnnnnnnnnnnnnnnnnnnnnnnnnnnnnnnnnnnnnnnnnnnnnnnnnnnnnnnnnnnnnnnnnnnnnnnnnnnnnnnnnnnnnnnnnnnnnnnnnnnnnnnnnnnnnnnnnnnnnnnnnnnnnnnnnnnnnnnnnnnnnnnnnnnnnnnnnnnnnnnnnnnnnnnnnnnnnnnnnnnnnnnnnnnnnnnnnnnnnnnnnnnnnnnnnnnnnnnnnnnnnnnnnnnnnnnnnnnnnnnnnnnnnnnnnnnnnnnnnnnnnnnnnnnnnnnnnnnnnnnnnnnnnnnnnnnnnnnnnnnnnnnnnnnnnnnnnnnnnnnnnnnnnnnnnnnnnnnnnnnnnnnnnnnnnnnnnnnnnnnnnnnnnnnnnnnnnnnnnnnnnnnnnnnnnnnnnnnnnnnnnnnnnnnnnnnnnnnnnnnnnnnnnnnnnnnnnnnnnnnnnnnnnnnnnnnnnnnnnnnnnnnnnnnnnnnnnnnnnnnnnnnnnnnnnnnnnnnnnnnnnnnnnnnnnnnnnnnnnnnnnnnnnnnnnnnnnnnnnnnnnnnnnnnnnnnnnnnnnnnnnnnnnnnnnnnnnnnnnnnnnnnnnnnnnnnnnnnnnnnnnnnnnnnnnnnnnnnnnnnnnnnnnnnnnnnnnnnnnnnnnnnnnnnnnnnnnnnnnnnnnnnnnnnnnnnnnnnnnnnnnnnnnnnnnnnnnnnnnnnnnnnnnnnnnnnnnnnnnnnnnnnnnnnnnnnnnnnnnnnnnnnnnnnnnnnnnnnnnnnnnnnnnnnnnnnnnnnnnnnnnnnnnnnnnnnnnnnnnnnnnnnnnnnnnnnnnnnnnnnnnnnnnnnnnnnnnnnnnnnnnnnnnnnnnnnnnnnnnnnnnnnnnnnnnnnnnnnnnnnnnnnnnnnnnnnnnnnnnnnnnnnnnnnnnnnnnnnnnnnnntgacctgcttacccctgggtccagagctccagagcttaaaggcagagcacggggcaagccctcattactggctgcagcaagacccatgagagcgattttgccagccccggttaatgtggggcgaggcagcagcatgggactgcccagggccaggcaggccttttccctgagtggtaannnnnnnnnnnnnnnnnnnnnnnnnnnnnnnnnnnnnnnnnnnnnnnnnnnnnnnnnnnnnnnnnnnnnnnnnnnnnnnnnnnnnnnnnnnnnnnnnnnnnnnnnnnnnnnnnnnnnnnnnnnnnnnnnnnnnnnnnnnnnnnnnnnnnnnnnnnnnnnnnnnnnnnnnnnnnnnnnnnnnnnnnnnnnnnnnnnnnnnnnnnnnnnnnnnnnnnnnnnnnnnnnnnnnnnnnnnnnnnnnnnnnnnnnnnnnnnnnnnnnnnnnnnnnnnnnnnnnnnnnnnnnnnnnnnnnnnnnnnnnnnnnnnnnnnnnnnnnnnnnnnnnnnnnnnnnnnnnnnnnnnnnnnnnnnnnnnnnnnnnnnnnnnnnnnnnnnnnnnnnnnnnnnnnnnnnnnnnnnnnnnnnnnnnnnnnnnnnnnnnnnnnnnnnnnnnnnnnnnnnnnnnnnnnnnnnnnnnnnnnnnnnnnnnnnnnnnnnnnnnnnnnnnnnnnnnnnnnnnnnnnnnnnnnnnnnnnnnnnnnnnnnnnnnnnnnnnnnnnnnnnnnnnnnnnnnnnnnnnnnnnnnnnnnnnnnnnnnnnnnnnnnnnnnnnnnnnnnnnnnnnnnnnnnnnnnnnnnnnnnnnnnnnnnnnnnnnnnnnnnnnnnnnnnnnnnnnnnnnnnnnnnnnnnnnnnnnnnnnnnnnnnnnnnnnnnnnnnnnnnnnnnnnnnnnnnnnnnnnnnnnnnnnnnnnnnnnnnnnnnnnnnnnnnnnnnnnnnnnnnnnnnnnnncaggtctctttaatgtggggaacaagctgctggtaagcctggacttgctttttgcaatcagaaaccagatcaagctcggagaggaccccagagtgtctgtcagtgttgttctgaagtcagtgcaggagcagacannnnnnnnnnnnnnnnnnnnnnnnnnnnnnnnnnnnnnnnnnnnnnnnnnnnnnnnnnnnnnnnnnnnnnnnnnnnnnnnnnnnnnnnnnnnnnnnnnnnnnnnnnnnnnnnnnnnnnnnnnnnnnnnnnnnnnnnnnnnnnnnnnnnnnnnnnnnnnnnnnnnnnnnnnnnnnnnnnnnnnnnnnnnnnnnnnnnnnnnnnnnnnnnnnnnnnnnnnnnnnnnnnnnnnnnnnnnnnnnnnnnnnnnnnnnnnnnnnnnnnnnnnnnnnnnnnnnnnnnnnnnnnnnnnnnnnnnnnnnnnnnnnnnnnnnnnnnnnnnnnnnnnnnnnnnnnnnnnnnnnnnnnnnnnnnnnnnnnnnnnnnnnnnnnnnnnnnnnnnnnnnnnnnnnnnnnnnnnnnnnnnnnnnnnnnnnnnnnnnnnnnnnnnnnnnnnnnnnnnnnnnnnnnnnnnnnnnnnnnnnnnnnnnnnnnnnnnnnnnnnnnnnnnnnnnnnnnnnnnnnnnnnnnnnnnnnnnnnnnnnnnnnnnnnnnnnnnnggaccagctctgcttctccttgttggccctctatgaatctgtacagaatggagctagagctatgcagcccccacctcacttcacaggtggtaaaatctacaaggtgtgcccccatcaggtnnnnnnnnnnnnnnnnnnnnnnnnnnnnnnnnnnnnnnnnnnnnnnnnnnnnnnnnnnnnnnnnnnnnnnnnnnnnnnnnnnnnnnnnnnnnnnnnnnnnnnnnnnnnnnnnnnnnnnnnnnnnnnnnnnnnnnnnnnnnnnnnnnnnnnnnnnnnnnnnnnnnnnnnnnnnnnnnnnnnnnnnnnnnnnnnnnnnnnnnnnnnnnnnnnnnnnnnnnnnnnnnnnnnnnnnnnnnnnnnnnnnnnnnnnnnnnnnnnnnnnnnnnnnnnnnnnnnnnnnnnnnnnnnnnnnnnnnnnnnnnnnnnnnnnnnnnnnnnnnnnnnnnnnnnnnnnnnnnnnnnnnnnnnnnnnnnnnnnnnnnnnnnnnnnnnnnnnnnnnnnnnnnnnnnnnnnnnnnnnnnnnnnnnnnnnnnnnnnnnnnnnnnnnnnnnnnnnnnnnnnnnnnnnnnnnnnnnnnnnnnnnnnnnnnnnnnnnnnnnnnnnnnnnnnnnnnnnnnnnnnnnnnnnnnnnnnnnnnnnnnnnnnnnnnnnnnnnnnnnnnnnnnnnnnnnnnnnnnnnnnnnnnnnnnnnnnnnnnnnnnnnnnnnnnnnnnnnnnnnnnnnnnnnnnnnnnnnnnnnnnnnnnnnnnnnnnnnnnnnnnnnnnnnnnnnnnnnnnnnnnnnnnnnnnnnnnnnnnnnnnnnnnnnnnnnnnnnnnnnnnnnnnnnnnnnnnnnnnnnnnnnnnnnnnnnnnnnnnnnnnnnnnnnnnnnnnnnnnnnnnnnnnnnnnnnnnnnnnnnnnnnnnnnnnnnnnnnnnnnnnnnnnnnnnnnnnnnnnnnnnnnnnnnnnnnnnnnnnnnnnnnnnnnnnnnnnnnnnnnnnnnnnnnnnnnnnnnnnnnnnnnnnnnnnnnnnnnnnnnnnnnnnnnnnnnnnnnnnnnnnnnnnnnnnnnnnnnnnnnnnnnnnnnnnnnnnnnnnnnnnnnnnnnnnnnnnnnnnnnnnnnnnnnnnnnnnnnnnnnnnnnnnnnnnnnnnnnnnnnnnnnnnnnnnnnnnnnnnnnnnnnnnnnnnnnnnnnnnnnnnnnnnnnnnnnnnnnnnnnnnnnnnnnnnnnnnnnnnnnnnnnnnnnnnnnnnnnnnnnnnnnnnnnnnnnnnnnnnnnnnnnnnnnnnnnnnnnnnnnnnnnnnnnnnnnnnnnnnnnnnnnnnnnnnnnnnnnnnnnnnnnnnnnnnnnnnnnnnnnnnnnnnnnnnnnnnnnnnnnnnnnnnnnnnnnnnnnnnnnnnnnnnnnnnnnnnnnnnnnnnnnnnnnnnnnnnnnnnnnnaagctttgaggaagagcatccccttcctcctttccctggccactgctgctgcaaccaacatgctctctgggcctgggaccctctccacagatgggatgtggtccctggtcataacataacctggcagcagtaggaaaaactccctttgtgaaagggaagcagacggggcgagaaggaaacagtaggactggctcaagtgcccaaggtttgcttaaggcctgggaattggccatttgttaatttattgagaagagtggagtgggtggctttttccccctccctcttcccccaacaagaataaagtttattaaatt

SEQ ID NO: 20558 - DNA, 148 bp, Macaca Mulatta
ttttgtccgcctgccgccgccgtcccagatattaatcacggagttccagggaagaggaacttgtgatatgggggagtcgggaggtgttgccggcaccatggagtcaccttttagcccgggactctctcacaggctggatgaagattgg

SEQ ID NO: 20559 - DNA, 83 bp, Macaca Mulatta
ggaactccttggacaaggctgcgtgttccaggagcggtacagctgggaacaaccgggatggtttcatccccgaggcccagctc

SEQ ID NO: 20560 - DNA, 275 bp, Macaca Mulatta
cccagaaagcaaggaggggctgatccaggcctgggtgctccacctggcaagtatatctctgttcttcccctgggggtacagtcaaggttatccagccctggtaggtcgcatccccattgggcaatacgtctttaggttcgacctccttggcatccattgactgcctatccttcagccacttcatggtgatgttctgggggtagtagttcagggcccgacaccgtagagtggtcactgaagaggtcacatgatgtgtcaccttcaccaaaggaggc

SEQ ID NO: 20561 - DNA, 447 bp, Macaca Mulatta
  misc_feature (1)...(447): n = A,T,C or G
gggtgtgagccgcgttgccccgggcagcgccgccgaggggaagccgcgcggccggcctgccggctagggtnnnnnnnnnnnnnnnnnnnnnnnnnnnnnnnnnnnnnnnnnnnnnnnnnnnnnnnnnnnnnnnnnnnnnnnnnnnnnnnnnnnnnnnnnnnnnnnnnnnnnnnnnnnnnnnnnnnnnnnnnnnnnnnnnnnnnnnnnnnnnnnnnnnnnnnnnnnnnnnnnnnnnnnnnnnnnnnnnnnnnnnnnnnnnnnnnnnnnnnnnnnnnnnnnnnnnnnnnnnnnnnnnnnnnnnnnnnnnnnnnnnnnnnnnnnnnnnnnnnnnnnnnnnnnnnnnnnnnnnnnnnnnnntgggagctggtgaggtggccaactttgctgcgtatgcgtttgcaccagccacgctagtgactccactcggagctctcagtgtactagtaa

SEQ ID NO: 20562 - DNA, 3117 bp, Macaca Mulatta
  misc_feature (1)...(3117): n = A,T,C or G
atggactctactgcctgcttgaagtccttgctcctgactatcagtcagtacaaagccgtgaagtcagaggcgaacgccactcagcttttgcggcacttggaggnnnaggtaatttctggacagaaactcacacgactatttacatcaaatcagatattaacaagtgaatgcttgagttgctntatgtagctacttgaagaccccaacatannnnnnnnnnnnnnnnnnnnnnnnnnnnnnnnnnnnnnnnnnnnnnntagacaatgaaaccagagattgtcttcagaatacatataatctgaatagtgtgctggcaggagtggtttgtcggagcagccacactgattcggtgtttttgcagnnnnnnnnnnnnnnnnnnnnnnnnnnnnnnnnnnnnnnnnnnnnnnnnnnnnnnnnnnnnnnnnnnnnnnnnnnnnnnnnnnnnnnnnnnnnnnntcaatcttctgaagatgagttaaaaatgccttgtctaggattattggcaaatctttgtcggcacaatctttctgttcaaacacacataaagacattnnnnnnnnnnnnnnnnnnnnnnnnnnnnnnnnnnnnnnnnnnnnnnnnnnnnnnnnnnnnnnnnnnnnnnnnnnnnnnnnnnnnnnnnnnnnnnnnnnnnnnnnnnnnnnnnnnnnnnnnnnnnnnnnnnnnnnnnnnnnnnnnnnnnnnnnnnnnnnnnnnnnnnnnnnnnnnnnnnnnnnnnnnnnnnnnnnnnnnnnnnnnnnnnnnnnnnnnnnnnnnnnnnnnnnnnnnnnnnnnnnnnnnnnnnnnnnnnnnnnnnnnnnnnnnnnnnnnnnnnnnnnnnnnnnnnnnnnnnnnnnnnnnnnnnnnnnnnnnnnnnnnnnnnnnnnnnnnnnnnnnnnnnnnnnnnnnnnnnnnnnnnnnnnnnnnnnnnnnnnnnnnnnnnnnnnnnnnnnnnnnnnnnnnnnnnnnnnnnnnnnnnnnnnnnnnnnnnnnnnnnnnnnnnnnnnnnnnnnnnnnnnnnnnnnnnnnnnnnnnnnnnnnnnnnnnnnnnnnnnnnnnnnnnnnnnnnnnnnnnnnnnnnnnnnnnnnnnnnnnnnnnnnnnnnnnnnnnnnnnnnnnnnnnnnnnnnnnnnnnnnnnnnnnnnnnnnnnnnnnnnnnnnnnnnnnnnnnnnnnnnnnnnnnnnnnnnnnnnnnnnnnnnnnnnnnnnnnnnnnnnnnnnnnnnnnnnnnnnnnnnnnnnnnnnnnnnnnnnnnnnnnnnnnnnnnnnnnnnnnnnnnnnnnnnnnnnnnnnnnnnnnnnnnnnnnnnnnnnnnnnnnnnnnnnnnnnnnnnnnnnnnnnnnnnnnnnnnnnnnnnnnnnnnnnnnnnnnnnnnnnnnnnnnnnnnnnnnnnnnnnnnnnnnnnnnnnnnnnnnnnnnnnnnnnnnnnnnnnnnnnnnnnnnnnnnnnnnnnnnnnnnnnnnnnnnnnnnnnnnnnnnnnnnnnnnnnnnnnnnnnnnnnnnnnnnnnnnnnnnnnnnnnnnnnnnnnnnnnnnnnnnnnnnnnnnnnnnnnnnnnnnnnnnnnnnnnnnnnnnnnnnnnnnnnnnnnnnnnnnnnnnnnnnnnnnnnnnnnnnnnnnnnnnnnnnnnnnnnnnnnnnnnnnnnnnnnnnnnnnnnnnnnnnnnnnnnnnnnnnnnnnnnnnnnnnnnnnnnnnnnnnnnnnnnnnnnnnnnnnnnnnnnnnnnnnnnnnnnnnnnnnnnnnnnnnnnnnnnnnnnnnnnnnnnnnnnnnnnnnnnnnnnnnnnnnnnnnnnnnnnnnnnnnnnnnnnnnnnnnnnnnnnnnnnnnnnnnnnnnnnnnnnnnnnnnnnnnnnnnnnnnnnnnnnnnnnnnnnnnnnnnnnnnnnnnnnnnnnnnnnnnnnnnnnnnnnnnnnnnnnnnnnnnnnnnnnnnnnnnnnnnnnnnnnnnnnnnnnnnnnnnnnnnnnnnnnnnnnnnnnnnnnnnnnnnnnnnnnnnnnnnnnnnnnnnnnnnnnnnnnnnnnnnnnnnnnnnnnnnnnnnnnnnnnnnnnnnnnnnnnnnnnnnnnnnnnnnnnnnnnnnnnnnnnnnnnnnnnnnnnnnnnnnnnnnnnnnnnnnnnnnnnnnnnnnnnnnnnnnnnnnnnnnnnnnnnnnnnnnnnnnnnnnnnnnnnnnnnnnnnnnnnnnnnnnnnnnnnnnnnnnnnnnnnnnnnnnnnngaaatgaaagtactgaaaagaagaataaagatttacagatcacatgtgattctctgaataaacacattgagacagtgaaaaagttgaatgagtcactcagggaacaaaatgaaaannnnnnnnnnnnnnnnnnnnnnnnnnnnnnnnnnnnnnnnnnnnnnnnnnnnnnnnnnnnnnnnnnnnnnnnnnnnnnnnnnntttgcatcagaaaacaaaagtacaagaagaaaagatcctttccttacaaaaggaaagggaagataaggaagaaaccattgatattcttagaaaagaattaagcagaacagaacagataagaaaagagctgagcattaaggnnnnnnnnnnnnnnnnnnnnnnnnnnnnnnnnnnnnnnnnnnnnnnnnnnnnnnnnnnnnnnnnnnnnnnnnnnnnnnnnnnnnnnnnnnnnnnnnnnnnnnnnnnnnnnnnnnnnnnnnnnnnnnnnnnnnnnnnnnnnnnnnnnnnnnnnnnnnnnnnnnnnnnnnnnnnnnnnnnnnnnnnnnnnnnnnnnnnnnnnnnnnnnnnnnnnnnnnnnnnnnnnnnnnnnnnnnnnnnnnnnnnnnnnnnnnnnnnnnnnnnnnnnnnnnnnnnnnnnnnnnnnnnnnnnnnnnnnnnnnnnnnnnnnnnnnnnnnnnnnnnnnnnnnnnnnnnnnnnnnnnnnnnnnnnnnnnnnnnnnnnnnnnnnnnnnnnctggcttttattgcttaaggctttctttggttcttacattagaaaatcatttttaaccttcattatcatttttctaaggttctttcctttttcttagttgctttctattctgtgttgcctgtcttatttattgtcatttgtgattatttagatcttaagaccaaactttcttgatataacaatcctaaagatta

SEQ ID NO: 20563 - DNA, 145 bp, Macaca Mulatta
ggagcgccgcagggtcatggctgcccaggtggccttgcgtaggcagcaggaggcgcagctaaagaagcacctgatgaggagaggggaagcctctcccaaagctcccaaccacttcagaaagggaaccgctcgaccacaggtcccc

SEQ ID NO: 20564 - DNA, 853 bp, Macaca Mulatta
gggcttgtgaaaaagaactttaaatatttacaagggaccatgggtaattaatatatattcaatttttactatgtgtcaccgtcaataaaatgtaaaatgtaatgtaccaactagtgtgctttgtttatgctgaaaagaataatgctctattagtatggtatttggtgtcatactgtcaagcatttgtaaatcatctgagactaagttaagctgaatttatttattcagtgtatgttgaacatctctacaccaactagtcaggcatagtcctaggcaatgatgatacggggtaaataagacatatccttatcttcagataacttaaaattcattaagggataatttgagaagcttttcatggatagtatctaattttatttcattggctgaatgaaaatattgcaacttcagattaagaggtataaagtaaattaatgtttgattgttcagtaatcataactgacatcttgtttttcccttttaaatgcctccaatttgccatagcactttgttacaataaattgtgacttttaactttttcatggacataaagtgctacataaatgttctttataattttagacatatctccgacacatgaatttattatttccttacaaattaagagaccccatataatttgggaacccctaaaaagacaaccttccatttttaatcccctgagccacccagtttattagagcaaatggtgggtgaaacccggaataacccattgggcatatttaaaacaaaaacctgtggaataatttacaatatttctacccctcgcttaaaacggggcccttaaacacttttggcaacaaaataaaaggcgacacaacatgcacaatta

SEQ ID NO: 20565 - DNA, 509 bp, Macaca Mulatta
  misc_feature (1)...(509): n = A,T,C or G
nnnnnnnnnnnnnnnnnnnnnnnnnnnnnnnnnnnnnnnnnnnnnnnnnnnnnnnnnnnnnnnnnnnnnnnnnnnnnnnnnnnnnnnnnnnnnnnnnnnnnnnnnnnnnnnnnnnnnnnnnnnnnnnnnnnnnnnnnnnnnnnnnnnnnnnnnnnnnnnnnnnnnnnnnnnnnnnnnnnnnnnnnnnnnnnnnnnnnnnnnnnnnnnnnnnnnnnnnnnnnnnnnnnnnnnnnnnnnnnnnnnnnnnnnnnnnnnnnnnnnnnnnnnnnttaatggcagctaaaacgctcccagtccatttattggccacatgaggtggttgtcaagaaacaagttagaaggttatcacgggaagtagtataataaatgcccagcagtacgaggggttcaacagaagtgaacaaggcacaagaaagaggtctgtgtccaggaaacaggccagtccccacatggagcaggtgactcctgtaagcctgtgaggctcaagttgtcgtgtctggctctggcct

SEQ ID NO: 20566 - DNA, 367 bp, Macaca Mulatta
ttgaccttttaagtagctagagtgccctggagcatactaaggactctggccagggaaattagcagtgggggacagagggcaagggagatagacctggccaaggaattttgtttggaaagctgaaggggcaggggtgggggtctttgaaaggagaacaatagtttgaagttacaggaaaacatctggccctgactaagtgcagggttggggaagaagctgggctgaggggaagagacgctgctctgcgcagatcctactccttcccggtgctgcattatcttgaaatcttccttccccttccccctagccccaactctccccaactccaaccctgacccagaaaggagtctgatttggagcctggaag

SEQ ID NO: 20567 - DNA, 1515 bp, Macaca Mulatta
  misc_feature (1)...(1515): n = A,T,C or G
aggttaccaggtgacaggggtgtttatgaagaactgggactcgctggatgaacatggggtgtgtactgccgacaaagactgtgaagatgcttacagagtttgccagatcttagacatccctttccatcaagtgtcctacataaaggagtattggaacgacgtgttcannnnnnnnnnnnnnnnnnnnnnnnnnnnnnnnnnnnnnnnnnnnnnnnnnnnnnnnnnnnnnnnnnnnnnnnnnnnnnnnnnnnnnnnnnnnnnnnnnnnnnnnnnnnnnnnnnnnnnnnnnnnnnnnnnnnnnnnnnnnnnnnnnnnnnnnnnnnnnnnnnnnnnnnnnnnnnnnnnnnnnnnnnnnnnnnnnnnnnnnnnnnnnnnnnnnnnnnnnnnnnnnnnnnngcggtaaaactcctccaggcagctgacagctttaaagaccagaccttctttctcagccaggtttcccaggatgccctgaggagaaccatcttccctctggggggattaacaaaagagtttgtaaagaaaatcgccgctgagaatagacttcatcatgtgcttcagaagaaagannnnnnnnnnnnnnnnnnnnnnnnnnnnnnnnnnnnnnnnnnnnnnnnnnnnnnnnnnnnnnnnnnnnnnnnnnnnnnnnnnnnnnnnnnnnnnnnnnnnnnnnnnnnnnnnnnnnnnnnnnnnnnnnnnnnnnnnnnnnnnnnnnnnnnnnnnnnnnnnnnnnnnnnnnnnnnnnnnnnnnnnnnnnnnnnnnnnnnnnnnnnnnnnnnnnnnnnnnnnnnnnnnnnnnnnnnnnnnnnnnnnnnnnnnnnnnnnnnnnnnnnnnnnnnnnnnnnnnnnnnnnnnnnnnnnnnnnnnnnnnnnnnnnnnnnnnnnnnnnnnnnnnnnnnnnnnnnnnnnnnnnnnnnnnnnnnnnnnnnnnnnnnnnnnnnnnnnnnnnnnnnnnnnnnnnnnnnnnnnnnnnnnnnnnnnnnnnnnnnnnnnnnnnnnnnnnnnnnnnnnnnnnnnnnnnnnnnnnnnnnnnnnnnnnnnnnnnnnnnnnnnnnnnnnnnnnnnnnnnnnnnnnnnnnnnnnnnnnnnnnnnnnnnnnnnnnnnnnnnnnnnnnnnnnnnnnnnnnnnnnnnnnnnnnnnnnnnnnnnnnnnnnnnnnnnnnnnnnnnnnnnnnnnnnnnnnnnnnnnnnnnnnnnnnnnnnnnnnnnnnnnnnnnnnnnnnnnnnnnnnnnnnnnnnnnnnnnnnnnnnnnnnnnnnnnnnnnnnnnnnnnnnnnnnnnnnnnnnnnnnnnnnnnnnnnnnnnnnnnnnnnnnnnnnnnnnnngggctcggcgagccccaggaagagcctcacctccaggctgcggctctggctgccagagcatctgctggctggtggggtggcccgagttccccttcaccacccccagggagggtttcccacctcagagcacaccgaggggacctgcagggggagctgcagggacagcgtggaataaacattctttcaagga

SEQ ID NO: 20568 - DNA, 137 bp, Macaca Mulatta
  misc_feature (1)...(137): n = A,T,C or G
gttttccttacaatgtgaactcatcatggtcttgaaatcaataaagccaaatgtcaactaaagacttacattatctttttcaaagacaaaataaatatatnttccagtacaaatttcaaaagtcctaaagttggtat

SEQ ID NO: 20569 - DNA, 406 bp, Macaca Mulatta
  misc_feature (1)...(406): n = A,T,C or G
ctnnnnnnnnnnnnnnnagcacggtgagccgtgtgcctggcccaaagaactgctcattgtagattccggtatctttgctgctggcacagaaatacagtgctgcgtcccctgactctgtggactggatctccaaggtacaagatgagttttggggacattgggctgaaaatctcttattgattatttctgctttctgaataatttcttcattctgaaagtaaaccaaaaacttgagctcttcgtccagcttcttacgataccagtaaacataactatgtccttttacaggaacacaatccatctttgctttctgtttgtttgctttgaccagaagtctaggtctctgggtgaccttggtgtccgtggaggctgctccccagaaagaaagggccacacagcagagaag

SEQ ID NO: 20570 - DNA, 542 bp, Macaca Mulatta
atttgtctctcttccgtgttccttgcctgtttctccccttggttcatagctactagatttttggaagaggaggaactgaggtctcatcacattctagagcgcttggatgcccatattgaagaactaaaaagagagagtgaaaagacagtgagacaattcacagccttaaagtagcctcttaaaaaatcacaatcttggaaataaaaataaacaccaaagagttactgtcatctgaagtagcagctctttaaaaacatgaagagataaaattataaaaatgatacatctaaagcagtggtgaagaaagctgaaaaaccaatacttttgataggcattttctctgcactagtttgtttgaaggacttcctccagtgataagttgtgagaataaaccactttgctagacttttttctcatacgaatatgtattatcataaagtgatacttatcttgctgacttaaatgtgaatagctgtgtactaattgaaagaaggattttatgatacatgttgaaaataaagtaactgcaggaactttcttta

SEQ ID NO: 20571 - DNA, 2014 bp, Macaca Mulatta
  misc_feature (1)...(2014): n = A,T,C or G
ccagatatagctgagaagtacctgtcagcttcagagtatgggagctccgtggatggccaccctgaggtcccagaaaccaaagacnnnnnnnnnnnnnnnnnnnnnnnnnnnnnnnnnnnnnnnnnnnnnnnnnnnnnnnnnnnnnnnnnnnnnnnnnnnnnnnnnnnnnnnnnnnnnnnnnnnnnnnnnnnnnnnnnnnnnnnnnnnnnnnnnnnnnnnnnnnnnnnnnnnnnnnnnnnnnnnnnnnnnnnnnnnnnnnnnnnnnnnnnnnnnnnnnnnnnnnnnnnnnnnnnnnnnnnnnnnnnnnnnnnnnnnnnnnnnnnnnnnnnnnnnnnnnnnnnnnnnnnnnnnnnnnnnnnnnnnnnnnnnnnnnnnnnnnnnnnnnnnnnnnnnnnnnnnnnnnnnnnnnnnnnnnnnnnnnnnnnnnnnnnnnnnnnnnnnnnnnnnnnnnnnnnnnnnnnnnnnnnnnnnnnnnnnnnnnnnnnnnnnnnnnnnnnnnnnnnnnnnnnnnnnnnnnnnnnnnnnnnnnnnnnnnnnnnnnnnnnnnctgatgcagagaaaattctcagagcccaacacttacatcgatggcctgcctagccaggaccgccaggaggagctgtatgacgacgtggaactgtcggagctcacagcnnnnnnngagcctaccgaggaagccacccctgttgcagatgacccaaatgagagagaatctgaccgagtgtacctggacctcacacctgtcaagtcctttctgcatggccccagcagtgcccgggcccaggcctcctccccgacgttgtcccacctggacaatgcgactgaggccctccctacagacccaggcccaggtcccaccccagatgagccctgcataaagtgtccagagaacctgggggaacannnnnnnnnnnnnnnnnnnnnnnnnnnnnnnnnnnnnnnnnnnnnnnnnnnnnnnnnnnnnnnnnnnnnnnnnnnnnnnnnnnnnnnnnnnnnnnnnnnnnnnnnnnnnnnnnnnnnnnnnnnnnnnnnnnnnnnnnnnnnnnnnnnnnnnnnnnnnnnnnnnnnnnnnnnnnnnnnnnnnnnnnnnnnnnnnnnnnnnnnnnnnnnnnnnnnnnnnnnnnnnnnnnnnnnnnnnnnnnnnnnnnnnnnnnnnnnnnnnnnnnnnnnnnnnnnnnnnnnnnnnnnnnnnnnnnnnnnnnnnnnnnnnnnnnnnnnnnnnnnnnnnnnnnnnnnnnnnnnnnnnnnnnnnnnnnnnnnnnnnnnnnnnnnnnnnnnnnnnnnnnnnnnnnnnnnnnnnnnnnnnnnnnnnnnnnnnnnnnnnnnnnnnnnnnnnnnnnnnnnnnnnnnnnnnnnnnnnnnnnnnnnnnnnnnnnnnnnnnnnnnnnnnnnnnnnnnnnnnnnnnnnnnnnnnnnnnnnnnnnnnnnnnnnnnnnnnnnnnnnnnnnnnnnnnnnnnnnnnnnnnnnnnnnnnnnnnnnnnnnnnnnnnnnnnnnnnnnnnnnnnnnnnnnnnnnnnnnnnnnnnnnnnnnnnnnnnnnnnnaggaatgggagaagaaaggagcaagttagaaaacaagcttcatctgaagactctcatgtcaatgtggaccttggtgacaatcctgctttgttaaagcaaaaactctgcaaaagggtgagtctgtttagaagaaaaagcaaagactgaggtactgtgaatggcaagcttcagctaagaggaggatctgtcccttttcagagctaaaggaaataatacaacaaaaaagaggcttctttggagacctaagtatattggatgtaaacaagacattgtatttagggatgttgtgtgtttcttttttgaagttgtcatcaattgctttactaagatttttaaatagtaaaaacctcatgtttagactttggtggaagatgaatcaaggaagcagggccctgtcttatgggtcacctggctttggtgagtgagaaaacctaaactcctggccatcgtctcttatccaatacttagcag

SEQ ID NO: 20572 - DNA, 663 bp, Macaca Mulatta
  misc_feature (1)...(663): n = A,T,C or G
atgaaaaatccaagaaaaggccagatggagttgcaggactatgttcagaaaacctactcggaagacacctaccgattggcccggatcctcgttcgcctgccggcactcaggctgatgagctccaacataacagaagaacttttttttactggcctcattggcaatgtttcgatagacagcataatcccctacatcctcaagatggagacagcagagtataatggccagatcaccggagccagtctatagtacacaccacacatctgccaaggagcaacagaatcctaccgggaccgttcacatacaaagaaaagaaaagtagtggtattttggtatgtgcaaatatttccatatgttagccgtttcctgtctggtttcttcttatctgttaatcccagacaatggcaatgaaaagactagtaggatcctttcctgacataagaaatgttttaatgccttttgatgaagcagcagattttggagcaatcttttaactcaatttgtatttagaaattctcaaagggnnnnnnnnnnnnnnnnnnnnnnnnnnnnnnnnnnnnnnnnnnnnnnnnnnnnnnnnnnnnnnnnnnnnnnnnnnnnnnnnnnnnnnnnnnnnnnnnnnnnnnnnnnnnnnnnnnnnnnnnngcgttaccaacttatcgc

SEQ ID NO: 20573 - DNA, 143 bp, Macaca Mulatta
ttatcatggaaaacctgaagaattcactctcaccagctacccagaggaagatgggagacaaagtcctccctgcccaggagaagaactcccgtgaccagctattggccgccatccgctccagcaacctcaagcagctcaagaag

SEQ ID NO: 20574 - DNA, 1039 bp, Macaca Mulatta
  misc_feature (1)...(1039): n = A,T,C or G
ggtgtggtctttccttaccagtcccccaacgggcgctatcagctcaacttccatgagggccagcaggtctgtgctgagcagggcgcggtggttgcctcctttgagcagctcttccgggcctgggaggagggcctggactggtgcaacgccggctggctgcaggacgccacggtgcagtaccccatcatgctgccccggcagccctgcggtggcccgggcctggcacctggcgtgcgaagctacggcccccgccaccgccgccggcaccgctatgatgtattctgcttcgccactgccctcaaggnnnnnnnnnnnnnnnnnnnnnnnnnnagaagctgacactgacagaggcaaaggaggcctgccaggaagatgacgccacaatcgccaaggtgggacagctctttgccgcctggaagttccatggcctggaccgctgcgacgctggctggctggcagatggcagcgtccgctaccctgtggttcacccgcatcccaactgtgggcccccggagcctggggtccgaagctttggcttccctgacccacagagccacttgtacggtgtttactgctaccgccagcactaggacgtggggccctcccctgccgaattctctcactggctgtgtatttattgagtggttcgttttcccttgtgggttggagccnnnnnnnnnnnnnnnnnnnnnnnnnnnnnnnnnnnnnnnnnnnnnnnnnnnnnnnnnnnnngtaaagcaaacagaacccaatgcctccctttgctcttggacgccccactccagaaatcttgcctgcttccctgggccatttgcggttttgtgggcctctggagggttccccaccatccaggctggtctccctcccttaaggaggttggtgcccagagcgggcggtggcctgtccagaatgccactgggagtcagggcatggtgggcacagttctccctgcccctcagcctaggggaagaagagggcctcgggggcctccagagctgggctttgggcctctcctgcccacctctacttctctgtgaag

SEQ ID NO: 20575 - DNA, 502 bp, Macaca Mulatta
  misc_feature (1)...(502): n = A,T,C or G
gcccagtgatgttctttccctccttgacaaccatggcagccattacgtggctattgtctttgaaagcaacagctcctaccttggacgggaggnnnnnnnnnnnnnnnnnnnnnnnnnnnnnnnnnnnnnnnnnnnnnnnnnnnnnnnnnnnnnnnnnnnnnnnnnnnnnnnnnnnnnnnnnnnnnnnnnnnnnnnnnnnnnnnnnnnnnnnnnnnnnnnnnnnnnnnnnnnnnnnnnnnnnnnnnnnnnnnnnnnnnnnnnnnnnnnnnnnnnnnnnnnnnnnnnnnnnnnnnnnnnnnnnnnnnnnnnnnnnnnnnnnnnnnnnnnnnnnnnnnnnnnnnnnnnnnnnnnnnnnnnnnnnnnnnnnnnnnnnnnnnnnnnaagctgtacacggcggacctggagtcagggctgcactacctcctgcgggtggagctggcagcccacaagtccctggctggagcagagctgaagacgctcaaggactttgtgactgtcttgg

SEQ ID NO: 20576 - DNA, 806 bp, Macaca Mulatta
  misc_feature (1)...(806): n = A,T,C or G
tgcgagggcagccagggagccctgttcctctgtgaacttgggaacctgccactattagaatgtgactttcacaaaactagtagttgaggaagtgttgctgaaattttctttatgccaattttgcacctcggggtgcggacttggcaccagatccccaaaggtgataggaaggactggagaaagatctggcatgaaccctgatgggtgagataacatgtgtgtcaagcctgttcttacaagaaataaatacttactggggagaggtgttggcagctgccggggtgttgggtgccctatctgctctggttagggagggcagcccccaaaccttagtggacacatgctagaaaaattctgactgtggagtgtttagcccatcgtttggaaatagcatctagctacaatgtgtctagacctgcctgggtttccctgtagtcagccgtccaaagaagaatacacgctgcctggcaccagcacacccaggtggtaccacaagttgagagagagcctctgaatgtaggacggaattaagttaaagaggaacagctgaccctgatggaaccacccagtgtgaaggcttccaggcagtgggagcagtgctttggggaaggaaggaaacacgcacaggaactgttcttaaacagtttccatcccaccaagagatcgtcactaagggagaagtgggactggtatccccgtggggagggtgtttgtgttcatctggaactgcactagccttggcgaaatctangggtccctangaggaactcagtgccccttcttcttccatagatgctctcccctct

SEQ ID NO: 20577 - DNA, 405 bp, Macaca Mulatta
caggtcctcgagcaccaggagccgcgtgcctggtccgaagtactgggtctccgcccaccctgggttgctgctggcacacaggtacacagctgcatcctccaggcctggtgagcggatgtcaagaaagcagaaagaagtgtttggcctcctggattggaagttatcaggggtgtctgcttcattgttaaaatctttgtcatagtagtggaacagcagctttggggcctgacttggcttctgctggtaccagtacatgaccttatggttcagattctgagaacaactcaaggtcactggcttttccaactgagtaacctggtatcttgggttctggatgaccatgacatccccatgacctgttccaaggagacaaagggccatccagtggagaagcccaggactcat

SEQ ID NO: 20578 - DNA, 633 bp, Macaca Mulatta
  misc_feature (1)...(633): n = A,T,C or G
ggggatgggcgagtctttacaccaggtcaaggaaacaatgtatatatttttccaggtgtggctttagctgttattctctgtaacacccggcatattagtgacagtgttttcctagaagctgcaaaggcactgacaagccaattgacagatgaagagctagcccaagggagactttacccaccacttgctaatattcaggaagtttctattaacattgctattaaagttacagaatacctatatgctaataaaatggctttccgatacccagaacctgaagacaaggccaaatatgttaaagaaagaatatggcggagtgaatatgattccctgctgccagatgtgtatgaatggccggaatctgcatcaagccctcctgtgataacagaatagaagcactcccctgataaatactttctgtgctccagggaatcccttttttcagacaagaagagataatgtcctcagttttatggtgttttctgtgttttgttctgcccagccactttggttgatgtatttttttccatgcgtctccacatctgttggggtagacgtgttgattgattgcattgcccaccagcaccctacaatcagatagttgtgatgcttttattctaacatacagcccan

SEQ ID NO: 20579 - DNA, 451 bp, Macaca Mulatta
ccctttttcagaatcggttggtgcgtcttgtgtgtgtgtttctccaatccttgatccgtaacaaaattattaatgtacaggatttgtttatagaagtgcaggcattctgtattgaattcagtaggatacgagaagctgctggtcttttccggttgttgaagacattggatactggggaaacaccttctgagaccaaaatgtctaaataatacctcatcagaaccatcccatccattcactgttcagctgtactgtgatttagtttttacaccgttaaaaccctgagtggattgcttggtctaatgcatataaaacagtactttatctacttaaagcaaagttttgctttcttggatgactttttccgtgagatgaatttttgataagaactggggaaaacgtgtcttttaggtgtcttgctgttgactatccacaggaggaatggctatcc

SEQ ID NO: 20580 - DNA, 4942 bp, Macaca Mulatta
  misc_feature (1)...(4942): n = A,T,C or G
aggaaggtgttcctgtgcagtttgacctcccggagccctccccagggaccactgtggctgctgtggatcacaatccctcnnnnnnnnnnnnnnnnnnnnnnnnnnnnnnnnnnnnnnnnnnnnnnnnnnnnnnnnnnnnnnnnnnnnnnnnnnnnnnnnnnnnnnnnnnnnnnnnnnnnnnnnnnnnnnnnnnnnnnnnnnnnnnnnnnnnnnnnnnnnnnnnnnnnnnnnnnnnnnnnnnnnnnnnnnnnnnnnnnnnnnnnnnnnnnnnnnnnnnnnnnnnnnnnnnnnnnnnnnnnnnnnnnnnnnnnnnnnnnnnnnnnnnnnnnnnnnnnnnnnnnnnnnnnnnnnnnnnnnnnnnnnnnnnnnnnnnnnnnnnnnnnnnnnnnnnnagagaggagctgcggagtctattccaggcccgagccaagctgcctcctgtgtgccgggctgtggcaggcctggagggcacctcccagcaggccctgcagaggaaccgcatggtgaggaggacctttgccagcagcctggccgcggtgaggaggaaagccccgtgctcccagatcaagctgcagatggnnnnnnnnnnnnnnnnnnnnnnnnnnnnnnnnnnnnnnnnnnnnnnnnnnnnnnnnnnnnnnnnnnnnnnnnnnnnnnnnnnnnnnnnnnnnnnnnnnnnnnnnnnnnnnnnnnnnnnnnnnnnnnnnnnnnnnnnnnnnnnnnnnnnnnnnnnnnnnnnnnnnnnnnnnnnnnnnnnnnnnnnnnnnnnnnnnnnnnnnnnnnnnnnnnnnnnnnnnnnnnnnnnnnnnnnnnnnnnnnnnnnnnnnnnnnnnnnnnnnnnnnnnnnnnnnnnnnnnnnnnnnnnnnnnnnnnnnnnnnnnnnnnnnnnnnnnnnnnnnnnnnnnnnnnnnnnnnnnnnnnnnnnnnnnnnnnnnnnnnnnnnnnnnnnnnnnnnnnnnnnnnnnnnnnnnnnnnnnnnnnnnnnnnnnnnnnnnnnnnnnnnnnnnnnnnnnnnnnnnnnnnnnnnnnnnnnnnnnnnnnnnnnnnnnnnnnnnnnnnnnnnnnnnnnnnnnnnnnnnnnnnnnnnnnnnnnnnnnnnnnnnnagattcgccgactggctgcgcagtgcatccagaagaatgtggctgtgttcctcgcagtcaaggactggccatggtggcagctccttggttccctccggcccctacttagtgccaccattggaaatgagcagctccgagccaaggaggnnnnnnnnnnnnnnnnnnnnnnnnnnnnnnnnnnnnnnnnnnnnnnnnnnnnnnnnnnnnnnnnnnnnnnnnnnnnnnnnnnnnnnnnnnnnnnnnnnnnnnnnnnnnnnnnnnnnnnnnnnnnnnnnnnnnnnnnnnnnnnnnnnnnnnnnnnnnnnnnnnnnnnnnnnnnnnnnnnnnnnnnnnnnnnnnnnnnnnnnnnnnnnnnnnnnnnnnnnnnnnnnnnnnnnnnnnnnnnnnnnnnnnnnnnnnnnnnnnnnnnnnnnnnnnnnnnnnnnnnnnnnnnnnnnnnnnnnnnnnnnnnnnnnnnnnnnnnnnnnnnnnnnnnnnnnnnnnnnnnnnnnnnnnnnnnnnnnnnnnnnnnnnnnnnnnnnnnnnnnnnnnnnnnnnnnnnnnnnnnnnnnnnnnnnnnnnnnnnnnnnnnnnnnnnnnnnnnnnnnnnnnnnnnnnnnnnnnnnnnnnnnnnnnnnnnnnnnnnnnnnnnnnnnnnnnnnnnnnnnnnnnnnnnnnnnnnnnnnnnnnnnnnnnnnnnnnnnnnnnnnnnnnnnnnnnnnnnnnnnnnnnnnnnnnnnnnnnnnnnnnnnnnnnnnnnnnnnnnnnnnnnnnnnnnnnnnnnnnnnnnnnnnnnnnnnnnnnnnnnnnnnnnnnnnnnnnnnnnnnnnnnnnnnnnnnnnnnnnnnnnnnnnnnnnnnnnnnnnnnnnnnnnnnnnnnnnnnnnnnnnnnnnnnnnnnnnnnnnnnnnnnnnnnnnnnnnnnnnnnnnnnnnnnnnnnnnnnnnnnnnnnnnnnnnnnnnnnnnnnnnnnnnnnnnnnnnnnnnnnnnnnnnnnnnnnnnnnnnnnnnnnnnnnnnnnnnnnnnnnnnnnnnnnnnnnnnnnnnnnnnnnnnnnnnnnnnnnnnnnnnnnnnnnnnnnnnnnnnnnnnnnnnnnnnnnnnnnnnnnnnnnnnnnnnnnnnnnnnnnnnnnnnnnnnnnnnnnnnnnnnnnnnnnnnnnnnnnnnnnnnnnnnnnnnnnnnnnnnnnnnnnnnnnnnnnnnnnnnnnnnnnnnnnnnnnnnnnnnnnnnnnnnnnnnnnnnnnnnnnnnnnnnnnnnnnnnnnnnnnnnnnnnnnnnnnnnnnnnnnnnnnnnnnnnnnnnnnnnnnnnnnnnnnnnnnnnnnnnnnnnnnnnnnnnnnnnnnnnnnnnnnnnnnnnnnnnnnnnnnnnnnnnnnnnnnnnnnnnnnnnnnnnnnnnnnnnnnnnnnnnnnnnnnnnnnnnnnnnnnnnnnnnnnnnnnnnnnnnnnnnnnnnnnnnnnnnnnnnnnnnnnnnnnnnnnnnnnnnnnnnnnnnnnnnnnnnnnnnnnnnnnnnnnnnnnnnnnnnnnnnnnnnnnnnnnnnnnnnnnnnnnnnnnnnnnnnnnnnnnnnnnnggtggatgagcagctgtacaggctgcagtttgaaaagacggacctcctgaagcgcattgatgaggaccaggatgacctgtatgagctgatgcagaagcacaaggacctcattgctcagnnnnnnnnnnnnnnnnnnnnnnnnnnnnnnnnnnnnnnnnnnnnnnnnnnnnnnnnnnnnnnnnnnnnnnnnnnnnnnnnnnnnnnnnnnnnnnnnnnnnnnnnnnnnnnnnnnnnnnnnnnnnnnnnnnnnnnnnnnnnnnnnnnnnnnnnnnnnnnnnnnnnnnnnnnnnnnnnnnnnnnnnnnnnnnnnnnnnnnnnnnnnnnnnnnnnnnnnnnnnnnnnnnnnnnnnnnnnnnnnnnnnnnnnnnnnnnnnnnnnnnnnnnnnnnnnnnnnnnnnnnnnnnnnnnnnnnnnnnnnnnnnnnnnnnnnnnnnnnnnnnnnnnnnnnnnnnnnnnnnnnnnnnnnnnnnnnnnnnnnnnnnnnnnnnnnnnnnnnnnnnnnnnnnnnnnnnnnnnnnnnnnnnnnnnnnnnnnnnnnnnnnnnnnnnnnnnnnnnnnnnnnnnnnnnnnnnnnnnnnnnnnnnnnnnnnnnnnnnnnnnnnnnnnnnnnnnnnnnnnnnnnnnnnnnnnnnnnnnnnnnnnnnnnnnnnnnnnnagtgtccagacggcagtggattgtggcagcagtggcaaaaaagagatgnnnnnnnnnnnnnnnnnnnnnnnnnnnnnnnnnnnnnnnnnnnnnnnnnnnnnnnnnnnnnnnnnnnnnnnnnnnnnnnnnnnnnnnnnnnnnnnnnnnnnnnnnnnnnnnnnnnnnnnnnnnnnnnnnnnnnnnnnnnnnnnnnnnnnnnnnnnnnnnnnnnnnnnnnnnnnnnnnnnnnnnnnnnnnnnnnnnnnnnnnnnnnnnnnnnnnnnnnnnnnnnnnnnnnnnnnnnnnnnnnnnnnnnnnnnnnnnntccgccggcaaagtactgtcattttggggacggcgaagggcttgccgtccagagaaaggccacagagagattagaagctgcgtcctctcccctggcttctcggagtacaaatacatccccgctgtcgagggaaaagctgcccagtccttcagcggccctctcggagttcgtggaagggctccggaggaagagagcccagagaggccaggggtccacgctgggcctggaggactggcccactctccccatttatcagacgactggggcttccacactaaggaggggcagggctggcagtgacgagggaaatctctcgttgagggttggggcaaagtcacccctggaaatcgaaggggccgctggtggtctcttgaggtccaccagcctcaaatgcatctcttcagatggtgttgggggcacgaccctactccccgagaaggcgaagacccgattcagttcctgcgagtccctcttagaatccagaccgagcatggggagaaaactgagctccccgaccacacccagggacatgctgttgtcacccacactgcgtcctcggaggcggtgtctggagtcctctgtggacgatgcgggctgtccagaccttggaaaggagccgctcgttttccagaaccgccagtttgcccacctgatggaggaacctctaggcagtgaccccttcagctggaaactcccaagcctcgactacgaacgcaagaccaaagtggacttcgatgacttcctcccagctatccggaagccccagacgcctacatccttggccggaggcgccaaaggtgggcaagatggttctcagcgttcaagtgtccactttgagacagaagaggctgaccgttcctttctctcggggatcaagaccattttgaaaaagagcccagagcccaaggaggatcctgctcacctgtccgactcgtcctcatcctccagctccatcgtgtcctttcaaagtgctgacagcatcaaaagtcgaccaggannnnnnnnnnnnnnnnnnnnnnnnnnnnnnnnnnnnnnnnnnnnnnnnnnnnnnnnnnnnnnnnnnnnnnnnnnnnnnnnnnnnnnnnnnnnnnnnnnnnnnnnnnnnnnnnnnnnnnnnnnnnnncagcctccttgaagctgcccttgaagacttcccaactctacaataacttggagacagagagactggccaggcctccccagtggccaaagccagccagcacggccaccctcaagagacaagacgggcccacaaaggcaaatcctgcggggatgctgggctcccagtgtggttggcctgaacaaaataaagtgttgactcctgggc

SEQ ID NO: 20581 - DNA, 925 bp, Macaca Mulatta
  misc_feature (1)...(925): n = A,T,C or G
catccagccagagcagcaaacctgttctatgccctgttcttggccatgtatcttaccaccctccttgggaacctcctcatcattgtcctcactcaactggactcccagctccacacgcctatgtatttgtttctcagcaacttgtccttctctgacctctgcttttcctcggtcacagtgcccagattgctgcagaacatgcagaaccacgacccatccatcccctatgcggactgcctggcccaaatgtacttcttcttgtatttttcagatctagaaagcttcctccttgtggccatggcctatgaccgctatgtggccatctgcttccccctgcgctacaccgccatcngccatctgcttccccctgcgctacaccgccatcatgagccccatgctctgtctcgccctggtggcgctgtcctgggtgctgaccaccttccatgccatgttacacactttactcatggccaggttgtgtttttgtgcagacaatgtgatcccccactttttctgtgatatgtctgctctgctgaagctggcctgctctgacactcgagttaatgaattggtgatatttatcatgggagggctgattcttgtcatcccattcctactcatccttgggtcctatgcacggattgtctcctccatcctcaaggtcccttcgtctaagggtatctgcaaggccttctctacttgtggctcccacctctctgtggtgtcactgttctatgggaccgttattggtctctacttatgcccatcagctaatagttctactctaaaggagactgtcatggctatgatgtacactgtggtgacccccatgctgaaccctttcatctacagcctgaggaacagagacatgaagggagccctggaaagggtcatttgtaaaaggcaaaatctcttccttctatga

SEQ ID NO: 20582 - DNA, 1557 bp, Macaca Mulatta
ggggtatcagaaccaaattgctgagccagtcacctgtgttccaggagccgaatcagaaatgtcatcctcaggcaagccagacttacctgtcctacctaccgatttgaagattcaatatactaagatcttcataaacaatgaatggcatgattcagtgagtggcaagaaatttcctgtctttaatcctgcaactgaggaggagctctgccaggtagaagaaggagataaggcggatgttgacaaggcagtgaaggctgcaagacaggctttccagattggatctccatggcgtactatggatgcttctgagaggggacgactattatacaagttggctgatttaatcgaaagagatcgtctgctcctggcgacaatggagtcaatgaatggtggaaaactctattccaatgcatatctgaatgatttagcaggctgcatcaaaacattgcgctactgtgcaggttgggctgacaagatccagggccgtacaataccaattgatggaaacttttttacatatacaagacatgaacctattggtgtatgtggccaaatcattccttggaatttcccgttggttatgctcatttggaagatagggcctgcactgagctgtggaaacacagtggttgtcaaaccagcagagcaaactcctctcactgctctccacgtggcatctttaataaaagaggcaggggtttcctcctgggagtagtgaataattgttcctgggttatgggcctacagcaggggcagccatttcttcccacatggatatagacaaagtagccttcacaggatcgacagaggtcggcaagttgatcaaagaagctgccgggaaaagcaatctgaagagggtgaccctggagctgggaggaaagagcccttgcattgtgttagctgatgctgacttggacaatgctgttgaatttgcacaccatggggtgttctaccaccagggccagtgttgtatagctgcatccaggatttttgtggaagaatcaatttatgacgagtttgttcgaaggagtgttgagcgggctaagaagtatatccttggaaatcctctgaccccaggagtcactcaaggccctcagattgacaaggaacaatatgataaaatacttgacctcattgagagtgggaagaaagaaggggccaaactggaatgtggaggaggcccgtgggggaataaaggctattttgtccagcccacggtgttctctaatgttacagatgagatgcgcattgccaaagaggagatttttggaccagtgcagcaaatcatgaagtttaaatctttagatgacgtgatcaaaagaggaaacaatactttctatggcttatcggcaggagtctttaccaatgacattgattaagccgtaacccatctcctctgctctgcagggcagggaacggtgtgggttgaattgctatggcgtggtaaaatggcccgggggcccctttggggggaattccaaaatgtctgggaaatggaacaaaaactggggaggaataacgggttcccctggaaaacccccgagggtccaaaaacgg

SEQ ID NO: 20583 - DNA, 2386 bp, Macaca Mulatta
  misc_feature (1)...(2386): n = A,T,C or G
ggccaaggagcagtgaggacgtttcctctgtcctctgaccacgccttgtccaggctgctcccagaatagttttgctgtttccttcctgcctggcaagaatgtctttactatcatctccttgcttttccccgggacagcctgnnnnnnnnnntactgctgcatatccaacacaatcctccattcctgttaaatatcaagcttcagtaatcccagaatcagaaaaaaaaggattcaatagtcaagccaagagattttctcaaaagaannnnnnnnnnnnnnnnnnnnnnnnnnnnnnnnnnnnnnnnnnnnnnnnnnnnnnnnnnnnnnnnnnnnnnnnnnnnnnnnnnnnnnnnnnnnnnnnnnnnnnnnnnnnnnnnnnnnnnnnnnnnnnnnnnnnnnnnnnnnnnnnnnnnnnnnnnnnnnnnnnnnnnnnnnnnnnnnnnnnnnnnnnnnnnnnnnnnnnnnnnnnnnnnnnnnnnnnnnnnnnnnnnnnnnnnnnnnnnnnnnnnnnnnnnnnnnnnnnnnnnnnnnnnnnnnnnnnnnnnnnnnnnnnnnnnnnnnnnnnnnnnnnnnnnnnnnnnnnnnnnnnnnnnnnnnnnnnnnnnnnnnnnnnnnnnnnnnnnnnnnnnnnnnnnnnnnnnnnnnnnnnnnnnnnnnnnnnnnnnnnnnnnnnnnnnnnnnnnnnnnnnnnnnnnnnnnnnnnnnnnnnnnnnnnnnnnnnnnnnnnnnnnnnnnnnnnnnnnnnnnnnnnnnnnnnnnnnnnnnnnnnnnnnnnnnnnnnnnnnnnnnnnnnnnnnnnnnnnnnnnnnnnnnnnnnnnnnnnnnnnnnnnnnnnnnnnnnnnnnnnnnnnnnnnnnnnnnnnnnnnnnnnnnnnnnnnnnnnnnnnnnnnnnnnnnnnnnnnnnnnnnnnnnnnnnnnnnnnnnnnnnnnnnnnnnnnnnnnnnnnnnnnnnnnnnnnnnnnnnnnnnnnnnnnnnnnnnnnnnnnnnnnnnnnnnnnnnnnnnnnnnnnnnnnnnnnnnnnnnnnnnnnnnnnnnnnnnnnnnnnnnnnnnnnnnnnnnnnnnnnnnnnnnnnnnnnnnnnnnnnnnnnnnnnnnnnnnnnnnnnnnnnnnnnnnnnnnnnnnnnnnnnnnnnnnnnnnnnnnnnnnnnnnnnnnnnnnnnnnnnnnnnnnnnnnnnnnnnnnnnnnnnnnnnnnnnnnnnnnnnnnnnnnnnnnnnnnnnnnnnnnnnnnnnnnnnnnnnnnnnnnnnnnnnnnnnnnnnnnnnnnnnnnnnnnnnnnnnnnnnnnnnnnnnnnnnnnnnnnnnnnnnnnnnnnnnnnnnnnnnnnnnnnnnnnnnnnnnnnnnnnnnnnnnnnnnnnnnnnnnnnnnnnnnnnnnnnnnnnnnnnnnnnnnnnnnnnnnnnnnnnnnnnnnnnnnnnnnnnnnnnnnnnnnnnnnnnnnnnnnnnnnnnnnnnnnnnnnnnnnnnnnnnnnnnnnnnnnnnnnnnnnnnnnnnnnnnnnnnnnnnnnnnnnnnnnnnnnnnnnnnnnnnnnnnnnnnnnnnnnnnnnnnnnnnnnnnnnnnnnnnnnnnnnnnnnnnnnnnnnnnnnnnnnnnnnnnnnnnnnnnnnnnnnnnnnnnnnnnnnnnnnnnnnnnnnnnnnnnnnnnnnnnnnnnnnnnnnnnnnnnnnnnnnnnnnnnttagacctttttcttctttcgattgggagatcatcttggaatggcagtggctgggcccaccgtctgcgcttttccctgacttcctctgccggcgggactgaattttctcaaggcttgcaggcccctccatggagtccacatggcctgtctaggcctgatagcctttgtctctttatgtggaggccaaaagaaatgtgccctggtggttttggtggaggctgcacaagtgcactgtgggtggggagctgccaggttccttccctcatctcctagcagactttgactgacgctgtaagtctctctgtgcattcaccccgccagatactgagaggttacaaaggctccagggcctgtacgtctgtggcctctccagagaagtggttctccgccttgactgcgcactgtaaccacctggggactttaaaaagtactgaggcctggggcccacccacaaatgctgatttaactcctccagggtggggtctgggcagtggggaggcnnngccacccaggtgattccagtgacaggtgaaggttgagcagtgacaccttccagcttcttgactggctctgggaggggagctgggaaggacaggaggtgggaactttatacacacggagcacctacagcgtggctgcggttccacactcctgtcatttaccctccacgcatcacctcattctgacatcatgggggcgtcacag

SEQ ID NO: 20584 - DNA, 363 bp, Macaca Mulatta
tgcagatcaccggcaagtgcatcgatgtgtgagctcttagaccactcagcatgatgactgagtagtcttgtttacatctgatcaaagcactgggcttgtgcaggttcataataaatgcatcattgaatctactattcttgttttccactgctgtggaaacctccttgctactatagcgtcttatgtatggtttaaaggaagtttatcaggtgagagagatgagcaaccttgtcttttctctcaaagctgtaacgtgggttttattgtttatttgtttgttgttgtatccttttctccttaagttatttgcccttcagaatacacttgggaaaggctggttccttagcctgctggtttgtgtct

SEQ ID NO: 20585 - DNA, 589 bp, Macaca Mulatta
gagtagattttaaaaagccacattggagctcccttctacccactaaaaaataaccaatttttacattttttgagggggagtgagttttaggaaaggggaattaaaattccagggagagctctggggatagaacagggtgcagattctgtctctccccaagcccctttttagtgactgagtcaaggccccagctcccctagcccaccctacactgagcttattcgagtttattcgtactaatgatccctcctgcggcttcctcattgttgctgttttaggccaccccagctcagccaatgattcctttccctctgaatgtcagttttgtttttaaaagtcacctgcttagttgatgtcagcgtatgtgtatttggtggggaaaacctaatttcggggatttctgtggtaggtaatagaagaaagggcagtgggggctgttctccttccttccctgggctgtatccatggactcctggaaggcgcagagaagggagctgtaagaggatgcgaagttttaaaacctgaaattgttttttaaagcacttaagcacctccttattatgacttggggaatcaccccttagcctcc

SEQ ID NO: 20586 - DNA, 878 bp, Macaca Mulatta
cttacctttggagtttacctaaaattcctgaatgttataatttttgtggcctcttttaaaaatgatattttaaaatagtcaatagttcagtaaatggtttgcatgttaaaaaatatcatcttcttttctttttatgatacttgtatttgaaccaagagataaagaaactaaaagtgaccattgaaatttatttagctggtatactccatctatggcaacaaatgagataagcttttcttgtatcaactctaggacggatgcatggagtatgattctgatttagcacctatatcaacattgtcaatttttacttctggaaaaaaatcgtaagatcagaagggagatttttagctttgaaccttacttctcaaataggttatacttgatgtgtattagaccatataatgtcacagataaatacataacacatattctttatattccagttatacctaaagatttggaattagaaacttttaatctttgcaattcttaaaatattttttcatatatatattcttggaagaacattaggtaaaaaactacatttacagtgggctgtttgggactatggctactgctgttcattgccaccctgcagtatgagtttactctcttatactattaggaggacttaagtagattaatttataagcattagccagaatatttgggaaaaaaagctagaagaggtaggattgggagagaggcatagagtctggaagacattatagtaactgtagatgtatcttctcttattgtgcaggaatgagtcacgttggccagcataaaatattacttaaaactatcctatttttgctctgatatcatgttcactaagtaactctacttttcagtatttctgaaaacacacattg

SEQ ID NO: 20587 - DNA, 769 bp, Macaca Mulatta
aagtgggttatcactgatgtggagaagaatgagtacgaaaaagactctccgagactgaccaaaaccaaccccatactgtattatatgctgcagaaaggaggcaattctgttaccagtcgagaaacacaagacaaggacatttggagggagccttcatctgctgaaagtgtctcacaggtcacaatcaaagaagagttacttcctactgcagaaacgagagctgctttctttaacttaagaagcccttacaatagccatatgggaaataatgcttctcgcccacacagtgcaaacggagaagtttatggacttctgggaaacgtgctaacaataaaaaaagaatcagaataaaatgtacctgccatccagtttgggatctttttaaaacataatgagtatgaacttgagatctgtataaataagagcatgatttgagaaaagcatggtataattgaaacttttttcattttgaaaagtattggttactggtgatgtttaaatatgcatactaatttttgcttaacattagatgtcatgaggaaactactgaactagcaattggttgtttaacacttctgtatgcatcagataacaaccgtgagtagcctatgaatgaaattcttttataaacataaataataggcataaattaaaatgtaaaactccattcatagtggattaatgcattttgctgcctttattagggtacttttattttgctcttcagaagtcagcctacataacacatttgttaaagtccaaactgtta

SEQ ID NO: 20588 - DNA, 3252 bp, Macaca Mulatta
  misc_feature (1)...(3252): n = A,T,C or G
accttttcggaggcaattagatttaatgcagattatggagtctttgaagtagttaatgatgctccacaacttctggaaaaacaactgaaaaaaattctacaaaaccagcaacctcgaaatcccatttttgatgttgtaaggaaaggaaagaatgaggttaaacctgttcaaatgaatgcctccgatgaaaatgagaccattaatgtcaactacaatattatgnnnnnnnnnnnnnnnnnnnnnnnnnnnnnnnnnnnnnnnnnnnnnnnnnnnnnnnnnnnnnnnnnnnnnnnnnnnnnnnnnnncaggttagccaaattggtctcacaagtaagatggagcaagtccggcatgaatttcacagtagaatcaaatttttctccctggatcgtgaaaaaaccacccagtctaccacctcctgccactgaagaagataatcttgtaattatgaaaaagttctatgtatcacttggtgaggnnnnnnnnnnnnnnnnnnnnnnnnnnnnnnnnnnnnnnnnnnnnnnnnnnnnnnnnnnnnnnnnnnnnnnnnnnnnnnnnnnnnnnnnnnnnnnnnnnnnnnnnnnnnnnnnnnnnnnnnnnnnnnnnnnnnnnnnnnnnnnnnnnnnnnnnnnnnnnnnnnnnnnnnnnnnnnnnnnnnnnnnnnnnnnnnnnnnnnnnnnnnnnnnnnnnnnnnnnnnnnnnnnnnnnnnnnnnnnnnnnnnnnnnnnnnnnnnnnnnnnnnnnnnnnnnnnnnnnnnnnnnnnnnnnnnnnnnnnnnnnnnnnnnnnnnnnnnnnnnnnnnnnnnnnnnnnnnnnnnnnnnnnnnnnnnnnnnnnnnnnnnnnnnnnnnnnnnnnnnnnnnnnnnnnnnnnnnnnnnnnnnnnnnnnnnnnnnnnnnnnnnnnnnnnnnnnnnnnnnnnnnnnnnnnnnnnnnnnnnnnnnnnnnnnnnnnnnnnnnnnnnnnnnnnnnnnnnnnnnnnnnnnnnnnnnnnnnnnnnnnnnnnnnnnnnnnnnnnnnnnnnnnnnnnnnnnnnnnnnnnnnnnnnnnnnnnnnnnnnnnnnnnnnnnnnnnnnnnnnnnnnnnnnnnnnnnnnnnnnnnnnnnnnnnnnnnnnnnnnnnnnnnnnnnnnnnnnnnnnnnnnnnnnnnnnnnnnnnnnnnnnnnnnnnnnnnnnnnnnnnnnnnnnnnnnnnnnnnnnnnnnnnnnnnnnnnnnnnnnnnnnnnnnnnnnnnnnnnnnnnnnnnnnnnnnnnnnnnnnnnnnnnnnnnnnnnnnnnnnnnnnnnnnnnnnnnnnnnnnnnnnnnnnnnnnnnnnnnnnnnnnnnnnnnnnnnnnnnnnnnnnnnnnnnnnnnnnnnnnnnnnnnnnnnnnnnnnnnnnnnnnnnnnnnnnnnnnnnnnnnnnnnnnnnnnnnnnnnnnnnnnnnnnnnnnnnnnnnnnnnnnnngtgctgaactgaatttctggcacctccgccaagcaaaaccaannnnnnnnnnnnnnnnnnnnnnnnnnnnnnnnnnnnnnnnnnnnnnnnnnnnnnnnnnnnnnnnnnnnnnnnnnnnnnnnnnnnnnnnnnnnnnnnnnnnnnnnnnnnnnnnnnnnnnnnnnnnnnnnnnnnnnnnnnnnnnnnnnnnnnnnnnnnnnnnnnnnnnnnnnnnnnnnnnnnnnnnnnnnnnnnnnnnnnnnnnnnnnnnnnnnnnnnnnnnnnnnnnnnnnnnnnnnnnnnnnnnnnnnnnnnnnnnnnnnnnnnnnnnnnnnnnnnnnnnnnnnnnnnnnnnnnnnnnnnnnnnnnnnnnnnnnnnnnnnnnnnnnnnnnnnnnnnnnnnnnnnnnnnnnnnnnnnnnnnnnnnnnnnnnnnnnnnnnnnnnnnnnnnnnnnnnnnnnnnnnnnnnnnnnnnnnnnnnnnnnnnnnnnnnnnnnnnnnnnnnnnnnnnnnnnnnnnnnnnnnnnnnnnnnnnnnnnnnnnnnnnnnnnnnnnnnnnnnnnnnnnnnnnnnnnnnnnnnnnnnnnnnnnnnnnnnnnnnnnnnnnnnnnnnnnnnnnnnnnnnnnnnnnnnnnnnnnnnnnnnnnnnnnnnnnnnnnnnnnnnnnnnnnnnnnnnnnnnnnnnnnnnnnnnnnnnnnnnnnnnnnnnnnnnnnnnnnnnnnnnnnnnnnnnnnnnnnnnnnnnnnnnnnnnnnnnnnnnnnnnnnnnnnnnnnnnnnnnnnnnnnnnnnnnnnnnnnnnnnnnnnnnnnnnnnnnnnaggtggagctggtggaagaaactcgacagttagactccacatacttcagaaagctacaggctttgcataaagagacactttccaagaaagctgnaggataccacttgtgaaattggaagtggcattttatcactctctaatgtctctaaacgaacagaatattgggataatgttcctgcagaatacaaacattttaagtttagtgatctgcttaataacaaactggagtttgaacatttccgtcagtttcttgagactcattcttcaagnnnnnnnnnnnnnnnnnnnnnnnnnnnnnnnnnnnnnnnnnnnnnnnnnnnnnnnnnnnnnnnnnnnnnnnnnnnnnnnnnnnnnnnnnnnnnnnnnnnnnnnnnnnnnnnnnnnnnnnnnnnnnnnnnnnnnnnnnnnnnnnnnnnnnnnnnnnnnnnnnnnnnnnnnnnnnnnnnnnnnnnnnnnnnnnnnnnnnnnnnnnnnnnnnnnnnnnnnnnnnnnnnnnnnnnnnnnnnnnnnnnnnnnnnnnnnnnnnnnnnnnnnnnnnnnnnnnnnnnnnnnnnnnnnnnnnnnnnnnnnnnnnnnnnnnnnnnnnnnnnnnnnnnnnnnnnnnnnnnnnnnnnnnnnnnnnnnnnnnnnnnnnnnnnnnnnnnnnnnnnnnnnnnnnnnnnnnnnnnncctgtggagagtaagtggatctcttcatcttgtgaaatcattgcttttcgcaaagcattatgaatccagtnnnnnnnnnnnnnnnnnnnnnnnnnnnnnnnnnnnnnnnnnnnnnnnnnnnnnnnnnnnnnnnnnnnnnnnnnnnnnnnnnnnnnnnnnaggacttatgccattctcattgtgatgagtctgtcatccagaagaaaattacgactattatcaactgctttattaattctagtattccaccagctttacaaattgacattccagtagagcaagcccaaaagattattgaacaccggaaggagttaggaccatatgtatttagagaggcacag

SEQ ID NO: 20589 - DNA, 1262 bp, Macaca Mulatta
  misc_feature (1)...(1262): n = A,T,C or G
gcaccgatcagctgatgccggagggtttgaagccgcgccgcgagggagcgaggtcgcagtgacagcggcgggcgatcggacccaggctgccccgcggtacccgcctgcgtcgtgcgcacccgccccagcatgacagacccggcgggtccgcgcggctcagnnnnnnnnnnnnnnnnnnnnnnnnnnnnnnnnnnnnnnnnnnnnnnnnnnnnnnnnnnnnnnnnnnnnnnnnnnnnnnnnnnnnnnnnnnnnnnnnnnnnnnnnnnnnnnnnnnnnnnnnnnnnnnnnnnnnnnnnnnnnnnnnnnnnnnnnnnnnnnnnnnnnnnnnnnnnnnnnnnnnnnnnnnnnnnnnnnnnnnnnnnnnnnnnnnnnnnnnnnnnnnnnnnnnnnnnnnnnnnnnnnnnnnnnnnnnnnnnnnnnnnnnnnnnnnnnnnnnnnnnnnnnnnnnnnnnnnnnnnnnnnnnnnnnnnnnnnnnnnnnnnnnnnnnnnnnnnnnnnnnnnnnnnnnnnnnnnnnnnnnnnnnnnnnnnncagtacctggcgttgcctgacgtgtcactgggccggtatgcgtatgtccatggcgggggtgacccttggaccaatggctcagggcttgctctctgccagcggtactaccaccgaggccatgtggacccggccaacgacacatttgacattgatccaatggtggttactgnnnnnnnnnnnnnnnnnnnnnnnnnnnnnnnnnnnnnnnnnnnnnnnnnnnnnnnnnnnnnnnnnnnnnnnnnnnnnnnnnnnnnnnnnnnnnnnnnnnnnnnnnnnnnnnnnnnnnnnnnnnnnnnnnnnnnnnnnnnnnnnnnnnnnnnnnnnnnnnnnnnnnnnnnnnnnnnnnnnnnnnnnnnnnnnnnnnnnnnnnnnnnnnnnnnnnnnnnnnnnnnnnnnnnnnnnnnnnnnnnnnnnnnnnnnnnnnnnnnnnnnnnnnnnnnnnnnnnnnnnnnnnnnnnnnnnnnnnnnnnnnnnnnnnnnnnnnnnnnnnnnnnnnnnnnnnnnnnnnnnnnnnnnnnnnnnnnnnnnnnnnnnnnnnnnnnnnnnnnnnnnnnnnnnnnnnnnnnnnnnnnnnnnnnnnnngagtttgtggggttcatgtggcggcagcggagacgggtcatcagcctgtgggagcggctggaatttgtcaatggctggtacatcctgctggtcaccagcgatgtgctcaccatctcgggcaccatcatgaagattggcatcgaggccaa

SEQ ID NO: 20590 - DNA, 351 bp, Macaca Mulatta
gatactcaggagaaggaagtcagagcgatggtgggcagcgacgtggagctcagctgcgcgtgccccgaaggaagccgttttgatttaaatgacgtttacgtatactggcaaaccagcgagtcgaaaaccgtggtgacttaccacatcccgcagaacagctccttggacaacgtggacagccactaccggaaccgggccctgatgtcaccggccggcatgcagcggggcgacttctccctgcgcttgttcaacgtcaccccccaggatgagcagaagtttcactgcctggtattgagccaatccctgggattccaggaggtgctgagcgttgtggtcacactgcatgtggca

SEQ ID NO: 20591 - DNA, 157 bp, Macaca Mulatta
  misc_feature (1)...(157): n = A,T,C or G
ngtagtaaaggtgtacagtgaggatggggcctgcaggtctgtggaggtggcggcaggtgccacagctcgccatgtgtgtgaaatgctggtgcagcgagctcacgctttgagcgacgagacctgggggctggtggagtgccacccccacctagcactg

SEQ ID NO: 20592 - DNA, 621 bp, Macaca Mulatta
  misc_feature (1)...(621): n = A,T,C or G
ggggaaaaagtatgggcccttgaaccccgaaaaacccaaaaaccttaattcttttaaatttttggacccccgggcttnnnnnnnnnnnnnnnnnnnntttcaaccccggtttgcccgggaatctttaagaacattttgnnnnnnnnnnnnnnnnnnngggccccgggggcnnnnnnnnnnnnnnnnnnnnttttggggggcggaagggggnnnannnnnnnnnnnnnnnnnnnnnnnnnnnnnnnnnnnnnnnnnnnnnnnnnnnnnnnnnnnnnnnnnnnnnnnnnnnnnnnnnnnnnnnnnnnnnnnnnnnnnnnnnnnnnnnnnnnnnnnnnnnnnnnnnnnnnnnnnnnnnnnnnnncacagaatgtaagatgggattttatcaaataaaactatgaaaatgcaagtgggctcctatgccagaaaaacccacctggcgttccagatgcaagagggccagagcagaggcctggttctggggaagcctcaggatgctgcccaccaaggagtgatttccaaagagtaacccagggtgcccttttcccttctggggaagtgtggagaggtagagccccagaggagaaggtaaacaagcagccagcacctctatacaggccc

SEQ ID NO: 20593 - DNA, 171 bp, Macaca Mulatta
atgcgcttccagggccccgtggtcctcaggaggacccttcctggccaaagccccaagcctttggtgagaagccaattcccgcttgacagaaggcaccacccattcatctcactggccaaggacaaactctcctctgggatgtcgggaactggcatttgtcccccactcaaa

SEQ ID NO: 20594 - DNA, 833 bp, Macaca Mulatta
  misc_feature (1)...(833): n = A,T,C or G
tgatggtatctgggatgtatgggaaatgaagagctctgtgattttgtaagatccagacttgaagtcactgatgaccttgagaaagtttgcaatgaagtagtcgacacctgtttgtataagggaagtcgagacaacatgagtgtgattttgatctgtttccaaatgcacccaaagtatcgccagaagcagtgaagaaggaggcagagttggacaagtacctggaatgcagagtagaagaaatcataaagaagcaggtggaaggcgtccccgacttagtccatgtgatgcgcacattagcgagtgagaacatccccagcctcccaccagggggtgaattggcaagcaagaggaatgttattgaagccgtttacaatagactgaatccttacaaaaatgatgacactgactctacatcaacagatgatatgtggtaaaactgctcatctagtcatggagtttaccttcacctccaaaggagagtacagctcaactttgttgaaccttttaacatccatcctcaactttaaggaaggggatatgacatgggtgagaatgattacatcagagaacttcagcagtacaacagctagcccagaactgatttttttttttggtaaatttgaaacttatgtaaacgtgatttcaaaccataattcatgttgtaaatcagactccagcaattttggtggtatgattaggttttttggtaaagtgtaattgtccttgtacaaaatgctcatatttaattatgaactgctttaattcactatcaaagttacaagaaatgtttggcttattgtgtgatgcaacagaatatatagccngttcaagtc

SEQ ID NO: 20595 - DNA, 707 bp, Macaca Mulatta
tcttcttgctgtagccactccacggtcacttctatcacaggcccgtttagtcatccgcagagccctgtgccaggctggccagccacaagccatcaaccagctggatattcctcccatgttgattagctatctaaaacaccaactgtaatcttgcagtctccccaggaacttatgatgcctccaaaaaccacctggggactcaggtagctggagggcattacagcctcatccacttacctggagttgctctcctgtattatcctccacaataaaattatccagaaaataagtcccagtgtctgttgtgtctggtgtgtgtgggcatggatgggggcgtgagcattattgagggaaggggtatgattggccatggggaaggatagcaaatggtctggtatctgataggcacaggagtctgtaagagcaaaagaggaaaataacccaatggcctatacctccacaccaagatcctttagagagttttgggagctgtgttgccctggaagcaaggtcctgaataatacaagtgggtagaagcgtagcatcagcttgcccagccctgtgcctcccttcaattctctggctgctgcaagacaccttttcattggctgtcccctagtctcatattactttgagtcaagtgactgaggagcctcccattcactcaccttgaatcataggctgcatttccgctagtccagtttatg

SEQ ID NO: 20596 - DNA, 1495 bp, Macaca Mulatta
  misc_feature (1)...(1495): n = A,T,C or G
acctggcccgttagatgaaacccagatcgctactatattaagagaaatactgaaaggacttgattatctccattcggagaagaaaatccacagagacattaaagnnnnnnnnnnnnnnnnnnnnnnnnnnnnnnnnnnnnnnnnnnnnnnnnnnnnnnnnnnnnnnnnnnnnnnnnnnnnnnnnnnnnnnnnnnnnnnnnnnnnnnnnnnnnnnnnnnnnnnnnnnnnnnnnnnnnnnnnnnnnnnnnnnnnnnnnnnnnnnnnnnnnnnnnnnnnnnnnnnnnnnnnnnnnnnnnnnnnnnnnnnnnnnnnnnnnnnnnnnnnnnnnnnnnnnnnnnnnnnnnnnnnnnnnnnnnnnnnnnnnnnnnnnnnnnnnnnnnnnnnnnnnnnnnnnnnnnnnnnnnnnnnnnnnnnnnnnnnnnnnnnnnnnnnnnnnnnnnnnnnnnnnnnnnnnnnnnnnnnnnnnnnnnnnnnnnnnnnnnnnnnnnnnnnnnnnnnnnnnnnnnnnnnnnnnnnnnnnnnnnnnnnnnnnnnnnnnnnnnnnnnnnnnnnnnnnnnnnnnnnnnnnnnnnnnnnnnnnnnnnnnnnnnnnnnnnnnnnnnnnnnnnnnnnnnnnnnnnnnnnnnnnnnnnnnnnnnnnnnnnnnnnnnnnnnnnnnnnnnnnnnnnnnnnnnnnnnnnnnnnnnnnnnnnnnnnnnnnnnnnnnnnnnnnnnnnnnnnnnacatcccaaagaggcctttctctcagtgtttatctacaattatttctcctctctttgcagannnnnnnnnnnnnnnnnnnnnnnnnnnnnnnnnnnnnnnnnnnnnnnnnnnnnnnnnnnnnnnnnnnnnnnnnnnnnnnnnnnnnnnnnnnnnnnnnnnnnnnnnnnnnnnnnnnnnnnnnnnnnnnnnnnnnnnnnnnnnnnnnnnnnnnnnnnnnnnnnnnnnnnnnnnnnnnnnnnnnnnnnnnnnnnnnnnnnnnnnnnnnnnnnnnnnnnnnnnnnnnnnnnnnnnnnnnnnnnnnnnnnnnnnnnnnnnnnnnnnnnnnnnnnnnnnnnnnnnnnnnnnnnnnnnnnnnnnnnnnnnnnnnnnnnnnnnnnnnnnnnnnnnnnnnnnnnnnnnnnnnnnnnnnnnnnnnnnnnnnnnnnnnnnnnnnnnnnnnnnnnnnnnnnnnnnnnnnnnnnnnnnnnnnnnnnnnnnnnnnnnnnnnnnnnnnnnnnnnnnnnnnnnnnnnnnnnnnnnnnnnnnnnnnnnnnnnnnnnnnnnnnnnnnnnnnnnnnnnnnnnnnnnnnnnnnnnnnnnnnnnnnnnnnnnnnnnnnnnnnnnnnnnnnnnnnnnnnnnnnnnnnnnnnnnnnnnnnnnnnnnnttttaagttgctagaaaataaaaatgatttattggctgcctttaattttgaggcaattgaaggatgatccctccctcctttgatacccaaaacagtataggaatacaggaaaatagaatgaaaaagtc

SEQ ID NO: 20597 - DNA, 828 bp, Macaca Mulatta
ggggctcttttcccggctggaaccatggagggtgcggaagagaagaagaaggttcctgctgtgccagaaacccttaagaaaaagcgaaggaatttcgcagagctgaagataaagcgcctgagaaagaagtttgcccaaaagatgcttcgaaaggcaaggaggaagcttatctatgaaaaagcgaagcactatcacaaggaatataggcagatgtacagaactgaaattcgaatggcgaggatggcaagaaaagctggcaacttctatgtacctgctgaacccaaattggcgtttgtcatcaggatcagaggtatcaatggcgtgagcccaaaggtccgaaaggtattgcagcttttgcgccttcgtcaaatcttcaatggaacctttgtgaagctcaacaaggcttcgattaacatgctgaggattgtagagccatatattgcatgggggtaccccaatctgaagtcagtaaatgagctaatctacaagcgtggttatggcaaaatcaataagaagcgaattgctttgacagataacgctttgattgctcgatctcttggtaaatatggcatcatcctgcatggaaggatctgattcatggagatctattaccgttgggaaaaaccctttcaaaagaaggcaaataactttccctggtgggccctttccaagtttatcctttcctccccccaaagggtggggaattgaaatgaaaaaaacgaaccccccccattttttgttaaacaaaggtggagaaaaattctctgggcaaaccagggggggggaacccctattatatcattgggctttaatttccgagagaattgg

SEQ ID NO: 20598 - DNA, 829 bp, Macaca Mulatta
gattcaagatggcagctgtcataaggcaacatttctttttcacacccaggaacctaatcatacttccagtgattgaagtacaaaaacttcctcatctcaaaactgaacgaaagtattacattgaaagcagttctgtatgctttctgtaaagtctctgaattagttccgaattcaggctgttggccaggtaattgctgcagagggagaaatgagacagaaagatactgtcattatgaaatgcatgtaataaagcattggctaaatcttaaagaatctcaggaagaacagacttcctcctaagaaggagaaaaggcatttttaaaggactatgattgataaagtatttaattcttttaaaaattatattgatctcagcttttttagagaattccctagaactaaaaatgtataaatatggaattcttcagggtatcttttatttttgactgagtgcatagtacccattagacagctggagatgcagagcactatggagcaatactggctaatgcttccaaatgtgcactgcttctgtctaaaaattacaagccacagtctaatatgccttattttccaaaacactaagctgtattcaggtccctgatgggcatatacatcttagccggtgatacactacctcttacgtgttgcctctttgtgttgcttggtgctcttttgaaaacaaggtgcttatggctttcatagactatttcctttttcatctttaccactctttaaaagtgtatgtactggttacatcaagatatgttttggttgttagtacttattttaaattgtttggtcacacactcaataacacgtaaaacta

SEQ ID NO: 20599 - DNA, 348 bp, Macaca Mulatta
  misc_feature (1)...(348): n = A,T,C or G
gggcccgaagttgctcagcctgaggtacgtaccaccctgggtcgtgtgtgaggccggcaggtgggcgtgaagggcacagaccgccttgtgaacgtcatcctgggcattccatttgcccagccaccactggggcctgactggttctcagccccacgcccagcacagccctgggagggtgtgcgggatgccagcagtgcaccccctatgtgngtgcctacaagacgtggagagcatgaacaacagcagatttatcctcaatggaaaacagcagatcttctctctttcagaggactgcctggtcctcaacatctatagcccagctgaggccaccacaggggccagtaggcc

SEQ ID NO: 20600 - DNA, 226 bp, Macaca Mulatta
tgccgcgccgcagccccacacgccagctcggctgtttttctgcattatttatattcaactgacagacaaaaaccaaccaacgacaaaacaaaaacccccaatcatgaacgcctgtacatagaactcttttgtacaaatgaaactattttcttcttctccatgaagccagggcacaaagaatttgacagtacaagtcaaatcccccaaaccacaaaatatgtgtgga

SEQ ID NO: 20601 - DNA, 2888 bp, Macaca Mulatta
  misc_feature (1)...(2888): n = A,T,C or G
taaacccatctcctcctatgccacctgcctgggtccctcctgggactttatcaccgtgccacactttttggaactactggttagaaggtgagtgtccatcccctccaaggcacggaggtgcctctgtcccctactggctgtgtcttgaagatgcacctcttggagcctcagttggctcctctggaacagggagtaatgagaagatgaacctcacagggttcttgtagggactgaatgatctaagacacagcaaacaaaggggtccctagagcctaaaactctggacaatctgctgtgggtgctgtgattcatgtttattacttttctcttccccctcactgaagcagttctcagcattctgcctcaatggctcatatccttcgctgtttggaaaaacacatagcaaagcaagtctgcaatggcattggtaaacgatgtctgagtttccttctggctggactttctccttgatacagacagaagtggggtcccttcatgctgagaaaggagccacaggccctctctgacatctggagaggctcactgagtttctccaatggttggggttcactcattcaacacatacatacaaaacacctcatttgtgcatcgttcttcttgtgacttggcataatttcataaacaaggcagatgacaatccctgggcctcaattctacccagagtcaggcgctcacagtagacagaataaacaaatcatatctacagaacgttagaggggaaaccctcatggcctcctctacgtatggtggcatcctcccagatcctgactagaatgacggagcccaacaagtatctactggggggacttagggttctgaagggcctcttcacccacaaaacatggggggaaatatgtggactctggctggggagagactaaaggagccctggggttcatatgtcttgtaattcccacaacaaggctgacatctggggacttcccctgcacgaggcaaatagtgagttctgtaaatggagacttaggtcccttgcaaaggagacgtgaggttgaggtcacaactggccactgagagacccatccccagcaccgtgccttcccagctctccctgtcctcctccacccaacatctgcccctaccctcctcaccccaggaccaggggaaccaaactggagctttgatgagcaagctgctcacaaatctgcctggagctgcagtctagagtgcccaggtgcacagtgttgtgctccagggccattgggaagagaatgtcaatgggacgctggggcgcagaatggtccgtacagccctgctacatggccaggtctgcccctttcaggacaacactgatggcttnngcaccatcacctccattttgatcacctggacccttgaaaacacttcaatttgctatcaccccccacaacggtcatctttacggataaagttggccttcaggaacttcacctggactgcactggacgtgtaggaccaccatgaacttgtcctaggccagttggtgcttccggagcccaacgaggccaagccagatnnnnnnnnnnnnnnnnnnnnnnnnnnnnnnnnnnnnnnnnnnnnnnnnnnnnnnnnnnnnnnnnnnnnnnnnnnnnnnnnnnnnnnnnnnnnnnnnnnnnnnnnnnnnnnnnnnnnnnnnnnnnnnnnnnnnnnnnnnnnnnnnnnnnnnnnnnnnnnnnnnnnnnnnnnnnnnnnnnnnnnnnnnnnnnnnnnnnnnnnnnnnnnnnnnnnnnnnnnnnnnnnnnnnnnnnnnnnnnnnnnnnnnnnnnnnnnnnnnnnnnnnnnnnnnnnnnnnnnnnnnnnnnnnnnnnnnnnnnnnnnnnnnnnnnnnnnnnnnnnnnnngagctgttcaagaacgtggagctctacgaatgcttgggctccatctggggccaacgacatcagaaggggagtgagcacgtggcacccacagtttgtgccaccattgcacacttcaacaggctcaccaactgtgtcaccacctcctgcctcggggaccacagcatgagggcccaggacagggccagggtggtggagcactggatcaaggtggccagggnggagtgcctaagcctcaacaacttctccgcggtgcacgccatcgtctctgctctgtgcagcaacccaatacatcggctacacaagacgtgggcaggagtgtccagcaaaagcacaaaacatctaaaacaactctgcgaaaaagacactgccgtgaagagggacctgctgatcaaggnnaggcggggagctttaaggtggccacccaggagaggaacccccagagagcccagatgaggctacagaggcagaagaagngggcgtggtccccttcctgggggattttctgactgagttacacaggttggattcagccatcccggacgatctggatgnnnnnnnnnnnnnnnnnnnnnggaggtccgagttctgcaggaaatgcagctgctccaagtggctgccatgaattacaggcttcggcctcttgagaaatttgtcacctatttctcaagaatggagcagctcagtgacaaggagagnagctacaagctttcctgccagctggagcccgaatcccagtaggccagcaacatcctgcagtggctgggaccccaccgggatgctggccagaacaccagctctgcaccatccttcacccagaccgtgacaccaggaaaccacatctaggaggctggcagctcagctgcatctggcccctgctccttaacacaagctgctcctgctggccaggatcaggccatgggtcttttgcgagtcaggcgggagaccattttatgtttactttctttactgtataagtaagggtttttttctaagctttcattaaaataaaattttaaaatgctattcaaaa

SEQ ID NO: 20602 - DNA, 223 bp, Macaca Mulatta
catcacacaggttatcgaacttttagatggaattcgcatctgtgaacttgctctttcatgtgaaaagataagcgaggtcactgtcaaagattggttggtttgccttgcaaaacggaaaactggaattttagctcaaaaagtagaacctaaaatcaacatagatgtacaactagattctcaaaagaaaactggagttgaagatgagctgtttcaagaggatgac

SEQ ID NO: 20603 - DNA, 1440 bp, Macaca Mulatta
ggggtcgctcgcgccctttatactcacttccgcccgcccgggggggctttttctttcggcggagcgcggcggcaagatggccgtgcaaatttccaagaagaggaagtttgtcgctgatggcatcttcaaagctgaactgaatgagtttcttactcgggagctggctgaagatggctactctggagttgaggtgcgagttacaccaaccaggacagaaatcattatcttagccaccagaacacagaatgttcttggtgagaagggccggcggattcgggaactgactgctgtagttcagaagaggtttggctttccagagggcagtgtagagctttatgctgaaaaggtggccactagaggtctgtgtgccattgcccaggcagagtctctgcgttacaaactcctaggagggcttgctgtgcggagggcctgctatggtgtgctgcggttcatcatggagagcggggccaaaggctgcgaggtcgtggtgtctgggaaactccgaggacagagggctaaatccatgaagtttgtggatggcctgatgatccacagcggagaccctgttaactactacgttgacactgctgtgcgccatgtgttgctcagacagggtgtgctgggcatcaaggtgaagatcatgctgccctgggacccaactggtaagattggccctaagaagcccctgcctgaccatgtgagcatcgtggaaacccaaagatgaaatactgcctaccaactcccatctcagaacagaagggtggggaagcccagagaccgcctgccatgccccagccagttccccacagcataacagggtctccttggcagctgtattctggagtctggatgttgctctgtaaagatctttaataaaatctggtacaaagacccccccttccattcacccaaaatttccccaaaacttttcgggccgcccctcggccctcaagaaacctttttaaaaccatttccttctggcgccccgggcccaactaggtatcctgaacattgctcataatgctgtttcccttggaacatcctcgggtcctggaaatcagcggctttggatttctcccccaagtataaaacttccgcgggtggcccaccccaactctctcctataacccaccccccactttggcgtttcttacaggggcgcttcaccccggaacccccatccccaatcgggagcttcccgcgcccagtctcttttattatctcccacggtgccccccccactcctcctgagctccccttaaccggcagccgaccgccttcgtctagcccttatatcctacgcacttccccgcctgaacgccctagcgcacctgctcttttctacatgatcgcggacgccccggaaccactctcttagagatgttaggccgtccgccgcttttgctcttcctccatcttgccggcctcctgttttccctt

SEQ ID NO: 20604 - DNA, 618 bp, Macaca Mulatta
tcatccattcactcctggggtgtagggcacgcaaaagagcttcccattgcttctgctctcctcagaggtcccgggctggacagaggctggtacttacccactccttttagcttttagggattaaagaagggtcaagccagccactgctgtggctctgtccagggcttggttgagggaacggcttctggctgtatggctgcatgtgacaagccaagtcccctcccacctctccccaaacccctgcatccctgtattcacacgggtcactctgactcagacaggtactattcataggcagtgtagacaacaagaggagcctgggcttgggcttcctctgagtcgtgatgccaaaggttgcgactcctgactctggataatttttagttgctttttgttttttctgctgcactttcctggtgccccatgtttttctctctttcttcccctctcattccccttctaagtgtggtgctttggtgggcaaaccctcagcagtcctgaccttctggtgaacaggtgcttgtgacctacaagtcagagtcctctgtcacagtcggccactggatttcccgcgttggctctcaggagtgtgaccagagtagacttggggcatggcca

SEQ ID NO: 20605 - DNA, 988 bp, Macaca Mulatta
  misc_feature (1)...(988): n = A,T,C or G
ggttccagaatatcttaaccatgtaagtaaacgtttagaggaagaaggagacagagtgatcacttacttggaccacggcacacagnnnnnnnnnnnnnnnnnnnnnnnnnnnnnnnnnnnnnnnnnnnnnnnnnnnnnnnnnnnnnnnnnnagggcttgaccacttactggacgagaacagagtgccggacctcgcgcagatgtaccagctgttcagccgggttaggggcgggcagcaggcgctgctgcagcactggagcgagtacatcaannnnnnnnnnnnnnnnnnnnnnnnnnnnnnnnnnnnnnnnnnnnnnnnnnnnnnnnnnnnnnnnnnnnnnnnnnnnnnnnnnnnnnnnnnnnnnnnnnnnnnnnnnnnnnnnnnnnnnnnnnnnnnnnnnnnnnnnnnnnnnnnnnnnnnnnnnnnnnnnnnnnnnnnnnnnnnnnnnnnnnnnnnnnnnnnnnnnnnnnnnnnnnnnnnnnnnnnnnnnnnnnnnnnnnnnnnnnnnnnnnnnnnnnnnnnnnnnnnnnnnnnnnnnnnnnnnnnnnnnnnnnnnnnnnnnnnnnngtaaagatgtctttgaagcattttataaaaaagatttggcaaaaagactccttgttgggaaaagtgcctcagtcgatgctgaaaagtctatgttgtcaaagctcaagcatgngagtgtggtgcagccttcaccagcaagctggaaggcatgttcaaggacatggagctttcgaaggacatcatggttcattttaagcagnnnnnnnnnnnnnnnnnnnnnnnnnnnnnnnnnnnnnnnnnnnnnnnnnnnnnnnnnnnnnnnnnnnnnnnnnnnnnnnnnnnnnnnnnnnnnnnnnnnnnnnnnnnnnnnntaaacttcaggaagtatttaaggcattttatcttggattttcagtggtcgaaaacttcagtggcaaactactttgggacatgctgttttaaaagcggagtttaaagaag

SEQ ID NO: 20606 - DNA, 629 bp, Macaca Mulatta
  misc_feature (1)...(629): n = A,T,C or G
gaggttaagaacangcggctaaacagtgtaacaggaagctgctcangtcggagaaagtaaggaagcaaacgttgtcaccgtgggggcaatggagaggacagtgaggagccctttatcctgataagagtgccttttgggtaaagaaaggaaagaggatgccttgagaggcgccactgtattagagaggacctggaagccaggatactaattctggggagatgggttccccaggcttactctaggagtagagacccatgggacgagggtttgatttgagaaagatcattttcttgggagtgggtggtgcgagctagacccttggagctgggataaaggaccttttaacccactgagaggtggctgcaataaatggaattgccctgggggtgagcaacagaaattggttcaagtaagtttctattttttgcagcacctgggctgtcccccatgcagaccctgaaggtttctgtgtctgcagtgactctgggcctgggcctcatcatcttctctcttggtttgatcagctggcggagagctggctcctctagtgagtgactccctgaattcccatccccactcttggtcccaatctctgcttactttctgttagtgattgactctttccttcc

SEQ ID NO: 20607 - DNA, 719 bp, Macaca Mulatta
caaaggggtataatgaacatgagcttttcctagaacttagtcagaaaatatcccaactaaaagaaatccccaaaaaagcagaaaacagcccatttaccaaatgtaccctgtgcctacaggaggtgttggctgtgtctgctgccttctctggtttattgtgatttatgatgaccccacttcctatccatggataagcacctcagaaaaagaatacatcacatcctccttgaaacagcaggtacatacaaagacaccaacactttcctgagaccttgtatctgaattttcttgagaccttatatctgtatttttaagggtgactaagtgtgtgagcatctcttggatttgccattctgacagtaaatttgttttcaggtcaggtcttctcagcagcctcttcccatcaaagctgtgctcagatctctacccatttggtccatatgtttaggctgtttcagccatcaatggttagttagcacaatggttgtatacataccaacttacatcagctctgtgtaccatattaacatcagagacgtgagtatgtttccttcccttcctttctcctgcttgcatggctgaccaattactctgccctcactaatcattccacttagagaaatgtatttcttattaccaaaaataatctaatatttaatattcatgccagtagcttttttgcggtatgatttgagaggttactgatttcctaagaaagt

SEQ ID NO: 20608 - DNA, 780 bp, Macaca Mulatta
gggagaagcagcagaagcatcgtgagggcggcagcccagggccagccacgatttgaacgctctgccttgcagctcttctggaccgaggagcccaaagccctaccctcaccattcaccaggttacggttcttatctgagtgaatacacatggctctgttacgaaaaattaatcaggtgctgctgttccttctgatcgtgaccctctgtgtgattctgtacaagaaagttcataaggggactgtgtctaagaatgatgcagatgatgaatccgagactcctgaagaactggaagaagagattcctgtggtgatttgtgctgcagcagggaggatgggtgccactatggctgccattaatagcatctacagcaacactgacgccaacatcttgttctatgtagtgggactccggaatactctgactcgaatacgaaaatggattgaacattccaaactgagggaaataaactttaaaatcgtggaattcaacccgatggtcctcaaagggaagatcagaccagactcatcgaggcctgaattgctccagcccctgaactttgttcgattttatctccctctacttatccaccaacatgagaaagtcatctatttggacgatgatgtaattgtacaaggtgatatccaagaactttatgacaccaccttggccctgggccatgcagcggctttttcagatgactgcgatttgccctctgctcaggatatataacagactcgtggggacttcagaatacctattatggggcctattctggaacta

SEQ ID NO: 20609 - DNA, 1252 bp, Macaca Mulatta
  misc_feature (1)...(1252): n = A,T,C or G
gatcttgtgagcaaccagagtgcagagggactcctggaagactgtgacctgtttgggcctgctcgagatgatgtcctggccatggcagtcaagatggccaatgtcttggatgagcctgggcaagacttggaggcagacttccctaagnnnnnnnnnnnnnnnnnnnnnnnnnnnnnnnnnnnnnnnnnnnnnnnnnnnnnnnnnnnnnnnnnnnnnnnnnnnnnnnnnnnnnnnnnnnnnnnnnnnnnnnnnnnnnnnnnnnnnnnnnnnnnnnnnnnnnnnnnnnnnnnnnnnnnnnnnnnnnnnnnnnnnnnnnnnnnnnnnnnnnnnnnnnnnnnnnnnnnnnnnnnnnnnnnnnnnnnnnnnnnnnnnnnnnnnnnnnnnnnnnnnnnnnnnnnnnnnnnnnnnnnnnnnnnnnnnnnnnnnnnnnnnnnnnnnnnnnnnnnnnnnnnnnnnnnnnnnnnnnnnnnnnnnnnnnnnnnnnnnnnnnnnnnnnnnnnnnnnnnnnnnnnnnnnnnnnnnnnnnnnnnnnnnnnnnnnnnnnnnnnnnnnnnnnnnnnnnnnnnnnnnnnnnnnnnnnnnnnnnnnnnnnnnnnnnnnnnnnnnnnnnnnnnnnnnnnnnnnnnnnnnnnnnnnnnnnnnnnnnnnnnnnnnnnnnnnnnnnnnnnnnnnnnnnnnnnnnnnnnnnnnnnnnnnnnnnnnnnnnnnnnnnnnnnnnnnnnnnnnnnnnnnnnnnnnnnnnnnnnnnnnnnnnnnnnnnnnnnnnnnnnnnnnnnnnnnnnnnnnnnnnnnnnnnnnnnnnnnnnnnnnnnnnnnnnnnnnnnnnnnnnnnnnnnnnnnnnnnnnnnnnnnnnnnnnnnnnnnnnnnnnnnnnnnnnnnnnnnnnnnnnnnnnnnnnnnnnnnnnnnnnnnnnnnnnnnnnnnnnnnnnnnnnnnnnnnnnnnnnnnnnnnnnnnnnnnnnnnnnnnnnnnnnnnnnnnnnnnnnnnnnnnnnnnnnnnnnnnnnnnnnnnnnnnnnnnnnnnnnnnnnnnnnnnnnnnnnnnnnnnnnnnnnnnnnnnnnnnnnnnnnnnnnnnnnnnnnnnnnnnnnnnnnnnnnnnnnnnnnnnnnnnnnnnnnnnnnnnnnnnnnnnnnnnnnnnnnnnnnnnnnnnnnnnnnnnnnnnnnngttggagagcatgctcaatcgcatcctggctctgtacgagatttatgaggaactgggtcgtcctggggaggcatacctggactga

SEQ ID NO: 20610 - DNA, 497 bp, Macaca Mulatta
ggcaggatacatgattgtggatccatataggacacatgacaaatgtccatgccacaggactcgtggctggccagatgacctcaggctggcccaagatctaatttattaatttttgaagcaaatacgtatttatagattgcatgtgtggagcagctaggtcaggaaaagtcttctgcgcgagctgggaggggagagtgtccatgcactgaccagtccaggagcccaagggccaggactctgggacaagctggggacttagccatgaagtcccctcctgcctcattcgtcagcctacccataaataaacttgatgacctctcccttacttacatactagcttccaaggacaggtggaggtagggccagcctggccttgggagtggagaagctcagtctgtcccgtgtaagggacaaagccaggtctaacagtactgggtggggggcactgccaagacaataggctaggctagtgggtccagctattaccttggtgtgat

SEQ ID NO: 20611 - DNA, 377 bp, Macaca Mulatta
  misc_feature (1)...(377): n = A,T,C or G
gttgacaaagagatgatgcaaagaattagagaaaaatctatcttgcaagcacaagagagagcaaaagaagctacagaagcaaaagctgcagcaaagagggaagatcaaaaatatgcactaagtgtcatgatgaagnnnnnnnnnnnnnnnnnnnnnnnnnnnnnnnnnnnnntaaaatataagactagtactagaaattcggcatcaagaaatcttgctccaaaaggnaagggagaaattcagaaaatatatttactgagaagttaaaggaagacagtattcctgctcctcgctctgttggcagtattaaaatcaactttacccctcgagtattcccaacagctcttcgtgaatcacaagtagcagaagaggaggag

SEQ ID NO: 20612 - DNA, 656 bp, Macaca Mulatta
  misc_feature (1)...(656): n = A,T,C or G
gtcgatctgaagccgggtagtgggagaagatggttacatctcgaacggacaagtgttggacagccggagtcagtctccatggagattatctttgataacagatttcttctggggaatagctgagtttgtggttttgtttttcaaaactctgcttcagcaagatgtgaaaaaaagaagaagctatggaaactcatctgattccagatatgatgatggaagagggtacagctttttaaattgatagttctttttatctctttgtatatcttaattaaattagatattttaggtagatagagttagatttgtggaaattaagagtttaaatcctgttttagaaaattaatgcattactgtaaaagtcaaattgcctctgatttgataataatcagagttaatctgacaaaactaaaatatacatcaaatatcccatgggaaaagtctaaattagaggatgaaaactgatgaccaacattaaaatctaaagatttctttttaacatcctgatttccagttgctaattaaaaaacttagaagaccgccaggcgcnnnnnnnnnnnnnnnnnnnnnnnnnnnnnnnnnnnnntcgaggcgggtagatcacgaggtcaagagatagagaccatcctgaccaacatggtgaagacccgtctcta

SEQ ID NO: 20613 - DNA, 422 bp, Macaca Mulatta
  misc_feature (1)...(422): n = A,T,C or G
tagttgatcctgaaaacgtatttattggtcgccacttcattattgggctttccacagttacctttactctgcctttatccttgtaccgaaatatagcgaagcttggaaaggnnnnnnnnnnnnnnnnnnnnnnnnnnnnnnnnnnnnnnnnnnnnnnnnnnnnnnnnnnnnnnnnnnnnnnnnnnnnnnnnnnnnnnnnnnnnnnnnnnnnnnnnnnnnnnnnnnnnnnnnnnnnnnnnnnnnnnnnnnnnnnnnnnnncatttatttgccaccataactccttcttagtttacagttctttagaagaacccacagtagctaagtggtcccgccttatccatatgtccatcgtgatttctgtatttatctgtatattctttgctacatgtggatacttgacatttactggcttcacccaagg

SEQ ID NO: 20614 - DNA, 1295 bp, Macaca Mulatta
  misc_feature (1)...(1295): n = A,T,C or G
cagcccaccagcgttaccccccagccccgagctggaccgcacaccttgggacacggttgtccacatcctaaggacgagccccagactggaggagaggtccgaggaggtnnnnaggtgggcgttggactctttgcgaggaccnnnnnnnnnnnnnnnnnnnnnnnnnnnnnnnnnnnnnnnnnnnnnnnnnnnnnnnnnnnnnngaggagcaggacctatcggaggtggagctgagccccgtaggctcggaggagccccgctgcctgtccccggggagcgcgccctcactagggcccgnnnnnnnnnnnnnnnatcgggcctgcgagccagcccggggcctggcgagctgggcaaggtcaagaaggagcagcaggacggagaggcggacgatgacaagttccccgtgtgcatccgcgaggccgtcagccaggtgctcagcggctatgactggacgctggtgcccatgcccgtgcgcgtcaacggcgccagcaagagcaagccgcacgtcaagcggcccatgaacgccttcatggtgtgggcgcaggcggcgcgcaggaagctcgcggaccagtacccgcacctgcacaacgccgagctcagcaagacgctgggcaagctctggagnnnnnnnnnnnnnnnnnnnnnnnnnnnnnnnnnnnnnnnnnnnnnnnnnnnnnnnnnnnnnnnnnnnnnnnnnnnnnnnnnnnnnnnnnnnnnnnnnnnnnnnnnnnnnnnnnnnnnnnnnnnnnnnnnnnnnnnnnnnnnnnnnnnnnnnnnnnnnnnnnnnnnnnnnnnnnnnnnnnnnnnnnnnnnnnnnnnnnnnnnnnnnnnnnnnnnnnnnnnnnnnnnnnnnnnnnnnnnnnnnnnnnnnnnnnnnnnnnnnnnnnnncaggccagagccatggcccacccacccnctccaaccaccccaaagacagagctgcagtcgggcaaggcagacccgaagcgggacgggcgctccatgggggagggcgggaagcctcacatcgatttcggcaatgtggacatcggtgagatcagccacgaggtaatgtccaacatggagacctttgatgtggctgagttggaccagtacctgccgcccaatgggcacccaggccacgtgggcagctactcagcagctggctatgggctgggcagcgccctggctgtggccagtggacactccgcctggatctccaagccaccaggcgtggctctgcccacggtctcagcacctggtgtggatgccaaagcccaggtgaagacagagaaggcggggccccaggggcccc

SEQ ID NO: 20615 - DNA, 772 bp, Macaca Mulatta
  misc_feature (1)...(772): n = A,T,C or G
ggggtcgcgctcgctcactccagctgcagccactctcgcccgtggctgcttcctccatcctggtattttttggagcctccatcctggttcttccaaagtgcccggacccaaaacaggaaagtgttgcagagataggaacatgggagagaaacaatctggataacatgaaagtgatgctggtggctaagggaaggcaacttgattctgtgggaagggctgtagctgatccatccgttgtctagatttgagtatgagcacagtggaagaggattctgacacagtaacagtagaaactgtgaattctgtgactttgactcaggacacagaagggaatctcattcttcactgccctcagaatgaagcggatgaaatagactcagaagatagtattgaacctccacataagaggctttgtttgtcctctgaggatgatcagagtattgatgattctactccttgcatatcagttgttgcacttccactttcagaaaatgatcagagctttgaggtgaccatgactgcgaccacagaggtagcagatgatgaggttactgaggggactgtgacacagatccagattttgcagaatgagcaactagatgaaatatctcccttgggtaatgaggaagtttcagcagttagccaagcatggtttacaactaaagaagataaggattctctgactaataaagggcataaatggaagcanggggatgtggtccaaggnaagaaaattgatatttttgaatgaacaatattgaaaccgctatct

SEQ ID NO: 20616 - DNA, 739 bp, Macaca Mulatta
  misc_feature (1)...(739): n = A,T,C or G
gaatctgccaggccaacctgtgtaaaactggaatgctgtcctaacctcttcggtccacggatggttctggataagtgttctgagaactgttctgtacttacaaagaccaaatacacacattattatgnnnnnnnnnnnnnnnnnnnnnttgggaggccacctggtgggcatagtaacttagcttgtgccctgaaaaaagccagtaagaggagaaagaggcggaaaaatgtttttgttcataagaagaaacgctcctctgcatctgttgataataccccagcgggctctccccaggggaagtgggggtgaagatgaggatgacccagatgaaggggatgatgattccctaagtgaaggcagtacatccgagcagcaggatgagctacaggaagaatcagaaatgtcagaaaaaaagtcatgctcctcttcgaccacccaaagtgagatatccacatcgctgcctccagatagacaaaggagaaaaagggagcttcgcaccttttcgttttctgatgatgaaaataaacctccttcaccaaaggaaataagaattgaagttgctgaaaggcttcacctggacagtaatcccttgaagtggagcgtgggagacgtagtgcggttcatcagatccactgactgtgctccaatagcaaggaatattcctagagcagggaatgatgggcagggcctattgctccttacctttccaatgttcaagattgctggattcaaattgggc

SEQ ID NO: 20617 - DNA, 458 bp, Macaca Mulatta
aattttcaggcagaatctaactaacctgttttgtggcattaggatcatcattatagtagtatgatctttatgctattatacctacactatgtcccgaatgttttaaaggccagcaaaatggaaacagtagaatacttgcctgaatggaaataatcttcagtttcaacttatgcctctgtgctgtggtaagttggtatctattcctgattctacagaaacaggagctcaattcctctgacatcattagatgattttcacagtaagtggtataattagatgaacaaatgtttaggaataaccataaagaatgtaaaaacttatctgaggatcaatgttttgtatttaaaaactgcttggatatgagatacacttgtatggctgaattatttaccatctggtatattgttgtggaggggttttatgtattgggtcaggatttctatcaatgaactgaattt

SEQ ID NO: 20618 - DNA, 789 bp, Macaca Mulatta
gggggcgggcctcagtgattggctctgtaggctccatgtagaagccactgtcactgggactgtgctcagagacccctctcccagctattcccaccctctctccgactccgagagcatgcttaatcctgcttctgcttctcatttctgtagcctgatcagcgccgcaccagccgggaagagggtgatcgctggggctcgtgccctgcatccctctcctcccagggcctgccccccagctcgggccctctgtgagatctatctttggcctcctcccaaatggagctggccctgtcctggggatgtgtgatggtccccctgcttacccacaaaagacaagtctttacagaatcaaacgcaattttaaatctgagagctcgctttgagcgatttggttttgtgattgcctctgaagcctatgtatgccatggaggcactacaaactctgaggtttctgaaatcagaagtgaaaaaatcaatgaataaaccagcatcttgccactgcccgcccctgaagccacagcagggtttcaggttccaatcagaactgttggcaagatgacatttccatgcataaatgtgatccacagatggtcctggtgttatttgtaactttttgcaagccatttttatatatatttttgtgcacatttttttttaccttttctttaaaaaactaatgtattttcacaaaaaaatttatagtcgaaacaatccatatttttgaagtgggaaccctatgaatgtcagttaatttatccttcctctattaaccccaaactactgggccat

SEQ ID NO: 20619 - DNA, 537 bp, Macaca Mulatta
caaaaagaaatcaatctgcagaaatgtgaagatttccaagcagtgaaaactgcaactagcgatgtaaatgtgctattacctaggtaactgcatatatataaggaatgtattttgttaagaaggcttttgtgaaattcataatttttctttttaatatatttcttccatggaagagttgtcatcatcactaaaacttcagtactgagagcaacatgactcagtagccacagaagctatgatttttaaaatgtataattgaatcagagtaatcataattcaggggagacattcaaattagagacaagggagaagcaacgctgaggaagaccctagatagagctcattttagtccacctagtcattatatctggctgtacccattttctgcgtcttctttctcaacaataaaaaatgtaactattttgaatgcccacaaatcccattccagtgttactttccgtggatgcagtaccatgttctcattttcaatgacatttcaaccacaggcagaaaagattgtttagtgcttgacccaaa

SEQ ID NO: 20620 - DNA, 1770 bp, Macaca Mulatta
  misc_feature (1)...(1770): n = A,T,C or G
gctgggatggccgccgccggtgtagcagtggctagtgcttagcgcggatctttgccgggcgctgagggcagcgcagtctccttgtttgtcccgttcgcctgcgcgtggtactcaagggcaccagcattcccgcggtcggcagcatgggtcgggagtcacgnnnnnnnnnnnnnnnnnnnnnnnnnnnnnnnnnnnnnnnnnnnnnnnnnnnnnnnnnnnnnnnnnnnnnnnnnnnnnnnnnnnnnnnnnnnnnnnnnnnnnnnnnnnnnnnnnnnnnnnnnnnnnnnnnnnnnnnnnnnnnnnnnnnnnnnnnnnnnnnnnnnnnnnnnnnnnnnnnnnnnnnnnnnnnnnnnnnnnnnnnnnnnnnnnnnnnnnnnnnnnnnnnnnnnnnnnnnnnnnnnnnnnnnnnnnnnnnnnnnnnnnnnnnnnnnnnnnnnnnnnnnnnnnnnnnnnnnnnnnnnnnnnnnnnnnnnnnnnnnnnnnnnnnnnnnnnnnnnnnnnnnnnnnnnnnnnnnnnnnnnnnnnnnnnnnnnnnnnnnnnnnnnnnnnnnnnnnnnnnnnnnnnnnnnnnnnnnnnnnnnnnnnnnnnnnnnnnnnnnnnnnnnnnnnnnnnnnnnnnnnnnnnnnnnnnnnnnnnnnnnnnnnnnnnnnnnnnnnnnnnnnnnnnnnnnnnnnnnnnnnnnnnnnnnnnnnnnnnnnnnnnnnnnnnnnnnnnnnnnnnnnnnnnnnnnnnnnnnnnnnnnnnnnnnnnnnnnnnnnnnnnnnnnnnnnnnnnnnnnnnnnnnnnnnnnnnnnnnnnnnnnnnnnnnnnnnnnnnnnnnnnnnnnnnnnnnnnnnnnnnnnnnnnnnnnnnnnnnnnnnnnnnnnnnnnnnnnnnnnnnnnnnnnnnnnnnnnnnnnnnnnnnnnnnnnnnnnnnnnnnnnnnnnnnnnnnnnnnnnnnnnnnnnnnnnnnnnnnnnnnnnnnnnnnnnnnnnnnnnnnnnnnnnnnnnnnnnnnnnnnnnnnnnnnnnnnnnnnnnnnnnnnnnnnnnnnnnnnnnnnnnnnnnnnnnnnnnnnnnnnnnnnnnnnnnnnnnnnnnnnnnnnnnnnnnnnnnnnnnnnnnnnnnnnnnnnnnnnnnnnnnnnnnnnnnnnnnnnnnnnnnnnnnnnnnnnnnnnnnnnnnnnnnnnnnnnnnnnnnnnnnnnnnnnnnnnnnnnnnnnnnnnnnnnnnnnnnnnnnnnnnnnnnnnnnnnnnnnnnnnnnnnnnnnnnnnnnnnnnnnnnnnnnnnnnnnnnnnnnnnnnnnnnnnnnnnnnnnnnnnnnnnnnnnnnnnnnnnnnnnnnnnnnnnnnnnnnnnnnnnnnnnnnnnnnnnnnnnnnnnnnnnnnnnnnnnnnnnnnnnnnnnnnnnnnnnnnnnnnnnnnnnnnnnnnnnnnnnnnnnnnnnnnnnnnnnnnnnnnnnnnnnnnnnnnnnnnnnnnnnnnnnnnnnnnnnnnnnnnnnnnnnnnnnnnnnnnnnnnnnnnnnnnnnnnnnnnnnnnnnnnnnnnnnnnnnnnnnnnnnnnnnnnnnnnnnnnnnnnnnnnnnnnnnnnnnnnnnnnnnnnnnnnnnnnnnnnnnnnnnnnnnnnnnnnnnnnnnnnnnnnnnnnnnnnnnnnnnnnnnnnnnnnnnnnnnnnnnnnnnnnnnnnnnnnnnnnnnnnnnnnnnggtcgggtcacaaatcttcgaagagtgacatatgttgttttagatgaagcagacagaatgtttgatatgggttttgaaccccagg

SEQ ID NO: 20621 - DNA, 694 bp, Macaca Mulatta
aaattcctattcttctttgacccaactggaggccacactcaggtgcttgggttgagtcttgtcctttcttcaacagcttgcatcaacctccatcaagactggggttggaataacttaagcgtctgctaagctagactgcttcaaccccagtgtctcatgtgtttcagcccttcaaccagtgagtttagaaaaccttaaagaaatcttcataacaaaatataagcattatagcgcttacatctcagcacccacacatccctaacagcatttttcaagtcaaagcgtatactacatctattacaacctaaatccacatcatcattgccagccatagattataccagatagagtattaatattattgagttgaagaatgtagattgtgaaaaatagtaaaagcattattattgatatataagcatgggctatttggagaaatactttgtctcagccaaccaagtgcagcctagaaccaaaacatgccaaaggacctactttggctctttctccctaagcatttgagtctcagacttttccaattcagagggaaaagcccatccaacaaaaaacagcagcaacaaaaagcttacccaacaaaaagttctgttctgaaagacagaagaggagggctggaattttctaaataattcccagagactggcttcttcctcctcaggcctggggaatagcaggg

SEQ ID NO: 20622 - DNA, 1396 bp, Macaca Mulatta
  misc_feature (1)...(1396): n = A,T,C or G
gcgaggtgtgtgcgccgccagtatggccgggctatggcggcgagcacaggctacgtgcgactgtggggagcggcgcggtgctgggcgctgcggcggccgatactggccgccgccggggggcgggtccccactgcagccggagcgtggttgttccgaggccggcgggcctgtgacgcctttccttcttgggcactgtggggccgaggcccggtaattgggggccagtggcgggggttttgggaagcgaacagccgcggcggaggagcattctcggggggccaggacgcctccgagggcggcgcagaggaaggagcnnnnnnnnnnnnnnnnnnnnnnnnnnnnnnnaaggcccggtcataacggcgctcacgcctatgacgatccccgatgtgttcccgcacttgccgctcatcgccatcacccgcaacccggtgttcccgcgctttatcaagattatcgaggnnnnnnnnnnnnnnnnnnnnnnnnnnnnnnnnnnnnnnnnnnnnnnnnnnnnnnnnnnnnnnnnnnnnnnnnnnnnnnnnnnnnnnnnnnnnnnnnnnnnnnnnnnnnnnnnnnnnnnnnnnnnnnnnnnnnnnnnnnnnnnnnnnnnnnnnnnnnnnnnnnnnnnnnnnnnnnnnnnnnnnnnnnnnnnnnnnnnnnnnnnnnnnnnnnnnnnnnnnnnnnnnnnnnnnnnnnnnnnnnnnnnnnnnnnnnnnnnnnnnnnnnnnnnnnnnnnnnnnnnnnnnnnnnnnnnnnnnnnnnnnnnnnnnnnnnnnnnnnnnnnnnnnnnnnnnnnnnnnnnnnnnnnnnnnnnnnnnnnnnnnnnnnnnnnnnnnnnnnnnnnnnnnnnnnnnnnnnnnnnnnnnnnnnnnnnnnnnnnnnnnnnnnnnnnnnnnnnnnnnnnnnnnnnnnnnnnnnnnnnnnnnnnnnnnnnnnnnnnnnnnnnnnnnnnnnnnnnnnagggagtcggtgctgcagatgatgcatgctggccagcgggtggtggacaaccccatctacctgagcgacatgggcgctgcgctcaccggggccgagtcccacgagctgcaggacgtcctggaagagaccaannnnnnnnnnnnnnnnnnnnnnnnnnnnnnnnnnnnnnnnnnnnnnnnnnnnnnnnnnnnnnnnnnnnnnnnnnnnnnnnnnnaggtggaggaaaagatcaagcagacccatcgcaagtacctgctgcaggagcagctgaagatcatcaagaaggagctgggcctggagaaggacgacaaggacgccatcgaggagaagttccgggagcgcctcaaggagctcgtggtccccaagcatgtcatggatgtcgtggacgaggagctgagcaagctgggcctgctggacaaccactcctcggaattca

SEQ ID NO: 20623 - DNA, 11517 bp, Macaca Mulatta
  misc_feature (1)...(11517): n = A,T,C or G
ggaagctctatttactgttctggatgcatcgaaaggactcttaaatggaattagggatatgttggcaaatatatttctaccagctgttcttgcaacaaataactggggtgctttaaaccagtccaagcagggagaatctgaaaaacatattttcactgaaaccatcaacagatatctttcatttttagatggtannnnnnnnnnnnnnnnnnnnnnnnnnnnnnnnnnnnnnnnnnnnnnnnnnnnnnnnnnnnnnnnnnnnnnnnnnnnnnnnnnnnnnnnnnnnnnnnnnnnnnnnnnnnnnnnnnnnnnnnnnnnnnnnnnnnnnnnnnnnnnnnnnnnnnnnnnnnnnnnnnnnnnnnnnnnnnnnnnnnnnnnnnnnnnnnnnnnnnnnnnnnnnnnnnnnnnnnnnnnnnnnnnnnnnnnnnnnnnnnnnnnnnnnnnnnnnnnnnnnnnnnnnnnnnnnnnnnnnnnnnnnnnnnnnnnnnnnnnnnnnnnnnnnnnnnnnnnnnnnnnnnnnnnnnnnnnnnnnnnnnnnnnnnnnnnnnnnnnnnnnnnnnnnnnnnnnnnnnnnnnnnnnnnnnnnnnnnnnnnnnnnnnnnnnnnnnnnnnnnnnnnnnnnnnnnnnnnnnnnnnnnnnnnnnnnnnnnnnnnnnnnnnnnnnnnnnnnnnnnnnnnnnnnnnnnnnnnnnnnnnnnnnnnnnnnnnnnnnnnnnnnnnnnnnnnnnnnnnnnnnnnnnnnnnnnnnnnnnnggtaacaaatcaaatggtaacagcatgtaaagcatatattactgatggaggattaaaccatgtatgggatcaggaaacgccagtggtactaaagaaaattcaggnnnnnnnnnnnnnnnnnnnnnnnnnnnnnnnnnnnnnnnnnnnnnnnnnnnnnnnnnnnnnnnnnnnnnnnnnnnnnnnnnnnnnnnnnnnnnnnnnnnnnnnnnnnnnnnnnnnnnnnnnnnnnnnnnnnnnnnnnnnnnnnaagattacagaaatgataactgttgtgcaaacatattcaaccttgagtaattctaccatagaaggaatagatattatggcaataaaattcagaaatatttaccaaggggttaagaaaaagcaatatgacattctggatccaagaaggacagagtttgacacagatttcttagaattcatgacaaaaatcaatagtttagaggtnnnnnnnnnnnnnnnnnnnnnnnnnnnnnnnnnnnnnnnnnnnnnnnnnnnnnnnnnnnnnnnnnnnnnnnnnnnnnnnnnnnnnnnnnnnnnnnnnnnnnnnnnnnnnnnnnnnnnnnnnnnnnnnnnnnnnnnnnnnnnnnnnnnnnnnnnnnnnnnnnnnnnnnnnnnnnnnnnnnnnnnnnnnnnnnnnnnnnnnnnnnnnnnnnnnttgctcgcaacatgccccctatagcaggaaaaatactctgggtgaggcagctctatcgccggataagtgagcccatcaattatttcttnnnnnnnnnnnnnnnnnnnnnnnnnnnnnnnnnnnnnnnnnnnnnnnnnnnnnnnnnnnnnnnnnnnnnnnnnnnnnnnnnnnnnnnnnnnnnnnnnnnnnnnnnnnnnnnnnnnnnnnnnnnnnnnnnnnnnnnnnnnnnnnnnnnnnnnnnnnnnnnnnnnnnnnnnnnnnnnnnnnnnnnnnnnnnnnnnnnnnnnnnnnnnnnnnnnnnnnnnnnnnnnnnnnnnnnnnnnnnnnnnnnnnnnnnnnnnnnnnnnnnnnnnnnnnnnnnnnnnnnnnnnnnnnnnnnnnnnnnnnnnnnnnnnnnnnnnnnnnnnnnnnnnnnnnnnnnnnnnnnnnnnnnnnnnnnnnnnnnnnnnnnnnnnnnnnnnnnnnnnnnnnnnnnnnnnnnnnnnnnnnnnnnnnnnnnnnnnnnnnnnnnnnnnnnnnnnnnnnnnnnnnnnnnnnnnnnnnnnnnnnnnnnnnnnnnnnnnnnnnnnnnnnnnnnnnnnnnnnnnnnnnnnnnnnnnnnnnnnnnnnnnnnnnnnnnnnnnnnnnnnnnnnnnnnnnnnnnnnnnnnnnnnnnnnnnnnnnnnnnnnnnnnnnnnnnnnnnnnnnnnnnnnnnnnnnnnnnnnnnnnnnnnnnnnnnnnnnnnnnnnnnnnnnnnnnnnnnnnnnnnnnnnnnnnnnnnnnnnnnnnnnnnnnnnnnnnnnnnnnnnnnnnnnnnnnnnnnnnnnnnnnnnnnnnnnnnnnnnnnnnnnnnnnnnnnnnnnnnnnnnnnnnnnnnnnnnnnnnnnnnnnnnnnnnnnnnnnnnnnnnnnnnnnnnnnnnnnnnnnnnnnnnnnnnnnnnnnnnnnnnnnnnnnnnnnnnnnnnnnnnnnnnnnnnnnnnnnnnnnnnnnnnnnnnnnnnnnnnnnnnnnnnnnnnnnnnnnnnnnnnnnnnnnnnnnnnnnnnnnnnnnnnnnnnnnnnnnnnnnnnnnnnnnnnnnnnnnnnnnnnnnatatttgttgcaaggtaagtggaaaatatgctaattatnnnnnnnnnnnnnnnnnnnnnnnnnnnnnnnnnnnnnnnnnnnnnnnnnnnnnnnnnnnnnnnnnnnnnnnnnnnnnnnnnnnnnnnnnnnnnnnnnnnnnnnnnnnnnnnnnnnnnnnnnnnnnnnnnnnnnnnnnnnnnnnnnnnnnnnnnnnnnnnnnnnnnnnnnnnnnnnnnnnnnnnnnnnnnnnnnnnnnnnnnnnnnnnnnnnnnnnnnnnnnnnnnnnnnnnnnnnnnnnnnnnnnnnnnnnnnnnnnnnnnnnnnnnnnnnnnnnnnnnnnnnnnnnnnnnnnnnnnnnnnnnnnnnnnnnnnnnnnnnnnnnnnnnnnnnnnnnnnnnnnnnnnnnnnnnnnnnnnnnnnnnnnnnnnnnnnnnnnnnnnnnnnnnnnnnnnnnnnnnnnnnnnnnnnnnnnnnnnnnnnnnnnnnnnnnnnnnnnnnnnnnnnnnnnnnnnnnnnnnnnnnnnnnnnnnnnnnnnnnnnnnnnnnnnnnnnnnnnnnnnnnnnnnnnnnnnnnnnnnnnnnnnnnnnnnnnnnnnnnnnnnnnnnnnnnnnnnnnnnnnnnnnnnnnnnnnnnnnnnnnnnnnnnnnnnnnnnnnnnnnnnnnnnnnnnnnnnnnnnnnnnnnnnnnnnnnnnnnnnnnnnnnnnnnnnnnnnnnnnnnnnnnnnnnnnnnnnnnnnnnnnnnnnnnnnnnnnnnnnnnnnnnnnnnnnnnnnnnnnnnnnnnnnnnnnnnnnnnnnnnnnnnnnnnnnnnnnnnnnnnnnnnnnnnnnnnnnnnnnnnnnnnnnnnnnnnnnnnnnnnnnnnnnnnnnnnnnnnnnnnnnnnnnnnnnnnnnnnnnnnnnnnnnnnnnnnnnnnnnnnnnnnnnnnnnnnnnnnnnnnnnnnnnnnnnnnnnnnnnnnnnnnnnnnnnnnnnnnnnnnnnnnnnnnnnnnnnnnnnnnnnnnnnnnnnnnnnnnnnnnnnnnnnnnnnnnnnnnnnnnnnnnnnnnnnnnnnnnnnnnnnnnnnnnnnnnnnnnnnnnnnnnnnnnnnnnnnnnnnnnnnnnnnnnnnnnnnnnnnnnnnnnnnnnnnnnnnnnnnnnnnnnnnnnnnnnnnnnnnnnnnnnnnnnnnnnnnnnnnnnnnnnnnnnnnnnnnnnnnnnnnnnnnnnnnnnnnnnnnnnnnnnnnnnnnnnnnnnnnnnnnnnnnnnnnnnnnnnnnnnnnnnnnnnnnnnnnnnnnnnnnnnnnnnnnnnnnnnnnnnnnnnnnnnnnnnnnnnnnnnnnnnnnnnnnnnnnnnnnnnnnnnnnnnnnnnnnnnnnnnnnnnnnnnnnnnnnnnnnnnnnnnnnnnnnnnnnnnnnnnnnnnnnnnnnnnnnnnnnnnnnnnnnnnnnnnnnnnnggcaagcttctttggatctcagaaagagaattgatgatttcagtgagtcacgtcctctactggaaatgatgaccaataaggccatgaaacagaggcactgggatagaatctccgaattaactggaaccccatttgatgtggaatctgattctttttgccttagaaatatcatggaagcaccactccttaaaaataaggatgatattgaggnnnnnnnnnnnnnnnnnnnnnnnnnnnnnnnnnnnnnnnnnnnnnnnnnnnnnnnnnnnnnnnnnnnnnnnnnnnnnnnnnnnnnnnnnnnnnnnnnnnnnnnnnnnnnnnnnnnnnnnnnnnnnnnnnnnnnnnnnnnnnnnnnnnnnnnnnnnnnnnnnnnnnnnnnnnnnnnnnnnnnnnnnnnnnnnnnnnnnnnnnnnnnnnnnnnnnnnnnnnnnnnnnnnnnnnnnnnnnnnnnnnnnnnnnnnnnnnnnnnnnnnnnnnnnnnnnnnnnnnnnnnnnnnnnnnnnnnnnnnnnnnnnnnnnnnnnnnnnnnnnnnnnnnnnnnnnnnnnnnnnnnnnnnnnnnnnnnnnnnnnnnnnnnnnnnnnnnnnnnnnnnnnnnnnnnnnnnnnnnnnnnnnnnnnnnnnnnnnnnnnnnnnnnnnnnnnnnnnnnnnnnnnnnnnnnnnnnnnnnnnnnnnnnnnnnnnnnnnnnnnnnnnnnnnnnnnnnnnnnnnnnnnnnnnnnnnnnnnnnnnnnnnnnnnnnnnnnnnnnnnnnnnnnnnnnnnnnnnnnnnnnnnnnnnnnnnnnnnnnnnnnnnnnnnnnnnnnnnnnnnnnnnnnnnnnnnnnnnnnnnnnnnnnnnnnnnnnnnnnnnnnnnnnnnnnnnnnnnnnnnnnnnnnnnnnnnnnnnnnnnnnnnnnnnnnnnnnnnnnnnnnnnnnnnnnnnnnnnnnnnnnnnnnnnnnnnnnnnnnnnnnnnnnnnnnnnnnnnnnnnnnnnnnnnnnnnnnnnnnnnnnnnnnnnnnnnnnnnnnnnnnnnnnnnnnnnnnnnnnnnnnnnnnnnnnnnnnnnnnnnnnnnnnnnnnnnnnnnnnnnnnnnnnnnnnnnnnnnnnnnnnnnggttggacttctgggaattcagatgttgtgnnnnnnnnnnnnnnnnnnnnnnnnnnnnnnnnnnnnnnnnnnnnnnnnnnnnnnnnnnnnnnnnnnnnnnnnnnnnnnnnnnnnnnnnnnnnnnnnnnnnnnnnnnnnnnnnnnnnnnnnnnnnnnnnnnnnnnnnnnnnnnnnnnnnnnnnnnnnnnnnnnnnnnnnnnnnnnnnnnnnnnnnnnnnnnnnnnnnnnnnnnnnnnnnnnnnnnnnnnnnnnnnnnnnnnnnnnnnnnnnnnnnnnnnnnnnnnnnnnnnnnnnnnnnnnnnnnnnnnnnnnnnnnnnnnnnnnnnnnnnnnnnnnnnnnnnnnnnnnnnnnnnnnnnnnnnnnnnnnnnnnnnnnnnnnnnnnnnnnnnnnnnnnnnnnnnnnnnnnnnnnnnnnnnnnnnnnnnnnnnnnnnnnnnnnnnnnnnnnnnnnnnnnnnnnnnnnnnnnnnnnnnnnnnnnnnnnnnnnnnnnnnnnnnnnnnnnnnnnnnnnnnnnnnnnnnnnnnnnnnnnnnnnnnnnnnnnnnnnnnnnnnnnnnnnnnnnnnnnnnnnnnnnnnnnnnnnnnnnnnnnnnnnnnnnnnnnnnnnnnnnnnnnnnnnnnnnnnnnnnnnnnnnnnnnnnnnnnnnnnnnnnnnnnnnnnnnnnnnnnnnnnnnnnnnnnnnnnnnnnnnnnnnnnnnnnnnnnnnnnnnnnnnnnnnnnnnnnnnnnnnnnnnnnnnnnnnnnnnnnnnnnnnnnnnnnnnnnnnnnnnnnnnnnnnnnnnnnnnnnnnnnnnnnnnnnnnnnnnnnnnnnnnnnnnnnnnnnnnnnnnnnnnnnnnnnnnnnnnnnnnnnnnnnnnnnnnnnnnnnnnnnnnnnnnnnnnnnnnnnnnnnnnnnnnnnnnnnnnnnnnnnnnnnnnnnnnnnnnnnnnnnnnnnnnnnnnnnnnnnnnnnnnnnnnnnnnnnnnnnnnnnnnnnnnnnnnnnnnnnnnnnnnnnnnnnnnnnnnnnnnnnnnnnnnnnnnnnnnnnnnnnnnnnnnnnnnnnnnnnnnnnnnnnnnnnnnnnnnnnnnnnnnnnnnnnnnnnnnnnnnnnnnnnnnngttgatgaagatgaacccctgttcctcagcttaatcaatgacctgttcccgggactgcaactggatagtaatacttacgtagaactgcaaaaagcagtagccaatcaggttcagatagaaggtttgattaaccatccaccctggaacctgaaactcgtgcagnnnnnnnnnnnnnnnnnnnnnnnnnnnnnnnnnnnnnnnnnnnnnnnnnnnnnnnnnnnnnnnnnnnnnnnnnnnnnnnnnnnnnnnnnnnnnnnnnnnnnnnnnnnnnnnnnnnnnnnnnnnnnnnnnnnnnnnnnnnnnnnnnnnnnnnnnnnnnnnnnnnnnnnnnnnnnnnnnnnnnnnnnnnnnnnnnnnnnnnnnnnnnnnnnnnnnnnnnnnnnnnnnnnnnnnnnnnnnnnnnnnnnnnnnnnnnnnnnnnnnnnnnnnnnnnnnnnnnnnnnnnnnnnnnnnnnnnnnnnnnnnnnnnnnnnnnnnnnnnnnnnnnnnnnnnnnnnnnnnnnnnnnnnnnnnnnnnnnnnnnnnnnnnnnnnnnnnnnnnnnnnnnnnnnnnnnnnnnnnnnnnnnnnnnnnnnnnnnnnnnnnnnnnnnnnnnnnnnnnnnnnnnnnnnnnnnnnnnnnnnnnnnnnnnnnnnnnnnnnnnnnnnnnnnnnnnnnnnnnnnnnnnnnnnnnnnnnnnnnnnnnnnnnnnnnnnnnnnnnnnnnnnnnnnnnnnnnnnnnnnnnnnnnnnnnnnnnnnnnnnnnnnnnnnnnnnnnnnnnnnnnnnnnnnnnnnnnnnnnnnnnnnnnnnnnnnnnnnnnnnnnnnnnnnnnnnnnnnnnnnnnnnnnnnnnnnnnnnnnnnnnnnnnnnnnnnnnnnnnnnnnnnnnnnnnnnnnnnnnnnnnnnnnnnnnnnnnnnnnnnnnnnnnnnnnnnnnnnnnnnnnnnnnnnnnnnnnnnnnnnnnnnnnnnnnnnnnnnnnnnnnnnnnnnnnnnnnnnnnnnnnnnnnnnnnnnnnnnnnnnnnnnnnnnnnnnnnnnnnnnnnnnnngtgattgggagcactggaataagaaacttcagcctttttattatccaactgacagtattccagaatattcatcaattttggttccaaatgttgacaatgttagaacaaattttttgatagacaccattgcaaaacaatataaagngctgttttgctcacaggagagcagggaactgcaaaaactgtcatgattaaggcctatctgaaaaaatatgatcctgaagtacagctatccaaaagtctaaacttttcatctgccacagaaccaatgatgtttcagnnnnnnnnnnnnnnnnnnnnnnnnnnnnnnnnnnnnnnnnnnnnnnnnnnnnnnnnnnnnnnnnnnnnnnnnnnnnnnnnnnnnnnnnnnnnnnnnnnnnnnnnnnnnnnnnnnnnnnnnnnnnnnnnnnnnnnnnnnnnnnnnnnnnnnnnnnnnnnnnnnnnnnnnnnnnnnnnnnnnnnnnnnnnnnnnnnnnnnnnnnnnnnnnnnnnnnnnnnnnnnnnnnnnnnnnnnnnnnnnnnnnnnnnnnnnnnnnnnnnnnnnnnnnnnnnnnnnnnnnnnnnnnnnnnnnnnnnnnnnnnnnnnnnnnnnnnnnnnnnnnnnnnnnnnnnnnnnnnnnnnnnnnnnnnnnnnnnnnnnnnnnnnnnnnnnnnnnnnnnnnnnnnnnnnnnnnnnnnnnnnnnnnnnnnnnnnnnnnnnnnnnnnnnnnnnnnnnnnnnnnnnnnnnnnnnnnnnnnnnnnnnnnnnnnnnnnnnnnnnnnnnnnnnnnnnnnnnnnnnnnnnnnnnnnnnnnnnnnnnnnnnnnnnnnnnnnnnnnnnnnnnnnnnnnnnnnnnnnnnnnnnnnnnnnnnnnnnnnnnnnnnnnnnnnnnnnnnnnnnnnnnnnnnnnnnnnnnnnnnnnnnnnnnnnnnnnnnnnnnnnnnnnnnnnnnnnnnnnnnnnnnnnnnnnnnnnnnnnnnnnnnnnnnnnnnnnnnnnnnnnnnnnnnnnnnnnnnnnnnnnnnnnnnnnnnnnnnnnnnnnnnnnnnnnnnnnnnnnnnnnnnnnnnnnnnnnnnnnnnnnnnnnnnnnnnnnnnnnnnnnnnnnnnnnnnnnnnnnnnnnnnnnnnnnnnnnnnnnnnnnnnnnnnnnnnnnnnnnnnnnnnnnnnnnnnnnnnnnnnnnnnnnnnnnnnnnnnnnnnnnnnnnnnnnnnnnnnnnnnnnnnnnnnnnnnnnnnnnnnnnnnnnnnnnnnnnnnnnnnnnnnnnnnnnnnnnnnnnnnnnnnnnnnnnnnnnnnnnnnnnnnnnnnnnnnnnnnnnnnnnnnnnnnnnnnnnnnnnnnnnnnnnnnnnnnnnnnnnnnnnnnnnnnnnnnnnnnnnnnnnnnnnnnnnnnnnnnnnnnnnnnnnnnnnnnnnnnnnnnnnnnnnnnnnnnnnnnnnnnnnnnnnnnnnnnnnnnnnnnnnnnnnnnnnnnnnnnnnnnnnnnnnnnnnnnnnnnnnnnnnnnnnnnnnnnnnnnnnnnnnnnnnnnnnnnnnnnnnnnnnnnnnnnnnnnnnnnnnnnnnnnnnnnnnnnnnnnnnnnnnnnnnnnnnnnnnnnnnnnnnnnnnnnnnnnnnnnnnnnnnnnnnnnnnnnnnnnnnnnnnnnnnnnnnnnnnnnnnnnnnnnnnnnnnnnnnnnnnnnnnnnnnnnnnnnnnnnnnnnnnnnnnnnnnnnnnnnnnnnnnnnnnnnnnnnnnnnnnnnnnnnnnnnnnnnnnnnnnnnnnnnnnnnnnnnnnnnnnnnnnnnnnnnnnnnnnnnnnnnnnnnnnnnnnnnnnnnnnnnnnnnnnnnnnnnnnnnnnnnnnnnnnnnnnnnnnnnnnnnnnnnnnnnnnnnnnnnnnnnnnnnnnnnnnnnnnnnnnnnnnnnnnnnnnnnnnnnnnnnnnnnnnnnnnnnnnnnnnnnnnnnnnnnnnnnnnnnnnnnnnnnnnnnnnnnnnnnnnnnnnnnnnnnnnnnnnnnnnnnnnnnnnnnnnnnnnnnnnnnnnnnnnnnnnnnnnnnnnnnnnnnnnnnnnnnnnnnnnnnnnnnnnnnnnnnnnnnnnnnnnnnnnnnnnnnnnnnnnnnnnnnnnnnnnnnnnnnnnnnnnnnnnnnnnnnnnnnnnnnnnnnnnnnnnnnnnnnnnnnnnnnnnnnnnnnnnnnnnnnnnnnnnnnnnnnnnnnnnnnnnnnnnnnnnnnnnnnnnnnnnnnnnnnnnnnnnnnnnnnnnnnnnnnnnnnnnnnnnnnnnnnnnnnnnnnnnnnnnnnnnnnnnnnnnnnnnnnnnnnnnnnnnnnnnnnnnnnnnnnnnnnnnnnnnnnnnnnnnnnnnnnnnnnnnnnnnnnnnnnnnnnnnnnnnnnnnnnnnnnnnnnnnnnnnnnnnnnnnnnnnnnnnnnnnnnnnnnnnnnnnnnnnnnnnnnnnnnnnnnnnnnnnnnnnnnnnnnnnnnnnnnnnnnnnagttgatgagtgcaacaggattcctgtggagccttcagcagttccctaaggacactataaatgaagagactgttgagctactacagccatattttaatatggatgattatacttttgaaagtgccaaaaaagtctgtgggaatgtggctggtctcctgtcttggacacttgctatggcaatattttatggcatcaatagagaagtgttgcctctgaagnnnnnnnnnnnnnnnnnnnnnnnnnnnnnnnnnnnnnnnnnnnnnnnnnnnnnnnnnnnnnnnnnnnnnnnnnnnnnnnnnnnnnnnnnnnnnnnnnnnnnnnnnnnnnnnnnnnnnnnnnnnnnnnnnnnnnnnnnnnnnnnnnnnnnnnnnnnnnnnnnnnnnnnnnnnnnnnnnnnnnnnnnnnnnnnnnnnnnnnnnnnnnnnnnnnnnnnnnnnnnnnnnnnnnnnnnnnnnnnnnnnnnnnnnnnnnnnnnnnnnnnnnnnnnnnnnnnnnnnnnnnnnnnnnnnnnnnnnnnnnnnnnnnnnnnnnnnnnnnnnnnnnnnnnnnnnnnnnnnnnnnnnnnnnnnnnnnnnnnnnnnnnnnnnnnnnnnnnnnnnnnnnnnnnnnnnnnnnnnnnnnnnnnnnnnnnnnnnnnnnnnnnnnnnnnnnnnnnnnnnnnnnnnnnnnnnnnnnnnnnnnnnnnnnnnnnnnnnnnnnnnnnnnnnnnnnnnnnnnnnnnnnnnnnnnnnnnnnnnnnnnnnnnnnnnnnnnnnnnnnnnnnnnnnnnnnnnnnnnnnnnnnnnnnnnnnnnnnnnnnnnnnnnnnnnnnnnnnnnnnnnnnnnnnnnnnnnnnnnnnnnnnnnnnnnnnnnnnnnnnnnnnnnnnnnnnnnnnnnnnnnnnnnnnnnnnnnnnnnnnnnnnnnnnnnnnnnnnnnnnnnnnnnnnnnnnnnnnnnnnnnnnnnnnnnnnnnnnnnnnnnnnnnnnnnnnnnnnnnnnnnnnnnnnnnnnnnnnnnnnnnnnnnnnnnnnnnnnnnnnnnnnnnnnnnnnnnnnnnnnnnnnnnnnnnnnnnnnnnnnnnnnnnnnnnnnnnnnnnnnnnnnnnnnnnnnnnnnnnnnnnnnnnnnnnnnnnnnnnnnnnnnnnnnnnnnnnnnnnnnnnnnnnnnnnnnnnnnnnnnnnnnnnnnnnnnnnnnnnnnnnnnnnnnnnnnnnnnnnnnnnnnnnnnnnnnnnnnnnnnnnnnnnnnnnnnnnnnnnnnnnnnnnnnnnnnnnnggctcactggtagatgacgaatctctcattggtgtacttcgaactaccaagcagacagcagctgaggtaagtgaaaagttgcatgtggctgcagaaactgagatcaagatcaacgcggctcaggaggagttccggcccgcagccacccgcggaagcannnnnnnnnnnnnnnnnnnnnnnnnnnnnnnnnnnnnnnnnnnnnnnnnnnnnnnnnnnnnnnnnnnnnnnnnnnnnnnnnnnnnnnnnnnnnnnnnnnnnnnnnnnnnnnnnnnnnnnnnnnnnnnnnnnnnnnnnnnnnnnnnnnnnnnnnnnnnnnnnnnnnnnnnnnnnnnnnnnnnnnnnnnnnnnnnnnnnnnnnnnnnnnnnnnnnnnnnnnnnnnnnnnnnnnnnnnnnnnnnnnnnnnnnnnnnnnnnnnnnnnnnnnnnnnnnnnnnnnnnnnnnnnnnnnnnnnnnnnnnnnnnnnnnnnnnnnnnnnnnnnnnnnnnnnnnnnnnnnnnnnnnnnnnnnnnnnnnnnnnnnnnnnnnnnnnnnnnnnnnnnnnnnnnnnnnnnnnnnnnnnnnnnnagatatctcgtaatgagaaggggtggaaaagctggtttgataaagacgctccagaggaggaaattatccctgatggttataacgattcactagatacctgccataaacttttacttatcagg

SEQ ID NO: 20624 - DNA, 955 bp, Macaca Mulatta
  misc_feature (1)...(955): n = A,T,C or G
agtgagcaaatctgtgtctgctgccgagcaacagttgtggaaaaaaagcttttcttgttttgaaaagggaattcacaactctgagtcaattgaggatgccacaaatgctgcccttttattatgtaacacgggaagactcatgcgaatttgtgcacaggcgcactgtggtgcaggtgatgaatttaaacgtgaattttcaccagaagaaggcttatattataataagnnnnnnnnnnnnnnnnnnnnnnnnnnnnnnnnnnnnnnnnnnnnnnnnnnnnnnnnnnnnnnnnnnnnnnnnnnnnnnnnnnnnnnnnnnnnnnnnnnnnnnnnnnnnnnnnnnnnnnnnnnnnnnnnnnnnnnnnnnnnnnnnnnnnnnnnnnnnnnnnnnnnnnnnnnnnnnnnnnnnnnnnnnnnnnnnnnnnnnnnnnnnnnnnnnnnnnnnnnnnnnnnnnnnnnnnnnnnnnnnnnnnnnnnnnnnnnnnnnnnnnnnnnnnnnnnnnnnnnnnnnnnnnnnnnnnnnnnnnnnnnnnnnnnnnnnnnnnnnnnnnnnnnnnnnnnnnnnnnnnnnnnnnnnnnnnnnnnnnnnnnnnnnnnnnnnnnnnnnnnnnnnnnnnnnnnnnnnnnnnnnnnnnnnnnnnnnnnnnnnnnnnnnnnnnnnnnnnnnnnnnnnnnnnnnnnnnnnnnnnnnnnnnnnnnnnnnnnnnnnnnnnnnnnnnnnnnnnnnnnnnnnnnnnnnnnnnnnnnnnnnnnnnnnnnnnnnnnnnnnnnnnnnnnnnnnnnnnnnnnnnnnnnnnnnnnnnnnagcctaagagtggtgacgctgctccagctgctgatgcttctcctagtctcaatcgagaagaagtgatgaaactcctcagtatatttgagtctcggttgtcatttcttctccttcagtccattaaactgctatcttcaactaaaaagaaaacaa

SEQ ID NO: 20625 - DNA, 1140 bp, Macaca Mulatta
  misc_feature (1)...(1140): n = A,T,C or G
ggggagaccagagggtgacccggatgatggcggccggcgcggccttagccctggccttgtggctactaatgccaccagtgggggtgggaggggcggggcccccnccaatccaggacggtgagttcacgttcctgttgccggcggggaggaagcagtgtttctaccagtccgcgccggccaacgcaagcctcgagaccgaatacccggtgatcggaggtgcgcggctggacgtggacttcacgctggacagccctcagggcgtgctgttggtcagcgagtcccgcaaggttgatggcgtacacaccgcggagccaacggaggccggggactacaagctgtgctttgacaactccttcatctccatctccgagaagctggtgttctttgaattgatctttgacagcctccaggatgacgaggaggtcgaaggatgggcagaggctgtggagcccgaggagatgctggatgttaaaattgaggacatctatgagttcattgagactttgcgtaccctgctggagcgaagcatccgtatgctgaagctacttcgggccttcgaggtacgtgaccgcaacctgcaagagggcaacttggagcgggtcaacttctggtcagctgtcaacgtggcggtgctgctgctggtggccgtgctgcaggtctgcacactcaagcgcttcttccaggacaagcgcccggtgcccacgtagcccctgccacggaaggaagaacgggacgaaggaggggcagcggggtgtttgcgtatgagacttgggggtccctccccattttagtttcctgccaaaatgggagtgtgcagtcggggcctgtggtctggccccctgagtctccttccgtcctcagtgggcagggaacacctctggcttgcagaagggacggctcagcggctgcaccgacggtcctggaaatctcacatggtggggcactgcagccgttggaacctgcagcctcagaatttcttgggcccctctactgtaaatgggccctaagcccaaagcctttccattccggtggttaccgtttgcccgggtggcgggggcaagggccctaaaccagggagaaaacttggggcccctcccaagcccaagcctgaggatcctggtaaacaaaaaatggccacgg

SEQ ID NO: 20626 - DNA, 2457 bp, Macaca Mulatta
  misc_feature (1)...(2457): n = A,T,C or G
ataaacttaagcttgagagggatttcagcagatataactacctgagtctnnnnnnnnnnnnnnnnnnnnnnnnnnnnnnnnnnnnnnnnnnnnnnnnnnnnnnnnnnnnnnnnnnnnnnnnnnnnnnnnnnnnnnnnnnnnnnnnnnnnnnnnnnnnnnnnnnnnnnnnnnnnnnnnnnnnnnnnnnnnnnnnnnnnnnnnnnnnnnnnnnnnnnnnnnnnnnnnnnnnnnnnnnnnnnnnnnnnnnnnnnnnnnnnnnnnnnnnnnnnnnnnnnnnnnnnnnnnnnnnnnnnnnnnnnnnnnnnnnnnnnnnnnnnnnnnnnnnnnnnnnnnnnnnnnnnnnnnnnnnnnnnnnnnnnnnnnnnnnnnnnnnnnnnnnnnnnnnnnnnnnnnnnnnnnnnnnnnnnnnnnnnnnnnnnnnnnnnnnnnnnnnnnnnnnnnnnnnnnnnnnnnnnnnnnnnnnnnnnnnnnnnnnnnnnnnnnnnnnnnnnnnnnnnnnnnnnnnnnnnnnnnnnnnnnnnnnnnnnnnnnnnnnnnnnnnnnnnnnnnnnnnnnnnnnnnngaaaagctgcaacaaatcttcattgaacttacacttaaagaagagcaggaggagtatatacgggagnnnnnnnnnnnnnnnnnnnnnnnnnnnnnnnnnnnnnnnnnnnnnnnnnnnnnnnnnnnnnnnnnnnnnnnnnnnnnnnnnnnnnnnnnnnnnnnnnnnnnnnnnnnnnnnnnnnnnnnnnnnnnnnnnnnnnnnnnnnnnnnnnnnnnnnnnnnnnnnnnnnnnnnnnnnnnnnnnnnnnnnnnnnnnnnnnnnnnnnnnnnnnnnnnnnnnnnnnnnnnnnnnnnnnnnnnnnnnnnnnnnnnnnnnnnnnnnnnnnnnaggtgctgtaccaggtggaaggatttgttgacaaaaacaacgaccttctctatcgagacctgtcccaagccatgtggaaggccagccatgccctcatcaagtctttgttccccgaagggaatcccgccaagatcaacctgaaaaggcctcctacagcaggctcacagttcaaggcatccgtggccactctgatgaagaacctacagaccaagaacccaaactatattaggnnnnnnnnnnnnnnnnnnnnnnnnnnnnnnnnnnnnnnnnnnnnnnnnnnnnnnnnnnnnnnnnnnnnnnnnnnnnnnnnnnnnnnnnnnnnnnnnnnnnnnnnnnnnnnnnnnnnnnnnnnnnnnnnnnnnnnnnnnnnnnnnnnnnnnnnnnnnnnnnnnnnnnnnnnnnnnnnnnnnnnnnnnnnnnnnnnnnnnnnnnnnnnnnnnnnnnnnnnnnnnnnnnnnnnnnnnnnnnnnnnnnnnnnnnnnnnnnnnnnnnnnnnnnnnnnnnnnnnnnnnnnnnnnnnnnntattcaaattagaagacctgaggaagcaacgcctggaggacttggccactctcattcagaagatctaccgggggtggaaatgccgcacacacttcctgctaatgaaaaaaagccaaattgtgattgccgcctggtataggagatatgcgnnnnnnnnnnnnnnnnnnnnnnnnnnnnnnnnnnnnnnnnnnnnnnnnnnnnnnnnnnnnnnnnnnnnnnnnnnnnnnnnnnnnnnnnnnnnnnnnnnnnnnnnnnnnnnnnnnnnnnnnnnnnnnnnnnnnnnnnnnnnnnnnnnnnnnnnnnggtacgtacataatacaggaaattcttcagagccaatgccggaaagaaaatctatgagttcacgcttcagagaattgttgcaaaaatacttcttggaaatgaaaaataagatgccttccttatctccaatagacaagaattggccctcaagaccttacttattcttggattctactcacaaggagctaaaaaggattttccacttgtggagggtaaaaaatnnnnnnnnnnnnnnnnnnnnnnnnnnnnnnnnnnnnnnnnnnnnnnnnnnnnnnnnnnnnnnnnnnnnnnnnnnnnnnnnnnnnnnnnnnnnnnnnnnnnnnnnnnnnnnttccaaggggcttacctgggaaatcaacaagaaccccaagtataagaaactgaaagatgctattgaagaaaagatcatcattgctgaagtcgtgaacaaaattaaccgtgctaatgggaagnagagtacatctcggattttcctcttaacaaataataatctccttcttgctgaccaaaagtctggacaaatcaagtcagaggttcccttggtggatgtgaccaaggtatcgatgagctcacaaaatgacggcttcttcgccgtccacctcaaagaggnnagggctcagaagcagctagtaaaggagattttctcttcagcagtgatcacctgattgaaatggccaccaagctctatcgcacgactctcagccaaaccaaacagaagctcaatattgagatttccgatgag

SEQ ID NO: 20627 - DNA, 661 bp, Macaca Mulatta
cttcacccacaaagaggacttaggtgggccaggccctggatgactatgtagcaaacacagacaactgcagcctgaaggacctggtgcaggagtgcgagaggaggtactgtgccttcaacaaccgaggctctggggaagagcagaggcagcagcaggcagagctcctggctgtgattgagaggctgggaagggagcgagagggctctttccacagcaacaacctcttcctggatgcccagctgctccaaagagctggagctgggacctgccaggaagactacaggcagtacctggccaaggtgaaatggcatgtggagaagcagaggcaagagctgagggagaatgagagtaactgggcatacaaggcgctcctcagagtcaaacacttgatgcttttgcattatgagattttcgtattacttttttggtgcagcatactttttttaattatttttctgttcatctttcattacatttaaatctctggaccctggagcacttctaacatatcaccccatggagtcattgttctaataatcaccaattcagactcggatcctcatggtctgtggagcagctgcgtgctgtctgtgcagctcccatttccccttctagcttatagacttggagctgtgttcctccactccaagggctgctggct

SEQ ID NO: 20628 - DNA, 1088 bp, Macaca Mulatta
ccacaatcaatacttttgcctctccacccacgttctgggccaaagcctccggaggcagtgtgttgagtgctgatgatgctccgatgcctgtcaaattcctagccctgaggctcatggttgccctggcctatgggcttgtgggggctgttggcttgctgggaaatttggcggtgctgtgggtactgagtaactgtgcccggagagcccctggcccaccttcagacaccttcgtcttcaacctggctctggcggacctgggactggcactcactctccccttttgggcagctgagtcggcactggactttcactggcccttcggaggtgccctctgcaagatggttctgacggccactgtcctcaacgtctatgccagcatcttcctcatcacagcgctgagcgttgctcgctactgggtggtggccatggctgcggggccaggcacccacctctcactcttctgggcccgaatagccactctagcagtgtgggcggcggctgccctggtgacggtgcccacagctgtcttcggggtggagggtgaggtgtgtggtgtgcgcctttgcctactgcgtttccccagcaggtactggctgggggcctaccagctgcagagggtggtgctggctttcatggtgcccttgggcgtcatcaccaccagctacctgctgctgctggccttcctgcagcagcggcaacggcggcagcaggacagcagggtcgtggcccgctctgtccgcatcctggtggcttccttcttcctctgctggtttcccaaccatgtggtcactctctggggtgtcctggtgaagtttgacctagtgccctggaacagtactttctatactatccagacgtatgtcttccctgtcactacttgcttggcacacagcaatagctgcctcaaccctgtgctgtactgtctcctgaggcgggagccccggcaggctctggcagacaccttcagggatctgcggtcgaggctgtggccccagggcggaggctgggtgcaacaggtggccctaaagcaggtaggcaggcggtgggtcgcgagcaaccccccggagagccgcccttctaccctgctc

SEQ ID NO: 20629 - DNA, 3206 bp, Macaca Mulatta
  misc_feature (1)...(3206): n = A,T,C or G
cgtgtgccagccgccgtgccagaaccggggctcctgcagccgccctcagctctgcgtctgccgctccggtttccgtggagcccgctgcgaggaggtcattcccgatgaggagtttgacccccagaactccagggtggcacctcgacgctgggccgagcgttcacccaacctgcgcaggagcagtgcggccggagacggcaccttggccagagcacaaccgccagcaccacagttgccgtccgccccacaatcgccnnnnnnnnnnnnnnnnnnnnnnnnnnnnnnnnnnnnnnnnnnnnnnnnnnnnnnnnnnnnnnnnnnnnnnnnnnnnnnnnnnnnnnnnnnnnnnnnnnnnnnnnnnnnnnnnnnnnnnnnnnnnnnnnnnnnnnnnnnnnnnnnnnnnnnnnnnnnnnnnnnnnnnnnnnnnnnnnnnnnnnnnnnnnnnnnnnnnnnnnnnnnnnnnnnnnnnnnnnnnnnnnnnnnnnnnnnnnnnnnnnnnnnnnnnnnnnnnnnnnnnnnnnnnnnnnnnnnnnnnnnnnnnnnnnnnnnnnnnnnnnnnnnnnnnnnnnnnnnnnnnnnnnnnnnnnnnnnnnnnnnnnnnnnnnnnnnnnnnnnnnnnnnnnnnnnnnnnnnnnnnnnnnnnnnnnnnnnnnnnnnnnnnnnnnnnnnnnnnnnnnnnnnnnnnnnnnnnnnnnnnnnnnnnnnnnnnnnnnnnnnnnnnnnnnnnnnnnnnnnnnnnnnnnnnnnnnnnnnnnnnnnnnnnnnnnnnnnnnnnnnnnnnnnnnnnnnnnnnnnnnnnnnnnnnnnnnnnnnnnnnnnnnnnnnnnnnnnnnnnnnnnnnnnnnnnnnnnnnnnnnnnnnnnnnnnnnnnnnnnnnnnnnnnnnnnnnnnnnnnnnnnnnnnnnnnnnnnnnnnnnnnnnnnnnnnnnnnnnnnnnnnnnnnnnnnnnnnnnnnnnnnnnnnnnnnnnnnnnnnnnnnnnnnnnnnnnnnnnnnnnnnnnnnnnnnnnnnnnnnnnnnnnnnnnnnnnnnnnnnnnnnnnnnnnnnnnnnnnnnnnnnnnnnnnnnnnnnnnnnnnnnnnnnnnnnnnnnnnnnnnnnnnnnnnnnnnnnnnnnnncagtgtgccaaccctctgctggagctgaccacccaagaggactgctgtggcagcgtgggagccttctggggggtgactttgtgtgccccatgcccacccagacagcctccccggtgattgagaatggccagctggagtgtcctcagggatacaagagactgaacctcactcactgccaagnnnnnnnnnnnnnnnnnnnnnnnnnnnnnnnnnnnnnnnnnnnnnnnnnnnnnnnnnnnnnnnnnnnnnnnnnnnnnnnnnnnnnnnnnnnnnnnnnnnnnnnnnnnnnnnnnnnnnnnnnnnnnnnnnnnnnnnnnnnnnnnnnnnnnnnnnnnnnnnnnnnnnnnnnnnnnnnnnnnnnnnnnnnnnnnnnnnnnnnnnnnnnnnnnnnnnnnnnnnnnnnnnnnnnnnnnnnnnnnnnnnnnnnnnnnnnnnnnnnnnnnnnnnnnnnnnnnnnnnnnnnnnnnnnnnnnnnnnnnnnnnnnnnnnnnnnnnnnnnnnnnnnnnnnnnnnnnnnnnnnnnnnnnnnnnnnnnnnnnnnnnnnnnnnnnnnnnnnnnnnnnnnnnnnnnnnnnnnnnnnnnnnnnnnnnnnnnnnnnnnnnnnnnnnnnnnnnnnnnnnnnnnnnnnnnnnnnnnnnnnnnnnnnnnnnnnnnnnnnnnnnnnnnnnnnnnnnnnnnnnnnnnnnnnnnnnnnnnnnnnnnnnnnnnnnnnnnnnnnnnnnnnnnnnnnnnnnnnnnnnnnnnnnnnnnnnnnnnnnnnnnnnnnnnnnnnnnnnnnnnnnnnnnnnnnnnnnnnnnnnnnnnnnnnnnnnnnnnnnnnnnnnnnnnnnnnnnnnnnnnnnnnnnnnnnnnnnnnnnnnnnnnnnnnnnnnnnnnnnnnnnnnnnnnnnnnnnnnnnnnnnnnnnnnnnnnnnnnnnnnnnnnnnnnnnnnnnnnnnnnnnnnnnnnnnnnnnnnnnnnnnnnnnnnnnnnnnnnnnnnnnnnnnnnnnnnnnnnnnnnnnnnnnnnnnnnnnnnnnnnnnnnnnnnnnnnnnnnnnnnnnnnnnnnnnnnnnnnnnnnnnnnnnnnnnnnnnnnnnnnnnnnnnnnnnnnnnnnnnnnnnnnnnnnnnnnnnnnnnnnnnnnnnnnnnnnnnnnnnnnnnnnnnnnnnnnnnnnnnnnnnnnnnnnnnnnnnnnnnnnnnnnnnnnnnnnnnnnnnnnnnnnnnnnnnnnnnnnnnnnnnnnnnnnnnnnnnnnnnnnnnnnnnnnnnnnnnnnnnnnnnnnnnnnnnnnnnnnnnnnnnnnnnnnnnnnnnnnnnnnnnnnnnnnnnnnnnnnnnnnnnnnnnnnnnnnnnnnnnnnnnnnnnnnnnnnnnnnnnnnnnnnnnnnnnnnnnnnnnnnnnnnnnnnnnnnnnnnnnnnnnnnnnnnnnnnnnnnnnnnnnnnnnnnnnnnnnnnnnnnnnnnnnnnnnnnnnnnnnnnnnnnnnnnnnnnnnnnnnnnnnnnnnnnnnnnnnnnnnnnnnnnnnnnnnnnnnnnnnnnnnnnnnnnnnnnnnnnnnnnnnnnnnnnnnnnnnnnnnnnnnnnnnnnnnnnnnnnnnnnnnnnnnnnnnagacctagatgagtgtgccttcccgggagtctgcccctcaggagtctgcaccaacacggctggctccttctcctgcaaggactgtgatgggggctaccggcccagccccctgggtgactcctgtgaannnnnnnnnnnnnnnnnnnnnnnnnnnnnnnnnnnnnnnnnnnnnnnnnnnnnnnnnnnnnnnnnnnnnnnnnnnnnnnnnnnnnnnnnnnnnnnnnnnnnnnnnnnnnnnnnnnnnnnnnnnnnnnnnnnnnnnnnnnnnnnnnnnnnnnnnnnnnnnnnnnnnnnnnnnnnnnnnnnnnnnnnnnnnnnnnnnnnnnnnnnnnnnnnnnnnnnnnnnnnnnnnnnnnnnnnnnnnnnnnnnnnnnngatgtggacgagtgtgccgccacagacccgtgtctgggagggcactgtgtcaacaccgagggctccttcaactgtctgtgtgagactggcttccagccctccccggagagtggagagtgtgtg

SEQ ID NO: 20630 - DNA, 1513 bp, Macaca Mulatta
  misc_feature (1)...(1513): n = A,T,C or G
ttccagaaagcagggttttacctcgtgggcagcaatcgcagaagaagagaattcagaaaacaaactggaaggcacaagcagagaagtaagtgagaggggtctctcgggaaagaagaccgctggtccacagcagaaaaatcttgatccagctctcccaggaagatgagggggtcgctctgtagagaacccccttcaggatccatgaggaagaccagaaagagcaaacagaagactcctggaaacagagatggtggcagtaccagcgaagcacctcagccccctcggaagaaaagggcctgggcagactgttgaaagtgaggaggcatttaagaatagaatggaggttaaagtgaagattcctgaagaattaaaactgtggcttattgaggactgggacttagtaaccagacagaagcagctgttccaactccctgctaagaaaaatgtagatggaattctggaggagtatgcaagttgcaagaagtcacaggcaaatgttgataataaggaatatgcagttaatgaagttgtggcaggaataaaagaatatttnnnnnnnnnnnnnnnnnnnnnnnnnnnnnnnnnnnnnnnnnnnnnnnnnnnnnnnnnnnnnnnnnnnnnnnnnnnnnnnnnnnnnnnnnnnnnnnnnnnnnnnnnnnnnnnnnnnnnnnnnnnnnnnnnnnnnnnnnnnnnnnnnnnnnnnnnnnnnnnnnnnnnnnnnnnnnnnnnnnnnnnnnnnnnnnnnnnnnnnnnnnnnnnnnnnnnnnnnnnnnnnnnnnnnnnnnnnnnnnnnnnnnnnnnnnnnnnnnnnnnnnnnnnnnnnnnnnnnnnnnnnnnnnnnnnnnnnnnnnnnnnnnnnnnnnnnnnnnnnnnnnnnnnnnnnnnnnnnnnnnnnnnnnnnnnnnnnnnnnnnnnnnnnnnnnnnnnnnnnnnnnnnnnnnnnnnnnnnnnnnnnnnnnnnnnnnnnnnnnnnnnnnnnnnnnnnnnnnnnnnnnnnnnnnnnnnnnnnnnnnnnnnnnnnnnnnnnnnnnnnnnnnnnnnnnnnnnnnnnnnnnnnnnnnnnnnnnnnnnnnnnnnnnnnnnnnnnnnnnnnnnnnnnnnnnnnnnnnnnnnnnnnnnnnnnnnnnnnnnnnnnnnnnnnnnnnnnnnnnnnnnnnnnnnnnnnnnnnnnnnnnnnnnnnnnnnnnnnnnnnnnnnnnnnnnnnnnnnnnnnnnnnnnnnnnnnnnnnnnnnnnnnnnnnnnnnnnnnnnnnnnnnnnnnnnnnnnnnnnnnnnnnnnnnnnnnnnnnnnnnnnnnnnnnnnnnnnnnnnnnnnnnnnnnnnnnnnnnnnnnnnnnnnnnnnnnnnnnnnnnnnnnnnnnnnnnnnnnnnnnnnnnnnnnnnnnnnnnnnnnnnnnnnnnnntgatagaggcaatgcattattgtgtagccacggttttctggaaaagttgatattttaggaattgtatttcagatcttaaataaaatttgtttctaaatttcaaagcaagt

SEQ ID NO: 20631 - DNA, 986 bp, Macaca Mulatta
  misc_feature (1)...(986): n = A,T,C or G
gggtgagcaccctgtgtctcgccgtctccctctctgcagccacagccagagggcccagaatggccccactcggttcccaagtggctcatgatacagcctcaccttttggccccatctctggtttttgaaaatgtagtctaaggaatagcttttatattggttcatgaaaatctaccctgctaggatttgcttttcaaagtggaaataaattccaactctcctaagaggcatttaattaaggctgtacttccaggttgagcaggaatccattctgaacaaactacaaaaatgtgactgagaagggggccttgagagactggggccgctctgggttagcttttctgtggactgaaaaaccgtgtgctttcctctaaatgaagcggcatcaaggactcagggggaaagaaatccaatgatcaggggatgtgttgtagaagttatgaaaaagcaaccacatggtcaggttcttgactgtggtctctagggctctgcagcagcagtggctcttggattcgttaaaacactcctaggctgacacatctgggtctcaatccccttggaaattcttggtgcattagatgaagnagccttacccccttactgcggttcttcccgtaaggggactccgttttcctacctctctttaaatgaccacctaaaggacagaatattaacaagcaaagtcgattcaacaacagcttcttcccagtcacnnnnnnnnnnctcactgccatcacgtactaaccttatactttgctctattctttctagttatcagagaaacattgggcaactgttttgacctgatggttttaagctgaacttggaggattggttcctactctgaaacagtaaaactatgtataatagtatatagccatgcatggcaaatatttaatattttctgttttcatttcctgttggaaatattatcctgcacaatagctattgaaggctccccagtgaacgattcaaaaaggattttg

SEQ ID NO: 20632 - DNA, 892 bp, Macaca Mulatta
  misc_feature (1)...(892): n = A,T,C or G
gcgacaacgacctcttccgggcctacatcacgngtgggccgagaagcacccacagtgccagcggctgaagctgagcgacatgctggccaaaccccaccagcggctcaccaagtacccgctgctgctcaagtcggtgctgaggaagaccgaggagccgcgcgccaaggaggccgtcgtcaccatgngatcggttccgtggagcgcttcatccaccacgtgaatgcatgcatgcggcagcggcaggagcggcagcggctggcggccgtggtgagccgcatcgacgcctacgaggtggtggaaagcagcagcgacgaagtggacaagnnnnnnnnnnnnnnnnnnnnnnnnnnnnnnnnnnnnnnnnnnnnnnnnnnnnnnnnnnnnnnnnnnnnnnnnnnnnnnnnnnnnnnnnnnnnnnnnnnnnnnnnnnnnnnnnnnnnnnnagatggatgtgtactgcttcctgttcacggatctgctgttggtgaccaaggcagtgaagaaggcagagaggaccagggtcatcaggccacccctgctagtggacaagattgtgtgccgggagctacgggaccctgnnnnnnnnnnnnnnnnnnnnnnnnnnnnnnnnnnnnnnnnnnnnnnnnnnnnnnnnnnnnnnnnnnnnnnnnnnnnnnnnnnnnnnnnnnnnnnnnnnnnnnnnnnnnnnnnnnnnnnnnnnnnnnnnnnnnnnnnnnnnnnnnnnnnnnnnnnnnnnnnnnnnnnnnnnnnnnnnnnnnnnnnnnnnnnnnnnnnnnnnnnnnnnnnnnnnnnnnnnnnnnnnnnnnnnnnnnnnnnnnnnnnnntggcaattcagctgccagctcccccaccatcatgcggaaaagcagcggcagccccgactctcagcact

SEQ ID NO: 20633 - DNA, 2074 bp, Macaca Mulatta
  misc_feature (1)...(2074): n = A,T,C or G
cccgctgtgccaggagcccttccccgacggccttcagctccgcaagaaccacacgctgtccgagctgctgcagctccgccagggctnnnnnnnnnnnnnnnnnnnnnnnnnnnnnnnnnnnnnnnnncggagccctcggtgcccagcgcgccgcccagcgccccggagccgtcggccccctgcgcgcccgagccgtggtccgcgggnnnnnnnnnnnnnnnnnnnnnnnnnnnnnnnnnnnnnnnnnnnnnnnnnnnnnnnnnnnnnnnnnnnnnnnnnnnnnnnnnnnnnnnnnnnnnnnnnnnnnnnnnnnnnnnnnnnnnnnnnnnnnnnnnnnnnnnnnnnnnnnnnnnnnnnnnnnnnnnnnnnnnnnnnnnnnnnnnnnnnnnnnnnnnnnnnnnnnnnnnnnnnnnnnnnnnnnnnnnnnnnnnnnnnnnnnnnnnnnnnnnnnnnnnnnnnnnnnnnnnnnnnnnnnnnnnnnnnnnnnnnnnnnnnnnnnnnnnnnnnnnnnnnnnnnnnnnnnnnnnnnnnnnnnnnnnnnnnnnnnnnnnnnnnnnnnnnnnnnnnnnnnnnnnnnnnnnnnnnnnnnnnnnnnnnnnnnnnnnnnnnnnnnnnnnnnnnnnnnnnnnnnnnnnnnnnnnnnnnnnnnnnnnnnnnnnnnnnnnnnnnnnnnnnnnnnnnnnnnnnnnnnnnnnnnnnnnnnnnnnnnnnnnnnnnnnnnnnnnnnnnnnnnnnnnnnnnnnnnnnnnnnnnnnnnnnnnnnnnnnnnnnnnnnnnnnnnnnnnnnnnnnnnnnnnnnnnnnnnnnnnnnnnnnnnnnnnnnnnnnnnnnnnnnnnnnnnnnnnnnnnnnnnnnnnnnnnnnnnnnnnnnnnnnnnnnnnnnnnnnnnnnnnnnnnnnnnnnnnnnnnnnnnnnnnnnnnnnnnnnnnnnnnnnnnnnnnnnnnnnnnnnnnnnnnnnnnnnnnnnnnnnnnnnnnnnnnnnnnnnnnnnnnnnnnnnnnnnnnnnnnnnnnnnnnnnnnnnnnnnnnnnnnnnnnnnnnnnnnnnnnnnnnnnnnnnnnnnnnnnnnnnnnnnnnnnnnnnnnnnnnnnnnnnnnnnnnnnnnnnnnnnnnnnnnnnnnnnnnnnnnnnnnnnnnnnnnnnnnnnnnnnnnnnnnnnnnnnnnnnnnnnnnnnnnnnnnnnnnnnnnnnnnnnnnnnnnnnnnnnnnnnnnnnnnnnnnnnnnnnnnnnnnnnnnnnnnnnnnnnnnnnnnnnnnnnnnnnnnnnnnnnnnnnnnnnnnnnnnnnnnnnnnnnnnnnnnnnnnnnnnnnnnnnnnnnnnnnnnnnnnnnnnnnnnnnnnnnnnnnnnnnnnnnnnnnnnnnnnnnnnnnnnnnnnnnnnnnnnnnnnnnnnnnnnnnnnnnnnnnnnnnnnnnnnnnnnnnnnnnnnnnnnnnnnnnnnnnnnnnnnnnnnnnnnnnnnnnnnnnnnnnnnnnnnnnnnnnnnnnnnnnnnnnnnnnnnnnnnnnnnnnnnnnnnnnnnnnnnnnnnnnnnnnnnnnnnnnnnnnnnnnnnnnnnnnnnnnnnnnnnnnnnnnnnnnnnnnnnnnnnnnnnnnnnnnnnnnnnnnnnnnnnnnnnnnnnnnnnnnnnnnnnnnnnnnnnnnnnnnnnnnnnnnnnnnnnnnnnnnnnnnnnnnnnnnnntggagagtgtggacgctcacctgcagatcgggcccctcaagaagtcctgcatatctgtgctgaagaggaggtgatgccgggcatgggcgctcctgctgcggtctctgctccaggaagctgcctcctctgggccctctccttcctctggggaaggcaccagcatgagtcccatacactcagccttctcatttctagaggcttccaccttttatacactcagccttcccccccacaaggcaggaggccctccagaccctgttcccctgcagacctcgcttctgagagacagagctacagctgggacagctccaagctaccctgacccctccttttccaggtttctagaacaatgtctggcatatagtaggtgctcaataaacacttgttgaatga

SEQ ID NO: 20634 - DNA, 371 bp, Macaca Mulatta
  misc_feature (1)...(371): n = A,T,C or G
natggtgtccatcctccctgttcttctgtgcctcannnnnnnnnnnnnnnnnnnnnnnnnnnnnnnnnnnnnnnnnnnnnnncagggatcctccccaaacccagcctctgggctgagccaggctctgtgatcagctgggggagctccgtgaccctctggtgccaggggaccctggatacccagggttaccatctcaccaaggaaggaagcaccatgacctggcaccaacagagcccaccagagcccaggaacaagaccaacttcttcatcccatccatgagagagcactatgcagggacataccgctgtcactatctcagctctgcaggctggtcagagctcagtgacccgctggaactggtggtgacagg

SEQ ID NO: 20635 - DNA, 1085 bp, Macaca Mulatta
  misc_feature (1)...(1085): n = A,T,C or G
caggccagcggntggatgtcattctgatatggagttggcattggaagcttattctttttgtccactggagagagagagaactgtttacagttaagctgtgtctaatttttttttaacggtcttgtggtctttttacctcccctttcccctccctccttgaaggctaccccttgggaaggctggtgccccatgccccattacaggctcacacccagtctgatcaggctgagttttgtatgtatctatctgttaatgcttgttacttttaactaatcagatctttttacagtatccatttattatgtaatgcttcttagaaaagaatcttatagtacatgttaatatatgcaaccaattaaaatgtataaattagtgtaagaaattcttggattatgtgtttaagtcctgtaatgcaggcatgtaagatggagggttgaaccctgtttggattgcagagtgttactcagaattgggaaatccagctagcggcagtattctgtacagtagacacaagaattatgtacgccttttatcaaagacttaagagccaaaaagcttttcatctctccagggggaaaactgtctagttcccttctgtgtctaaattttccaaaaggttgatttgcataatacagtggtatgtgcaatggataaattgccgttatttcaaaaattaaaattctcannnnnnnnnnnnnnnnnnnnnnngctccacacttcaaaactcccctgttagatcaacatcctactatgagagcgaaaggaaaaccctcacagatctgtcctagtgatttttacctttgttctagaaggcgctcctttcagggttgtggtatccttaggttagcggagctttttctccttttccccacccatctccccgatattgcccattattaattaacctgtttctttggttggaaccctggcagttctgctcccttcctaggatctgcccccgcattgtagcttgcttaatggagcacttctcctttttccaaagtctactttctagggtgtgggctgagttcttctgtaaagagatgaacgcaatgccaataaaattgaacaagaaccattgaaaa

SEQ ID NO: 20636 - DNA, 963 bp, Macaca Mulatta
  misc_feature (1)...(963): n = A,T,C or G
aggtttgaaggttgaagtgactcattgtggaacaatgagacggaaataccgtgtttgtaatgtaacaaggaggcctgccagtcatcaaacnctttcctttacagttagaaaatggccaaactgtggagagaacagtagcgcagtatttcagagaaaagtatactcttcagctgaagtacccgcaccttccctgcctgcaagtcgggcaggagcagaaacacacctacctgccgctagaagtnnnnnnnnnnnnnnnnnnnnnnnnnnnnnnnnnnnnnnnnnnnnnnnnnnnnnnnnnnnnnnnnnnnnnnnnnnnnnnnnnnnnnnnnnnnnnnnnnnnnnnnnnnnnnnnnnnnnnggtaagaagtgcaaattatgaaacggatccatttgttcaggagtttcaatttaaagttcgggatgaaatggctcatgtaactggacgcgtacttccagcacctatgctccagtatggaggacggngaatcggacagtagcaacaccaagccacggagtatgggatatgcgagggaagcaattccacacaggagttgaaatcaaaatgtgggctatcgcttgttttgccacacagaggcagtgcagagaagaaatattgaagnnnnnnnnnnnnnnnnnnnnnnnnnnnnnnnnnnnnnnnnnnnnnnnnnnnnnnnnnnnnnnnnnnnnnnnnnnnnnnnnnnnnnnnnnnnnnnnnnnnnnnnnnnnnnnnnnnnnnnnnnnnnnnnnnnnnnnnnnnnnnnnnnnnnnnnnnnnnnnnnnnnnnnnnnnnnnnnnnnnnnnngcggaagtgaaacgtgtaggagacacacttttgggtatggccacacaatgtgttcaagtcaagaatgtaataaaaacatctcctcaaactctctcaaacttgtgcctaaagataaatgttaaactcggaggaatcaataatattcttgtacctcatcaaag

SEQ ID NO: 20637 - DNA, 4799 bp, Macaca Mulatta
  misc_feature (1)...(4799): n = A,T,C or G
tacaaaggtctggacactgaaaccactgtggaagtcgcctggtgtgaactgcagnnnnnnnnnnnnnnnnnnnnnnnnnnnnnnnnnnnnnnnnnnnnnnnnnnnnnnnnnnnnnnnnnnnnnnnnnnnnnnnnnnnnnnnnnnnnnnnnnnnnnnnnnnnnnnnnnnnnnnnnnnnnnnnnnnnnnnnnnnnnnnnnnnnnnnnnnnnnnnnnnnnnnnnnnnnnnnnnnnnnnnnnnnnnnnnnnnnnnnnnnnnnnnnnnnnnnnnnnnnnnnnnnnnnnnnnnnnnnnnnnnnnnnnnnnnnnnnnnnnnnnnnnnnnnnnnnnnnnnnnnnnnnnnnnnnnnnnnnnnnnnnnnnnnnnnnnnnnnnnnnnnnnnnnnnnnnnnnnnnnnnnnnnnnnnnnnnnnnnnnnnnnnnnnnnnnnnnnnnnnnnnnnnnnnnnaggtaccccagagttcatggcccctgagatgtatgaggagaaatatgatgaatccgttgacgtttacgcttttgggatgtgcatgcttgagatggctacatctgaatatccttactcggagtgccagaatgctgcgcagatctaccgtcgcgtgaccagtgggtgaagccagccagttttgacaaagtagcaattcctgaagtgaaggaaattattgaaggatgcatacgacaaaacaaagatgaaagnaagatattccatcaaagaccttttgaatcatgccttcttccaagaggaaacaggagtacgggtagaattagcagaagaagacgatggagaaaaaatagccataaaattatggctacgtattgaagatattaagaaattaaagggaaaatacaaagacaatgaagctattgagttttcttttgatttagagagagatgtcccagaagatgttgctcaagaaatggtannnnnnnnnnnnnnnnnnnnnnnnnnnnnnnnnnnnnnnnnnnnnnnnnnnnnnnnnnnnnnnnnnnnnnnnnnnnnnnnnnnnnnnnnnnnnnnnnnnnnnnnnnnnnnnnnnnnnnnnnnnnnnnnnnnnnnnnnnnnnnnnnnnnnnnnnnnnnnnnnnnnnnnnnnnnnnnnnnnnnnnnnnnnnnnnnnnnnnnnnnnnnnnnnnnnnnnnnnnnnnnnnnnnnnnnnnnnnnnnnnnnnnnnnnnnnnnnnnnnnnnnnnnnnnnnnnnnnnnnnnnnnnnnnnnnnnnnnnnnnnnnnnnnnnnnnnnnnnnnnnnnnnnnnnnnnnnnnnnnnnnnnnnnnnnnnnnnnnnnnnnnnnnnnnnnnnnnnnnnnnnnnnnnnnnnnnnnnnnnnnnnnnnnnnnnnnnnnnnnnnnnnnnnnnnnnnnnnnnnnnnnnnnnnnnnnnnnnnnnnnnnnnnnnnnnnnnnnnnnnnnnnnnnnnnnnnnnnnnnnnnnnnnnnnnnnnnnnnnnnnnnnnnnnnnnnnnnnnnnnnnnnnnnnnnnnnnnnnnnnnnnnnnnnnnnnnnnnnnnnnnnnnnnnnnnnnnnnnnnnnnnnnnnnnnnnnnnnnnnnnnnnnnnnnnnnnnnnnnnnnnnnnnnnnnnnnnnnnnnnnnnnnnnnnnnnnnnnnnnnnnnnnnnnnnnnnnnnnnnnnnnnnnnnnnnnnnnnnnnnnnnnnnnnnnnnnnnnnnnnnnnnnnnnnnnnnnnnnnnnnnnnnnnnnnnnnnnnnnnnnnnnnnnnnnnnnnnnnnnnnnnnnnnnnnnnnnnnnnnnnnnnnnnnnnnnnnnnnnnnnnnnnnnnnnnnnnnnnnnnnnnnnnnnnnnnnnnnnnnnnnnnnnnnnnnnnnnnnnnnnnnnnnnnnnnnnnnnnnnnnnnnnnnnnnnnnnnnnnnnnnnnnnnnnnnnnnnnnnnnnnnnnnnnnnnnnnnnnnnnnnnnnnnnnnnnnnnnnnnnnnnnnnnnnnnnnnnnnnnnnnnnnnnnnnnnnnnnnnnnnnnnnnnnnnnnnnnnnnnnnnnnnnnnnnnnnnnnnnnnnnnnnnnnnnnnnnnnnnnnnnnnnnnnnnnnnnnnnnnnnnnnnnnnnnnnnnnnnnnnnnnnnnnnnnnnnnnnnnnnnnnnnnnnnnnnnnnnnnnnnnnnnnnnnnnnnnnnnnnnnnnnnnnnnnnnnnnnnnnnnnnnnnnnnnnnnnnnnnnnnnnnnnnnnnnnnnnnnnnnnnnnnnnnnnnnnnnnnnnnnnnnnnnnnnnnnnnnnnnnnnnnnnnnnnnnnnnnnnnnnnnnnnnnnnnnnnnnnnnnnnnnnnnnnnnnnnnnnnnnnnnnnnnnnnnnnnnnnnnnnnnnnnnnnnnnnnnnnnnnnnnnnnnnnnnnnnnnnnnnnnnnnnnnnnnnnnnnnnnnnnnnnnnnnnnnnnnnnnnnnnnnnnnnnnnnnnnnnnnnnnnnnnnnnnnnnnnnnnnnnnnnnnnnnnnnnnnnnnnnnnnnnnnnnnnnnnnnnnnnnnnnnnnnnnnnnnnnnnnnnnnnnnnnnnnnnnnnnnnnnnnnnnnnnnnnnnnnnnnnnnnnnnnnnnnnnnnnnnnnnnnnnnnnnnnnnnnnnnnnnnnnnnnnnnnnnnnnnnnnnnnnnnnnnnnnnnnnnnnnnnnnnnnnnnnnnnnnnnnnnnnnnnnnnnnnnnnnnnnnnnnnnnnnnnnnnnnnnnnnnnnnnnnnnnnnnnnnnnnnnnnnnnnnnnnnnnnnnnnnnnnnnnnnnnnnnnnnnnnnnnnnnnnnnnnnnnnnnnnnnnnnnnnnnnnnnnnnnnnnnnnnnnnnnnnnnnnnnnnnnnnnnnnnnnnnnnnnnnnnnnnnnnnnnnnnnnnnnnnnnnnnnnnnnnnnnnnnnnnnnnnacttcaagtccccacatccacatcgccataacattgtttctagtacagcactgtatccttcagtaacactttcagcaacttcagcttccgcagggggcagcactgtgaccccaggtcctaagcctccagccgtcgtgtctccgcaggcagcaggcagcactactgtgggagtcgcattgacatcagtttccgccaccacttcactgccaagcacagcttcacagctgtccattcagcttagcagcagtacttctgctcctactttagctgagaccgttgtagttagtgcacactcactagataagacatctcacagcattacaactggattggctttgtcgctctctgcgccatcttcctcttcctctcctggagcgggagtgtctagttctatttctcagcctggtgggctgcatcctttggtcattccatcagtgatagcttctactcctattcttccccaagcagcaggacctacttctacacctttattaccccaagtacctagtatcccacccttggtacagcctgttgccaatgtgcctgctgtacagcagacactcattcacagtcagcctcaaccagctttgcttcccaaccagccccatactcattgtcctgaaatcgattctgatacacaacccaaagctcctgggatcgatgacatnnnnnnnnnnnnnnnnnnnnnnnnnnnnnnnnnnnnnnnnnnnnnnnnnnnnnnnnnnnnnnnnnnnnnnnnnnnnnnnnnnnnnnnnnnnnnnnnnnnnnnnnnnnnnnnnnnnnnnnnnnnnnnnnnnnnnnnnnnnnnnnnnnnnnnnnnnnnnnnnnnnnnnnnnnnnnnnnnnnnnnnnnnnnnnnnnnnnnnnnnnnnnnnnnnnnnnnnnnnnnnnnnnnnnnnnnnnnnnnnnnnnnnnnnnnnnnnnnnnnnnnnnnnnnnnnnnnnnnnnnnnnnnnnnnnnnnnnnnnnnnnnnnnnnnnnnnnnnnnnnnnnnnnnnnnnnnnnnnnnnnnnnnnnnnnnnnnnnnnnnnnnnnnnnnnnnnnnnnnnnnnnnnnnnnnnnnnnnnnnnnnnnnnnnnnnnnnnnnnnnnnnnnnnnnnnnnnnnnnnnnnnnnnnnnnnnnnnnnnnnnnnnnnnnnnnnnnnnnnnnnnnnnnnnnnnnnnnnnnnnnnnnnnnnnnnnnnnnnnnnnnnnnnnnnnnnnnnnnnnnnnnnnnnnnnnnnnnnnnnnnnnnnnnnnnnnnnnnnnnnnnnnnnnnnnnnnnnnnnnnnnnnnnnnnnnnnnnnnnnnnnnnnnntttcagttgcagcagatgatacccagaaagagggtaaaagtaagtcagaagatgcaaagtctgttcattttgaatccagcacttcagagtcctcggtgttgtcaagtagtagtccagagagtaccttggtgaaaccagagccgaatgggataaccatccctggtatctcttcagatgtgccagagagtgcccacaaaactactgcctcagaggcaaagtcagacactgggcagcctaccaaggttggacgttttcaggtgacaactacagcaaacaaagtgggtcgtttctctgtatcgaaaactgaggacaagatcactgacacaaagaaagaaggaccagtggcatctcctccttttatggatttggaacaagctgttcttcctgctgtgataccaaagaaagaaaagcctgaactgtcagagccttcacatctaaatgggccatcttctgacctggaggccgcctttttaagtagggatgtggatgatggttcaggtagtccacactcncctcatcaactgagctcanagagccttcctatccagaatctaagtcaaagccttagtaattcatttaactcctcttacatgagtagtgacaatgagtcagatatcgaagatgaagacttaagttagagctgcgacgactacgagataa

SEQ ID NO: 20638 - DNA, 332 bp, Macaca Mulatta
gcgcgcgtgcaggcacagggaggcccgggcagcagatgtgggtggctgagacaggcaggcagcctggcgcttccagctgggctgtttggagcccagaggctgctgtcacccccaggctctggccaccaggctctgcagacctgtcctccagaggtgctcccggctgagcctgctccagaaggactgtgcaggctgggctcacgcagggcatggggaagagaggagccaggcctttcgtcgtctctgaaactcctgagaatatctgggggtgaggctgagcaccccactctgcccacgctcctcagacatctccagtgtccggaggaatcatt

SEQ ID NO: 20639 - DNA, 927 bp, Macaca Mulatta
  misc_feature (1)...(927): n = A,T,C or G
gaaaaatccagttacactcttaaaggaattgtcagcaataaagtctcgatatcaaactttgtatgcccgctttaaaccagttgctgttgagcagaaagagactaagagccgcatatgtgctactgtgaataaaactatgaatgtgatacaaaaactacagaagcaaacagacctggagnnnnnnnnnnnnnnnnnnnnnnnnnnnnnnnnnnnnnnnnnnnnnnnnnnnnnnnnnnnnnnnnnnnnnnnnnnnnnnnnnnnnnnnnnnnnnnnnnnnnnnnnnnnnnnnnnnnnnnnnnnnnnnnnnnnnnnnnnnnnnnnnnnnnnnnnnnnnnnnnnnnnnnnnnnnnnnnnnnnnnnnnnnnnnnnnnnnnnnnnnnnnnnnnnnnnnnnnnnnnnnnnnnnnnnnnnnnnnnnnnnnnnnnnnnnnnnnnnnnnnnnnnnnnnnnnnnnnnnnnnnnnnnnnnnnnnnnnnnnnnnnnnnnnnnnnnnnnnnnnnnnnnnnnnnnnnnnnnnnnnnnnnnnnnnnnnnnnnnnnnnnnnnnnnnnnnnnnnnnnnnnnnnnnnnnnnnnnnnnnnnnagatgttctgtctatcataaaagaatgtttatgtacatttcagtcattcaatatgtggctttggaaattaaagtatagctaaaatatttgtattacacattatatataatttcattttgtaaatgttgattgcgcatgtggccacattattgttgagactgcttttatgtgacctgtagtcttccacaaaacctaaagtaataacctggcttttctgtgatagccacttttgcgtattttttttccctatttcccttgcctgctaatgttgagcagcatgaacttgctttctgatgctgttttagactgtccctgttgtatttcaataatacctttgttttccttc

SEQ ID NO: 20640 - DNA, 800 bp, Macaca Mulatta
  misc_feature (1)...(800): n = A,T,C or G
ggggcagttcggcggtcccgcgggtctgtctcttgcttcaacagtgtttggacggaacagatccggggactctttcttccagcctccgagcgccctccgatttcctctccacttgcaacctccgggaccatcttctcggccatctcctgcttctgggacctgccagcaccgtttttgtggttagctccgtcttgccgaccaaccatgagctcccagattcgtcagaattattccaccgacgtggaggcagccgtcaacagcctggtcaatatgtacctgcaggcctcctacacctacctctctctgggcttctatttcgaccgcgatgatgtggctctggaaggcatgagccacttcttccgcgaattggccgaagaaaaacacaagggctacaagcgtcccctgaaaataaaaaaccaacgtggcagccgcactctttttcaagacaatcaaaagccaagtgaaaaataagtgggagtaagaccccggaataccaagaaaagacaaacaaaacacnnnnnnnnnnnnnnnnnnnnnnnngcccctgtatagaatctacaagcacctagggannnnnnnnnnnnnnnnnnnnnnncgaaatacagaaaactatggatnnnnnnnnnnnnncnnnnnnnnnnnnnnnnnnnnnngaaacgttattaaataaaagaatgagcggtgaacaataatagaaaaaaacaaaaagttagaaaagagacaggatagcaaaaaagccgagaaacgaagagaaaaaaaatgtatacaatacaaaaaagagaataaacagtaaaatgtga

SEQ ID NO: 20641 - DNA, 633 bp, Macaca Mulatta
  misc_feature (1)...(633): n = A,T,C or G
gcactgagntcaaanntgtgggcacnnaaagccctttcacctaggcaagtcacaaagctccgctacagttgtgtttatgaaatactggggggcttaaggggggaaagggataaccccaaggtaccatctttgcatttcagatccacacaacttaaagatctgctgccgagtgaacggggaagtggtccagagcagcaacaccaaccagatggtattcaagacggaggacctgatagcctgggtctcccagtgagtgccagggcctgtcctgccagtcccactccatccgcccacatgtggaggctgagctgagccctccacccttggctgtggccacctcagccagcccctggtctcaccgggtcctttggctttgctccaggtttgtcaccttttacccaggggatgtcatcctgactgggacccccccaggtgtcggtgtattcaggaaacctcctgtctttctcaaggtaggttagcgaaaaggaaagagagcaagggccccgaaggcctggcaggcttggctcagacctgagaagtacaagcttgtgtggatgtgcgtgtgtctgacggaagggctgacaccctcatggcctgctctgttgcacaacggggatgaagtccagtgtgaga

SEQ ID NO: 20642 - DNA, 427 bp, Macaca Mulatta
tacaatgcagagagtggaggatgcttttatacattgtgagagagatccgacaatacagattgaaaaaaatcagcaaagaagaaaagactcctggctgtgtgaaaattaaaaaatgcattataatgtaatctggtaagtttaagttcagcacattaattttggcagaaagcagatatcttttaaaggtaacaaggtggcaaccactttagaactacttaggtgtagtattctaacttgaagtattaaaagataagaaacttgtttccatacttagtacatttatttttaatctagtgggaattataattgagacaattttgatggctgtagtagactaatctatatttggcataaagtctaatgatttaatgagtcttaagtaaactaagtatttgggaactgatatttacctttatttttaagggaa

SEQ ID NO: 20643 - DNA, 148 bp, Macaca Mulatta
gtgcactaggccttccaatgagggggatgagcaacaatacccctcagttaaatcgcagcttatcacaaggcactcagttaccgagccacgtcacgccaacaacaggggtaccaacaatgtcacttcatacgcctccatctccaagcag

SEQ ID NO: 20644 - DNA, 1351 bp, Macaca Mulatta
gcggcgggcgaagcgcacgtcgagcgggggagcggcgctgcctgtggagatccgcggaggccgacaggattcgttggctgccgtccccgctgctgtgcactgggttaaaaacgacaaccaacatcagccatgaaagatccaagtcgcagcagtactagcccaagcatcatcaatgaagatgtgattattaacggtcattctcatgaagatgacaatccatttgcagagtacatgtggatggaaaatgaagaagaattcaacagacaaatagaagaggagttatgggaagaagaatttattgaacgctgtttccaagaaatgctggaagaggaagaagagcatgaatggtttattccagctcgagatctcccacaaactatggaccaaatccaagaccagtttaatgaccttgttatcagtgatggctcttctctggaagatcttgtggtcaagagcaatctgaatccaaatgcaaaggagtttgttcctggggtgaagtactgaaatatttgagtagacggggccctctttttgtggatgtagcacaatttccacactgtgaaggcagtattagaagacttaatttgtaaaagctctctcgtcactgtgttacacttatgcattgccaaagtttttgttagtcctgcatgcttaataaaagtgctgagactgttattaagtaaaaagctgtcaaacacttactgaaaatagaaattggccccatgggcttgatgtggaagacagccaagagaaagaagcaccagtcaagttgtgaacaagcaccaaattaaaagacctaaaccttactaaattgtctttttttgaggctaaactggtcccttagggttaactaacacttgttaatgtctaaactttaaaatcagtaaatttaatttgagttcctactgttaagcatctttctcagacttaaatttgattatgtccccatcaaaaagaatctccattttctgaaggtctattagtcagagataatttgttatagacgagtatgtcatattactgaggctacaaggtagtcagcagatgagtgccattccaggcttttctggtacattattgtgttagaaatactgagttataatgttacatctgaagaagtatgtaatttgagaattgtaacttctaagggattcattgcatcatagctatgcctgtatagagtctaacatatgaccaatgccaaccccataatccagctgaacaaagttactgtaacattatgattttgagtggtgctttttcctttgctttgttaacccatcacaaagagttctgccagcacaaacttttttctttttaacaaaaagcttagaaaccaagttttttggcc

SEQ ID NO: 20645 - DNA, 678 bp, Macaca Mulatta
  misc_feature (1)...(678): n = A,T,C or G
aaaatccataanaaaacaactagtatagtgcctcttctcaaacagtggatgacacaaaactatgagagtgacaaaatggtgacaggtagctgggacctaggctatcttaccatgaaggttgttttgcttattgtatatttgtgtatgtagtgtaactattttgtacaatagaggactgtaactactacttaggttgtacagattgaaatttagatgttccattggccgatctgaggaggtgtggacttttatatatcgatctacataaaaactgctacatgacaaaaaccacacctaaagaaatttgaagaatttggcacagttactcactttgtgtaatctgaaatctagctgctgaataccctgaagtaaatccctgttcactgaagtctttcaattgagctggttgaatactttgaaaaatgctcaattctagctaatgaaatggatttcccagtaggggtttctgcatatcacctgtatagtagttatatgcatatgtttctgtgcatgttctctacacagttgtaaggtgtcactgtatttaactgttgcacttgtcaactttcaataaagcatataaaatgttgatnnnnnnnnnnnnnnnnnnnnnnnnnnnnnnnnnnnnnnnnnnnnnnnnnnnnnnnnnnnnnnnnnnnnnnnnnnnnnnnnannnnc

SEQ ID NO: 20646 - DNA, 1148 bp, Macaca Mulatta
  misc_feature (1)...(1148): n = A,T,C or G
ngttccagcagacctcagagcatgccctattctcctgctccgtggtggacgtcttctcccaactcaaccagagctttgaaatcatcaagaaacttgagtgtcccgacccccagattgtggggcactacatgaggcgctttgccaannnnnnnnnnnnnnnnnnnnnnnnnnnnnnnnnnnnnnnnnnnnnnnnnnnnnnnnnnnnnnnnnnnnnnnnnnnnnnnnnnnnnnnnnnnnnnnnnnnnnnnnnnnnnnnnnnnnnnnnnnnnnnnnnnnnnnnnnnnnnnnnnnnnnnnnnnnnnnnnnnnnnnnnnnnnnnnnnnnnnnnnnnnnnnnnnnnnnnnnnnnnnnnnnnnnnnnnnnnnnnnnnnnnnnnnnnnnnnnnnnnnnnnnnnnnnnnnnnnnnnnnnnnnnnnnnnnnnnnnnnnnnnnnnnnnnnnnnnnnnnnnnnnnnnnnnnnnnnnnnnnnnnnnnnnnnnnnnnnnnnnnnnnnnnnnnnnnnnnnnnnnnnnnnnnnnnnnnnnnnnnnnnnnnnnnnnnnnnnnnnnnnnnnnnnnnnnnnnnnnnnnnnnnnnnnnnnnnnnnnnnnnnnnnnnnnnnnnnnnnnnnnnnnnnnnnnnnnnnnnnnnnnnnnnnnnnnnnnnnnnnnnnnnnnnnnnnnnnnnnnnnnnnnnnnnnnnnnnnnnnnnnnnnnnnnnnnnnnnnnnnnnnnnnnnnnnnnnnnnnnnnnnnnnnnnnnnnnnnnnnnnnnnnnnnnnnnnnnnnnnnnnnngaacccagatgatcttcaatgcagccaaggagctgggtcagctgtccaaactcaaggnnnnnnnnnnnnnnnnnnnnnnnnnnnnnnnnnnnnnnnnnnnnnnnnnnnnnnnnnnnnnnnnnnnnnnnnnnnnnnnnnnnnnnnnnnnnnnnnnnnnnnnnnnnnnnnnnnnnnnnnnnnnnnnnnnnnnnnnnnnnnnnnnnnnnntgcgctatgccctgtcgctctacacacaggccaccgacctgctcattaagacctttgtacagacgcaatcggcncaggnnnnnnnnnnnnnnnnnnnnnnnnnnnnnnnnnnnccacgttgagctgtttactcatccaggaactggggaacacaaagtcacagtgaaag

SEQ ID NO: 20647 - DNA, 761 bp, Macaca Mulatta
gaagctgaaggccacttcctcgcaggtggcctctagccaggaccatcgccctttctcagagcagagggccaggtgtagaagccgcagcagtcctgcaagccgcccgagccttcccagcagcctcctgcagagcaggaagaagcgcactgtgaaccctgagtgtcgcaggcccagtagaccctgctgtcccaagcccacccctcctcccaccatcacctccctcacctcggaacagtagccccccgcttctccagcctcgcggccctgtgctcttacatccagagtggaacccaggctggtgcccatgtctgtccctgggccccatccctggtcctgccttggttgtgtcatctgtggtaaacgttcgggaggaccagggcagcatccgggacctgggatggccacagaaggggcaggccaggtggaaaggagccagggggaagtggtctaagagacctggagctgccagaggagggcagcctgggcctcccccgagccgggcatgcgggagaggtggggactggacctggcagactgaggcgggggctgctcttgtcaggcctgagccagggtgagccggtgtcgccttgcgttttccttctggtgctgcgaagaccataggctggcaggcggctgcgatgaactgtctttaccactgatgagggtcctctaccggctgagggtagcaagcaggggttgtgagtcaggctgggggactcgtttgaaagaaagaagagtggcaaatggttccaggagggaag

SEQ ID NO: 20648 - DNA, 155 bp, Macaca Mulatta
  misc_feature (1)...(155): n = A,T,C or G
naggtgatatccagcctcagttggacagtgctctccaagatgtcaatgataaatatctcttgttggaagaaacagaaaagcaggccgtccggaaggctttgattgaagaacgtggccgattctgcaccttcatctctatgctgcggccagtgatt

SEQ ID NO: 20649 - DNA, 1194 bp, Macaca Mulatta
gcatgagcacatccgagagaattaaacatagcctacaaagcagaattcaaaaagaccctggaagaggccattcgaagcgacacatcagggcacttccagcggctcctcatctctctctctcagggaaaccgtgatgaaagcacaaatgtggacatgtccctcgcccagagagatgcccaggaactgtatgcggccggggagaaccgcctgggaacagacgagtccaagttcaatgcggttctgtgctcccggagccgggcccacctggtggcagttttcaatgagtaccagagaatgacaggccgggacattgagaagagcatctgccgcgagatgtccggggatctggagcagggcatgctggctgtggtgaaatgtctcaagaacaccccagccttctttgcggagaggctcaacaaagccatgaggggggcaggaacaaaggaccggaccctgattcgcatcatggtgtctcgcagtgagaccgacctcctggacatcagatcggagtataagcggatgtacggcaagtcgctgtaccacgacatctcgggagatacttcaggggattaccggaagattctgctgaagatctgtggtggcaatgactgaacagtgactggtggctcacttctgcccacctgcgggcaaacagtggtgccagggaaaaggcccaaagagaatggttctgtttcctaaacaaaaatcccacaaaattagccccccgagaaatgccacccggtcccctaagaagacccttaagggccatgggtcccgtcccaccccccccttccccgtgaaacccttaatggctaaatctggtggggccccactaaatgggaaaccccttgagggtgtttcaaatgtcccatataaaaaaaattctcttcctctccaaggggaatgggcctctttagtatttgcaaccccaccaaagcctcgcatttatgcaacgacctttcatgttggccatggcattggtaaaagataggaaatgggatactcaaattcgtttttccgaggaagtgctcatgcagaaatcaccattcaccccgatatatagacccaggatgggcgtttaaaaaactttaggcctgtagcaattagtcatttgcctttgtaacatcgggcaagatgcttttaaacaggagggagggggtgaaaatgttgtactctttagcatcagcgaagcag

SEQ ID NO: 20650 - DNA, 1535 bp, Macaca Mulatta
  misc_feature (1)...(1535): n = A,T,C or G
aatgccatgatgacatttgaggaagaaaaaatgcagttggcatgtgatgacttaaaaaccacagaaaaactgtgtgaaagtgaagaggctggagtaattgaaacaatcaagaataaaattaagaagaannnnnnnnnnnnnnnnnnnnnnnnnnnnnnnnnnnnnnnnnnnnnnnnnnnnnnnnnnnnnnnnnnnnnnnnnnnnnnnnnnnnnnnnnnnnnnnnnnnnnnnnnnnnnnnnnnnnnnnnnnnnnnnnnnnnnnnnnnnnnnnnnnnnnnnnnnnnnnnnnnnnnnnnnnnnnnnnnnnnnnnnnnnnnnnnnnnnnnnnnnnnnnnnnnnnnnnnnnnnnnnnnnnnnnnnnnnnnnnnnnnnnnnnnnnnnnnnnnnnnnnnnnnnnnnnnnnnnnnnnnnnnnnnnnnnnnnnnnnnnnnnnnnnnnnnnnnnnnnnnnnnnnnnnnnnnnnnnnnnnnnnnnnnnnnnnnnnnnnnnnnnnnnnnnnnnnnnnnnnnnnnnnnnnnnnnnnnnnnnnnnnnnnnnnnnnnnnnnnnnnnnnnnnnnnnnnnnnnnnnnnnnnnnnnnnnnnnnnnnnnnnnnnnnnnnnnnnnnnnnnnnnnnnnnnnnnnnnnnnnnnnnnnnnnnnnnnnnnnnnnnnnnnnnnnnnnnnnnnnnnnnnnnnnnnnnnnnnnnnnnnnnnnnnnnnnnnnnnnnnnnnnnnnnnnnnnnnnnnnnnnnnnnnnnnnnnnnnnnnnnnnnnnnnnnnnnnnnnnnnnnnnnnnnnnnnnnnnnnnnnnnnnnnnnnnnnnnnnnnnnnnnnnnnnnnnnnnnnnnnnnnnnnnnnnnnnnnnnnnnnnnnnnnnnnnnnnnnnnnnnnnnnnnnnnnnnnnnnnnnnnnnnnnnnnnnnnnnnnnnnnnnnnnnnnnnnnnnnnnnnnnnnnnnnnnnnnnnnnnnnnnnnnnnnnnnnnnnnnnnnnnnnnnnnnnnnnnnnnnnnnnnnnnnnnnnnnnnnnnnnnnnnnnnnnnnnnnnnnnnnnnnnnnnnnnnnnnnnnnnnnnnnnnnnnnnnnnnnnnnnnnnnnnnnnnnnnnnnnnnnnnnnnnnnnnnnnnnnnnnnnnnnnnnnnnnnnnnnnnnnnnnnnnnnnnnnnnnnnnnnnnnnnnnnnnnnnnnnnnnnnnnnnnnnnnnnnnnnnnnnnnnnnnnnnnnnnnnnnnnnnnnnnnnnnnnnnnnnnnnnnnnnnnnnnnnnnnnnnnnnnnnnnnnnnnnnnnnnnnnnnnnnnnnnnnnnnnnnnnnnnnnnnnnnnnnnnnnnnnnnnnnnnnnnnnnnnnnnnnnnnnnnnnnnnnnnnnnnnnnnnnnnnnnnnnnnnnnnnnnnnnnnnnnnnnnnnnnnnnnnnnnnnnnnnnnnnnnnnnnnnnnnnnnnnnnnnnnnnnnnnnnnnnnnnnnnnnaggaggatttctctggctacgactttgaaaacagattgcatgtccgcatccatgctgctctggcctctctgagggaattggttcctcagtg

SEQ ID NO: 20651 - DNA, 243 bp, Macaca Mulatta
cccctcattcctccctcgccttcacccccacccccaccacttcgccacagctcaggatttgtttaaaccttgggaaactggttcaggtccaggttttgctttgatccttttcaaaaactggagacacagaagagggctctaggaaaaagttttggatgggattatgtggaaactacaaggcgattctctgctgccagagcaggctcggcgcttccaacgcagtgcagccttcccctggcggtg

SEQ ID NO: 20652 - DNA, 1248 bp, Macaca Mulatta
cgaggttgcggcggatgcaatacatgtccgagctgcggctccggggcagctccgacgggcggcctcattgctacgatttcagagtaccctggtaatagctgagcatgcaaatgattccctagcacccattactttaaatactattactgcagccacacgccttggaggtgaagtgtcctgcttagtagctggaaccaaatgtgacaaggtggcacaagatctctgtaaagtagcaggcatagcaaaagttctggtggctcagcatgatgcatacagaggcctacttgcagaggaactgacaccattgattttggcaactcagaagcaattcaattacacacacatctgtgctggagcatctgccttcggaaagaaccttttgcccagagtagcagccaaacttgaggttgccccaatttctgacatcattgcaatcaagtcacctgacacatatgtgagaactatttatgcaggaaatgctctatgtacagtgaagtgtgatgagaaagtgaaagtgttttctgtccgtggaacatcttttgaagctgcagcaacaagtggcggtactgccagttcagaaaaggcatcaagtacttcaccagtggaaatatcagagtggcttgaccagaaattaacaaaaagtgatcgaccagagctaacaggtgccaaagtggtggtatctggtggtcgaggcttgaagagtggcgagaactttaagttgttgtatgacttagcagatcaactacatgctgcagttggtgcttcccgtgctgctgttgatgctggctttgttcccaatgacatgcaagttggacagacaggaaaaatagtagcaccggaactttatattgctgttggaatatctggagccatccaacatttagctgggatgaaagacagcaagacaattgtggctattaataaagacccagaagctccaattttccaagtggcagattatggaatagttgcagatttatttaaggtagttcctgaaatgactgagatattgaagaaaaaatgaatcaggatcatgcctttaaaaagaaaaattacgttaaagtattccactgaaatcacagatatttgtggggtactataacaatcattggaaaagcatggaggagctacattttataattttgagggaaaatttttctaacaggaccgccagaatgcttggtttatggggaattacctaatggtttttcccttttgaataattgtgggttcccaaccggtttattt

SEQ ID NO: 20653 - DNA, 443 bp, Macaca Mulatta
ggaaaagcttcagtgaaaaggcaggactcttccaacatcttaaaatccacactggagaaaagccccatcaatgtagtaaatgtggcagatgttttagttggagatcagttcttacgaagcatcaaattctccacactggagataaacctttggaatgtatgaactgtgggaaagccttctgccatagttcatacctcattgaacatcagtaattccacaacaaagagaaaccttatgaatgtaatgaatgtgggaaagccttcaggcagtgttcacctcttattaaatatcagtgaattcacagtgaagaaaaaccctatgaatgtaaagtatgtggaaaagccttcactcagtatgccggacttaaccaacaccagagaatccacactggagagaaaccttttgaatgtccttatgtggacgagcctttagccggagctcag

SEQ ID NO: 20654 - DNA, 361 bp, Macaca Mulatta
ccagagttaaactttgacaagggaacaaatctcaaactgatccgtcagtcatgtagctagctgtagagcttgcaacttaatagcagcagctgcccaatgccatgtgaagtaacaaactggtttttggttttttttcccccttcagttttaatgttatgtgtaatgtatttaaacccttatttaaataaaacttgttttcagaaatacctgacttgcagattatttacatatagttgatcttgtgcatataaaggaaccatagaaatgggcagtggaggattcgtccacacccacagcttctcaacaggggcctgaacttggccaagaaaaacttgatgagcttgtccctctgtggtcaact

SEQ ID NO: 20655 - DNA, 710 bp, Macaca Mulatta
  misc_feature (1)...(710): n = A,T,C or G
aggcctcctgtttcctgcactttctccttttcctgtgaaatctccgaggagaagaaagaatgatggacagtttatcctttcactgccacagggcctgtttccttggcagtcggtccttaagttccttgctcttttgctgctgtttggtgactgaaagaggcaccagagactctcactctggggaggnnnnnnnnnnnnnnnnnnnnnnnnnnnnnnnnnnnnnnnnnnnnnnnnnnnnnnnnnnnnnnnnnnnnnnnnnnnnnnnnnnnnnnnnnnnnnnnnnnnnnnnnnnnnnnnnnnnnnnnnnnnnnnnnnnnnnnnnnnnnnnnnnnnnnnnnnnnnnnnnnnnnnnnnnnnnnnnnnnnnnnnnnnnnnnnnnnnnnnnnnnnnnnnnnnnnnnnnnnnnnnnnnnnnnnnnnnnnnnnnnnnnnnnnnnnnnnnnnnnnnnnnnnnnnnnnnnnnnnnnnnnnnnnnnnnnnnnnnnnnnnnnnnnnnnnnnnnnnnnnnnnnnnnnnnnnnnnnnnnnnnnnnnnnnnnnnnnnnnnnnnnnnnnnnnnnnnnnnnnnnnnnnnnnnnnnnnnnnnnnnnnnnnnnnnnnnnnnnnnnnnnnnnnnnnnnnnnnnnnnnnnnagatgacaaatcctgccatacagaatgatttcagctattatagaagaacattgagtcgtatgaggattaacaatgtaccg

SEQ ID NO: 20656 - DNA, 181 bp, Macaca Mulatta
tggcagggacatgtttgcctctgtgggtgctgatggctccgtgcggatgtttgacctccgccatctagaacacagcaccatcatttacgaagacccacagcatcacccgctgcttcgcctctgctggaacaagcaggaccctaactacctggccaccatggccatggatggaatggaggtg

SEQ ID NO: 20657 - DNA, 992 bp, Macaca Mulatta
  misc_feature (1)...(992): n = A,T,C or G
tctccggctccctggccacccaggcagtcttgctgggcataggggtggggaacgcaaaagccactgtttcagctgctacggccacctggctcgtgaaannnnnnnnnnnnnnnnnnnnnnnnnnnnnnnnnnnnnnnnnnnnnnnnnnnnnnnnnnnnnnnnnnnnnnnnnnnnnnnnnnnnnnnnnnnnnnnnnnnnnnnnnnnnnnnnnnnnnnnnnnnnnnnnnnnnnnnnnnnnnnnnnnnnnnnnnnnnnnnnnnnnnnnnnnnnnnnnnnnnnnnnnnnnnnnnnnnnnnnnnnnnnnnnnnnnnnnnnnnnnnnnnnnnnnnnnnnnnnnnnnnnnnnnnnnnnnnnnnnnnnnnnnnnnnnnnnnnnnnnnnnnnnnnnnnnnnnnnnnnnnnnnnnnnnnnnnnnnnnnnnnnnnnnnnnnnnnnnnnnnnnnnnnnnnnnnnnnnnnnnnnnnnnnnnnnnnnnnnnnnnnnnnnnnnnnnnnnnnnnnnnnnnnnnnnnnnnnnnnnnnnnnnnnnnnnnnnnnnnnnnnnnnnnnnnnnnnnnnnnnnnnnnnnnnnnnnnnnnnnnnnnnnnnnnnnnnnnnnnnnnnnnnnnnnnnnnnnnnnnnnnnnnnnnnnnnnnnnnnnnnnnnnnnnnnnnnnnnnnnnnnnnnnnnnnnnnnnnnnnnnnnnnnnnnnnnnnnnnnnnnnnnnnnnnnnnnnnnnnnnnnnnnnnnnnnnnnnnnnnnnnnnnnnnnnnnnnnnnnnnnnnnnnnnnnnnnnnnnnnnnnnnnnnnnnnnnnnnnnnnnnnnnnnnnnnnnnnnnnnnnnnnnnnnnnnnnnnnnnnnnnnnnnnnnnnnnnnnnnnnnnnnnnnnnnnnnnnnnnnnnnnnnnnnnnnnnnnnnnnnnnnnnnnnnnnncaggtcctaagaaagagagctgggtcatcgtcaaggagacacaccaagtgttggacatgctgttcccaaagttcttgaaag

SEQ ID NO: 20658 - DNA, 598 bp, Macaca Mulatta
  misc_feature (1)...(598): n = A,T,C or G
tttcaaatgagaccaaagatctgcttctggcagctgtcagtgaggactcatctgttaaccagatctaccatgcagttgcagctctaagcggctttggccttcctttggcatcccaagaagcactcagtgcccttactgctcgtctcagcaaggaggagactgtgctggcgnnnnnnnnnnnnnnnnnnnnnnnnnnnnnnnnnnnnnnnnnnnnnnnnnnnnnnnnnnnnnnnnnnnnnnnnnnnnnnnnnnnnnnnnnnnnnnnnnnnnnnnnnnnnnnnnnnnnnnnnnnnnnnnnnnnnnnnnnnnnnnnnnnnnnnnnnnnnnnnnnnnnnnnnnnnnnnnnnnnnnnnnnnnnnnnnnnnnnnnnnnnnnnnnnnnnnnnnnnnnnnnnnnnnnnnnnnnnnnnnnnnnnnnnnnnnnnnnaggatcaggtcatccagctgatgaacgcaatcttcagcaagaagaactttgagtccctctccgaagccttcagcgtggcctctgcggctgctgtactttcccataatcgctaccacgtgccggttgtggttgtgcccgagggctctgcttccgacactcaagaacaggctat

SEQ ID NO: 20659 - DNA, 167 bp, Macaca Mulatta
tcagctgtggaataatggcaacagaaagactggttaactacaccggaggcatctatgccgaataccaggatgtcacctacataaaccatgtcatttccgtggctgggtggggcatcagcaatgggactgagtactggattgtccggaattcatggggtgaaccatgg

SEQ ID NO: 20660 - DNA, 2041 bp, Macaca Mulatta
  misc_feature (1)...(2041): n = A,T,C or G
ccaaggatgccctcttcacgattctccatgacctccgaccccaggaccgtttcagtatcattggattttccaaccggatcatagtatggaaggaccacttgatatcagtcactccagacagtatcaggtatgggaaagtgtacattcaccatatgtcacccactggaggnnnnnnnnnnnnnnnnnnnnnnnnnnnnnnnnnnnnnnnnnnnnnnnnnnnnnnnnnnnnnnnnnnnnnnnnnnnnnnnnnnnnnnnnnnnnnnnnnnnnnnnnnnnnnnnnnnnnnnnnnnnnnnnnnnnnnnnnnnnnnnnnnnnnnnnnnnnnnnnnnnnnnnnnnnnnnnnnnnnnnnnnnnnnnnnnnnnnnnnnnnnnnnnnnnnnnnnnnnnnnnnnnnnnnnnnnnnnnnnnnnnnnnnnnnnnnnnnnnnnnnnnnnnnnnnnnnnnnnnnnnnnnnnnnnnnnnnnnnnnnnnnnnnnnnnnnnnnnnnnnnnnnnnnnnnnnnnnnnnnnnnnnnnnnnnnnnnnnnnnnnnnnnnnnnnnnnnnnnnnnnnnnnnnnnnnnnnnnnnnnnnnnnnnnnnnnnnnnnnnnnnnnnnnnnnnnnnnnnnnnnnnnnnnnnnnnnnnnnnnnnnnnnnnnnnnnnnnnnnnnnnnnnnnnnnnnnnnnnnnnnnnnnnnnnnnnnnnnnnnnnnnnnnnnnnnnnnnnnnnnnnnnnnnnnnnnnnnnnnnnnnnnnnnnnnnnnnnnnnnnnnnnnnnnnnnnnnnnnnnnnnnnnnnnnnnnnnnnnnnnnnnnnnnnnnnnnnnnnnnnnnnnnnnnnnnnnnnnnnnnnnnnnnnnnnnnnnnnnnnnnnnnnnnnnnnnnnnnnnnnnnnnnnnnnnnnnnnnnnnnnnnnnnnnnnnnnnnnnnnnnnnnnnnnnnnnnnnnnnnnnnnnnnnnnnnnnnnnnnnnnnnnnnnnnnnnnnnnnnnnnnnnnnnnnnnnnnnnnnnnnnnnnnnnnnnnnnnnnnnnnnnnnnnnnnnnnnnnnnnnnnnnnnnnnnnnnnnnnnnnnnnnnnnnnnnnnnnnnnnnnnnnnnnnnnnnnnnnnnnnnnnnnnnnnnnnnnnnnnnnnnnnnnnnnnnnnnnnnnnnnnnnnnnnnnnnnnnnnnnnnnnnnnnnnnnnnnnnnnnnnnnnnnnnnnnnnnnnnnnnnnnnnnnnnnnnnnnnnnnnnnnnnnnnnnnnnnnnnnnnnnnnnnnnnnnnnnnnnnnnnnnnnnnnnnnnnnnnnnnnnnnnnnnnnnnnnnnnnnnnnnnnnnnnnnnnnnnnnnnnnnnnnnnnnnnnnnnnnnnnnnnnnnnnnnnnnnnnnnnnnnnnnnnnnnnnnnnnnnnnnnnnnnnnnnnnnnnnnnnnnnnnnnnnnnnnnnnnnnnnnnnnnnnnnnnnnnnnnnnnnnnnnnnnnnnnnnnnnnnnnnnnnnnnnnnnnnnnnnnnnnnnnnnnnnnnnnnnnnnnnnnnnnnnnnnnnnnnnnnnnnnnnnnnnnnnnnnnnnnnnnnnnnnnnnnnnnnnnnnnnnnnnnnnnnnnnnnnnnnnnnnnnnnnnnnnnnnnnnnnnnnnnnnnnnnnnnnnnnnnnnnnnnnnnnnnnnnnnnnnnnnnnnnnnnnnnnnnnnnnnnnnnnnnnnnnnnnnnnnnnnnnnnnnnnnnnnnnnnnnnnnnnnnnnnnnnnnnnnnnnnnnnnnnnnnnnnnnnnnnnnnnnnnnnnnnnnnnnnnnnnnnnnnnnnnnnnnnnnnnnnnnnnnnnnnnnnnnnnnnnnngtggctcatgcctgtaatcccagcactttgagaggccgaggcgggaggatggctcgagcccaggagttcgagacgagactgggcagcatagtgagacctcatctgtaccaaaaagaacaaaattagccaggcatgatggcccacacctgtagtcccagctacttaggagactgaggcaggaagatggcttgagcccaggaggtcgagactgcagtgagctatgatggcgccattgcactccagcctgg

SEQ ID NO: 20661 - DNA, 854 bp, Macaca Mulatta
gggggggctcttttccgtggcgcctcggaggcgttcagctgcttcaagatgaagctgaacatctccttcccagccactggctgccagaaactcattgaagtggacgatgaacgcaaacttcgtactttttatgagaagcgtatggccacagaagttgctgctgacgctctgggtgaagaatggaagggttatgtggtccgaatcagtggtgggaacgacaaacaaggtttccccatgaagcagggtgtcttgacccatggccgtgtccgcctgctactgagtaaggggcattcctgttacagaccaaggagaacgggagaaagaaagagaaaatcagttcgtggttgcattgtggatgccaatctgagcgttctcaacttggttattgtaaaaaaaggagagaaggatattcctggactgactgatactacagttcctcgccgcctgggccccaaaagagctagcagaatccgcaaacttttcaatctctctaaagaagatgacgtccgccagtatgttgtaagaaagccccttaaacaaagaaggtaagaaacctaggaccaaagcacccaagattcagcgtcttgttactccacgtgtcctgcagcacaaacggcgggcgtaattgctctcgaaaaaccagcgtacctaagaaaaaccagggaaaaaggctgcccaaatatgcctaaaccttttgggcccaaaagaattgaacggacggctaagggagaaatccgccagcgaaaccaatttggcaaacaaaaaccttcgaactttttcctcttcttggggggagcttgcacacctttctaagtctctggaaatcccagttccgggaaaaacaaagtttttta

SEQ ID NO: 20662 - DNA, 381 bp, Macaca Mulatta
  misc_feature (1)...(381): n = A,T,C or G
cttccagnccntccgnnagcgccctccgatctctccttgcactcccggggaccatcttctcggcatctttcccnnttggncccatttttcctggtggaaaccccntttggnccccagacaacccgctgttttgtggttagctccgttgcacaacatgagctccagattcgcaatatccgacgtggaagtgccaagccgtcaacagccntttgggggggtcaactatgtaancccccttgnncaggcctcctacactttaacctctctctgggctctattcgaccgcgatgaatgtggctcctgcgaaggcggttgagccacttcttccgcgaattggcgaggagaagcgcgagggctacgagcgtctcnctgaagatgcaa

SEQ ID NO: 20663 - DNA, 662 bp, Macaca Mulatta
aaatattattttaaacaccaaaatgttaatataaaatgccaaatggttgaaaaaatagaaacctctctgtatatttgatcatatttttctttgccttgttgatgtatttaaagtttgcttaaggtcaggaaattctaaaacaacttttctggcctcgttatttgatttatatcttttaaatttactgaccaaagcatgttttaagctgcaatgcagtagtcatgggtggtaaccatgtagttaagtatagttattagtacctatcactgctggatctgtatttaaaattgtggtacaatatataaaatggagaaaaacttgatattcaggtactaaccacaactagtctgacattgttggcagttaaaatcttattttgaattgtaaattagttaaattttatgtggaatttgctgagaagagaatatagactactgaaatgtcattttagttatttttcttatgaccatattgtacaaatgaatctgtgttaaaaagactattttaaatgtatttcctgcttttgtaagcattaaagatttataagaaaattattcaaactattttttataaaatgaaagttatgatttttaacttattgattactcttgtccctaccgcctctttttggaagatatcttgattccttataaacttttacc

SEQ ID NO: 20664 - DNA, 399 bp, Macaca Mulatta
tgtagtacaaccgaagaaaactgaacctctgtgaatgggttgggatttattctctaaaacaccatattcatgtgttacctgcttctgctacttagccattcacaaaatgccaattgatcatgccagccctggcctctgcctgcctcatgtccacacccagcagaagccacacagaaggtggggaatccaaagggcctccttccctccatgctggccccaggccagcccagagctgtctggcaggtgccctttcggccccacccccgtgcctcaaactaagtatactggactggtttagaccaaactgcctcctgatcttttgaacgaagcaggtagctatctgctgcctcatttgctcttgcaacaaagatctaaagaattgctttaatagaaaactcc

SEQ ID NO: 20665 - DNA, 857 bp, Macaca Mulatta
ccaattctcttctcaacaggttaatgccgggccaatggcctatgcacgagcttttcttgaagaaaccaatgcaaagaagtaccctgacaaccaagtaaagcttttgaaggagatcttcaggtaagcttctctttgttggaatgttcttccttgaacttcctcagacagggagtcctcaatcccccaagaatccatcacaccaaaactcactgaggtggcagagtccatcagcagcctgactctgaactcagtcactgaactcaatgctacttgcaaggactggtttttaatttgtttaatgctgttgctaaaggcaatttgcagatgcatgtgggcaggcccttgacgtgaatgagcgcctcatcaaagaggaccagctggagtaccaggaagaactgaggtcccactacaaggacatgctcagcgaactctccactatcatgaatgagcaggtaagcgctccttggtgcacatgcgcgatcagtggacagaaaatccctttcacccccaatgccagaaggacaggaaagaggcccttttcttgctgcagaaatcactgcatcagcgccatgttgctgatctattttctctcctgtgcacaccacctcttgccccaaagcagaggtcaggttggggaaaaatctatagaaaaggattatgagaatccagatactttccacagtccacatgaacccttggtttttctagactatgtgagtcccatcaaatgctgaggaacactgggtggcattcccatgagggtttgctgccaccctccgccatccctgtttgaggaccgcacaaccccaaggccgtgatgtggagtccacagttgagggggtctctgcactatactc

SEQ ID NO: 20666 - DNA, 175 bp, Macaca Mulatta
ggtttcagattcaaccatgcccatgtgcaagggcgctggtccctgaccaggacacataatcagagaagggatacggccacgccgaggtatacgtgtgtgcagaaatggacacacaggcttcagaagcatcagtaactgacgattgagatcatggtcttcttggaaggaataaatg

SEQ ID NO: 20667 - DNA, 679 bp, Macaca Mulatta
  misc_feature (1)...(679): n = A,T,C or G
ggggaagacggaggcgggctctggagaaacgtacgctgtcaggtagtgtttacttcgcctccacttctgttcttccccgcccaggtgctgctcggggtcgcatactcgtcctcagccggcttcagcctctccgcgcagaagtctcccggagccatggccgagtactcctacgtgaagtctaccaaactcgtgctcaagggaaccaaggcgaagagtaagaagaaaaagagcaaagatnnnnnnnnnnnnnnnnnnnnnnnnnnnnnnacccagcttgatattgttggaatctggtggacagtaacaaactttggtgaaatttcaggaaccatagccattgaaatggataagggaacctatatacacgcactcgacaatggcctttttaccctgggagctccacacaaagaagttgatgagggccctagtcccccagagcagttgacggctgtcaaattatctgattccagaattgccctgaaatctggctatggaaagtatcttggtatcaattcagatgggcttgttgttgggcgttcagatgcaatcggaccccagagaaacatgggaaccagtctttccaaatgggaaatggctttattggcttcaatagctgctttatagatgcatgaagctggggacatgaaagcaaaagtagacggcaggagagaagaatgtn

SEQ ID NO: 20668 - DNA, 148 bp, Macaca Mulatta
atgccgtgcgcgaaattcggaagtatgatgatgtgaccgaaaaggtgaacctccagaacaatcctggggccatggaacacttccacatgaagcttttccgtgcccagaggaatctctacattgctggcttttccttgctgctgtcctt

SEQ ID NO: 20669 - DNA, 1160 bp, Macaca Mulatta
  misc_feature (1)...(1160): n = A,T,C or G
ggacactaacactgcagaagaaattgatgaagcattgactacagcacatcataattttgaacaattaagcaatgctggaaannnnnnnnnnnnnnnnnnnnnnnnnnnnnnnnnnnnnnnnnnnnnnnnnnnnnnnnnnnnnnnnnnnnnnnnnnnnnnnnnnnnnnnnnnnnnnnnnnnnnnnnnnnnnnnnnnnnnnnnnnnnnnnnnnnnnnnnnnnnnnnnnnnnnnnnnnnnnnnnnnnnnnnnnnnnnnnnnnnnnnnnnnnnnnnnnnnnnnnnnnnnnnnnnnnnnnnnnnnnnnnnnnnnnnnnnnnnnnnnnnnnnnnnnnnnnnnnnnnnnnnnnnnnnnngattatccggactttgaagttaacatcagatagtgaattagcacaagttagttctccaaaactaaggaaccctcccaggtnaggttgagtgtgaattgcagtgagatcatctgtatgttcaacaatatgggaaagattgaatttggggactcnnnnnnnnnnnnnnnnnnnnnnnnnnnnnnnnnnnnnnnnnnnnnnnnnnnnnnnnnnnnnnnnnnnnnnnnnnnnnnnnnnnnnnnnnnnnnnnnnnnnnnnnnnnnnnnnnnnnnnnnnnnnnnnnnnnnnnnnnnnnnnnnnnnnnnnnnnnnnnnnnnnnnnnnnnnnnnnnnnnnnnnnnnnnnnnnnnnnnnnnnnnnnnnnnnnnnnnnnnnnnnnnnnnnnnnnnnnnnnnnnnnnnnnnnnnnnnnnnnnnnnnnnnnnnnnnnnnnnnnnnnnnnnnnnnnnnnnnnnnnnnnnnnnnnnnnnnnnnnnnnnnnnnnnnnnnnnnnnnnnnnnnnnnnnnnnnnnnnnnnnnnnnnnnnnnnnnnnnnnnnnnnnnnnnnnnnnnnnnnnnnnnnnnnnnnnnnnnnnnnnnnnnnnnnnnnnnnnnnnnnnnnnnnnnnnnnnnnnnnnnnnnnnntaggtgcaagaatatttgtcaacagtattaaaaatggaatgtggtgtcgaggaactatcacagaattaattccaatagagggtaaaaataccagaaaaccttgtagcccaaccagattatttgtccatgaagttgcactaatacaaatattcatggtagattttggaaattctgaagtcctgattgtca

SEQ ID NO: 20670 - DNA, 121 bp, Macaca Mulatta
cctgaagtggccaacttactacctcctttaccccacagagctgctcccgcccagcccctcgtcaggacactgcctgtgtccaattgccaagaccgttcaggctcctcccatgaatcagggg

SEQ ID NO: 20671 - DNA, 735 bp, Macaca Mulatta
  misc_feature (1)...(735): n = A,T,C or G
gagaagaaataactgtttacaggttggaggagagttcccctttaaaccttgataaaagcgtgtcctcttggtctcagcgtgggagagctgcgatgatacaggtgttgtcccgagaagagatggatgggggcctccgtaaagctatgagagtcgtcagcacttggtctgaggatgacattctcaagccgggacaggttttcattgtcaagtcctttcttcctgaggttgtgcggacgtggcataaaatcttccaggagagtactgtgcttcatctttgcctcagggnggaaattcaacaacaaagagctgctcaaaaattgatctataccttcaaccaagtgaaaccacaaacccattccctacacaccaaggtnnnnnnnnnnnnnnnnnnnnnnnnnnnnnnnnnnnnnnnnnnnnnnnnnnnnnnnnnnnnnnnnnnnnnnnnnnnnnnnnnnnnnnnnnnnnnnnnnnnnnnnnnnnnnnnnnnnnnnnnnnnnnnnnnnnnnnnnnnnnnnnnnnnnnnnnnnnnnnnnnnnnnnnnnnnnnnnnnnnnnnnnnnnnnnnnnnnnnnnnnnnnnnnnnnnnnnnnnnnnnnnnnnnnnnnnnnnnnnnnnnnnnnnnnnnnnnnntcaagaggaatggtgtttggaccagccaatttgggggaagatgcaattagaaacttcattgcaaaacataattgtaactcctgctgccggaagctcaaactcccgg

SEQ ID NO: 20672 - DNA, 841 bp, Macaca Mulatta
  misc_feature (1)...(841): n = A,T,C or G
gggcgtgccccctgtatatcttgccagtcagatagtggggaacgactccagttggtagataagcgtatgtgagggttttattctgttctctgaatcttggccaaaggaaagttggaagggaactgattagattctgccttctaggtacttgaactggcaggaaatgcatcaaaagacttaaaggtaaagcgtattacccctcgtcacttgcaacttgctattcgtggagatgaagaattggattcgctcatcaaggctacaattgctggtggtggtatgttaacttcnnnnnnnnnnnnnnnnnncctcagaggaaggaattctttgctgctttaatttcattactttttctagaagagaaaattttagtatattttcattgatgcaagaatggatttctcctgaaaattgattcaaatgtataactgaattttttccttcataccttgaacctgccctttttttaagataccttggaacccgtataactttttttttgggttttcaaaaaacctggggnnnnnnnnnnnnnnnnnnnnctaacgccgaaatttaatttccccggtcactcccccctaaggtggacatttcccccaatattccccacaaattttcttatatttgggtgaaaaaaaagggctcccctcataaaaatatttctttcaaaggaagggcccagggaattccccttggttttccaccgggggacagcccaaaaaacttccttaaaaacactgtttccccggggtgtgggggaaattccccgcggggagagggatccctgtctcttaagaaaaaacaccattatggacaccctcttgtagaaccccactcttccacc

SEQ ID NO: 20673 - DNA, 291 bp, Macaca Mulatta
ggaactaatccaggtgcctgagaccatggagatgctggtctgtgccctcggcctgctgatgggcctggcggggatcctcaatggcaccatcgtctcaaagaccaagcgatctgacagcatccctgggtccaggggctcctgtgagtcatcctagaggtgcattagggacacagtggaatagacgagataaaaagttaggggtgaagaatgggaaagagaaacacttcaccaggggctctttgagcactgatgttttagtgccattgggctggatgaaaacactaacaaatg

SEQ ID NO: 20674 - DNA, 432 bp, Macaca Mulatta
  misc_feature (1)...(432): n = A,T,C or G
cagattgacttctggaagccagattctgtcacacaaatcaaacctcacagtacagttgacttccgtgttaaagcagaagatattgtcactgtggagaatgttctaaagcagaatgaactacaannnnnnnnnnnnnnnnnnnnnnnnnnnnnnnnnnnnnnnnnnnnnnnnnnnnnnnnnnnnnnnnnnnnnnnnnnnnnnnnnnnnnnnnnnnnnnnnnnnnnnnnnnnnnnnnnnnnnnnnnnnnnnnnnnnnnnnnnnnnnnnnnnnnnnnnnnnnnnnnnnnnnnnnnnnnnnnnnnnnnnnnnnnnnnnnnnnnnnnnnnnnnnnnnnnnnnnnnnnnnnnnnnnnnnnnnnnnnnnnnnnnnngactgtggtttcatgccagagagtggatttctcctgcattttgccagtggtttgtaagagagg

SEQ ID NO: 20675 - DNA, 1945 bp, Macaca Mulatta
  misc_feature (1)...(1945): n = A,T,C or G
agatggagaattatactctggaactgcagctgattttatggggcgagactttgctatcttccgaactcttgggcaccaccacccaatcaggacagagcagcatgattccaggtggcttaatnnnnnnnnnnnnnnnnnnnnnnnnnnnnnnnnnnnnnnnnnnnnnnnnnnnnnnnnnnnnnnnnnnnnnnnnnnnnnnnnnnnnnnnnnnnnnnnnnnnnnnnnnnnnnnnnnnnnnnnnnnnnnnnnnnnnnnnnnnnnnnnnnnnnnnnnnnnnnnnnnnnnnnnnnnnnnnnnnnnnnnnnnnnnnnnnnnnnnnnnnnnnnnnnnnnnnnnnnnnnnnnnnnnnnnnnnnnnnnnnnnnnnnnnnnnnnnnnnnnnnnnnnnnnnnnnnnnnnnnnnnnnnnnnnnnnnnnnnnnnnnnnnnnnnnnnnnnnnnnnnnnnnnnnnnnnnnnnnnnnnnnnnnnnnnnnnnnnnnnnnnnnnnnnnnnnnnnnnnnnnnnnnnnnnnnnnnnnnnnnnnnnnnnnnnnnnnnnnnnnnnnnnnnnnnnnnnnnnnnnnnnnnnnnnnnnnnnnnnnnnnnnnnnnnnnnnnnnnnnnnnnnnnnnnnnnnnnnnnnnnnnnnnnnnnnnnnnnnnnnnnnnnnnnnnnnnnnnnnnnnnnnnnnnnnnnnnnnnnnnnnnnnnnnnnnnnnnnnnnnnnnnnnnnnnnnnnnnnnnnnnnnnnnnnnnnnnnnnnnnnnnnnnnnnnnnnnnnnnnnnnnnnnnnnnnnnnnnnnnnnnnnnnnnnnnnnnnnnnnnnnnnnnnnnnnnnnnnnnnnnnnnnnnnnnnnnnnnnnnnnnnnnnnnnnnnnnnnnnnnnnnnnnnnnnnnnnnnnnnnnnnnnnnnnnnnnnnnnnnnnnnnnnnnnnnnnnnnnnnnnnnnnnnnnnnnnnnnnnnnnnnnnnnnnnnnnnnnnnnnnnnnnnnnnnnnnnnnnnnnnnnnnnnnnnnnnnnnnnnnnnnnnnnnnnnnnnnnnnnnnnnnnnnnnnnnnnnnnnnnnnnnnnnnnnnnnnnnnnnnnnnnnnnnnnnnnnnnnnnnnnnnnnnnnnnnnnnnnnnnnnnnnnnnnnnnnnnnnnnnnnnnnnnnnnnnnnnnnnnnnnnnnnnnnnnnnnnnnnnnnnnnnnnnnnnnnnnnnnnnnnnnnnnnnnnnnnnnnnnnnnnnnnnnnnnnnnnnnnnnnnnnnnnnnnnnnnnnnnnnnnnnnnnnnnnnnnnnnnnnnnnnnnnnnnnnnnnnnnnnnnnnnnnnnnnnnnnnnnnnnnnnnnnnnnngatcagagtggatgatcatatcatcaggacagatcaaggccttctgctgcgtagtctacaacggaaggattcaggcagttacctctgccatgcggtggaacatgggttcatacaaactcttcttaaggtgaccctggaagtcattgacacagagcatctggaagaacttcttcataaagatgatgatggagatggctctaagaccaaagaaatgtccaatagcatgacacctagccagaaggtctggtacagagacttcatgcagctcatcaaccaccccaatctcaacacgatggatgagttctgtgaacaagtttggaaaagggaccgaaaacaacgtcggcaaaggccaggacatacccaaggcaacagtaacaaatggaagcacttacaggaaaataagaaaggtagaaacaggaggacccacgaatttgagagggcacccaggagtgtctgagctgcattacctctagaaacctcaaacaagtgaaacttgcctagacaataactggaaaaaaaaatgcaatatacatgaacttttttcatggcattatgtggatgtttacaatggtgggaaattcaactgagttccaccaattataattaaatccatgagtaacttttctaataggc

SEQ ID NO: 20676 - DNA, 135 bp, Macaca Mulatta
gtacgcctgggtggagaagcacttcggccccgactttctggagcagattgtgctcaccagagacaagaccgtggtctctgctgaccttctcatagacgaccggccggacatcacaggcaagtggcctgcggcagg

SEQ ID NO: 20677 - DNA, 798 bp, Macaca Mulatta
ccagccgcagccggctaccacgcctactggaagccagccgcagtcccagcatgcggcccccagtcctgtccaggtgcctgctgtagggggtgctgagtggtcagggtgcaggaatgggtggctagaagagtgggatagagctctaggggtcatttctgagtggtgaggaccagaggccagtgagttactggctttggtggcactcaaccttcccctccccaacagcatcaggcggggcaggccccacacctgggcagtggacagccacagcagaatctgtaccacccaggggccctgacaggcacgccgccctctctgccaccgggaccttctgcccagtcccctcagagcagcttcccccagccagccgctgtgtatgccatccaccaccagcagctgccccacggcttcaccaacatggcccatgttacccaggtaagagcccagctgtcccacttctgggtctgtttgccagggctcatctgtcatgggggccatcccattcccaagaccctggtgccacccttgccatagtgctccctaactctggctctcagagtctgtctcaggattctgtggtcttccctgctgcttttttgttttccacaggcccatgtccaaactggaatcacagcagccccgccccctcaccctggggctccccacccgccccaggtgatgctgctgcacccaccccagagtcatggggggcccccccaaggcgcggtgccccagagtggggtgcctgcactctcagcttccacaccctcaccctacccctacatcggacacccccaa

SEQ ID NO: 20678 - DNA, 311 bp, Macaca Mulatta
aagccagggagattgtccttaggaattttacaagataacgtattttgtatttagtagacattcattgagtagttgataagtattttctgaatacttgcgtgcatgtgcattttcttctttcatgtattagaatggaaataatcatcaataaattagtagtagtaacattgccatatatctgatttcatttatagataaagtaaattcctatctagacttttgtcttcattctactcttgaactcatttcatataaaaccaatattcttaaagctatcaggagggaaaatttatccattcatctattcagcc

SEQ ID NO: 20679 - DNA, 475 bp, Macaca Mulatta
  misc_feature (1)...(475): n = A,T,C or G
ncctgcctcagtgctctgggtacctgcaagcagacttccaaagagagtaaaagcagcagccctggcacttctggctccagcagaaaggagaggcccggtgcagctgaggttcccaacacccaggagctgtggggagaaagcaatacgtctgtgcagaatctctaggtatattctatntatnaaattaattgaatctagtatatgcgggatgtacgacatttgntgactgaagagactngtttccttctactntatgntgtctcagaatatttttgaggcgaaggcgtctgtctcttggctattttaacntaaaataacagtctagttataatccctcttcttgcaaagcacaagctgggaccgcgagcgcattgcagccccaacggtggcccatcttcagcggagagcgagaaccattttggaaactgtaatgtaacttattttctcctttaacctcgtcatcattttctgtagg

SEQ ID NO: 20680 - DNA, 601 bp, Macaca Mulatta
  misc_feature (1)...(601): n = A,T,C or G
ggctagatccatcagaagctgaagctgtggagaacgctctcaggggcctttgccactttctggagtagaagccacagagacctgtnnnnnnnnnnnnnnnnnnnnnncagttgaagactaggctttggaggttttcaaagtagacggtgcttggatgggcggcgagaagtaacattctgcaaatcaccgtcagaggtcctgaggacacagacctacctggcttgccttcccctcgctgaatggcgtgtgctgcagccgcccactgagggctcttttccctgggattctggacttgcgagtaggacagcaggctgggaagatgctgagttccatcaagtgcgtgttggtgggcgactctgctgtggggaagacctctctgttggtgcgcttcacctctgagaccttcccggaggcctacaagcccacagtgtacgagaacacgggggtggacgtcttcatggatggcatccagatcagcctgggcctctgggacacagccggcaatgacgccttcagaagcatccggcccctgtcctaccatccggcacacgtggtgctgatgtgctactctgtggcccaccataactcattcctgaacttg

SEQ ID NO: 20681 - DNA, 2005 bp, Macaca Mulatta
  misc_feature (1)...(2005): n = A,T,C or G
atgagtaactcccggaataaccgggtgatggtggaaggggttggcgctcgggtagtgcgcggcccggactggaagtgggggaagcaggacggcggcgagggccatgtgggcaccgtccggagcttcgagagccccgaggaggtggtggtagtgtgggacaacggcaccgctgccaactaccgctgctccggggcttacgacctccgcatcctggacagcgcgcccaccgnnnnnnnnnnnnnnnnnnnnnnnnnnnnnnnnnnnnnnnnnnnnnnnnnnnnnnnnnnnnnnnnnnnnnnnnnnnnnnnnnnnnnnnnnnnnnnnnnnnnnnnnnnnnnnnnnnnnnnnnnnnnnnnnnnnnnnnnnnnnnnnnnnnnnnnnnnnnnnnnnnnnnnnnnnnnnnnnnnnnnnnnnnnnnnnnnnnnnnnnnnnnnnnnnnnnnnnnnnnnnnnnnnnnnnnnnnnnnnnnnnnnnnnnnnnnnnnnnnnnnnnnnnnnnnnnnnnnnnnnnnnnnnnnnnnnnnnnnnnnnnnnnnnnnnnnnnnnnnnnnnnnnnnnnnnnnnnnnnnnnnnnnnnnnnnnnnnnnnnnnnnnnnnnnnnnnnnnnnnnnnnnnnnnnnnnnnnnnnnnnnnnnnnnnnnnnnnnnnnnnnnnnnnnnnnnnnnnnnnnnnnnnnnnnnnnnnnnnnnnnnnnnnnnnnnnnnnnnnnnnnnnnnnnnnnnnnnnnnnnnnnnnnnnnnnnnnnnnnnnnnnnnnnnnnnnnnnnnnnnnnnnnnnnnnnnnnnnnnnnnnnnnnnnnnnnnnnnnnnnnnnnnnnnnnnnnnnnnnnnnnnnnnnnnnnnnnnnnnnnnnnnnnnnnnnnnnnnnnnnnnnnnnnnnnnnnnnnnnnnnnnnnnnnnnnnnnnnnnnnnnnnnnnnnnnnnnnnnnnnnnnnnnnnnnnnnnnnnnnnnnnnnnnnnnnnnnnnnnnnnnnnnnnnnnnnnnnnnnnnnnnnnnnnnnnnnnnnnnnnnnnnnnnnnnnnnnnnnnnnnnnnnnnnnnnnnnnnnnnnnnnnnnnnnnnnnnnnnnnnnnnnnnnnnnnnnnnnnnnnnnnnnnnnnnnnnnnnnnnnnnnnnnnnnnnnnnnnnnnnnnnnnnnnnnnnnnnnnnnnnnnnnnnnnnnnnnnnnnnnnnnnnnnnnnnnnnnnnnnnnnnnnnnnnnnnnnnnnnnnnnnnnnnnnnnnnnnnnnnnnnnnnnnnnnnnnnnnnnnnnnnnnnnnnnnnnnnnnnnnnnnnnnnnnnnnnnnnnnnnnnnnnnnnnnnnnnnnnnnnnnnnnnnnnnnnnnnnnnnnnnnnnnnnnnnnnnnnnnnnnnnnnnnnnnnnnnnnnnnnnnnnnnnnnnnnnnnnnnnnnnnnnnnnnnnnnnnnnnnnnnnnnnnnnnnnnnnnnnnnnnnnnnnnnnnnnnnnnnnnnnnnnnnnnnnnnnnnnnnnnnnnnnnnnnnnnnnnnnnnnnnnnnnnnnnnnnnnnnnnnnnnnnnnnnnnnnnnnnnnnnnnnnnnnnnnnnnntcaccatggaacttttggagatgaaggtgctgttatagaagtactacatcgaggtagtgctgatttgaatgctcgaaacaagcgccgacagacaccacttcatattgctgtcaataaaggtcatcttcaagttgtgaagactttattggactttggctgtcatcccagtctccaggnnnnnnnnnnnnnnnnnnnnnnnnnnnnnnnnnnnnnnnnnnnnnnnnnnnnnnnnnnnnnnnnnnnnnnnnnnnnnnnnnnnnnnnnnnnnnnnnnnnnnnnnnnnnnnnnnnnnnnnnnnnnnnnnnnnnnnnnnnnnnnnnnnnncagtgcaatgcgtgttttactatctaaattaccaagaccatggattgtggatgagaagaaagatgatggttatactgccttacatctggctgcccttaataatcatgtagaagtggcggaactgttggtacatcag

SEQ ID NO: 20682 - DNA, 1926 bp, Macaca Mulatta
  misc_feature (1)...(1926): n = A,T,C or G
cgggctaggacatcctcctctcccccttctgtttctgcgtgaggtgcacaaaagggcggggagccggnggaacatgcttgccaactcagccagcgtgaggatcctcatcaagggaggcaaggtggtgaacgatgactgcacccacgaggctgacgtctacatcgagaatggcatcatccagcaggtgggccgcgagctcatgatccctggcggggccaaggtgattgatgccacagggaaactggtgatccctggtggcatcgacaccagcacccacttccaccagaccttcatgaatgccacgtgcgtggacgacttctaccatgggaccaagnnnnnnnnnnnnnnnnnnnnnnnnnnnnnnnnnnnnnnnnnnnnnnnnnnnnnnnnnnnnnnnnnnnnnnnnnnnnnnnnnnnnnnnnnnnnnnnnnnnnnnnnnnnnnnnnnnnnnnnnnnnnnnnnnnnnnnnnnnnnnnnnnnnnnnnnnnnnggtgaaagcagaaatggagacactggtgagggagaagggtgtcaactcattccagatgttcatgacctacaaggacctgtacatgcttcgagacagcgagctgtaccaagtgttgcacgcttgcaaggacattggggcaatcgcccgtgtccatgctgaaaacggggagcttgtggccgaggcaagnnnnnnnnnnnnnnnnnnnnnnnnnnnnnnnnnnnnnnnnnnnnnnnnnnnnnnnnnnnnnnnnnnnnnnnnnnnnnnnnnnnnnnnnnnnnnnnnnnnnnnnnnnnnnnnactcactgtccaatctacctggtcaacgtgtccagtatctcggctggtgactttttctcagctgctaagatgcaaggnnnnnnnnnnnnnnnngagaccaccactgcacatgccacgctgacaggcttacactactaccaccaggactggtcccacgcggctgcctacgtcacggtgcctcccatgagactggacaccaacacctccacctacctcatgagcctgctggccannnnnnnnnnnnnnnnnnnnnnnnnnnnnnnnnnnnnnnnnnnnnnnnnnnnnnnnnnnnnnnnnnnnnnnnnnnnnnnnnnnnnnnnnnnnnnnnnnnnnnnnnnnnnnnnnnnnnnnnnnnnnnnnnnnnnnnnnnnnnnnnnnnnnnnnnnnnnnnnnnnnnnnnnnnnnnnnnnnnnnnnnnnnnnnnnnnnnnnnnnnnnnnnnnnnnnnnnnnnnnnnnnnnnnnnnnnnnnnnnnnnnnnnnnnnnnnnnnnnnnnnnnnnnnnnnnnnnnnnnnnnnnnnnnnnnnnnnnnnnnnnnnnnnnnnnnnnnnnnnnnnnnnnnnnnnnnnnnnnnnnnnnnnnnnnnnnnnnnnnnnnnnnnnnnnnnnnnnnnnnnnnnnnnnnnnnnnnnnnnnnnnnnnnnnnnnnnnnnnnnnnnnnnnnnnnnnnnnnnnnnnnnnnnnnnnnnnnnnnnnnnnnnnnnnnnnnnnnnnnnnnnnnnnnngactttaaaggttagaggagtggaccgcactccctacctaggggatgtcgctgttgtcgtgcaccctgggaaaaaagagatgggaaccccactcgcagacactcctacccggcctgtcacccggcatgggggcatgcgggaccttcatgaatccagcttcagcctctctggnnggctctcagatcgatgaccatgttccaaagcgagcttcagctcggatcctcgctcctcccggaggcaggtcgagtggcatttggtaaaggcactgcccagccccccgagtgaggacacaccgccgccaccagtccgcaactctccggccacagcttcaggggcaggagaggctgggctgggcagcacgccacaagaagggggccccaggacctgcggagccctccctatgtctgcaaagtgat

SEQ ID NO: 20683 - DNA, 387 bp, Macaca Mulatta
  misc_feature (1)...(387): n = A,T,C or G
ggagcctggttctggacggacgacatagaggaccacgatgaggaagacgacgaggacttcctggcggaggtggctgaggaggagaacgagcccccagggctctggtcggcggcctacggcgtgggggacgtgcctgggacgtggggccccgacgactcggattcggcgcagactccagagggnnnnnnnnnnnnnnnnnnnnnnnnnnnnnnnnnnnnnnnnnnnnnnnnnnnngcccgtggatctgctcggactgcggcaagacgttcgggcgccgggccgcgaaggccaagcaccagcgctaccacgcgggcgagaggccacaccgctgcgccgattgcggcaagagcttttgaagcggctcgcacctggcgcgccaccggcgca

SEQ ID NO: 20684 - DNA, 408 bp, Macaca Mulatta
gccgctgcgcacaggaccacacatggtggtacgcgttgtacttcccaaaagcatttctgtgttctagttgagaagttcaagtatatttattataagatagtcattggtcacgtctggtgttttatgtataggcacagccacctgtcatcctgcagggcatggggtggaggccagaattgattaggaggcgtctttggagcgcctgcgccgtgtcctgcatgatgcactttctgccagggccttccccacgagatcgctgttgctttcatagagaaaaccacgcatgctgattgtagctgcaccaaacggcctggacctttgcaaagtacaggacctcagccttggcaggcaaaggagggacctgctgaacagacagtgcggaggccaaggccagatccacacacaaag

SEQ ID NO: 20685 - DNA, 177 bp, Macaca Mulatta
  misc_feature (1)...(177): n = A,T,C or G
ggaattacatgaacgacagccttcgtaccgacgtcttcgtgcggttccagcctgagagcatcgcctgtgcctgcatttatcttgctgcccggacactggagnagatccctttgcccaatcgtccaacattggtttctttgtttggagcaactgaagaagaaattcaggaaatctgct

SEQ ID NO: 20686 - DNA, 144 bp, Macaca Mulatta
ctcattgagtgttatgtacacatcttgtttcctgtagaaatgtcctgtattctgggatcagtttccaaatgctttacttttgatttctgtaagttcaaattaatgtattatagaagttatgagttaaataaacattggaatatc

SEQ ID NO: 20687 - DNA, 175 bp, Macaca Mulatta
caaaacattgatttcagggctgccaggaaggaagagcagcagcagggtgtgagagaagctcccgtcagcccacaagatgccgttgccccccggcctcctgctgctgctgctctctggggccacggccaccgccgccctgcccctggagggcagccccactggcccagacagcgag

SEQ ID NO: 20688 - DNA, 163 bp, Macaca Mulatta
cagcacttcaaatgcttcaccttcagaaggcgcaccactagcaggaagttatggatgtactcctcattcattcccaaagttccagcatccttctcatgaacttttgaaggaaaatggctttacccaacaagtgtaccacaaatatcgtcgaagatgcctaagt

SEQ ID NO: 20689 - DNA, 1178 bp, Macaca Mulatta
gggagaccgtgtgtttccaaaatggcggcagcgatggatgtggataccccgagcggcaccaacagcggcgcgggcaagaagcgctttgaagtgaaaaagtggaatgcagtagccctctgggcctgggatattgtggttgataactgtgccatctgcaggaaccacattatggatctttgcatagaatgtcaagctaaccaggcgtctgctacttcagaagaatgtaccgtcgcatggggagtctgtaaccatgcttttcacttccactgcatctctcgctggctcaaaacacgacaggtgtgtccattggacaacagagagtgggaattccaaaagtatgggcactaggaaaagacttcttccatcaagcttaattgttttgttattcatttaatgactttccctgctgttacctaattacagattagatggaaccgtgttttttctgctttgttttttcagtttgctgtttctgtagccatattgtattctgtgtcaaataaagtccagttggattctagaacggatgctctctcttgtgtatgtgaacaaagtgaacataaatgaagagtctccccttccaaggctgaaaactcaactttcgaaagtgaaatgttcgttcatccgggccagagcagggttgtcctctgagcgcatcacttagtcatgaggcatccgacagaggcagagtatggatcgctggcacccgaagacagcagtcagcccttctttctcctcctgtgtgacagcagcgggcagctgaatgagggaagaacgtgggattcagtcatcaaacccagttctgagtcctggttccacagcctggttactgatggcaatcttggcaaagttgcctctctgcgctgaactttgtctgtactgtgggcttctgaggactaagtggtatcatgtggtcacagagaaaagctttgtaaaatgtaaaaccaatatacaaatgtgacctttggttgtgtatgacagcagtccccaacctttttgccaccagggaattggtttcatgaaaaacagttttttccacagctgggggttggggtggggggtgttccctgggggatgggttaatggaattgtctcacctggaaatcttgaggccctcagatggaactccaaaacccggggatcccttcacatggaacagtttttaccctaagggtcac

SEQ ID NO: 20690 - DNA, 1145 bp, Macaca Mulatta
  misc_feature (1)...(1145): n = A,T,C or G
acaggctgagctctgccttcattgaaactcccattcccctgttcacccagagccatggggtctctctcagcactggatccggtgggaaagnnnnnnnnnnnnnnnnnnnnnnnnnnnnnnnnnnnnnnnnnnnnnnnnnnnnnnnnnnnnnnnnnnnnnnnnnnnnnnnnnnnnnnnnnnnnnnnnnnnnnnnnnncggagctctggaagatgcaccattaaaaagttttgaagacacaaagctggtacaggtggtacttaaagaggaaagtgaatctaagtttgaatcagaaagtaaagaagtaagtcccctgacacaagaaggggctccagaggatgtgccagacggagggcagataagcaaaagctttgggaaagtatacaggatggtcaaggagaaagtgagaagccccaaagagcctgagacccccactgagctctgcaccaaagagcggcacgtggtggtcacaggggatgccaattacgtggaccctaggttctgtgtctaccccgtcacagccaaaggtggggtggctgtttccatcgcggaagactctgtgctttatgatggccagttggagccctctcctgagtcacctaagccccctttagagaatgggcaggtgggtctgcaggagaaagaagatggacagccaattgaccagcagcctacagacaaggagattgagccagatggcaaagagctggaagtccctgaggagaaacgtgagggtgaggagcaggacgaggggactgggagaccctgtcccgtggtcacacccggtgcagaggaaccatctataccccagcctccaaagcctgtggctgatcaggacggagccgaggggcttgggactaggggcagaagcctgccagaaaaaggccctcccagggctttggcctataagacagtagaagtggtggaatctatcgagaagatttccacagagagcattcagacatatgaagaaactgctgtgatcgtggagaccatgattggaaagacaaagtcagacaagaagaaatcaggagagaagagctcttaaaatgcccaggcttaatgggagaaaatgtctttggggccactgtaggggtaatgctttgatattttagagcaaatgataaaagagggtgaggtttcctgt

SEQ ID NO: 20691 - DNA, 590 bp, Macaca Mulatta
caggccagaagaaggaaggcctgctgtgagtgggaccggaaatgacatcaccaccccaccaaacaaggagctcccaccaagcccagagaagaaaacaaaggtaggtgccagaatggtggttatcttctactgccataatttttaaacaagagtatcttctgctattattgcttgaatcacgaatgaaatttcttttttctgagctattattgtccttcctcatgtttggtagaaaatatcttgtattctcatttaccatagtggcctaaaccaactttaaaatctcagcctttgaccctattatcttatatatctgtaaaaaatgttctgtagaggtcgggcgtggtggctcatgcctgtaatcccagcactttgggaggccgaggcaggcggatcacgagattaggagatggagaccatcctggccaacatggtgaaatcccgtctctactaaaaatactaaaattagctgggcgtggtgatgcatgcctgtaacagctactcaggaggctgaggcaggagaatcacttgaaccaaggagttggaggttgcagtgagccaagatcatgccactgcactgctctccatct

SEQ ID NO: 20692 - DNA, 625 bp, Macaca Mulatta
ttgacctttggttgaactgctaaggcgattttgctgattttgatttctttttccgcgggggccgtcttttgctcctccaattgagcccagtccccctcccttctccccaaagcgctccaagagaaagtgccaggaaggggcttgtcccggaaggcctgaccgctgagcggggccaggtcctgattaggccaccagggtgggcttccgcgccattgtttgagcttgtcggcgctggtgggagagatgagggcaattcctctgggacgcaagtcccctggagtggccggggctggccggcatgttccccgcacggcgctgccctcgagtccccccgatggagagcgcgggcgcgccttccttcgctggcctccaaacccgggacccgcgagaacacaggagggctgggctccagccccacgtggagtctgggtttgttttgttgtgttttggtttccttcctggaagaaatcccgaggggaccgctctagagcggcatctccgggacctcgtcccttgggcttccggggttgcagccacttaggccccgctcccggggaaaaagggattattttttaaggtttattcccagggcgcgcggcatttccctgtccctcgtgaatcccgt

SEQ ID NO: 20693 - DNA, 927 bp, Macaca Mulatta
atcatctgcgacaatgacgagatgctcagagtgcgactgcgggacctggtcctcaaattcttacagaagttctgagtgggccgcctgagccacttccctgaaatcctgcaggccctcactggctgccctcacaagccacctgacgagtggcatgagaggccgttaaccatgtctttgtggtgtcctctggcttaaggagtgaagaggtggctcttgagggaaatggtctggacttactcccagcactgtttcaggcaagaactttccctttcaacttcaggctaatttcttctcaactctggctctcccgaggagctgaagggtggcagaagtggaacggaagcagttttccaagaggctcatgggagccagggaggcggagatgaccggctggctgtctcacatgggtcccaggcctcgggcaggggagccagcctttggtttcgtttacttgcctacagtgctgcacccaataagatgatcccaaaatatggtaaagtgaacccatctatctgcattttctactctgagcacattggttaataaaaacttatttttatataattagctgtcttctgttgaatctacaatctttatattgatttagtagctgaaaaaatatgaaaatatacagacagcatgaacttagaaaacaccacagcaaattgaattttgatgtgtatgttaaatcatataatttgcagtttataaaaacacagatctgtttcttcttaaattgcgtacgaaggtgctcacctttaagctgtggctgcatggagagtgatgcaggtcggtaccccagcctcaggctccacctgcgccacctctcccacagagcctcagtctctgcgttaaaccgagtgttactcacggataccctcagagccactcgtcacaggaagctttcagacaaaagtaacctcacaa

SEQ ID NO: 20694 - DNA, 458 bp, Macaca Mulatta
  misc_feature (1)...(458): n = A,T,C or G
tgggtaattggggtggtccatgctatgtctcaatttgcttttgttataaacttgcctttttgtggccctaataaagtagacagcttttactgtgactttccnnnnnnnnnnnnnnnnnnnnnnnnnnnnnnnnnnnnnnnnnnnnnnnnnnnnnnnnnnnnnnnnnnnnnnnnnnnnnnnnnnnnnnnnnnnnnnnnnnnnnnnnnnnnnnnnnnnnnnnnnnnnnnnnnnnnnnnnnnnnnnnnnnnnnnnnnnnnnnnnnnnnnnnnnnnnnnnnnnnnnnnnnnnacagtagttcttttgttctttggaccatgtgtcttatttctgcctggccatcccccatcaagtcattagataaattccttgctgtattttattctgtgatcacccctctcttgaacccaattatatacacactgaggaacaaagacatgaagactgcaataagacggctg

SEQ ID NO: 20695 - DNA, 463 bp, Macaca Mulatta
ctcaccagacttctcataatgctcttaatatattgcacttttcgaatcaaagtgtgattttatgggtgtaaatctctactttcctacggcagccttcagattctcatcattgtgcgtctattttgtagccaataaaactcctcactagctgcatggtgtcttttttttaatatcatgaggcaaaacagcacctcagtgtttcatcctaacaaggggttctcaaaacattttccgtggaagatccagagaaatctccagacatcagacatgttcacagcagccagacactgggcagaattgtcaccctgtagccaggcaacctaggcatgagtcatgggtcatgaggctctccacaatccacacttctgccagcaggaagggaagggaggaaacagagaaagggaggcccagaaagcctcactgggagtgtgagatgaccaaaaagtatgctatctcactttta

SEQ ID NO: 20696 - DNA, 1267 bp, Macaca Mulatta
ggcaggtgtcctgccaggaactttgctttaacagacttcaatgctgctcctgttcctcctcttcgagggactctgctgtcctggggaaaatacagcagctccccaggctctacaatcctaccgtccagcagcagaggaccccctgtccttccgcatgctccaaatttcctcctttgccaaccacagctgggcacacagtgagggctcaggatggctgggtgaccttcagactcatggctgggacactgtcacgggcaccatccgctttctgaagccctggtcccatggaaacttcagcaagcaggagctgaaaaacttacagtcactgttccagttatacttcaatggttttgtctggatagtgcaagcttctgctggtcaatttcagcttgaataccccttcgagatccagatattagctggctgtagaatgaatgccccacaaatcttcttaaatatggcatatcaaggatcagatttcctgagtttccaaggaatttcctgggagccatctccaggagcagggatccgggcccagaacgtctgtaaagtgctcagtcgctacctagatattaaggaaatactgcaaagccttcttggtcacacctgtcctcgatttcttgcggggctcatggaagcaggggagtcagaactgaaacgaaaagtgaagccagaagcctggctgtcccgtggccccagtcctggccctggccgtcggcagcttgtgtgccatgtctcaggattctacccaaagcccgtgtgggtgatgtggatgcggggtgaacaggagcagcggggcactcagcgaggggacatcctgcctaatgctgacgagacatggtatctccgagcaaccctggatgtggcaactggggaggcagctggcctgtcctgtcgggtgaaacacagcagtatagagggccatgatctaatcatccattggggtggatattccatctttctcatcctgatctgtttaactgtgatagttaacctggtcatattggttgtagttcactcacggttaaaaaaacagagttcaaataagaacgctctttctccccgtgcacccagccctgtgtttcccatgggagccaacacccaggacaccaataattcaagacatcacttctgcttggcacaagtatcatggatcaaaaacagattcttgaagtggaagacacgcctaaaccaactctcgtgacatttgctttaccttatacataaaatccttgtctgcatcttcttaaacaccgctcgagatctg

SEQ ID NO: 20697 - DNA, 8819 bp, Macaca Mulatta
  misc_feature (1)...(8819): n = A,T,C or G
ggccacagttaagatggaggaatataatgaccttctgaagagcactgatgcttggatagaaaataccagtcatttgctggccaatcctgctgactatgactcttcaaggacactgagtcaccatgctagcactctgcaggnnnnnnnnnnnnnnnnnnnnnnnnnnnnnnnnnnnnnnnnnnnnnnnnnnnnnnnnnnnnnnnnnnnnnnnnnnnnnnnnnnnnnnnnnnnnnnnnnnnnnnnnnnnnnnnnnnnnnnnnnnnnnnnnnnnnnnnnnnnnnnnnnnnnnnnnnnnnnnnnnnnnnnnnnnnnnnnnnnnnnnnnnnnnnnnnnnnnnnnnnnnnnnnnnnnnnnnnnnnnnnnnnnnnnnnnnnnnnnnnnnnnnnnnnnnnnnnnnnnnnnnnnnnnnnnnnnnnnnnnnnnnnnnnnnnnnnnnnnnnnnnnnnnnnnnnnnnnnnnnnnnnnnnnnnnnnnnnnnnnnnnnnnnnnnnnnnnnnnnnnnnnnnnnnnnnnnnaggtcatacttgaaaatatacgtcccatgaagaaaaccattgctgagatagtgtcttaccaagtggaactgaggttgccgcagacaggaatgaaacctctccctgtgtttcagcggacaaatcagcttttacaagatataaaactattggaaaatgtgactcaagaacaaaatgagttattaaaggtnnnnaggtagtcataaaacagaccaatgaatgtgaggaagaaatagaaaatgtgaaacagatcttaaataattactcagatcaattctccctcgtacatatgtcgccagatgtagctgacaagctgccacannnnnnnnnnnnnnnnnnnnnnnnnnnnnnnnnnnnnnnnnnnnnnnnnnnnnnnnnnnnnnnnnnnnnnnnnnnnnnnnnnnnnnnnnnnnnnnnnnnnnnnnnnnnnnnnnnnnnnnnnnnnnnnnnnnnnnnnnnnnnnnnnnnnnnnnnnnnnnnnnnnnnnnnnnnnnnnnnnnnnnnnnnnnnnnnnnnnnnnnnnnnnnnnnnnnnnnnnnnnnnnnnnnnnnnnnnnnnnnnnnnnnnnnnnnnnnnnnnnnnnnnnnnnnnnnnnnnnnnnnnnnnnnnnnnnnnnnnnnnnnnnnnnnnnnnnnnnnnnnnnnnnnnnnnnnnnnnnnnnnnnnnnnnnnnnnnnnnnnnnnnnnnnnnnnnnnnnnnnnnnnnnnnnnnnnnnnnnnnnnnnnnnnnnnnnnnnnnnnnnnnnnnnnnnnnnnnnnnnnnnnnnnnnnnnnnnnnnnnnnnnnnnnnnnnnnnnnnnnnnnnnnnnnnnnnnnnnnnnnnnnnnnnnnnnnnnnnnnnnnnnnnnnnnnnnnnnnnnnnnnnnnnnnnnnnnnnnnnnnnnnnnnnnnnnnnnnnnnnnnnnnnnnnnnnnnnnnnnnnnnnnnnnnnnnnnnnnnnnnnnnnnnnnnnnnnnnnnnnnnnnnnnnnnnnnnnnnnnnnnnnnnnnnnnnnnnnnnnnnnnnnnnnnnnnnnnnnnnnnnnnnnnnnnnnnnnnnnnnnnnnnnnnnnnnnnnnnggctatgctaacagagattgagcacaaggttgcctttctgttagagacttgcaaagatcagggcctgggagataatggagccactcaacatgaggctgaagcgctttcgctgaaactgaaaacagtgaagtgcaatttagaaaaagtccagatgatgcttcaggagaagcacagtgaagatcagnncagcatcctaccattctaaagaaatcctcagagccagagcatccaaaagctctccaaccagttaacctttctgaattggaatccagtgaaactgaaaggccactattcagcannnnnnnnnnnnnnnnnnnnnnnnnnnnnnnnnnnnnnnnnnnnnnnnnnnnnnnnnnnnnnnnnnnnnnnnnnnnnnnnnnnnnnnnnnnnnnnnnnnnnnnnnnnnnnnnnnnnnnnnnnnnnnnnnnnnnnnnnnnnnnnnnnnnnnnnnnnnnnnnnnnnnnnnnnnnnnnnnnnnnnnnnnnnnnnnnnnnnnnnnnnnnnnnnnnnnnnnnnnnnnnnnnnnnnnnnnnnnnnnnnnnnnnnnnnnnnnnnnnnnnnnnnnnnnnnnnnnnnnnnnnnnnnaggtttccacaaatatgggtattctaccccagtgtgagtatgtataactttagatacccaacaactgaagaactgaaaacctacaccacccannnnnnnnnnnnnnnnnnnnnnnnnnnnnnnnnnnnnnnnnnnnnnnnnnnnnnnnnnnnnnnnnnnnnnnnnnnnnnnnnnnnnnnnnnnnnnnnnnnnnnnnnnnnnnnnnnnnnnnnnnnnnnnnnnnnnnnnnnnnnnnnnnnnnnnnnnnnnnnnnnnnnnnnnnnnnnnnnnnnnnnnnnnnnnnnnnnnnnnnnnnnnnnnnnnnnnnnnnnnnnnnnnnnnnnnnnnnnnnnnnnnnnnnnnnnnnnnnnnnnnnnnnnnnnnnnnnnnnnnnnnnnnnnnnnnnnnnnnnnnnnnnnnnnnnnnnnnnnnnnnnnnnnnnnnnnnnnnnnnnnnnnnnnnnnnnnnnnnnnnnnnnnnnnnnnnnnnnnnnnnnnnnnnnnnnnnnnnnnnnnnnnnnnnnnnnnnnnnnnnnnnnnnnnnnnnnnnnnnnnnnnnnnnnnnnnnnnnnnnnnnnnnnnnnnnnnnnnnnnnnnnnnnnnnnnnnnnnnnnnnnnnnnnnnnnnnnnnnnnnnnnnnnnnnnnnnnnnnnnnnnnnnnnnnnnnnnnnnnnnnnnnnnnnnnnnnnnnnnnnnnnnnnnnnnnnnnnnnnnnnnnnnnnnnnnnnnnnnnnnnnnnaggatgtacttgacagtatgtggggaatgctaagagccaggtacacagaactcagcagccctttcatcactgagagccagcaagatgctttgttgcaaggcatggtagaactggtgaagattgggaaggaaaagcttgctcatgaccacttaaaacaaaccaaaagtaaagtggcgttacaggctcaaatagaaaatcacaaggnnnnnnnnnnnnnnnnnnnnnnnnnnnnnnnnnnnnnnnnnnnnnnnnnnnnnnnnnnnnnnnnnnnnnnnnnnnnnnnnnnnnnnnnnnnnnnnnnnnnnnnnnnnnnnnnnnnnnnnnnnnnnnnnnnnnnnnnnnnnnnnnnnnnnnnnnnnnnnnnnnnnnnnnnngaaatgggaagaatttgatgaaaactatgcatctcttgaaaaggacctgggaaattcttatatctacattgccctctgtgagtttggtggaagagacagaggaaagattagtggaaaggatttcnnnnnnnnnnnnnnnnnnnnnnnnnnnnnnnnnnnnnnnnnnnnnnnnnnnnnnnnnnnnnnnnnnnnnnnnnnnnnnnnnnnnnnnnnnnnnnnnnnnnnnnnnnnnnnnnnnnnnnnnnnnnnnnnnnnnnnnnnnnnnnnnnnnnnnnnnnnnnnnnnnnnnnnnnnnnnnnnnnnnnnnnnnnnnnnnnnnnnnnnnnnnnnnnnnnnnnnnnnnnnnnnnnnnnnnnnnnnnnnnnnnnnnnnnnnnnnnnnnnnnnnnnnnnnnnnnnnnnnnnnnnnnnnnnnnnnnnnnnnnnnnnnnnnnnnnnnnnnnnnnnnnnnnnnnnnnnnnnnnnnnnnnnnnnnnnnnnnnnnnnnnnnnnnnnnnnnnnnnnnnnnnnnnnnnnnnnnnnnnnnnnnnnnnnnnnnnnnnnnnnnnnnnnnnnnnnnnnnnnnnnnnnnnnnnnnnnnnnnnnnnnnnnnnnnnnnnnnnnnnnnnnnnnnnnnnnnnnnnnnnnnnnnnnnnnnnnnnnnnnnnnnnnnnnnnnnnnnnnnnnnnnnnnnnnnnnnnnnnnnnnnnnnnnnnnnnnnnnnnnnnnnnnnnnnnnnnnnnnnnnnnnnnnnnnnnnnnnnnnnnnnnnnnnnnnnnnnnnnnnnnnnnnnnnnnnnnnnnnnnnnnnnnnnggagtttagaatggaaatggactataaacagtggatagtggactttgttaaccagtcgttacttcagctaagcacctgtgatgtagaaagcaaacgctatgaaagaacggagtttgcagagcacctgggggagatgaaccgccagtggcaccatgtacatggaatgctgaatagaaagnnnnnnnnnnnnnnnnnnnnnnnnnnnnnnnnnnnnnnnnnnnnnnnnnnnnnnnnnnnnnnnnnnnnnnnnnnnnnnnnnnnnnnnnnnnnnnnnnnnnnnnnnnnnnnnnnnnnnnnnnnnnnnnnnnnnnnnnnnnnnnnnnnnnnnnnnnnnnnnnnnnnnnnnnnnnnnnnnnnnnnnnnnnnnnnnnnnnnnnnnnnnnnnnnnnnnnnnnnnnnnnnnnnnnnnnnnnnnnnnnnnnnnnnnnnnnnnnnnnnnnnnnnnnnnnnnnnnnnnnnnnnnnnnnnnnnnnnnnnnnnnnnnnnnnnnnnnnnnnnnnnnnnnnnnnnnnnnnnnnnnnnnnnnnnnnnnnnnnnnnnnnnnnnnnnnnnnnnnnnnnnnnnnnnnnnnnnnnnnnnnnnnnnnnnnnnnnnnnnnnnnnnnnnnnnnnnnnnnnnnnnnnnnnnnnnnnnnnnnnnnnnnnnnnnnnnnnnnnnnnnnnnnnnnnnnnnnnnnnnnnnnnnnnnnnnnnnnnnnnnnnnnnnnnnnnnnnnnnnnnnnnnnnnnnnnnnnnnnnnnnnnnnnnnnnnnnnnnnnnnnnnnnnnnnnnnnnnnnnnnnnnnnnnnccagaagcttgttgctgacatgttgttgatccaagcatactctgccaaagtatttccttctttattgcaaaagagagagacattttgggcagaacaaataacagaagttaaaatactagaagaaaagtcacgccaacgtggtatgaaactacagagtttgttgcannnnnnnnnnnnnnnnnnnnnnnnnnnnnnnnnnnnnnnnnnnnnnnnnnnnnnnnnnnnnnnnnnnnnnnnnnnnnnnnnnnnnnnnnnnnnnnnnnnnnnnnnnnnnnnnnnnnnnnnnnnnnnnnnnnnnnnnnnnnnnnnnnnnnnnnnnnnnnnnnnnnnnnnnnnnnnnnnnnnnnnnnnnnnnnnnnnnnnnnnnnnnnnnnnnnnnnnnnnnnnnnnnnnnnnnnnnnnnnnnnnnnnnnnnnnnnnnnnnnnnnnnnnnnnnnnnnnnnnnnnnnnnnnnnnnnnnnnnnnnnnnnnnnnnnnnnnnnnnnnnnnnnnnnnnnnnnnnnnnnnnnnnnnnnnnnnnnnnnnnnnnnnnnnnnnnnnnnnnnnnnnnnnnnnnnnnnnnnnnnnnnnnnnnnnnnnnnnnnnnnnnnnnnnnnnnnnnnnnnnnnnnnnnnnnnnnnnnnnnnnnnnnnnnnnnnnnnnnnnnnnnnnnnnnnnnnnnnnnnnnnnnnnnnnnnnnnnnnnnnnnnnnnnnnnnnnnnnnnnnnnnnnnnnnnnnnnnnnnnnnnnnnnnnnnnnnnnnnnnnnnnnnnnnnnnnnnnnnnnnnnnnnnnnnnnnnnnnnnnnnnnnnnnnnnnnnggactgcatggaagaaataaacttgtttagtgaaaacaagttacagttaaagcagatgggtgaccagctgatcaaggccagcaacaaatcgagaacagctgagatcgatgacaagctcaacaaaattaacgatcgttggcaacatctttttgatgtcatcggatcaaggnnnnnnnnnnnnnnnnnnnnnnnnnnnnnnnnnnnnnnnnnnnnnnnnnnnnnnnnnnnnnnnnnnnnnnnnnnnnnnnnnnnnnnnnnnnnnnnnnnnnnnnnnnnnnnnnnnnnnnnnnnnnnnnnnnnnnnnnnnnnnnnnnnnnnnnnnnnnnnnnnnnnnnnnnnnnnnnnnnnnnnnnnnnnnnnnnnnnnnnnnnnnnnnnnnnnnnnnnnnnnnnnnnnnnnnnnnnnnnnnnnnnnnnnnnnnnnnnnnnnnnnnnnnnnnnnnnnnnnnnnnnnnnnnnnnnnnnnnnnnnnnnnnnnnnnnnnnnnnnnnnnnnnnnnnnnnnnnnnnnnnnnnnnnnnnnnnnnnnnnnnnnnnnnnnnnnnnnnnnnnnnnnnnnnnnnnnnnnnnnnnnnnnnnnnnnnnnnnnnnnnnnnnnnnnnnnnnnnnnnnnnnnnnnnnnnnnnnnnnnnnnnnnnnnnnnnnnnnnnnnnnnnnnnnnnnnnnnnnnnnnnnnnnnnnnnnnnnnnnnnnnnnnnnnnnnnnnnnnnnnnnnnnnnnnnnnnnnnnnnnnnnnnnnnnnnnnnnnnnnnnnnnnnnnnnnnnnnnnnnnnnnnnnnnnnnnnnnnnnnnnnnnnnnnnnnnnnnnnnnnnnnnnnnnnnnnnnnnnnnnnnnnnnnnnnnnnnnnnnnnnnnnnnnnnnnnnnnnnnnnnnnnnnnnnnnnnnnnnnnnnnnnnnnnnnnnnnnnnnnnnnnnnnnnnnnnnnnnnnnnnnnnnnnnnnnnnnnnnnnnnnnnnnnnnnnnnnnnnnnnnnnnnnnnnnnnnnnnnnnnnnnnnnnnnnnnnnnnnnnnnnnnnnnnnnnnnnnnnnnnnnnnnnnnnnnnnnnnnnnnnnnnnnnnnnnnnnnnnnnnnnnnnnnnnnnnnnnnnnnnnnnnnnnnnnnnnnnnnnnnnnnnnnnnnnnnnnnnnnnnnnnnnnnnnnnnnnnnnnnnnnnnnnnnnnnnnnnnnnnnnnnnnnnnnnnnnnnnnnnnnnnnnnnnnnnnnnnnnnnnnnnnnnnnnnnnnnnnnnnnnnnnnnnnnnnnnnnnnnnnnnnnnnnnnnnnnnnnnnnnnnnnnnnnnnnnnnnnnnnnnnnnnnnnnnnnnnnnnnnnnnnnnnnnnnnnnnnnnnnnnnnnnnnnnnnnnnnnnnnnnnnnnnnnnnnnnnnnnnnnnnnnnnnnnnnnnnnnnnnnnnnnnnnnnnnnnnnnnnnnnnnnnnnnnnnnnnnnnnnnnnnnnnnnnnnnnnnnnnnnnnnnnnnnnnnnnnnnnnnnnnnnnnnnnnnnnnnnnnnnnnnnnnnnnnnnnnnnnnnnnnnnnnnnnnnnnnnnnnnnnnnnnnnnnnnnnnnnnnnnnnnnnnnnnnnnnnnnnnnnnnnnnnnnnnnnnnnnnnnnnnnnnnnnnnnnnnnnnnnnnnnnnnnnnnnnnnnnnnnnnnnnnnnnnnnnnnnnnnnnnnnnnnnnnnnnnnnnnnnnnnnnnnnnnnnnnnnnnnnnnnnnnnnnnnnnnnnnnnnnnnnnnnnnnnnnnnnnnnnnnnnnnnnnnnnnnnnnnnnnnnnnnnnnnnnnnnnnnnnnnnnnnnnnnnnnnnnnnnnnnnnnnnnnnnnnnnnnnnnnnnnnnnnnnnnnnnnnnnnnnnnnnnnnnnnnnnnnnnnnnnnnnnnnnnnnnnnnnnnnnnnnnnnnnnnnnnnnnnnnnnnnnnnnnnnnnnnnnnnnnnnnnnnnnnggagatattgaaagcctttgacacctacaaggcattagtggtctctgtcaacgtgagcagcaaggaatttctgcaaaccgagagccccgaatccacagagctccaaagtagactccgccagctgagcctgctctgggaagcggcacagggcgcagtggacagctggagagggggcttacgacagtcgctcatgcagtgccaggnnnnnnnnnnnnnnnnnnnnnnnnnnnnnnnnnnnnnnnnnnnnnnnnnnnnnnnnnnnnnnnnnnnnnnnnnnnnnnnnnnnnnnnnnnnnnnnnnnnnnnnnnnnnnnnnnnnnnnnnnnnnnnnnnnnnnnnnnnnnnnnnnnnnnnnnnnnnnnnnnnnnnnnnnnnnnnnnnnnnnnnnnnnnnnnnnnnnnnnnnnnnnnnnnnnnnnnnnnnnnnnnnnnnnnnnnnnnnnnnnnnnnnnnnnnnnnnnnnnnnnnnnnnnnnnnnnnnnnnnnnnnnnnnnnnnnnnnnnnnnnnnnnnnnnnnnnnnnnnnnnnnnnnnnnnnnnnnnnnnnnnnnnnnnnnnnnnnnnnnnnnnnnnnnnnnnnnnnnnnnnnnnnnnnnnnnnnnnnnnnnnnnnnnnnnnnnnnnnnnnnnnnnnnnnnnnnnnnnnnnnnnnnnnnnnnnnnnnnnnnnnnnnnnnnnnnnnnnnnnnnnnnnnnnnnnnnnnnnnnnnnnnnnnnnnnnnnnnnnnnnnnnnnnnnnnnnnnnnnnnnnnnnnnnnnnnnnnnnnnnnnnnnnnnnnnnncgaagaagactacagctgcactcaggcaaacaactttgcccggtctttttaccccatgctgaggtacaccaacgggccacccccgacataaaggacgtagttggccacaggccacaccacctgcctgattgctaagggtgcccagcacgtggccccagaccaatctgagtgacttagtgttggcaaggtccggggacctatgcagacaccttcttctgggcttgcccggcacgctctctgaaagcccagggcagctttcaaattgtgttcctccccaggggcagggaacctgtgcggcagttgccccgggtattttggcaaaactagttgattggtttagggatctctggaaatgtcaatttcctgaagagccaagcactttgtgaattctggtttatttgtaaaacagcattattataatgtaggtatggtcaatgagcagtggtgtccctcacgtatattatagaagcgagcgagcacattccaccctagaaatggt

SEQ ID NO: 20698 - DNA, 586 bp, Macaca Mulatta
tgaaacagcagcagtggtgtgggatgactgccaaaatgggcaccgtgttggcaggggtcttcaccatcatggccgtacacatgtatctcatctttgaacatagtcacctagggcatggcaattgcagtgagatcgcactaaagtacgagagtgcaagtggcatcataaatgacttcatcatctgctggagttttaaaatcgtcctcttcctctctttcatcaccatcctcatcagctgcttcctcctgtactcagtgtatgcccagatcttcaggggcctggtcatctacgttgcctggatttttttctatgaaaccgtaaacgtcgtaatacaaatcctcaccaatgacgacttcagcgttacagaggtcagaatcatgcgctggtttggcttggtgtctcgtaccatcatgcactgtttctggatgttctttgtcatcacctatgcccacataacctacaaaaaccagagccagggcaatatagtttcctacaagagacgaatttctacagcggaggctctccacagcagaaataaaagataatcagttttgggtgggctcagtggctcatacctggaatccca

SEQ ID NO: 20699 - DNA, 197 bp, Macaca Mulatta
tacatggccatcgtccatcccttccagcctcggctttcagcccccggcaccaaggcggttattgctggcatctggctggtggctctcgccctggcctccccccagtgcttctactccaccgtcaccatggatcagggtgccaccaagtgcgtggtggcctggcccgaagacagcgggggcaagacgctcctcctgta

SEQ ID NO: 20700 - DNA, 3648 bp, Macaca Mulatta
  misc_feature (1)...(3648): n = A,T,C or G
gaaaaaatggtgtgaatatttcatcttaagaaatatacatacttttgaattttggaatctgaatttaattcacctttctgacttaagtgatgagcttttgttgaagaatattgctttttactatgaaaatgaaaatgtaaaagnnaggcctacatttgaatttgggagataccattatgaaagattatgaatatctctggaataccgtatcaaagttggtcagagactttgaggttggacagccatttcctctgagaacaacaaaatttcgttttcttgaaaagaaaccatcaccaatcaaannnnnnnnnnnnnnnnnnnnnnnnnnnnnnnnnnnnnnnnnnnnnnnnnnnnnnnnnnnnnnnnnnnnnnnnnnnnnnnnnnnnnnnnnnnnnnnnnnnnnnnngtgatgatcctattgttacttcactggttaaacaaaaggaatttgatgaacttgtgcactggcattctcataaacccctgagtgatgattatgacaggtccaagtgtcagtttgatgnnnnnnnnnnnnnnnnnnnnnnnnnnnnnnnnnnnnnnnnnnnnnnnnnnnnnnnncggttttatgggaattcattagaaacagtctcttcgaaaatcatcgtgactcaaactattaagtcaaagaaggattttagtgggcccaagagcaaaaaggcacacnnnnnnnnnnnnnnnnnnnnnnnnnnnnnnnnnnnnnnnnnnnnnnnnnnnnnnnnnnnnnnnnnnnnnnnnnnnnnnnnnnnnnnnnnnnnnnnnnnnnnnnnnnnnnnnnnnnnnnnnnnnnnnnnnnnnnnnnnnnnnnnnnnnnnnnnnnnnnnnnnnnnnnnnnnnnnnnnnnnnnnnnnnnnnnnnnnnnnnnnnnnnnnnnnnnnnnnnnnnnnnnnnnnnnnnnnnnnnnnnnnnnnnnnnnnnnnnnnnnnnnnnnnnnnnnnnnnnnnnnnnnnnnnnnnnnnnnnnnnnnnnnnnnnnnnnnnnnnnnnnnnnnnnnnnnnnnnnnnnnnnnnnnnnnnnnnnnnnnnnnnnnnnnnnnnnnnnnnnnnnnnnnnnnnnnnnnnnnnnnnnnnnnnnnnnnnnnnnnnnnnnnnnnnnnnnnnnnnnnnnnnnnnnnnnnnnnnnnnnnnnnnnnnnnnnnnnnnnnnnnnnnnnnnnnnnnnnnnnnnnnnnnnnnnnnnnnnnnnnnnnnnnnnnnnnnnnnnnnnnnnnnnnnnnnnnnnnnnnnnnnnnnnnnnnnnnnnnnnnnnnnnnnnnnnnnnnnnnnnnnnnnnnnnnnnnnnnnnnnnnnnnnnnnnnnnnnnnnnnnnnnnnnnnnnnnnnnnnnnnnnnnnnnnnnnnnnnnnnnnnnnnnnnnnnnnnnnnnnnnnnnnnnnnnnnnnnnnnnnnnnnnnnnnnnnnnnnnnnnnnnnnnnnnnnnnnnnnnnnnnnnnnnnnnnnnnnnnnnnnnnnnnnnnnnnnnnnnnnnnnnnnnnnnnnnnnnnnnnnnnnnnnnnnnnnnnnnnnnnnnnnnnnnnnnnnnnnnnnnnnnnnnnnnnnnnnnnnnnnnnnnnnnnnnnnnnnnnnnnnnnnnnnnnnnnnnnnnnnnnnnnnnnnnnnnnnnnnnnnnnnnnnnnnnnnnnnnnnnnnnnnnnnnnnnnnnnnnnnnnnnnnnnnnnnnnnnnnnnnnnnnnnnnnnnnnnnnnnnnnnnnnnnnnnnnnnnnnnnnnnnnnnnnnnnnnnnnnnnnnnnnnnnnnnnnnnnnnnnnnnnnnnnnnnnnnnnnnnnnnnnnnnnnnnnnnnnnnnnnnnnnnnnnnnnnnnnnnnnnnnnnnnnnnnnnnnnnnnnnnnnnnnnnnnnnnnnnnnnnnnnnnnnnnnnnnnnnnnnnnnnnnnnnnnnnnnnnnnnnnnnnnnnnnnnnnnnnnnnnnnnnnnnnnnnnnnnnnnnnnnnnnnnnnnnnnnnnnnnnnnnnnnnnnnnnnnnnnnnnnnnnnnnnnnnnnnnnnttgaaaggtatggattccctcctgatcttaccctttcacctcgagaaagcatccagctatatgatgccatgtttcaaatttggaaaagttggccccgggcccaggnaggaactgtgcccagaaaacttcattcattttaacaataaattagtcattnnnnnnnnnnnnnnnnnnnnnnnnnnnnnnnnnnnnnnnnnnnnnnnnnnnnnnnnnnnnnnnnnnnnnnnnnnnnnnnnnnnnnnnnnnnnnnnnnnnnnnnnnnnnnnnnnnnnnnnnnnnnnnnnnnnnnnnnnnnnnnnnnnnnnnnnnnnnnnnnnnnnnnnnnnnnnnnnnnnnnnnnnnnnnnnnnnnnnnnnnnnnnnnnnnaagttaggagctgtagaagacgcagccaaaagtgtgagcacgtccctaaagaaaaagcaggagacaaaaaggcctcccaaagctgataaagaagcccatgtcatggctaacaaacttcgaaaagttaaaaaatccatagagaaacaaaagatnnnnnnnnnnnnnnnnnnnnnnnnnnnnnnnnnnnnnnnnnnnnnnnnnnnnnnnnnnnnnnnnnnnnnnnnnnnnnnnnnnnnnnnnnnnnnnnnnnnnnnnnnnnnnnnnnnnnnnnnnnnnnnnnnnnnnnnnnnnnnnnnnnnnnnnnnnnnnnnnnnnnnnnnnnnnnnnnnnnnnnnnnnnnnnnnnnnnnnnnnnnnnnnnnnnnnnnnnnnnnnnnnnnnnnnnnnnnnnnnnnnnnnnnnnnnnnnnnnnnnnnnnnnnnnnnnnnnnnnnnnnnnnnnnnnnnnnnnnnnnngtggtgacagctactggaacacttgctttaggtatcaacatgccttgtaaatctgtggtttttgctcaaaactcagtctatctggatgccttgaattatagacagnnnnnnnnnnnnnnnnnnnnnnnnnnnnnnnnnnnnnnnnnnnnnnnnnnnnnnnnnnnnnnnnnnnnnnnnnnnnnnnnnnnnnnnnnnnnnnnnnnnnnnnnnnnnnnnnnnnnnnnnnnnnnnnnnnnnnnnnnnnnnnnnnnnnnnnnnnnnnnnnnnnnnnnnnnnnnnnnnnnnnnnnnnnnnnnnnnnnnnnnnnnnnnnnnnnnnnnnnnnnnnnnnnnnnnnnnnnnnnnnnnnnnnnnnnnnnnnnnnnnnnnnnnnnnnnnnnnnnnnnnnnnnnnnnnnnnnnnnnnnnnnnnnnnnnnnnnnnnnnnnnnnnnnnnnnnnnnnnnnnnnnnnnnnnnnnnnnnnnnnnnnnnnnnnnnnnnnnnnnnnnnnnnnnnnnnnnnnnnnnnnnnnnnnnnnnnnnnnnnnnnnnnnnnnnnnnnnnnnnnnnnnnnaggctcaaaacatttttctcaagacgttatggaaaagctaatgttagtactggcacatctcttcggaagaagatattttccaccaaagttccaagatacacacttcgagttttatcaatcaaaggnnnaggtgttccttgatgagctccctgaggatttcagtgatgcctcagatgagtataacatgaaagttatggaggactttaccactttcctacgaattgtttccaacccggctgatatgaatctggaatatcaactcccattgtcaaaaatc

SEQ ID NO: 20701 - DNA, 774 bp, Macaca Mulatta
  misc_feature (1)...(774): n = A,T,C or G
gagaccaaaataaacagaggggctatataatgtttataggtggaagggttaaacatgntaaagatggcaatctttcccaaattgatcattgcatccaagcaattttcagcagggttttatttgtttttttttatggaactgtggaagccgactctaaaatttatgtagaagtgtgaagagccaagacaattttgaaaaaaataaaatggtaggacatactctgtccggtgtcaagaataattctaaaaatgtaataagagagtatggtattgacacaaggatttaaaactagataaacagaattaattacctttgttaaaatcaagaatccatacctgtgtgggtgtattagacttctcttgcataccctcaaatgcagtcaatatactcttgctccagttgtgttttggctttgactagcttcccacagatgcaacctgacaatgcttagcctctttcttcagttcagacatgactggcctaaacactaaagcgttgagtgcttctgagatcacacttggcacttgtgcatgcacttttcaagaaatatagggagttaatgcccatggggccatgtaaaggtacaaagagaaagcagctgtctgcaagccaataagagagccctcaccaggaaacaaatctgctggaaccttaatcttggactatccagcctcctggaactgtgagaaataaatgtctgttgttgaagccaccccatatttggtattttgttatggcaaccacagctaatataataaatattcccaatacccc

SEQ ID NO: 20702 - DNA, 616 bp, Macaca Mulatta
  misc_feature (1)...(616): n = A,T,C or G
cagaatggttccctgtttgaagctgacttcatccttctggatggaattccagccaacgtgatccgaggagagaagcagtacctggctgcccccctcgtcatgctgaagatggagnnnnnnnnnnnnnnnnnnnnnnnnnnnnnnnnnnnnnnnnnnnnnnnnnnnnnnnnnnnnnnnnnnnnnnnnnnnnnnnnnnnnnnnnnnnnnnnnnnnnnnnnnnnnnnnnnnnnnnnnnnnnnnnnnnnnnnnnnnnnnnnnnnnnnnnnnnnnnnnnnnnnnnnnnnnnnnnnnnnnnnnnnnnnnnnnnnnnnnnnnnnnnnnnnnnnnnnnnnnnnnnnnnnnnnnnnnnnnnnnnnnnnnnnnnnnnnnnnnnnnnnnnnnnnnnnnnnnnnnnnnnnnnnnnnnnnnnnnnnnnnnnnnnnnnnnnnnnnnnnnnnnnnnnnnnnnnnnnnnnnnnnnnnnnnnngccatgtgcagttgcttcgtcgggcgacggctcagctgacctactgctccctctgtcctcctgacgacctggctgaccggggcctgctgggactcccaggtgctctctacgcccgtgatgctttacggctctgggagatcattgccaggt

SEQ ID NO: 20703 - DNA, 1078 bp, Macaca Mulatta
  misc_feature (1)...(1078): n = A,T,C or G
ggggggggcaccctctccctcgtccaccgctgccgcctccttcttctgccgctcctggtgctgcttgtgtgctcgtttggtgcggacctggtacctcttttgtgaagcggcagctgaggagactccggcgctcgccatggccgacgaaaagcccaaggaaggagtcaagactgagaacaacgatcatattaatttgaaggtggcggggcaggatggttctgtggtgcagtttaagattaagaggcatacaccacttagtaaactaatgaaagcctattgtgaacgacagggattgtcaatgaggcagatcagattccgattcgacgggcaaccaatcaatgaaacagacacacctgcacagttggaaatggaggatgaagatacaattgatgtgttccaacagcagacgggaggtgtctactgaaaagggaacctgcttctttactccagaactctgttctttaaagaccaagattacattctcaattagaaaactgcaatttggttccaccacatcctgactactaccgtatagttttctctattctttcatttcccccttccccattcctttattgtacataaagtaactggtatatgtgcacaagcatattgcttttttttttttactaaaacagccaatggtatggttttaattgacatcaagtggagacgggatgggggaaaaaatactgattctgtgaaaataccccccttttctccattaagtggcatgctccattccagctccttatcttttatattcccaggtaaagttatttttgctctcccactgttttaacaaaaacacacatcataaaaatccttgcataccttgttcaattggagaattttaatgtttttcatttatcattgtaaaaccaaggacaattttataacttttttgtacgtagctgttacatgtagggcaatctgtctttaagtagggataaattactctaaaacaaaaaagaatcttagatagtttttccctttcagttcaagcggtctttgttgttttaaaataacctttcttggttttannnnnnnnnnnnnnnnnnnnnnnnnnnnnnnnnnt

SEQ ID NO: 20704 - DNA, 753 bp, Macaca Mulatta
  misc_feature (1)...(753): n = A,T,C or G
ccgctctcccggcgctgcagctgtctgggctgctgcgcgccgcctaggtgtctgggcaatccatgggcaagagcaagggccacgatgacagattacggcgaggagcagcgcaacgagctggaggctctggagtccatctaccctgactccttcacagtattatcagaaaatccacccagcttcaccattactgtgacatctgaggctggagaaaatgatgaaactgtccagactaccctcaagtttacatacagtgaaaaatacccagatgaagctcccctttatgaaatattctcccaggaaaacctagaagataatgatgtctcagacattttaaaattactagcattacaggctgaagaaaatcttggtatggtgatgatttttactctagtgacagctgtgcaagaaaaattgaatgaaatagtagatcagataaaaactnnnnnnnnnnnnnnnnnnnnnnnnnnnnnnnnnnnnnnnnnnnnnnctgaaaagcaattattccatggtactccagttacaattgagaatttcttaaattggaaggccaagtttgatgcagaactcttggaaattaaaaagaaaaggatgaaagaagaagaacaagcaggaaaaaataaattaagtgggaaacaactatttgaaacggatcataatcttgacacatctgatatccagttctcggaggatgctggaaacaacgtggaggtcgatgagtctttgttccaagaaatggatgacttggagctg

SEQ ID NO: 20705 - DNA, 840 bp, Macaca Mulatta
tcagtgacaatgcacagctccggtctgtggaccctgccaccttccacggcctgggccgcctgcacacccttcacctggaccgctgcggcctgcaggagctgggtccaggcctgttccgcggcctggctgccctgcagtacctctacctgcaggacaacgcactgcaggcgctgcctgatgacaccttccgcgacctgggcaacctcacacacctcttcctgcacggcaaccgcatctccagcgtgcccgagcgcgccttccgcggcctgcacagcctcgaccgtctcctgctgcaccagaaccgcgtggcccacgtgcatccacacgcctttcgtgaccttggccgcctcatgacactctatctgtttgccaacaatctatcagcgctgcccgccgaggccctggcacccctgcgtgccctgcagtacctgaggctcaacgacaacccctgggtgtgtgactgccgggcacgcccgctctgggcctggctgcagaagttccgcggctcctcctccgaggtgccctgcagcctccctcaacgcctggctggtcgtgacctgaaacgcctagctgccaatgacctgcagggctgcgctgtggccaccggcccttaccatcccatctggactggcagggccaccgacgaggagctgctggggcttcccaagtgctgccagccagacgccgctgacaaggcctcggtactagagcctgggagaccggcttcagcaggcaatgcgctgaagggacgcgtgccgcctggtgacagccccccaggcaacggctctggcccacggcacatcaatgactccccctttgggactctgcctggctctgctg

SEQ ID NO: 20706 - DNA, 835 bp, Macaca Mulatta
ggggcaaacgtcagtgtcgggcgcagaccgcagcagtgcggcttgctgttggaagttcaggctcggttgtcttttgggagccatggagagtgacttttatctgcgttactacgtggggcacaagggcaaattcggccacgagttcctggagtttgagttccgaccggatgggaagttaagatatgccaacaacagcaattacaagaatgatgtcatgatcagaaaagaggcttatgtacataaaagcgtgatggaggaactgaagagaataatcgatgacagtgaaattaccaaagaggatgatgcattgtggcctcctcctgaccgagtgggccggcaggagcttgaaatcgtcattggagatgaacacatttcttttacaacatcaaaaattggttcccttattgatgtcaatcaatccaaggatccagaaggcttacgagtattttattatcttgtccaggacctgaagtgtttggtcttcagtcttattggattacacttcaagattaaaccaatctagactgaatattggtgtggacatgggggagtgggtgggagtagaaaatttttgtgtatatcagggcagtattttttttataaactataaaatgattgtctttaataaaataagtgattccccattccccccactaatcaaaataaccttccgccaaccaagcccaacacaacgcacttatgtataccgcccaagttgacatacagcgcaatctccaccactaagatgcgacgacatatacatagactaccaagtctgtatgaaccatcttcaaatctcttgtcgatcatctttctgtcaccacactacaccctt

SEQ ID NO: 20707 - DNA, 99 bp, Macaca Mulatta
caggtgtatgagtttagagtcaaagaatctagcatcatagctccagctcctgctgaggatgtggacactcctccaaggaaaaagaagaggaaacaccgg

SEQ ID NO: 20708 - DNA, 750 bp, Macaca Mulatta
gggcctccggcgcggtcctccaggccagggccctaagccatctccacccccaggtggtttgaactttgagccttttgtagtcctgatgaataatttcattttcctcaagtttatgacactcggaacgtcaagaactggaggtttgtgcaatttgagaccggtcagcactgtgcagagatcagagtactaagagacagagattcaaatggcttccagaggaaagacagagacaagcaaattaaagcagaatttagaagaacagttggatagactcatgcagcaattacaagatctggaggaatgcagagaggaactcgatacagatgaatatgaagaaaccaaaaaggaaactctggagcaactaagtgaatttaatgattcactgaagaaaattatgtctggaaatatgaccttggtagatgaactaagtggaatgcagctggctattcaggcagctatcagccaggcctttaaaaccccagaggtcatcagattgtttgcaaagaaacaaccaggtcagctccggacaaggttagcagagatggatagagatctgatggtaggaaagctggagagagacctatacactcaacagaaagtggagatactaacagctctcaggaaacttggagagaagctgactgcaaatgatgaggcctttcttgtcagcaaatgcagggtgctatactcagccagttttgagaaaagtctctacaggacctttggcctctgggagaacaaaaatccttt

SEQ ID NO: 20709 - DNA, 1642 bp, Macaca Mulatta
  misc_feature (1)...(1642): n = A,T,C or G
atttccttacgtctctgcttcgctcagcgatgcaaaacgcgcgaggcgcacggcagagggccgaggccgcgggactctccgggccaggcccgcccctcggccgcgcagcgcagcacgggacgccctggcggctgtccagcgctggcagtctgagccgaggctgtcgcggagccagtacagccggggccgcgggctggaagggcgagcttcctaagccggggggatgcccggcgcccgggcnnnnnnnnnnnnnnnnnnnnnnnnnnnnnnnnnnnnnnnnnnnnnnnnnnnnnnnnnnnnnnnnnnnnnnnnnnnnnnnnnnnnnnnnnnnnnnnnnnnnnnnnnnnnnnnnnnnnnnnnnnnnnnnnnnnnnnnnnnnnnnnnnnnnnnnnnnnnnnnnnnnnnnnnnnnnnnnnnnnnnnnnnnnnnnnnnnnnnnnnnnnnnnnnnnnnnnnnnnnnnnnnnnnnnnnnnnnnnnnnnnnnnnnnnnnnnnnnnnnnnnnnnnnnnnnnnnnnnnnnnnnnnnnnnnnnnnnnnnnnnnnnnnnnnnnnnnnnnnnnnnnnnnnnnnnnnnnnnnnnnnnnnnnnnnnnnnnnnnnnnnnnnnnnnnnnnnnnnnnnnnnnnnnnnnnnnnnnnnnnnnnnnnnnnnnnnnnnnnnnnnnnnnnnnnnnnnnnnnnnnnnnnnnnnnnnnnnnnnnnnnnnnnnnnnnnnnnnnnnnnnnnnnnnnnnnnnnnnnnnnnnnnnnnnnnnnnnnnnnnnnnnnnnnnnnnnnnnnnnnnnnnnnnnnnnnnnnnnnnnnnnnnnnnnnnnnnnnnnnnnnnnnnnnnnnnnnnnnnnnnnnnnnnnnnnnnnnnnnnnnnnnnnnnnnnnnnnnnnnnnnnnnnnnnnnnnnnnnnnnnnnnnnnnnnnnnnnnnnnnnnnnnnnnnnnnnnnnnnnnnnnnnnnnnnnnnnnnnnnnnnnnnnnnnnnnnnnnnnnnnnnnnnnnnnnnnnnnnnnnnnnnnnnnnnnnnnnnnnnnnnnnnnnnnnnnnnnnnnnnnnnnnnnnnnnnnnnnnnnnnnnnnnnnnnnnnnnnnnnnnnnnnnnnnnnnnnnnnnnnnnnnnnnatcttaagcaatattttgtattcagtaaacctaaattcttacacaaggtacaaaatcttgcataagctgaactaaaagaaaatgaaatgaaaaggagagattaaaggtattccttgttcttccttctcttcactagtttaaaaacttctttttaatcttaagattctttgtgatgagggtgaaaagagaatcctcagtttatttttccactattaatctttcttttgataaatcctctattgactgggtagaggtatgtttgtgaaagacatgtaacttggggatttgttacctttgttttgttcccctgaatttcatctcatcaggcaagttgtactagttgtagctatgagtttccctaagtgaagtagcaataggctgtaatcaagaaaatatgccatttacagggataagataaatgaaataatacatacttcggccaccaggtttttctgtctcacatacataagcagcacttcattgcagatacggaactgattctgtggcttagcttgattgacatcttttggaagtt

SEQ ID NO: 20710 - DNA, 148 bp, Macaca Mulatta
  misc_feature (1)...(148): n = A,T,C or G
tctgtagcatcaacatcttcgcaatgcatcacaacccctcagtctggccagaccctgaggtnaggtctatgaccccttccgcttcgacccagaaaacatccagaagaggtcacctatggcttttattcctttctcagcagggcccagg

SEQ ID NO: 20711 - DNA, 1129 bp, Macaca Mulatta
ttcccacccgcaacttgagccaggacagctggtcccagtggccacagtgatgggtttaagtaccttggtagggctggcaccagtggaaacacatactgaagctgaccccacagtagcttgtgaggttttgtccagctttggttagaccctacatgaccaaattggacctgcccttcttctttatggcaagaagggcatttttctgttcaatttccagggtttcctaagacccagttcctcttgtaagggaagaagaccaaggtctttgtgttttcttcctcatggaattgaacctgacattttctggatctcctgcacgtcaggagcatcagtgaggcttcagcctcctcgtctccactccagagaggaggtggccatgtcttcttaagcctctggccctcagaggctcctccctatctcctggctagttactactgggctaccaggtctctaggggcttcagagaggccctctggagaatccagggaaaccgtgagcccaggagttgcccatctatggtttcattcctcccctggctcttctccctcttcaggccataatttccctggtgccaacttcttttccttctggggtatcctcatccctgggctctctgctgcagattggctgtgccagcttcccacaggtcactggcaatgccagtgagtttctgcaggccctaagctgaagaagtgaggcagtgattctgcctccatcctggtttccccaaagccccagggcaccatccttaggggagaaggtctacagttatcattattttaattccattactttcagtctggaaaactaagctagtcagaactatcatcttgcttcccaatctaagaacctgtggccctggaacacttttcaagaagtggttcattttgctttacacagtagatctgtttcaacagttctgtgtaaaccaaatgctgtttttcaatgcatttggactgctgaccatttaaaagcagcctatgattgcttctttttgtaaagcaagcaacctcccttcactttagctgttttgactatttgaattttcacatattgggcttacccagagtggagcacacctccagggcatgtggctgacactgggtagatgtctgcatctgtgctgtgt

SEQ ID NO: 20712 - DNA, 1241 bp, Macaca Mulatta
  misc_feature (1)...(1241): n = A,T,C or G
aaatttttctcaagaaggcactgaaacatgtgttgagtgacctgtcaaccaagctttcttcaaacgcccttgtgttcagaatttgccacagttcagtgtatatatggcctagcagtgacgtaaacaccattcctggagaactgactgatgcttccgcttgtaagaacatactgcgctttattcannnnnnnnnnnnnnnnnnnnnnnnnnnnnnnnnnnnnnnnnnnnnnnnnnnnnnnnnnnnnnnnnnnnnnnnnnnnnnnnnnnnnnnnnnnnnnnnnnnnnnnnnnnnnnnnnnnnnnnnnnnnnnnnnnnnnnnnnnnnnnnnnnnnnnnnnnnnnnnnnnnnnnnnnnnnnnnnnnnnnnnnnnnnnnnnnnnnnnnnnnnnnnnnnnnnnnnnnnnnnnnnnnnnnnnnnnnnnnnnnnnnnnnnnnnnnnnnnnnnnnnnnnnnnnnnnnnnnnnnnnnnnnnnnnnnnnnnnnnnnnnnnnnnnnnnnnnnnnnnnnnnnnnnnnnnnnnnnnnnnnnnnnnnnnnnnnnnnnnnnnnnnnnnnnnnnnnnnnnnnnnnnnnnnnnnnnnnnnnnnnnnnnnnnnnnnnnnggagttacatgatctcttcaaactgcctcatgacagaccctatttcaaaaggtctaatgcttatcactttccagatgaaccatacaaagatggttacattagaaatccacatacttatcttaatccacctaacatggagactggtatgnnnnnnnnnnnnnnnnnnnnnnnnnnnnnnnnnnnnnnnnnnnnnnnnnnnnnnnnnnnnnnnnnnnnnnnnnnnnnnnnnnnnnnnnnnnnnnnnnnnnnnnnnnnnnnnnnnnnnnnnnnnnnnnnnnnnnnnnnnnnnnnnnnnnnnnnnnnnnnnnnnnnnnnnnnnnnnnnnnnnnnnnnnnnnnnnnnnnnnnnnnnnnnnnnnnnnnnnnnnnnnnnnnnnnnnnnnnnnnnnnnnnnnnnnnnnnnnnnnnnnnnnnnnnnnnnnnnnnnnnnnnnnnnnnnnnnnnnnnnnnnnnnnnnnnnnnnnnnnnnnnnnnnnnnnnnnnnnnnnnnnnnnnnnnnnnnnnnnnnnnnnnnngggggaggagttttggcccacacgatactaggaattgcatggaatgagattacagggcagataaagtttctgattcgagatacacattatactggtgctgaagacctacaagtgattttggaaaagg

SEQ ID NO: 20713 - DNA, 1229 bp, Macaca Mulatta
  misc_feature (1)...(1229): n = A,T,C or G
atggggcccctctcagcccctccctgcacactgcacatcacctggaaggagctcctgctcacannnnnngcatcacttttaatcttctggaacccgaccaccactgctcaagtcacgattgaagcccagccaaccaaagtttccgaggggaaggatgttcttctacttgtccacaatttgccccagaatcttactggctacatctggtacaaagggcaaataatggaccaccaccattacattacatcatatgtgatagacactgaaacaattatatttgggcctgcatacaatgaacgagaaacagtatattccaatgcatccctgctgatccagaatgtcaccaagaatgacacaggatcctacaccatacaaatcataaagcgaggtgataggactgaaggagtaactggacattacaccttataccgtgagtgattccacatgatccctgggtgttggngggttgggagtcacttctactttgcacacacaggattgtcaggcctagactgtgcctgtgtccctctctgtgttatgtcccatgttgaggtttggcatttagtgcaggccacacacagaggagacaaacttcagcagatcagaattcctttcctgcctccagaccctgcagacacttgctgcacaggaaggacagtctgatgggggaggtgctcagcaggaggagatcagtctcagccaagcacctcatgtcctcttcataaacttgaccctgagaaagaccctggagaactgagtagggctttgcttaagaggccccttgagatactctcagaaaagctcagccctagagacctcaaccccagaccgctgtccctaaatccttactccagataaagctgaggagcctgtgccagggctcagttgtggcagggcttactgggaccaaggattcaccagctgtctgaggactgtgtctcctggagctgctcaccagccagggctcagccctcagagcctcatctgggcaaggacagagctttcttcacctgacactcagagtggagaggacagaaagacaagctttgtaggngaggcttaggacactccatagaaactctaatgtccccagaagcagaaacagaagagagaaaatgtacctggcagcagcttgtccacagggatctgacctaaaggtgctctctcatggaagtgaaagtgaataataataaatgctgtttgtgtgaacacctccactgtgccaagca

SEQ ID NO: 20714 - DNA, 440 bp, Macaca Mulatta
  misc_feature (1)...(440): n = A,T,C or G
tggtgggggatttgaaataggaattgaggtannnnnnnnnnnnnnnnnnnnnnnnnnnnnnnnnnnnnnnnnnnnnnnnnnnnnnnnnnnnnnnnnnnnnnnnnnnnnnnnnnnnnnnnnnnnnnnnnnnnnnnnnnnnnnnnnnnnnnnnnnnnnnnnnnnnnnnnnnnnnnnnnnnnnnnnnnnnnnnnnnnnnnnnnnnnnnnnnnnnnnnnnnnnnnnnnnnnnnnnnnnnnnnnnnnnnnnnnnnnnnnnnnnnnnnnnnnnnnnttttattgtcaagatatccgagcttatgatattttatttggagatacaccgcggcctgctcaagctgaagatctttatgaaattcttgattcctttaccgaaaagtatgaaaatgaaggacaacgaatcaatgcaagaaaagcagcaagggagcagaggaagtcttctgn

SEQ ID NO: 20715 - DNA, 192 bp, Macaca Mulatta
tggagctcaggtcctggtgaggggctgggtcccgggtgcccctcatgccctccctgctgccaggctcccgctgcccccgcacctgcttctcagcgcaacagctgtgtgtgcccgtggtgaggttgtgctgcctgtggtgaggtcctgtcctggctcccagggtcctgggggctgccgcgctgccctccgccc

SEQ ID NO: 20716 - DNA, 2510 bp, Macaca Mulatta
  misc_feature (1)...(2510): n = A,T,C or G
atggagaagcggctgggagtcaagccaaatcctgcttcctggattttatcaggatgttattggcagacatctgcgaagtggttgagaagcctgtacctgttttatacttgcttttgcttcagtgttctgtggttgtcaacannnnnnnnnnnnnnnnnnnnnnnnnnnnnnnnnnnnnnnnnnnnnnnnnnnnnnnnnnnnnnnnnnnnnnnnnnnnnnnnnnnnnnnnnnnnnnnnnnnnnnnnnnnnnnnnnnnnnnnnnnnnnnnnnnnnnnnnnnnnnnnnnnnnnnnnnnnnnnnnnnnnnnnnnnnnnnnnnnnnnnnnnnnnnnnnnnnnnnnnnnnnnnnnnnnnnnnnnnnnnnnnnnnnnnnnnnnnnnnnnnnnnnnnnnnnnnnnnnnnnnnnnnnnnnnnnnnnnnnnnnnnnnnnnnnnnnnnnnnnnnnnnnnnnnnnnnnnnnnnnnnnnnnnnnnnnnnnnnnnnnnnnnnnnnnnnnnnnnnnnnnnnnnnnnnnnnnnnnnnnnnnnnnnnnnnnnnnnnnnnnnnnnnnnnnnnnnnnnnnnnnnnnnnnnnnnnnnnnnnnnnnnnnnnnnnnnnnnnnnnnnnnnnnnnnnnnnnnnnnnnnnnnnnnnnnnnnnnnnnnnnnnnnnnnnnnnnnnnnnnnnnnnnnnnnnnnnnnnnnnnnnnnnnnnnnnnnnnnnnnnnnnnnnnnnnnnnnnnnnnnnnnnnnnnnnnnnnnnnnnnnnnnnnnnnnnnnnnnnnnnnnnnnnnnnnnnnnnnnnnnnnnnnnnnnnnnnnnnnnnnnnnnnnnnnnnnnnnnnnnnnnnnnnnnnnnnnnnnnnnnnnnnnnnnnnnnnnnnnnnnnnnnnnnnnnnnnnnnnnnnnnnnnnnnnnnnnnnnnnnnnnnnnnnnnnnnnnnnnnnnnnnnnnnnnnnnnnnnnnnnnnnnnnnnnnnnnnnnnnnnnnnnnnnnnnnnnnnnnnnnnnnnnnnnnnnnnnnnnnnnnnnnnnnnnnnnnnnnnnnnnnnnnnnnnnnnnnnnnnnnnnnnnnnnnnnnnnnnnnnnnnnnnnnnnnnnnnnnnnnnnnnnnnnnnnnnnnnnnnnnnnnnnnnnnnnnnnnnnnnnnnnnnnnnnnnnnnnnnnnnnnnnnnnnnnnnnnnnnnnnnnnnnnnnnnnnnnnnnnnnnnnnnnnnnnnnnnnnnnnnnnnnnnnnnnnnnnnnnnnnnnnnnnnnnnnnnnnnnnnnnnnnnnnnnnnnnnnnnnnnnnnnnnnnnnnnnnnnnnnnnnnnnnnnnnnnnnnnnnnnnnnnnnnnnnnnnnnnnnnnnnnnnnnnnnnnnnnnnnnnnnnnnnnnnnnnnnnnnnnnnnnnnnnnnnnnnnnnnnnnnnnnnnnnnnnnnnnnnnnnnnnnnnnnnnnnnnnnnnnnnagcttgactgtagtagactctgatggagctaccaactctactactgcaaacctgacagtgaacaaagctgtggattacccccctgtggccaacgcaggccccaaccaagtgatcaccctgccccaaaactccatcaccctctttgggaaccagagcactgatgatcatggcatcaccagctatgagtggtcactcagcccaagcagcaaagggaaagtggtggagatgcagnnnnnnnnnnnnnnnnnnnnnnnnnnnnnnnnnnnnnnnnnnnnnnnnnnnnnnnnnnnnnnnnnnnnnnnnnnnnnnnnnnnnnnnnnnnnnnnnnnnnnnnnnnnnnnnnnnnnnnnnnnnnnnnnnnnnnnnnnnnnnnnnnnnnnnnnnnnnnnnnnnnnnnnnnnnnnnnnnnnnnnnnnnnnnnnnnnnnnnnnnnnnnnnnnnnnnnnnnnnnnnnnnnnnnnnnnnnnnnnnnnnnnnnnnnnnnnnnnnnnnnnnnnnnnnnnnnnnnnnnnnnnnnnnnnnnnnnnnnnnnnnnnnnnnnnnnnnnnnnnnnnnnnnnnnnnnnnnnnnnnnnnnnnnnnnnnnnnnnnnnnnnnnnnnnnnnnnnnnnnnnnnnnnnnnnnnnnnnnnnnnnnnnnnnnnnnnnnnnnnnnnnnnnnnnnnnnnnnnnnnnnnnnnnnnnnnnnnnnnnnnnnnnnnnnnnnnnnnnnnnnnnnnnnnnnnnnnnnnnnnnnnnnnnnnnnnnnnnnnnnnnnnnnnnnnnnnnnnnnnnnnnnnnnnnnnnnnnnnnnnnnnnnnnnnnnnnnnnnnnnnnnnnnnnnnnnnnnnnnnnnnnnnnnnnnnnnnnnnnnnnnnnnnnnnnnnnnnnnnnnnnnnnnnnnnnnnnnnnnnnnnnnnnnnnnnnnnnnnnnnnnnnnnnnnnnnnnatcccaggaaaaacaacctggtggagatcatcttggatatcaacgtcagtcagctaactgagaggctgaaggggatgttcatccgccagattggggtcctcctgggggtgctggattccgacatcattgtgcaaaagattcagccgtacacggagcagag

SEQ ID NO: 20717 - DNA, 516 bp, Macaca Mulatta
  misc_feature (1)...(516): n = A,T,C or G
ggaagtcgggtcccttcgatgccagcttggggaccgtcttaacatcgaggtggatgctgcacccccggtggacctgactagggtgctggaggagatgcggtgtcagtatgagaccatggtggaggccaaccgcagggatgtcgaggaatggttcaatatgcagntgcagatggaggagcttaaccagcaggtggctacaagctctgagcagcttcagaactaccagtcagacatcattgacctgagacgcacggtcaacacgctggannnnnnnnnnnnnnnnnnnnnnnnnnngagggactcgctggaaaacacactgacagagagcgaggcccgctacagctcccagctagctcagatgcagtacatgatcaccaacgtggaggcccagctggctgagatccgggctgacctggagcggcagaaccaggagtaccaggtgctgctggacgtccgggcccggctggagagcgagatcaacacataccggagcctgctggagagcgaggacagcaa

SEQ ID NO: 20718 - DNA, 808 bp, Macaca Mulatta
  misc_feature (1)...(808): n = A,T,C or G
gggccatgcgaaggttcctactatggcttccagcggggtcccggtgagcgctgctggctcggctaatgaaactcccgaaataccggacaacgtgggagattggcttcggggacgtctaccgctttgccacagataggaatgacttccggaggaacttgatactaaatttgggactctttgctgcgggagtttggctggccaggaacttgagtgacattgacctcatggcacctcagccaggggctgtagccaagtagacaaatggaatcctgtgctgaacccgaatcttccaaaaaacagcctacaatctgtgaccaccacaagatgtgccctgatggcagctgaagtttgattcagatgggcacttttcttccctctccctgcctagtttccttttgttccttgagtccacgcagaattccattctctggtcagcagacaggcttaagctaaagtatggcctctgttctataaagttctgtacatagttcccaagcttctgcagggggtgatctttgctcttgtcctgagaaataacagtgctgtttttaacaaccttttgaaataaataccgccccccaaaatcttcaataactaaaccacctacctgatcaatatcacttagataaattgtaaaaaagaaagaggaacactgattaacaatcccttgtcacattcaaaggttagctcgtcccccccctttttacgataaaacataaatacccgaattatcatatgttgaaatatttngtgtttcgggcgcccccaccttctgtggctccccccccgagagagaaaaattattttc

SEQ ID NO: 20719 - DNA, 451 bp, Macaca Mulatta
ggggggcccagggccgggtcaggcaagtgacagcttctcttctccctgtgacaggaagcgggacccacggcagccgagacctcccggtcaacagaatcatcgacgtggatcttgtaactggcctggcgcccgggcaggatggtggcatcgcgggggcaccggctggtcctgggagggcgcaggccggtggtgggtctcctacgtcagacctccctggcctgagccccgtcccaggtgagcccgtgaagcccaaggccagcgcgcaccacgccaccttcgtctgagctgccctggcctggccaactctcccgtggacatgtcggggtggggcagcccccgtggagtctgtgagcctcagaggggccaccgcagccgccaacaccctcaggagccaggagggcagggggtgacctcgctggaggcactggccccggacattcactatgctggc

SEQ ID NO: 20720 - DNA, 132 bp, Macaca Mulatta
gcttcatttcctctgagctgttctcttgtgtatggatatatgtaaatgttatgactccttgataaaaaatttattatgtccattattcaagaaagatatctatgactgtgtttaatagtgtatctaatggct

SEQ ID NO: 20721 - DNA, 648 bp, Macaca Mulatta
  misc_feature (1)...(648): n = A,T,C or G
cccgccatcagctccgccatcgaccgcggcgacaccnnnnnnnnnnnnnnnnnnnnnnnnnnnnnnnnnnnnnnnnnnnnnnnnnnnnnnnnnnnnnnnnnnnnnnnnnnnnnnnnnnnnnnnnnnnnnnnnnnnnnnnnnnnnnnnnnnnnnnnnnnnnnnnnnnnnnnnnnnnnnnnnnnnnnnnnnnnnnnnnnnnnnnnnnnnnnnnnnnnnnnnnnnnnnnnnnnnnnnnnnnnctacaggcggttctctgtgcagcgctgcgcccgctgccacctgggcatctcggcctcggagatggtgatgcgcgctcgggacttggtttatcacctcaactgcttcacgtgcaccacgtgtaacaagatgctgaccacgggcgatcacttcggcatgaaggacagcctggtctactgccgcttgcacttcgaggcgctgctgcagggcgagtaccccgcacacttcaaccacgctgacgtggcagcggcggccgctgcagccgcggcagccaagagcgcggggctaggcgcagcaggggccaaccctctgggtcttccctactacaatggtgtgggcactgtgcagaaggggcggccgaggaagcgcaagagcccgggccctggtgcagatcagacggcctacaacgct

SEQ ID NO: 20722 - DNA, 3011 bp, Macaca Mulatta
  misc_feature (1)...(3011): n = A,T,C or G
agggaaacacctttgtccaagccccctatttcctggaccttctaagcccttttgggcactggtggtggttggtggagtcctggcttgctatagcttgctagtaacagtggccttttgtattttctgggtntgaggagtaagaggagcaggctcctgcacagcgactacatgaacatgactcctcgccgccccgggcccacccgcaagcattaccagccctatgccccaccacgcgacttcgcagcctatcgctcctgacacggacgcctatccagaagccagccggctggcagcccccatctgctcaatatcactgctctggataggaaatgaccgcctcatctccagccggccacctcaggcccccgttgggccaccaatgccaatttttctcgagcgactagaccaaatatcaagatcattttgagactctgaaatgaagtaaaagacatttcttgtggcaggccaagtcttacagtgccatgacccacattccaacttaccacgtatttattgacttgactgagaagttagggtagaaaacaaaaagggagtggattctgggagcctctttcctttctcactcatcagaacatctcagtcaagcaaagtgtggtatccacagacattttagttgcagaagaaaggctaggaaatcattccttttggttaaatgggtgtttaatcttttggttagtgaattaaatggggtaagttagagtagggggagggataggaagacatatttaaaaaccattaaaacactgtctcccactcatgaaatgagccacttagttcctatttaatgctgttttcctcttagtttagaaatatatagacattgtcttttatgaattctgatcatatttagtcattttgaccaaatgagggatttggtcaaatgagagattccctcaaagcagtatcaggtaaaccaacttactttcctcattccctgccatgagacttcagtgttaatgttcacaatatactttcaaaagaataaaatagttctcctacaccaagaaagaatatgtcaggaaataaggtcactttatgtcgaaattatttgagtgctatgggacctggcgcagtggctcatgtttgtaatcccagcattttgggaggccgaggtgggcagatcacttgaggtcaggaccagcgtggtcaagatggtgaaaccccatctgtactaaaagtacaaaattcagctgggcctggtggcaggcacctataatcccagctacccaggaggctgaggcatgagaatcacttgaacttgggaggtgaaggttgcagtgagccaagattgtgccacagctctccagcctgggtgacagagtgagactcnnnnnnnnnnnnnnnnnnnnnnnnnnnnnnnnnnnnnnnnnnnnnnnnnnnnnnnnnnnnnnnnnnnnnnnnnnnnnnnnnnnnnnnnnnnnnnnnnnnnnnnnnnnnnnnnnnnnnnnttcatatgtttcagggtgcacagtttggtctctttattgtcgtgtgggagatccaaagtaggatgtggaaagagtgtccataggagaagtgagaatactgtgaaaaagggatgttagcattcattaaagtatgaggatgagtcccaagaagcttcttcggaaggannnnnnnnnnnnnnnnnnnatgaaattcttgccatgtgctgaggaggtggccagcattaggtgacaatcttccagagggtgtcaggcagaaggagccatggtgagagctcctttacagggactttatgtggtttagggctcagaattccaaaactctgggctcagctgctcctgtannnnnnnnnnnnnnnnacatgggaaagtattttggaatgtgtcttttaagagaacatcaaagttcttaagggactgggtaaggcctgactctgaagtgactatggatatttttctgcctacagtttgagtcaactaaaatatgcctggggaccttgaagaatggcccttcagcagccctcaccatttgttcatgcttcagttaattcaggtgttgaaggagcttaggttttagaggcacatagacttggttcaagtcttgttagtagttgaatagcctcaggcaagccactgtccacctaagatgatggttcttcaactataaaatggagataatggtcactatattcctatagtataatctccatgagggcatgtcccaagtctgtctttgtctctgcctacccctgacatttagtagtatgcctgacatatttagctattggtattattgccatttagataaattatgtataaaaattaaactgggcaatagcctaagaaggggggaatattgtaacacaaatttaaacccactacgcagggatgaggtgctataatatgaggaccttttaacttccatcattttactgtttcttgaaatagtttatcttgtaatggaatatagggcacctcccacttttatgtatagaaagaggtattttaannnnnnnnnnnnnnnnnnaggaggggaggagtaggaatcttgagattccagatagaaaatactgtactttggttgattttaaaatgggcttccattccatgaatttaatcagtcccaagaagatcaaactcagcagtatttgggtgctgaagaactgttggatttgccctgcacctatgccacttgccagcttcttgggcacacagttatcccacttatcagattgtatttgaaaatgacagagctggagagttttttgaaatggcagtggcaaataaataaatacttttttttaaatggaaagacttgatctatggtaataaatgattttgttttctgactggaaaagtaggcctactaaagatgaatcacacttgagatgtttcttactcactctgcacagaaacaaagaagaaatgttatatagggaagtccgttttcactattagtatgaaccaagaaatggttcaaaaacagtggttggagcaatgcttttatagtttcagatatggtagttatgaagaaaacaatgtcat

SEQ ID NO: 20723 - DNA, 635 bp, Macaca Mulatta
gggaagatctggaagctggctgacgtggacaaggacgggctgctggacgacgaggagttcgcgctggccaaccacctcatcaaggtcaagctggagggccacgagctgcccgctgacctgcccccacacctggtgccgccctccaagcgcaggcatgagtgatggcacctggccccgcacctgccatctgcatgcccggctgggaggcagagacggggggaggggaaggctcaccatttctctattgtccataaagactgagcggatgtttcctcgcctctcgaaaaggaaaaccaccatctttattttaaggctgttcctgggcctggcgggggaggcaggggtgagatgatggaattttgtgcacaagaactatggatattttaatatataacgttagaggcagcgttctttgtcgccgcctcctctgtgtgacagccacatgtgcacagcctctgccccccaccggcctttgctctgctctggctgcagctggacagtgcagcgactgtgaccgcaggggagccaggtcgcccttttggcagctgctaggctgggactgcatggacaggaacaccgggcaccctccgtttgcttctgagctgaggttgcttcacggggccgtggcttccttc

SEQ ID NO: 20724 - DNA, 890 bp, Macaca Mulatta
cgccggccctgctcccgcgacggctcggggctccccacgcccggggccttcgccttccacaccgagttcattcgcgtgcctgtcggctgtacctgcgtgctgccccggtcagtgtgaccgccgaggctgtggagcccctagactggacacatgggctccccagagggcaccccctatttatgtgtatttattgttatttatatgcctaccccaacactacccttggggtccaggcatcccccgtatctggaggacggccccccactgttctccccatctccagcctcagcagttgggggtagaaggagctcagcccctcttccagcccttaaagccacagaaaagttgtcacacggccacctgtaccttggcttccagccccactcccggcttccctcgccctatcactgacctcaggccccccaggctccctcttcccaacctccttggaagtacccctgtttcttaaacaactattttagtgtacgtttgttattaaactgatgaacacatccccagaggccaacattcaatgtgacattctcctgctcagccctggcccaggccagccacggacccagttctggggcatcctttcagaaaggtctatgcagcagcgagcagtgcatgcaggtgggactgagctctagcacgggggagcacaggtgtccctgctctgcccacagtgtctccccggaggatacccctgggaacaggaatgagcctccttccccaggcagagccttgagccctatgctttgtaatgatgtgagcgcctaggggcaccatctcggcccccaggcaagagtctctgaggatgaactgcagggctgtcggctcaaggcagggccccaagcctctgtgggtcggatcaacagccaagaccaagg

SEQ ID NO: 20725 - DNA, 1566 bp, Macaca Mulatta
  misc_feature (1)...(1566): n = A,T,C or G
cgtgagtgcatctccatccatgttggccaggctggtgtccagattggcaatgcctgctgggagctctactgcctggaacacggcatccagcccgatggtcagatgccaagtgacaagaccattgggggaggagatgattccttcaacaccttcttcagtgagacgggcgctggcaagcatgtgccccgggccgtgtttgtagacttggaacccacggtcattgnnnnnnnnnnnnnnnnnnnnnnnnnnnnnnnnnnnnnnnnnnnnnnnnnnnnnnnnnnnnnnnnnnnnnnnnnnnnnnnnnnnnnnnnnnnnnnnnnnnnnnnnnnnnnnnnnnnnnnnnnnnnnnnnnnnnnnnnnnnnnnnnnnnnnnnnnnnnnnnnnnnnnnnnnnnnnnnnnnnnnnnnnnnnnnnnnnnnnnnnnnnnnnnnnnnnnnnnnnnnnnnnnnnnnnnnnnnnnnnnnnnnnnnnnnnnnnnnnnnnnnnnnnnnnnnnnnnnnnnnnnnnnnnnnnnnnnnnnnnnnnnnnnnnnnnnnnnnnnnnnnnnnnnnnnnnnnnnnnnnnnnnnnnnnnnnnnnnnnnnnnnnnnnnnnnnnnnnnnnnnnnnnnnnnnnnnnnnnnnnnnnnnnnnnnnnnnnnnnnnnnnnnnnnnnnnnnnnnnnnnnnnnnnnnnnnnnnnnnnnnnnnnnnnnnnnnnnnnnnnnnnnnnnnnnnnnnnnnnnnnnnnnnnnnnnnnnnnnnnnnnnnnnnnnnnnnnnnnnnnnnnnnnnnnnnnnnnnnnnnnnnnnnnnnnnnnnnnnnnnnnnnnnnnnnnnnnnnnnnnnnnnnnnnnnnnnnnnnnnnnnngaacagctttctgtagcagagatcaccaatgcttgcttgagccagccaaccagatggtgaaatgtgaccctcgccatggtaaatacatggcttgctgcctgttgtaccgtggtgatgtggttcccaaagatgtcaatgctgccattgccaccatcaagaccaagcgtaccatccagtttgtggattggtgccccactggcttcaaggttggcatcaactaccagcctcccactgtggtgcctggtggagacctggccaaggttcagagagctgtgtgcatgctgagcaacaccacagccattgctgaggcctgggctcgcctggaccacaagtttgacctgatgtatgccaagcgtgcctttgttcactggtatgtgggtgaggggatggaggaaggcgagttttcagaggcccgtgaagacatggctgcccttgagaaggattatgaggaggttggtgtggattctgttgaaggagagggtgaggaagaaggagaggaatactaaagttaaaatatcacaaaggtgctgcttttacagggaagcttattctgttttaaacgttgaaaagttgtggtctgctcagttaatttgtatgtagcagtgtatgctcttatatacaattactgacctatgctctaaaacatgaatgctttgttacagacccaagctgtccatttctgtgatgggttttgaataaagtattccctgtcttaaatga

SEQ ID NO: 20726 - DNA, 591 bp, Macaca Mulatta
  misc_feature (1)...(591): n = A,T,C or G
taggccgcaacaggatgtcggacaccgaggagcagnnnnnnnnnnnnnnnnnnnnnnnnnnnnnnnnnnnnnnnnnnnnnnnnnnnnnnnnnnnnnnnnnnnnnnnnnnnnnnnnnnnnnnnnnnnnnnnnnnnnnnnnnnnnnnnnnnnnnnnnnnnnnnnnnnnnnnnnnnnnnnnnnnnnnnnnnnnnnnnnnnnnnnnnnnnnnnnnnnnnnnnnnnnnnnnnnnnnnnnnnnnnnnnnnnnnnnnnnnnnnnnnnnnnnnnnnnnnnnnnnnnnnnnnnnnnnnnnnnnnnnnnnnnnnnnnnnnnnnnnnnnnnnnnnnnnnnnnnnnnnnnnnnnnnnnnnnnnnnnnnnnnnnnnnnnnnnnnnnnnnnnnnnnnnnnnnnnnnnnnnnnnnnnnnnnnnnnnnnnnnnnnnnnnnnnnnnnnnnnnnnnnnnnnnnnnnnnnnnnnnnnnnnnnnnnnnnnnnnnnnnnnaggcagaacagaagcgtggtaagcggcagacagggcgggagatgaagctgcgcatcctgtctgagcgcaagaagcctctggacattgactacatgggggaggaacagctccg

SEQ ID NO: 20727 - DNA, 1293 bp, Macaca Mulatta
  misc_feature (1)...(1293): n = A,T,C or G
gcaacaagaatgggtgaatcagcaaagggaagatattgaaaggcaaaggaaacttctagccaaacgcaaacctcccacagctaataattctcaggcaccctctaccaattctgaaccaaaacaaaggaaaaacaaagcagtcaatggagcagagaatgatccctttgttagaccaaatttaccacaactgnttgactttggcagaatatcatgaacaggaagaaattttcaaacttagactaggacatctcaaaaagnnnnnnnnnnnnnnnnnnnnnnnnnnnnnnnnnnnnnnnnnnnnnnnnnnnnnnnnnnnnnnnnnnnnnnnnnnnnnnnnnnnnnnnnnnnnnnnnnnnnnnnnnnnnnnnnnnnnnnnnnnnnnnnnnnnnnnnnnnnnnnnnnnnnnnnnnnnnnnnnnnnnnnnnnnnnnnnnnnnnnnnnnnnnnnnnnnnnnnnnnnnnnnnnnnnnnnnnnnnnnnnnnnnnnnnnnnnnnnnnnnnnnnnnnnnnnnnnaggaagaggcagaaatccaggcagaacttgaacgtttggaaagagtcagaaatcttcacatacgtgagctgaaaagaataaacaatgaagataattcannnnnnnnnnnnnnnnnnnnnnnnnnnnnnnnnnnnnnnnnnnnnnnnnnnnnnnnnnnnnnnnnnnnnnnnnnnnnnnnnnnnnnnnnnnnnnnnnnnnnnnnnnnnnnnnnnnnnnnnnnnnnnnnnnnnnnnnnnnnnnnnnnnnnnnnnnnnnnnnnnnnnnnnnnnnnnnnnnnnnnnnnnnnnnnnnnnnnnnnnnnnnnnnnnnnnnnnnnnnnnnnnnnnnnnnnnnnnnnnnnnnnnnnnnnnnnnnnnnnnnnnnngttttgtacagtgttagaatactgtgaaggcaatgacttggatttctatctgaagcaacacaagttaatgtcagagaaagaagctaggtctattgtaatgcagattgtaaatgcactaagatatctcaatgagatcaaaccccctattatacattatgatcttaagccagnnnnnnnnnnnnnnnnnnnnnnnnnnnnnnnnnnnnnnnnnnnnnnnnnnnnnnnnnnnnnnnnnnnnnnnnnnnnnnnnnnnnnnnnnnnnnnnnnnnnnnnnnnnnnnnnnnnnnnnnnnnnnnnnnnnnnngtatttacctcctgagtgttttgtagttggaaaagagccaccaaagatttccaacaaggttgatgtatggtcagttggagtcatcttctttcagtgtctttatggtagaaag

SEQ ID NO: 20728 - DNA, 777 bp, Macaca Mulatta
  misc_feature (1)...(777): n = A,T,C or G
gtaacagtgtttattgatgatgagtccagggctcctgctgaagccctggtggggaggggcacagggcgagatggggcgtaatggaatgcttgaaggttgccccgtgatgttggagcttccagactaggcgagggcagagtgaggcctcgggcacacagccggcgcccagtcacccagcccagatgaagggcggccgggtcctgggcgggcacttgccaaggtggctcacactcacacacactcgcaccgagactcaaggccgtctccacaactccaaccagtgcaaatgacttagtgcaaattaaattcactccgccccgcccgcctcgcctagtctggtctcgccccatgcccttgactcccctggatgctgtactgcctgccaagccagccccaggggctgagcggtgagggcatacagtgtcaccaagtccactgtgggccctctccgcaccagaccctgggccgcagtgcctcgtgggaacggcgcccgcaggccgagcccctgcagcctccttgctgcgtaatgtcccggggcccttcccgtggccgcttcgccctcctggtgacgtcctgctgctactccccgagcactgcctgtcttcccgctctccagccctcgaggctccggcataggcctgagaaagccctgccagagctgcccctgtgcctgctactaaatgaattgcggtgggtgaggtggcagctggggacccctctgttttgtgtcgcctgccttgtgcctgtctgacncggcccatcagctcccctcgtcca

SEQ ID NO: 20729 - DNA, 1006 bp, Macaca Mulatta
  misc_feature (1)...(1006): n = A,T,C or G
ataggtggctgcagacgcgaggtgagggcgcctgcgaaacgaactctgcacccccaggaacggggaacgctggttttccgtgggaaaattccacgtggaggtggtctcttgctgtcgggaatgtgtctccgggacgcccgagtgtgagaatcggctcggaactgcggggttcggggctggctgtttgcttggaactcagaggcgctgacccggcctggggcccctttgctgcccacgggaggaaccgctgtcaggnnnnnnnnnnnnnnnnnnnnnnnnnnnnnnnnnnnnnnnnnnnnnnnnnnnnnnnnnnnnnnnnnnnnnnnnnnnnnnnnnnnnnnnnnnnnnnnnnnnnnnnnnnnnnnnnnnnnnnnnnnnnnnnnnnnnnnnnnnnnnnnnnnnnnnnnnnnnnnnnnnnnnnnnnnnnnnnnnnnnnnnnnnnnnnnnnnnnnnnnnnnnnnnnnnnnnnnnnnnnnnnnnnnnnnnnnnnnnnnnnnnnnnnnnnnnnnnnnnnnnnnnnnnnnnnnnnnnnnnnnnnnnnnnnnnnnnnnnnnnnnnnnnnnnnnnnnnnnnnnnnnnnnnnnnnnnnnnnnnnnnnnnnnnnnnnnnnnnnnnnnnnnnnnnnnnnnnnnnnnnnnnnnnnnnnnnnnnnnnnnnnnnnnnnnnnnnnnnnnnnnnnnnnnnnnnnnnnnnnnnnnnnnnnnnnnnnnnnnnnnnnnnnnnnnnnnnnnnnnnnnnnnnnnnnnnnnnnnnnnnnnnnnnnnnnnnnnnnnnnnnnnnnnnnnnnnnnnnnnnnnnnnnnnnnnnnnnnnnnnnnnnnnnnnnnnnnnnnnnnnnnnnnnnnnnnnnnnnnnnnnnnnnnnnnnnnnnnnnnnnnnnnnnnnnnnnnnnnnnnnnnnnnnnnnnnnnnnnnnnnnngtgagtctggagtcccggtcctcagtggccaagtttccagtgaccatccgccatcctgtcatacccaagctatacgaccctggaccag

SEQ ID NO: 20730 - DNA, 426 bp, Macaca Mulatta
atgggcgtgctcctgggggcatcattgctgattctgtggcttcagccagactgggtaaatagtcaacagaagaatgatgaccagcgagttaagcaaaatccaccatccctgagtgtccaggaaggaggaatttctattctgaactgtgactatactaacagcatgtttgattatttcgtatggtacaaaaaataccctgctgaaggtcctacattcctgatatctatacgttccgttaaggataaaaatgaagagggaagattcacagtcttcttaaacaaaagtgccaagcacctctctctgcacattgggccctcccagcctggagactctgcagtgtacctctgtgcagcaagcgccgggaactatggtcagaattttatcttcggtcccggaaccagattgtccgtgctgccttatatccag

SEQ ID NO: 20731 - DNA, 443 bp, Macaca Mulatta
gctgatgggcgaggaggccctggcttggggcgacaagtcagacccgaaccttaataaccccgcggtcgaggaccatgcctatgctctgcggatgctccccaagaccggctgcgtgatccagcctgtgccaaaacccttggagaaggctgctatggcgccgtgcatcatttcctcgcccatgctcagcgccgggcccgaggacctggagccgccgctcaaaaggaggtgcctccgaattagaaatcagaataagtaaaaggtttgtatgtccgccgggcgctcctccgcaccagccagtgcacctctccttacttctgacaaggcagaggcgagagttgtaataatagtcatgattttaccgtgtgtgttttatattgcacccggtgtggtcacgctatcaacattctgagccagcaactctgatgctgagttgttcagtagca

SEQ ID NO: 20732 - DNA, 441 bp, Macaca Mulatta
gatccactccttataccgccgcacaggtgccagctttcagaaggcccagcaagaatttgctgctggtgtcttctccaaccctgcggtgcgaaccgcagctgccaatgcagctgctggggctgctgaaaatgccttccgggccccgtgacccctgactgggatgccctcgccctgccacttgagggagctgacttagctcccgtccctaaggtctctgggacttggagagacatcagtacctgatggctcctccgtagtgctcccaatccaatggccatgactgctgaacctgacaggcgtgtggagagtccactgtgacctagtccccccatcaggccacactgctgccacctctcacacgccccaacccagcttccctttgctgtgccacagctgttgcttcggttatttaaataaaaagaaagtggaactggaactgac

SEQ ID NO: 20733 - DNA, 512 bp, Macaca Mulatta
gaaatccaaagagcaaaaggcgctgcggcttaacatcaacgcccgagagcgccggcggatgcacgacctgaacgacgcgctggacgagctgcgcgcggtgatcccctacgcgcacagcccctcagtgcgaaagctctccaagatcgccacactgctgctcgccaagaactacatcctcatgcaggcgcaggccctggaggagatgcggcgcctagtcgcctacctcaaccagggccaagccatctcggctgcctccctgcccagctcggctgctgcagcggcagcagctactgccctgcacccggcgcttggcgcctacgagcaggcggccggctacccgttcagcgccgggctgcccccggctgcctcctgcccggagaagtgcgccctgttcaacagcgtctcctccagcctctgcaaacagtgcacggagaagccttaaacacacccccgaaaaacacaagaccgacccaaaatctagaggaaagcgaaaagctgctccccaccccctt

SEQ ID NO: 20734 - DNA, 686 bp, Macaca Mulatta
ggaaggtgtcctttggtaaccctattattgtgtattacctttaaacatttcacatcgtgtaagtgtttaatcatatcttttaattgtgtatttaattaagaaaagtgttttcacaacaaaagcttttgacaaattgctgcgtgacatatactatattaaaaaatgaatatgctatagctgatcattaggggtttgggagcagagaaaattgtgaaagtggaactctctcactaaagatgttagtagtttcctatgtcctttaaaaatgtttgagtattctgcatagcagtttaaaaaagtgtaaccgcttcttgacttaataaagcttttcctgcatgcaatcagctgtaagaatttgtctttctagaaaacaaaacattgcccattgtattaaaatttaaaccatatctgttaaaggtttccaataagaacttcacacatgggtgtccctgccatgttgaaattatccaatatgggagggaggtgttttagggaggtctctgcaatgcagagctgttttgtgtctttcctggactgacatccagaagaactccaggcatctttgaggaagatggtcacagtgttgctatctcaagaggaagcaggtgaaaagcaagcctatgccttccgtctcttcctatattctgaaatactggatataggcaatagggagcagaatgaaagat

SEQ ID NO: 20735 - DNA, 381 bp, Macaca Mulatta
cctgaggaaattaagcagccgcagcacttccagaaggaggacgctgcattgaccatctatgagatgctccacaatatcttcgctattttcagacaagatttatctagcactggctggaatgagactattgtggagaacttccttgctaatgtctatcatcagatagaccatctgaagacaatcctagaagaaaaactggagaaagaagatttcaccaggggaaaattcatgagcagtttgcacctgaaaagatactatggaaggattctgcattacctgaaggccaaggagtacagtcactgtgcctggaccatagtcagagtggaaatcctcaggaactttttcttcattaacaaacttacaggttacctccgaaactga

SEQ ID NO: 20736 - DNA, 1704 bp, Macaca Mulatta
  misc_feature (1)...(1704): n = A,T,C or G
gatgtgccgcctcggatgctgtcgcctcggaaccagctcattcgagtgattctttacaaccggacgcggctggactgccccttctttgggtctcccatccccactctgcgatggtnggtttaagaatgggcaaggaagcaacctggatggtggcaactaccatgtttatgagaatggcagtctggaaattaagatgatccgcaaagaggaccaaggcatctacacctgtgtcgccaccaacatcctgggcaaagctgaaaaccaagtccgcctggaggtcaaagnnnnnnnnnnnnnnnnnnnnnnnnnnnnnnnnnnnnnnnnnnnnnnnnnnnnnnnnnnnnnnnnnnnnnnnnnnnnnnnnnnnnnnnnnnnnnnnnnnnnnnnnnnnnnnnnnnnnnnnnnnnnnnnnnnnnnnnnnnnnnnnnnnnnnnnnnnnnnnnnnnnnnnnnnnnnnnnnnnnnnnnnnnnnnnnnnnnnnnnnnnnnnnnnnnnnnnnnnnnnnnnnnaggatgaagaaggaagatgactccctgaccatctttggtgtggcagagcgggtccagggcagttacacgtgtgttgccagcaccgagctagaccaagtcctggccaaggcctacctcactgtgctagnnnnnnnnnnnnnnnnnnnnnnnnnnnnnnnnnnnnnnnnnnnnnnnnnnnnnnnnnnnnnnnnnnnnnnnnnnnnnnnnnnnnnnnnnnnnnnnnnnnnnnnnnnnnnnnnnnnnnnnnnnnnnnnnnnnnnnnnnnnnnnnnnnnnnnnnnnnnnnnnnnnnnnnnnnnnnnnnnnnnnnnnnnnnnnnnnnnnnnnnnnnnnnnnnnnnnnnnnnnnnnnnnnnnnnnnnnnnnnnnnnnnnnnnnnnnnnnnnnnnnnnnnnnnnnnnnnnnnnnnnnnnnnnnnnnnnnnnnnnnnnnnnnnnnnnnnnnnnnnnnnnnnnnnnnnnnnnnnnnnnnnnnnnnnnnnnnnnnnnnnnnnnnnnnnnnnnnnnnnnnnnnnnnnnnnnnnnnnnnnnnnnnnnnnnnnnnnnnnnnnnnnnnnnnnnnnnnnnnnnnnnnnnnnnnnnnnnnnnnnnnnnnnnnnnnnnnnnnnnnnnnnnnnnnnnnnnnnnnnnnnnnnnnnnnnnnnnnnnnnnnnnnnnnnnnnnnnnnnnnnnnnnnnnnnnnnnnnnnnnnnnnnnnnnnnnnnnnnnnnnnnnnnnnnnnnnnnnnnnnnnnnnnnnnnnnnnnnnnnnnnnnnnnnnnnnnnnnnnntacccagtgcccccaggcgtttccgagtccggcagcctaacctggagacaatcaacctggaatgggatcatccagagcatccaaatgggatcatgactggatacactctcaaatacgtggcctnnnnnnnnnnnnnnnnnnnnnnnnnnnnnnnnnnnnnnnnnnnnnnnnnnnnnnnnnnnnnnnnnnnnnnnnnnnnnnnnnnnnnnnnnnnnnnnnnnnnnnnnnnnnnnnnnnnnnnnnnnnnnnnnnnnnnnnnnnnnnnnnnnnnnnnnnnnnnnnnnnnnnnnnnnnnagcttacaccaacaaccaagcggacatcgccacccagggctggttcattgggcttatgtgcgccatcgccctcctggtgctgatcctgctcatcgtctgtttcatcaagaggagtcgcggcggcaagtacccag

SEQ ID NO: 20737 - DNA, 775 bp, Macaca Mulatta
gggatcttcagtcagaggagattgttgctgagttggtttatagttttctgatcccagaggtgcaaaaatactttgtcaaagaaaaagtgaggaacgcacagcggaaacatattcttgcagcccatcagatcatccacagttgcacagaaagcatggttcaaaagagattaactgagggacagcaagatgaggcctcaaatgctgccatgttacttgagaaagaaattcaaaatgagaacaacagctaagattgtgattaaaaaaataaaaagaagcagtgcgaatcatcataaagaattccaatggtctgcacttctcccaaagtgtgcactgctcataaacttgccaatgtgtgtttcgtgagaaaggagatttgttttccttaaacacccaataatttataatggttttcagtaataataatcaaatgaaaaatcttcattctcttcagtgtcttctagacgccctacttaaaaagaacattttcttatgtctcatttcaatattttgttaactatgaggatgtgctggtttgttgaatcaaacaaaaggaaatgttgtggaatatttttccaagtagttttggttcactattcgcaggacattggcattatctactaaggctgaaaatgtgcatattccatgactcaggattttatctcccagatatatattcaacagaaatgcatgagtatgcggcaccaacaggcatgacaaaaatattttatagtagttgggattcaccaatattccccaaactgggaaaccccagttg

SEQ ID NO: 20738 - DNA, 118 bp, Macaca Mulatta
ctcctcccacctccattgaagtggtggccgctgacacaccagcccccttcagccgctaccaagcccagaacttcacgctagtctgcatcgtgtctggaggaaaaccagcacccatggt

SEQ ID NO: 20739 - DNA, 1237 bp, Macaca Mulatta
  misc_feature (1)...(1237): n = A,T,C or G
gttgcggcgggaagccgggcgccgcggctctgcttccctcggggnnnnnnnnnntggccagaaaggctctcaagcttgcttcatggaccagcatggctcttgctgcttctggcatctacctctacagtaacaagtacttggaccctaatgactttggcgctgtcagggtgggcagagcagttgctacgnnnnnnnnnnnnnnnnnnnnnnnnnnnnnnnnnnnnnnnnnnnnnnnnnnnnnnnnnnnnnnnnnnnnnnnnnnnnnnnnnnnnnnnnnnnnnnnnnnnnnnnnnnnnnnnnnnnnnnnnnnnnnnnnnnnnnnnnnnnnnnnnnnnnnnnnnnnnnnnnnnnnnnnnnnnnnnnnnnnnnnnnnnnnnnnnnnnnnnnnnnnnnnnnnnnnnnnnnnnnnnnnnnnnnnnnnnnnnnnnnnnnnnnnnnnnnnnnnnnnnnnnnnnnnnnnnnnnnnnnnnnnnnnnnnnnnnnnnnnnnnnnnnnnnnnnnnnnnnnnnnnnnnnnnnnnnnnnnnnnnnnnnnnnnnnnnnnnnnnnnnnnnnnnnnnnnnnnnnnnnnnnnnnnnnnnnnnnnnnnggtgccccgaatccactgggacctgtccacggagcgggtcctcctgatggagtttgtggacggcgggcaggtcaatgacagagactacatggagaagaacaagatcgacgtcaatgagnnnnnnnnnnnnnnnnnnnnnnnnnnnnnnnnnnnnnnnnnnnnnnnnnnnnnnnnnnnnnnnnnnnnnnnnnnnnnnnnnnnnnnnnnnnnnnnnnnnnnnnnnnnnnnnnnnnnnnnnnnnnnnnnnnnnnnnnnnnnnnnnnnnnnnngctcacggaggaattccgcctgaattactgccacctctggcagtctctgatctggactgacatgaagagagtgaaggagtacagccagcgcctgggagccggggatctctaccccttgtttgcctgcatgctgacagcgcggtcatggaactcagtcaacagaggcatcagccaagctcccgtcactgccactgaggnnaggacttagagattcgcaacaatgcggccaactacctcccccagatcagccagctccttaaccacgtgccacgccagatgctgctcatcttgaagaccaatgacctgctgcgtggcatcgaggccgccctgggcacccgtgccagcgccagctcctttctcaccatgtcacgttgctgcat

SEQ ID NO: 20740 - DNA, 135 bp, Macaca Mulatta
gcttataggaatctcccacttatttggaaaaaaaaatgtctcgtgcaagcaacaaagtggactccctgctccagaacatgtgggatgggaatatctaatagggtgaccaatgaaaacagcaactgtgaaatgaga

SEQ ID NO: 20741 - DNA, 440 bp, Macaca Mulatta
ctagtgaggactcaagacaaatctgaaacaaaacagctattttggttcttgcataaactctttgctatgatgtgacacgaaatgaggccatgggtaaaaggtgccaaagagggcccatccctcctaacaaattacgtctttgactcaattatggggactgaaagtactgcatgacttgtatgatctgttgctaactcaggtatctaatcggtgggcctttcggatgtattactaagctgctaatcgtgtctgtgtcagtttctctctgtaacatgacctctcttctcttccttctcctgctttcctttgttcagagaagcaacagaaaactcacccattctggatgggtctgagtctccacctcaccaaagtactgatgaatagaggtaccgtaagaggagttttgttcctactgcccatgagtctgtggtcccacatgt

SEQ ID NO: 20742 - DNA, 877 bp, Macaca Mulatta
tctgtgaagatggtgcaagtgtggagagatatctctctgaccaaatttaatgtcagcaattgaaagagataaccagacttcatgttgtcaaggcatctctgatctacgtgagcatgggattcccaaagccagctaacggcgtgatcttttctcacttcaatccttacttttgctcattaaaacttaatccaacttcacagaatttggttcttgctttcatggggagaaagataaagtggtcatcatcaagagggcttgggggattttatgggtggtgtgaatgagtcaaagaggataaatcttcctgagacacaaaaagtaagtgacaaggccagtgaaatgtctgagaagacattagcaactacatccttctatagcatcgactatatgtcagactctctgaaccaaccctacacaatttcagatgagtcactgaggtgtagcaatgggattggaggcttgaataactgagccatgacagggtgggtagagctatatctgagctgagcagaactgagtaggaagcccactctttacactgaaaacaggggagcaggaacccttgggggctcccattactctgcctaaaccccatatctcatatgtccctccaattaacttggaaaaatgccaagaagaaaatcaccagagaaagaaactcatgggcttgtcccctcagttcaggaacaacggtatgcaacaccatttttcgaaaggtagagcacagatgcagaaattggatttgttcatttaaagagtactcatgggtgatcatgcccttctcacttcctctttgcagactgagaaaggaaaaagacacttgacagaaaaggagctgtagcctcaaacagtaaaaaggggagatactactttccag

SEQ ID NO: 20743 - DNA, 478 bp, Macaca Mulatta
  misc_feature (1)...(478): n = A,T,C or G
ggaaaaagaaattcccgggccctggcnnnnnnnnnnnnnnnnnnnnnnnnnnnnnnnnnnnnnnnnnnnnnnnnnnnnnnnnnnnnnnnnnnnnnnnnnnnnnnnnnnnnnnnnnnnnnnnnnnnnnnnnnnnnnnnnnnnnnnnnnnnnnnnnnnnnnnnnnnnnnnnnnnnnnnnaggttccggttctgtggtgatctggaccatcgcgactgggtcctggctgagatcagcacgctggccaagatgngtcctctgtgaagttgtggctactctgcagccaggtactaaagagctgctgggacgggggattgatntatgagaagatcctgaagctcacagctgatgtcaagtttgnagtcaggcgacgtcaaggccacagtggcagtgctgagtttcatcctctccagtgcagccaagcacagtgtcgatggtggatccttgtccagtgaagtgcagcagctggggctgcccaaag

SEQ ID NO: 20744 - DNA, 1439 bp, Macaca Mulatta
  misc_feature (1)...(1439): n = A,T,C or G
tatgcatttatcttcactctgatgagggctcagacttgataacgcccgtggtgccccatccctgtaggagctggtgagattgcagcctgctgcctcccctccatcagccacagctattggatttcccacccagaatctttaggtaaatgagnnnnnnnnnnnnnnnnnnnnnnnnnnnnnnnnnnnnnnnnnnnnnnnnnnnnnnnnnnnnnnnnnnnnnnnnnnnnnnnnnnnnnnnnnnnnnnnnnnnnnnnnnnnnnnnnnnnnnnnnnnnnnnnnnnnnnnnnnnnnnnnnnnnnnnnnnnnnnnnnnnnnnnnnnnnnnnnnnnnnnnnnnnnnnnnnnnnnnnnnnnnnnnnnnnnnnnnnnnnnnnnnnnnnnnnnnnnnnnnnnnnnnnnnnnnnnnnnnnnnnnnnnnnnnnnnnnnnnnnnnnnnnnnnnnnnnnnnnnnnnnnnnnnnnnnnnnnnnnnnnnnnnnnnnnnnnnnnnnnnnnnnngccagtgcagtagtgacctgttccagtccacacacaatgtcatagtcaagactgaacaaactgnnnnnnnnnnnnnnnnnnnnnnnnnnnnnnnnnnnnnnnnnnnnnnnnnnnnnnnnnnnnnnnnnnnnnnnnnnnnnnnnnnnnnnnnnnnnnnnnnnnnnnnnnnnnnnnnnnnnnnnnnnnnnnnnnnnnnnnnnnnnnnnnnnnnnnnnnnnnnnnnnnnnnnnnnnnnnnnnnnnnnnnnnnnnnnnnnnnnnnnnnnnnnnnnnnnnnnnnnnnnnnnnnnnnnnnnnnnnnnnnnnnnnnnnnnnnnnnnnnnnnnnnnnnnnnnnnnnnnnnnnnnnnnnnnnnnnnnnnnnnnnnnnnnnnnnnnnnnnnnnnnnnnnagatactactacaaaagagaaattctggagcgtgtggatggacgaagactggtatataaatttgggaagaatgcccgaggatggagggaaaatgaaaactgaagctgccaatactttggacacaaaccaaaacacgcaccaactaatcacaaacaaagaactcctggacgtaaatatttcaaagactacttttctctgatatttatgtaccatgaggggaaaaagaaactacttctaacgggaagaagaaaaagtacaattgattaaaaaaattattttgttactttgaaataggtcctatatggggaaaaaacgtacacagttttctgtgaaatatgatgctgtatgtggttgtgatttgttttcacctctattgtgaattctttttcactgcaagagtgacagggtttgtagccttgtgcttcttgctaagagaaannnnnnnnnntcagagggcattaaatgttttgtgtgtgacacgatttagaaaaaggtgatgcatcccacatgtaagcatccgtatggcttcgtcaagggaggtgaacatggttgct

SEQ ID NO: 20745 - DNA, 3048 bp, Macaca Mulatta
  misc_feature (1)...(3048): n = A,T,C or G
tgtactttctgatcggagctgtttaagagttacagctggtcccacctcactggatcttgatgttaatgttcagaggactctagacaacaacttagcaactgaagcttatgaaagaagaattaagcgccttgagcaagaaaaacttgaactcagtagaaaacttcaagnnnnnnnnnnnnnnnnnnnnnnnnnnnnnnnnnnnnnnnnnnnnnnnnnnnnnnnnnnnnnnnnnnnnnnnnnnnnnnnnnnnnnnnnnnnnnnnnnnnnnnnnnnnnnnnnnnnnnnnnnnnnnnnnagtcatttggaacagcaacttgaagaagctaatgctgtgaggcaagaactagatgaagcttttagacaaatctaggcttatgaaaaacaaatcaaaacgttacaacaagaaagagaagatctaaataannaagctggaagttcatacagaagctctagctgctgaagcatctaaagacaggaaactacgtgaacaaagtgagcactattctaagcaactggaaaatnnnnnnnnnnnnnnnnnnnnnnnnnnnnnnnnnnnnnnnnnnnnnnnnnnnnnnnnnnnnnnnnnnnnnnnnnnnnnnnnnnnnnnnnnnnnnnnnnnnnnnnnnnnnnnnnnnnnnnnnnnnnnnnnnnnnnnnnnnnnnnnnnnnnnnnnnnnnnnnnnnnnnnnnnnnnnnnnnnnnnnnnnnnnnnnnnnnnnnnnnnnnnnnnnnnnnnnnnnnnnnnnnnnnnnnnnnnnnnnnnnnnnnnnnnnnnnnnnnnnnnnagtcaaagtgaaagggaagaatttgaaagtgagttcaaacaacagtatgaacgagaaaaagtgttgttaactgaagaaaataaaaagctgacaagtgaacttgataannnnnnnnnnnnnnnnnnnnnnnnnnnnnnnnnnnnnnnnnnnnnnnnnnnnnnnnnnnnnnnnnnnnnnnnnnnnnnnnnnnnnnnnnnnnnnnnnnnnnnnnnnnnnnnnnnnnnnnnnnnnnnnnnnnnnnnnnnnnnnnnnnnnnnnnnnnnnnnnnnnnnnnnnnnnnnnnnnnnnnnnnnnnnnnnnnnnnnnnnnnnnnnnnnnnnnnnnnnnnnnnnnnnnnnnnnnnnnnnnnnnnnnnnnnnnnnnnnnnnnnnnnnnnnnnnnnnnnnnnnnnnnnnnnnnnnnnnnnnnnnnnnnnnnnnnnnnnnnnnnnnnnnnnnnnnnnnnnnnnnnnnnnnnnnnnnnnnnnnnnnnnnnnnnnnnnnnnnntaaactaaaagattcagagaagaagaacttggaactgctctcagaaatcgaacaactgataaaggacactgaagagcttagatctgaaaagggtatnggtatagagcaccaagactcacagcattctttcttggcatttttgaatacgccttccgatgctctggatcaatttgaannnnnnnnnnnnnnnnnnnnnnnnnnnnnnnnnnnnnnnnnnnnnnnnnnnnnnnnnnnnnnnnnnnnnnnnnnnnnnnnnnnnnnnnnnnnnnnnnnnnnnnnnnnnnnnnnnnnnnnnnnnnnnnnnnnnnnnnnnnnnnnnnnnnnnnnnnnnnnnnnnnnnnnnnnnnnnnnnnnnnnnnnnnnnnnnnnnnnnnnnnnnnnnnnnnnnnnnnnnnnnnnnnnnnnnnnnnnnnnnnnnnnnnnnnnnnnnnnnnnnnnnnnnnnnnnnnnnnnnnnnnnnnnnnnnnnnnnnnnnnnnnnnnnnnnnnnnnnnnnnnnnnngattcctaaaccagccggagtgaagaaagggtggcagagagcactggctatagtgtgtgacttcaaactgtttctgtacgatattgctgaaggaaaagcatctcagcccagtgttgtcattagtcaagtgattgacatgagnnnnnnnnnnnnnnnnnnnnnnnnnnnnnnnnnnnnnnnnnnnnnnnnnnnnnnnnnnnnnnnnnnnnnnnnnnnnnnnnnnnnnnnnnnnnnnnnnnnnnnnnnnnnnnnnnnnnnnnnnnnnnnnnnnnnnnnnnnnnnnnnnnnnnnnnnnnnnnnnnnnnnnnnnnnnnnnnnnnnnnnnnnnnnnnnnnnnnnnnnnnnnnnnnnnnnnnnnnnnnnnnnnnnnnnnnnnnnnnnnnnnnnnnnnnnnnnnnnnnnnnnnnnnnnnnnnnnnnnnnnnnnnnnnnnnnnnnnnnnnnnnnnnnnnnnnnnnnnnnnnnnnnnnnnnnnnnnnnnnnnnnnnnnnnnnnnnnnnnnnnnnnnnnnnnnnnnnnnnnnnnnnnnnnnnnnnnnnnnnnnnnnnnnnnnnnnnnnnnnnnnnnnnnnnnnnnnnnnnnnnnnnnnnnnnnnnnnnnnnnnnnnnnnnnnnnnnnnnnnnnnnnnnnnnnnnnnnnnnnnnnnnnnnnnnnnnnnnnnnnnnnnnnnnnnnnnnnnnnnnnnnnnnnnnnnnnnnnnnnnnnnnnnnnnnnnnnnnnnnnnnnnnnnnnnnnnnnnnnnnnnnnnnnnnnnnnnnnnnnnnnnnnnnnnnnnnnnnnnnnnnnnnnnnnnnnnnnnnnnnnnnnnnnnnnnnnnnnnnnnnnnnnnnnnnnnnnnnnnnnnnnnnnnnnnnnnnnnnnnnnnnnnnnnnnnnnnnnnnnnnnnnnnnnnnnnnnnnnnnnnnnnnnnnnnnnnnnnnnnnnnnnnnnnnnnnnnnnnnnnnnnnnnnnnnnnnnnnnnnnnnnnnnnnnnnnnnnnnnnnnnnnnnnnnnnnnnnnnnnnnnnnnnnnnnnnnnnnnnnnnnnnnnnnnnnnnnnnnnnnnnnnnnnnnnnnnnnnnnnnnnnnnnnnnnnnnnnnnnnnnnnnnnnnnnnnnnttacaatgcaccatatctctcggtgtacagtgaaaatgcagttgatatctttgatgtgaactccatggaatnnnnnnnnnnnnnnnnnnnnnnnnggttcgacccttaaacaatgaaggatcattaaatcttttagggctggagaccattagattaatatatttcaaaaataagatggcag

SEQ ID NO: 20746 - DNA, 5381 bp, Macaca Mulatta
  misc_feature (1)...(5381): n = A,T,C or G
ggccgtgagtactcacctagccgccaccacggcagagaatgggggcggcaagaagaaacagaaggagaaggaactggatgannnnnnnnnnnnnnnnnnnnnnnnnnnnnnnnnnnnnnnnnnnnnnnnnnnnnnnnnnnnnnnnnnnnnnnnnnnnnnnnnnnnnnnnnnnnnnnnnnnnnnnnnnnnnnnnnnnnnnnnnnnnnnnnnnnnnnnnnnnnnnnnnnnnnnnnnnnnnnnnnnnnnnnnnnnnnnnnnnnnnnnnnnnnnnnnnnnnnnnnnnnnnnnnnnnnnnnnnnnnnnnnnnnnnnnnnnnnnnnnnnnnnnnnnnnnnnnnnnnnnnnnnnnnnnnnnnnnnnnnnnnnnctatatctgggtgtggtgctggcagctgtggtcattgtcactggctgcttctcctactaccaggaggccaaaagctccaagatcatggattccttcaagaacatggtacctcannnnnnnnnnnnnnnnnnnnnnnnnnnnnnnnnnnnnnnnnnnnnnnnnnnnnnnnnnnnnnnnnnnnnnnnnnnnnnnnnnnnnnnnnnnnnnnnnnnnnnnnnnnnnnnnnnnnnnnnnnnnnnnnnnnnnnnnnnnnnnnnnnnnnnnnnnnnnnnnnnnnnnnnnnnnnnnnnnnnnnnnnnnnnnnnnnnnnnnnnnnnnnnnnnnnnnnnnnnnnnnnnnnnnnnnnnnnnnnnnnnnnnnnnnnnnnnnnnnnnnnnnnnnnnnnnnnnnnnnnnnnnnnnnnnnnnnnnnnnnnnnnnnnnnnnnnnnnnnnnnnnnnnnnnnnnnnnnnnnnnnnnnnnnnnnnnnnnnnnnnnnnnnnnnnnnnnnnnnnnnnnnnnnnnnnnnnnnnnnnnnnnnnnnnnnnnnnnnnnnnnnnnnnnnnnnnnnnnnnnnnnnnnnnnnnnnnnnnnnnnnnnnnnnnnnnnnnnnnnnnnnnnnnnnnnnnnnnnnnnnnnnnnnnnnnnnnnnnnnnnnnnnnnnnnnnnnnnnnnnnnnnnnnnnnnnnnnnnnnnnnnnnnnnnnnnnnnnnnnnnnnnnnnnnnnnnnnnnnnnnnnnnnnnnnnnnnnnnnnnnnnnnnnnnnnnnnnnnnnnnnnnnnnnnnnnnnnnnnnnnnnnnnnnnnnnnnnnnnnnnnnnnnnnnnnnnnnnnnnnnnnnnnnnnnnnnnnnnnnnnnnnnnnnnnnnnnnnnnnnnnnnnnnnnnnnnnnnnnnnnnnnnnnnnnnnnnnnnnnnnnnnnnnnnnnnnnnnnnnnnnnnnnnnnnnnnnnnnnnnnnnnnnnnnnnnnnnnnnnnnnnnnnnnnnnnnnnnnnnnnnnnnnnnnnnnnnnnnnnnnnnnnnnnnnnnnnnnnnnnnnnnnnnnnnnnnnnnnnnnnnnnnnnnnnnnnnnnnnnnnnnnnnnnnnnnnnnnnnnnnnnnnnnnnnnnnnnnnnnnnnnnnnnnnnnnnnnnnnnnnnnnnnnnnnnnnnnnnnnnnnnnnnnnnnnnnnnnnnnnnnnnnnnnnnnnnnnnnnnnnnnnnnnnnnnnnnnnnnnnnnnnnnnnnnnnnnnnnnnnnnnnnnnnnnnnnnnnnnnnnnnnnnnnnnnnnnnnnnnnnnnnnnnnnnnnnnnnnnnnnnnnnnnnnnnnnnnnnnnnnnnnnnnnnnnnnnnnnnnnnnnnnnnnnnnnnnnnnnnnnnnnnnnnnnnnnnnnnnnnnnnnnnnnnnnnnnnnnnnnnnnnnnnnnnnnnnnnnnnnnnnnnnnnnnnnnnnnnnnnnnnnnnnnnnnnnnnnnnnnnnnnnnnnnnnnnnnnnnnnnnnnnnnnnnnnnnnnnnnnnnnnnnnnnnnnnnnnnnnnnnnnnnnnnnnnnnnnnnnnnnnnnnnnnnnnnnnnnnnnnnnnnnnnnnnnnnnnnnnnnnnnnnnnnnnnnnnnnnnnnnnnnnnnnnnnnnnnnnnnnnnnnnnnnnnnnnnnnnnnnnnnnnnnnnnnnnnnnnnnnnnnnnnnnnnnnnnnnnnnnnnnnnnnnnnnnnnnnnnnnnnnnnnnnnnnnnnnnnnnnnnnnnnnnnnnnnnnnnnnnnnnnnnnnnnnnnnnagggagccattgtggccgtgacgggtgacggggtgaacgactcccctgcgctgaagaaggctgacattggcattgccatgggcatctctggctctgacgtctctaagcaggcagccgacatgatcctgctggacgacaactttgcctccatcgttacgggggtggaggagggnnnnnnnnnnnnnnnnnnnnnnnnnnnnnnnnnnnnnnnnnnnnnnnnnnnnnnnnnnnnnnnnnnnnnnnnnnnnnnnnnnnnnnnnnnnnnnnnnnnnnnnnnnnnnnnnnnnnnnnnnnnnnnnnnnnnnnnnnnnnnnnnnnnnnnnnnnnnnnnnnnnnnnnnnnnnnnnnnnnnnnnnnnnnnnnnnnnnnnnnnnnnnnnnnnnnnnnnnnnnnnnnnnnnnnnnnnnnnnnnnnnnnnnnnnnnnnnnnnnnnnnnnnnnnnnnnnnnnggatgatccaggcactgggtggcttcttcacctactttgtgatcctggcagagaacggtttcctgccatcacggctactgggaatccgcctcgactgggatgaccggaccatgaacgatctggaggacagctatggacaggagtggnnnnnnnnnnnnnnnnnnnnnnnnnnnnnnnnnnnnnnnnnnnnnnnnnnnnnnnnnnnnnnnnnnnnnnnnnnnnnnnnnnnnnnnnnnnnnnnnnnnnnnnnnnnnnnnnnnnnnnnnnnnnnnnnnnnnnnnnnnnnnnnnnnnnnnnnnnnnnnnnnnnnnnnnnnnnnnnnnnnnnnnnnnnnnnnnnnnnnnnnnnnnnnnnnnnnnnnnnnnnnnnnnnnnnnnnnnnnnnnnnnnnnnnnnnnnnnnnnnnnnnnnnnnnnnnnnnnnnnnnnnnnnnnnnnnnnnnnnnnnnnnnnnnnnnnnnnnnnnnnnnnnnnnnnnnnnnnnnnnnnnnnnnnnnnnnnnnnnnnnnnnnnnnnnnnnnnnnnnnnnnnnnnnnnnnnnnnnnnnnnnnnnnnnnnnnnnnnnnnnnnnnnnnnnnnnnnnnnnnnnnnnnnnnnnnnnnnnnnnnnnnnnnnnnnnnnnnnnnnnnnnnnnnnnnnnnnnnnnnnnnnnnnnnnnnnnnnnnnnnnnnnnnnnnnnnnnnnnnnnnnnnnnnnnnnnnnnnnnnnnnnnnnnnnnnnnnnnnnnnnnnnnnnnnnnnnnnnnnnnnnnnnnnnnnnnnnnnnnnnnnnnnnnnnnnnnnnnnnnnnnnnnnnnnnnnnnnnnnnnnnnnnnnnnnnnnnnnnnnnnnnnnnnnnnnnnnnnnnnnnnnnnnnnnnnnnnnnnnnnnnnnnnnnnnnnnnnnnnnnnnnnnnnnnnnnnnnnnnnnnnnnnnnnnnnnnnnnnnnnnnnnnnnnnnnnnnnnnnnnnnnnnnnnnnnnnnnnnnnnnnnnnnnnnnnnnnnnnnnnnnnnnnnnnnnnnnnnnnnnnnnnnnnnnnnnnnnnnnnnnnnnnnnnnnnnnnnnnnnnnnnnnnnnnnnnnnnnnnnnnnnnnnnnnnnnnnnnnnnnnnnnnnnnnnnnnnnnnnnnnnnnnnnnnnnnnnnnnnnnnnnnnnnnnnnnnnnnnnnnnnnnnnnnnnnnnnnnnnnnnnnnnnnnnnnnnnnnnnnnnnnnnnnnnnnnnnnnnnnnnnnnnnnnnnnnnnnnnnnnnnnnnnnnnnnnnnnnnnnnnnnnnnnnnnnnnnnnnnnnnnnnnnnnnnnnnnnnnnnnnnnnnnnnnnnnnnnnnnnnnnnnnnnnnnnnnnnnnnnnnnnnnnnnnnnnnnnnnnnnnnnnnnnnnnnnnnnnnnnnnnnnnnnnnnnnnnnnnnnnnnnnnnnnnnnnnnnnnnnnnnnnnnnnnnnnnnnnnnnnnnnnnnnnnnnnnnnnnnnnnnnnnnnnnnnnnnnnnnnnnnnnnnnnnnnnnnnnnnnnnnnnnnnnnnnnnnnnnnnnnnnnnnnnnnnnnnnnnnnnnnnnnnnnnnnnnnnnnnnnnnnnnnnnnnnnnnnnnnnnnnnnnnnnnnnnnnnnnnnnnnnnnnnnnnnnnnnnnnnnnnnnnnnnnnnnnnnnnnnnnnnnnnnnnnnnnnnnnnnnnnnnnnnnnnnnnnnnnnnnnnnnnnnnnnnnnnnnnnnnnnnnnnnnnnnnnnnnnnnnnnnnnnnnnnnnnnnnnnnnnnnnnnnnnnnnnnnnnnnnnnnnnnnnnnnnnnnnnnnnnnnnnnnnnnnnnnnnnnnnnnnnnnnnnnnnnnnnnnnnnnnnnnnnnnnnnnnnnnnnnnnnnnnnnnnnnnnnnnnnnnnnnnnnnnnnnnnnnnnnnnnnnnnnnnnnnnnnnnnnnnnnnnnnnnnnnnnnnnnnnnnnnnnnnnnnnnnnnnnnnnnnnnnnnnnnnnnnnnnnnnnnnnnnnnnnnnnnnnnnnnnnnnnnnnnnnnnnnnnnnnnnnnnnnnnnnttgcttttgacgtcttaggtggcagggctattccctccaggcagatgcccttcacaccgacgatcattgtgcccactgtctctgggctggagagttggtttcagtttcctacaggagatacctttctttcccttactccctatctaacatttgtgctctgcaggcagctttgcccattctctaagcctggcttagaaggccctgggaatgtcctgtagagagagacctagataagtcatgcaagtgagagagacatctgaggaaaatggaagacctaaggcagacaggaaggaagcacaaaagacaagcattgggtcagacccataaaccacctcccaaatgctgtcatttcattgcactggaatttagctttatcagaagcacctggaagtaagggagtcattgcctttgggccctgggaatctaagtgggagaccatattaatttnnnnnnnnnnnnnnnnnnnnnnnnnnnnnnnnnnnnnnnnnnnnnnnnnnnnnnnnnnnnnnnnnnnnnnnnnnnnnnnnnnnnnnnnnnnnnnnnnnnnnnnnnnnnnnnnnnnnnnnnnnnnnnnnnnnnnnnnnnnnnnnnnnnnnnnnnnnnnnnnnnnnnnnnnnnnnnnnnnnnnnnnnnnnnnnnnnnnnnnnnnnnnnnnnnnnnnnnnnnnnnnnnnnnnnnnnnnnnnnnnnnnnnnnnnnnnnnnnnnnnnnnnnnnnnnnnnnnnnnnnnnnnnnnnnnnnnnnnnnnnnnnnnnnnnnnnnnnnnnnnnnnnnnnnnnnnnnnnnnnnnnnnnnnnnnnnnnnctttatacttgcctccctcctaaattgtgatatt

SEQ ID NO: 20747 - DNA, 139 bp, Macaca Mulatta
aggtaatgaaagcatgggatgctcatgtgacagcagtttgctctcaagatgccagtggacttgtaaggaagcttggggcagatgatgtaattgattacaaatctggaagtgtggaagagcagttgaaatccttaaaacc

SEQ ID NO: 20748 - DNA, 499 bp, Macaca Mulatta
gcaaaggaaaagccaagtgagacgggctttgggaccatggtgaccaggctcttccccctgctccctggccctcgacagctgccacactgaaaagaagcctcagatcccacaccaccctcctcgccgcccttcctcgggagtcacttccactggtggaccacgggcccccagccctgtgtcagccttgtctgtctcagctcaacagaatccgacgccagagccacttccatcctctctggtgtgaggcacagcaagggcagcatctggaggagctctgcagcctccacgcctaccacaacctcccagggctaggctcaggagaaaccagccactgctccacaggacagggagtagaagctgggccctgcctcacacccacccccatgcattcaaagactggcttttacagctatttgtaattcaaaattcagaagaataaaaaatgggaacatatagaactctaaaagatagacatcagaaattgttaagttaagctttt

SEQ ID NO: 20749 - DNA, 233 bp, Macaca Mulatta
tggagcacaaggccaccaccatccagaagcacgtgcggggctggatggcacgcaggcacttccagcggctgcgggatgcagccattgtcatccaatgtgccttccggatgctcaaggccaggcgggagctgaaggccctcaggatcgaggcccgctcagcagagcatctgaaacgtctcaacgtgggcatggagaacaaggtggtccagctgcagcggaagatcgacgagcag

SEQ ID NO: 20750 - DNA, 130 bp, Macaca Mulatta
gagaaacatcttgcctggtttaaacatcacttgtaccttccacaagactcagaatccacagtgtcccattttccgactaggagacatcttccgagaaacaggcgataatttttcagatgtggcaattcag

SEQ ID NO: 20751 - DNA, 763 bp, Macaca Mulatta
  misc_feature (1)...(763): n = A,T,C or G
gggtgggttccgaaattttaacccaaatgacacctgtctggctagctgttttaaaagtggccacccgtgctcgccatgtgctccgatcataggagaatatgctggagaggttttgagatttgttggtggcattggcctgtttttcagttttacagagatcctgggtgtttggctgacctacagatacaggaaccagaaagatccccgtgcgaatcccagtgcattcctttgatgagaaaacaaggaagattttctttcgtattatgatcttgttcactttctgtaattttctgttaagctcgatttgccagtttaaggaaggaaacaccatctggaaaattacattattgatagtggaattatatatttttactctatgtttctctaaatgttgttttctttttccattgctgaaaaatatttgaaacttgtggtctctgaagctcagtggcacctggaatttactgtattcagtgtcgggcgctgtccactgtggcctttcttagcatttttacctgcagaaaaactttgtatggcaccactgtgttggtcatatggtaaatctaaatgtacatctcactggtataattatatgtagcactgtgctgtgtagatagttcctgctggaaaagagttgaagtttattaaaatcagaaagtatgagattctattatgttaaagggaaatccnnnnnaaannnnnnnnnnnnnnnnnnnnnnnccttgtcggcccgccctcggcccctcgaagaagcttttctaga

SEQ ID NO: 20752 - DNA, 108 bp, Macaca Mulatta
tcccttttactatccccaacagggtgtgaggggcacacccctgtttttcctgctctttcacacagatgtcctcagcctgaggcagacacagcaggaaatggggcatga

SEQ ID NO: 20753 - DNA, 730 bp, Macaca Mulatta
tcagataccgtggatgtggatgacttcccctaatgcctatcgggaagcctctaaaatggggtgtacggtctggccagaaacactgtagaagtagtaggcagatgtcctccttcccctggacatctcctacagagaggaatggacccaggctgtcattcgaggaagaactgcagagccttcagcctctccaaacatgtaggaaatgaggaaatccctgtgttgttaatgcagagaacaaactctgtttagttgcagggatatatcccaaagtcctctacccccttacttttatggccctttccctagatatactgcaggatctctccttaggataaagagttgttgttgaagttgtatatttttgatcaatatatttggaaattaaagtttctgactttaattccggcctatcctttgaggctcttgagggtgggcaagttcctgaatccctcaggtggtaaagatatgcaaaggatggggaaaagaagcatgggtgattaactccttttatcccacccctggacagaaagattagcttctgggaaaacacttaacccaaagtttcagacatgttaaaccactagcccagatttctgcccttgcaccaaggctatgcttggagatcagtggttgacaggttaggaaagcggttggacaagagatatgagagggcagaaatctcaattaacatgctatcccctcccttaaaagccaagataccccacaatta

SEQ ID NO: 20754 - DNA, 920 bp, Macaca Mulatta
  misc_feature (1)...(920): n = A,T,C or G
gggctttttctttcggcggagcgcggcggcaagatggccgtgcaaatttccaagaagaggaagtttgtcgctgatggcatcttcaaagctgaactgaatgagtttcttactcgggagctggctgaagatggctactctggagttgaggtgcgagttacaccaaccaggacagaaatcattatcttagccaccagaacacagaatgttcttggtgagaagggccggcggattcgggaactgactgctgtagttcagaagaggtttggctttccagagggcagtgtagagctttatgctgaaaaggtggccactagaggtctgtgtgccattgcccaggcagagtctctgcgttacaaactcctaggagggcttgctgtgcggagggcctgctatggtgtgctgcggttcatcatggagagcggggccaaaggctgcgaggtcgtggtgtctgggaaactccgaggacagagggctaaatccatgaagtttgtggatggcctgatgatccacagcggagaccctgttaactactacgttgacactgctgtgcgccatgtgttgctcagacagggtgtgctgggcatcaaggtgaagatcatgctgccctgggacccaactggtaagattggccctaagaagcccctgcctgaccatgtgagcatcgtggaacccaaagatgaaatactgcctaccactcccatctcagaacagaagggtggggaagccagagccgcctgccatgcccccagccagtccccacaggcataacagggtcctccttgggcagctgtaattctgggagtctgggatggtgcgttcttgtaaagatcctttaaataaaaaacctgggttccgatcgtattttgcgcagagcacaacnnnnnnnnnnnnnnnnnnnnnnnnnnccacaatggttccga

SEQ ID NO: 20755 - DNA, 2092 bp, Macaca Mulatta
  misc_feature (1)...(2092): n = A,T,C or G
cccagtgcagtgtttgacatccacgtggtctacgtcaccaccacagagatgcggctggagtggaagagcccaggcaatgcttccgagtatgtctaccatttagtcatagagtccaagcatggctctaaccacacaaacacatctgacaacgtggtcactctccagggcctgatcccgggcaccttatataacattaccatctctccggaagtggaccacatcccgggagaccccagctccactacacagtacacacgnnnnnnnnnnnnnnnnnnnnnnnnnnnnnnnnnnnnnnnnnnnnnnnnnnnnnnnnnnnnnnnnnnnnnnnnnnnnnnnnnnnnnnnnnnnnnnnnnnnnnnnnnnnnnnnnnnnnnnnnnnnnnnnnnnnnnnnnnnnnnnnnnnnnnnnnnnnnnnnnnnnnnnnnnnnnnnnnnnnnnnnnnnnnnnnnnnnnnnnnnnnnnnnnnnnnnnnnnnnnnnnnnnnnnnnnnnnnnnnnnnnnnnnnnnnnnnnnnnnnnnnnnnnnnnnnnnnnnnnnnnnnnnnnnnnnnnnnnnnnnnnnnnnnnnnnnnnnnnnnnnnnnnnnnnnnnnnnnnnnnnnnnnnnnnnnnnnnnnnnnnnnnnnnnnnnnnnnnnnnnnnnnnnnnnnnnnnnnnnnnnnnnnnnnnnnnnnnnnnnnnnnnnnnnnnnnnnnnnnnnnnnnnnnnnnnnnnnnnnnnnnnnnnnnnnnnnnnnnnnnnnnnnnnnnnnnnnnnnnnnnnnnnnnnnnnnnnnnnnnnnnnnnnnnnnnnnnnnnnnnnnnnnnnnnnnnnnnnnnnnnnnnnnnnnnnnnnnnnnnnnnnnnnnnnnnnnnnnnnnnnnnnnnnnnnnnnnnnnnnnnnnnnnnnnnnnnnnnnnnnnnnnnnnnnnnnnnnnnnnnnnnnnnnnnnnnnnnnnnnnnnnnnnnnnnnnnnnnnnnnnnnnnnnnnnnnnnnnnnnnnnnnnnnnnnnnnnnnnnnnnnnnnnnnnnnnnnnnnnnnnnnnnnnnnnnnnnnnnnnnnnnnnnnnnnnnnnnnnnnnnnnnnnnnnnnnnnnnnnnnnnnnnnnnnnnnnnnnnnnnnnnnnnnnnnnnnnnnnnnnnnnnnnnnnnnnnnnnnnnnnnnnnnnnnnnnnnnnnnnnnnnnnnnnnnnnnnnnnnnnnnnnnnnnnnnnnnnnnnnnnnnnnnnnnnnnnnnnnnnnnnnnnnnnnnnnnnnnnnnnnnnnnnnnnnnnnnnnnnnnnnnnnnnnnnnnnnnnnnnnnnnnnnnnnnnnnnnnnnnnnnnnnnnnnnnnnnnnnnnnnnnnnnnnnnnnnnnnnnnnnnnnnnnnnnnnnnnnnnnnnnnnnnnnnnnnnnnnnnnnnnnnnnnnnnnnnnnnnnnnnnnnnnnnnnnnnnnnnnnnnnnnnnnnnnnnnnnnnnnnnnnnnnnnnnnnnnnnnnnnnnnnnnnnnnnnnnnnnnnnnnnnnnnnnnnnnnnnnnnnnnnnnnnnnnnnnnnnnnnnnnnnnnnnnnnnnnnnnnnnnnnnnnnnnnnnnnnnnnnnnnnnnnnnnnnnnnnnnnnnnnnnnnnnnnnnnnnnnnnnnnnnnnnnnnnnnnnnnnnnnnnnnnnnnnnnnnnnnnnnnnnnnnnnnnnnnnnnnnnnnnnnnnnnnnnnnnnnnnnnnnnnnnnnnnnnnnnnnnnnnnnnnnnnnnnnnnnnnnnnnnnnnnnnnnnnnnnnnnnnnnnnnnnnnnnnnnnnnnnnnnnnnnnnnnnnnnnnnnnnnnnnnnnnnnnnnnnnnnnnnnnnnnnnnnnnnnnnnnnnnnnnnnnnnnnnnnnnnnnnnnnnnnnnnnnnnnnnnnnnnnnnnnnnnnnnnnnnnnnnnnnnnnnnnnnnnnnnnnnnnnnnnnnnnnnnnnnnnnnnnnnnnnnnnnnnnnnnnnnnnnnnnnnnnntcaccctctgagacagttccatttcacctcctgccctgaccacggtgttccggacaccactgacctgctcatcaccttccggtacctcgttcgtgactacatgaagcagagtcctcccgaatcgccgattctggtgcattgcag

SEQ ID NO: 20756 - DNA, 544 bp, Macaca Mulatta
  misc_feature (1)...(544): n = A,T,C or G
atccatagggcttctctcctgcgtgagctctcagatgtgcagtgagctgttccttcctaccaaaggctgtcccacattcaccgcattggtaaggattatttcctgtgtgaactgcctgatgtacgatgagctgtgtcttcatattgaaggctttcccacaatcgctgcattggtagggttgttctcctgtatgcattcggacgtgaacaaggagataggacttactcctannnnnnnnnnnnnnnnnnctgcatttatgtggtttcactcctgtgtgcgttctctggtgtacaacgaatggagacttcaaagctannnnnnnnnnnnnnnnnnctgcattcatagggtttcactcctgtgtgacttctctggtgtaaaagaagctgtgatttccaactgtaggctttcccacattcactgcagccatagggtttccctcctgtgtgaatttcctgatggacaatgagctgtgacctgaaagagagaccttctcgcactcactacatgagtagggttttctcctgtatgactctctgatgagcat

SEQ ID NO: 20757 - DNA, 292 bp, Macaca Mulatta
aaacttgtgtgactagcagatgaaaattataaatcaattaattgtcaggaatgtagactgtggatatgaaagtgatcctatgcattgttaataattccgtggtcttaggacaattttgcttaccactatggatctttgtttgaaagccacatgttcagagccagctcacatattttctttggttatttgagggatattttctttatggacaagagcatcataacataatgataaaaacatatagaaaaactaaagtatcatgatctagatagaagcctgtatttagaataca

SEQ ID NO: 20758 - DNA, 765 bp, Macaca Mulatta
ggagaaaaagcacctacaaacgctttctgttgaataataagatcattggtgttttttgttctctttagggacatgaattttataatccccagaaaaaaaattacattttcctgcgtaatgcagccgaagagctaaagccccggaataagaagtagtggctggagactctggcccggccagagttgttctctccactctgcctcatctctatacgaatttgggtcccagccttgttgggttgtcagccatggacatggatttcaacccctggagaaaacgatgtcattgttgagcagccgagagcccaggcgtccgcggcgacttgccgtctctccattccactgcctgttgcagagtttttctgtaactctaagggggttgaggttactatagacgttagattgcgggcaccgccagggattttgcagtgcttcagtgtacgtgttagagaatattggccaagcgtctgtgagccccgtgctgtattttgtaagaaagtcttttgcagattgctttccgagcttcctttgtccttttctcccctttcccaccctgtaacctcagggaaggtgcgtcctggccggcatcagcgagggggttttggagttgagaattttcgaacaacctgtgggaagacgcaaggaagccttaaggggaaaagggggttccccgagctgggcggctcaacttgcggcgcgcaacgaaagccgggcaagcccgtctgggggaaccgcctggagtgggggaaaaaaggtttgaaaaagg

SEQ ID NO: 20759 - DNA, 2918 bp, Macaca Mulatta
  misc_feature (1)...(2918): n = A,T,C or G
tgatggccggttcaggaaggagctaacttttttcctcagtgagggagccaagggtgggaagccgtgaggatttgcagcccccacccccgggttcaagtcctagttctcccccctcttggcccctacaagtcacttgacccattctaggctgaggatgtgatggtgataataatatcaggataccacccacttcacaagattgtgtggggattaaatgagctaatgcacattcattcattcaaaaaaaaatttttgaataagcaccttttgtgttccagggtcggtgataggctctagggcagcgtccctgggctggtggggcttccattctggtggagggagacagtgtacaaaccagaaagcatcagggatgctaagtgctgagatgaggaataaatccaaggggagtgaggcgaggcgggcttgaaagtaccttgtcagctctgaagggccattcaaggttcactgttgttttgtccccagaaccaggagcttcagatcctaagtcaagtgggtgagcgcagtgatgattgggagggccgaagcaccccggtggcagctggcagggttttgctcagcacgtgccggccctcctcgaagctcagtactgtcacagtggagcctctcaacaacgctgtgaggcagcaccatttgacaggttaggatgctggggcccagagaggttaagtgtcttgcccaaggtcacacagcaatcctcctgtcccacaactccccttcccagccccaggcaaactgagccacttgccactcctggcttctccttgtccctcctgcagcctctgctcaaaacgcccttcctccggtccctgacacctgagctggggttgcaaactcagtggccacatccagcccaaaggtaaattatgtttgtccagtatagcatttaactgtatcagaaccagtatgaaaagatcaggagtccaaatttctggcttttaaaagtcagaggctctcactacattgggtctgtgttcccattatggcaatgacctggcacctgtggacagtgctcccctgtagagagggcatgtgctgtcccttcccacagtccttggcgggcgggcggaaggccaggcctggtcatctttcaagcagggcggacttcttacgtgacggttcaggactccgttaagtgctaaagcagaagccgcaaggccttcttaaggtttcagctgttgctgggagaaacctgccgcgtgttatgagttaaagtgagtctcgtaccagcccgggcctcaggaggagggactaccgagaggcagggatgctgagggtcgcggttcactgggggctgtctctgcccatgagctgccacacagcacttttgccatgccccgtaatttggattttatggtggttgtgatggaaagccatttgagggttaaacagggaagcaatgtaatcagatttatgcttcagaactgtactatccaataggttgccaccagccacataaggttatttaaattaattcaaattaaataaaatatacaattcagtcattcattctcatcaaccatatttcaagtgctcaaagccatgtgctggctggggccgcagcgctagtgcagatagaaagaaagcacttccatcgttgaggaaagttctgctggacagcacagccttagaaggatggctttcgcggccgggtgtggtggctcacgcctctaatcccagcactttgggaggccgaggtgggcggatcacgaggtcaggagattgagaccatcccggccaacacaatgaaaccctgtctctactnnnnnnnnnnnnnnnnncaaaattagccgggcgcggtggcgggtgcctgtagtcccagctactcaggagctgatgtgggagaatggcatgaacccgggaggtggagctggcagtgagccgagattacgccactgcagtccagcctgggtgacagagtaagactctgtctcaaaannnnnnnnnnnnnnatggggctgggccggagggggtggcaggtagtggttgtggcagtggaactggggagatatggtcggattagggaggtagagtcaataagacttaatgaagaattggatgcgggattgagggcacatgtggaatcaaagaaacctttgacatctttgtcttgacaaccaggtggtcctgtttctggatgtggaagcttagaaaagcctggattctatgggaagtaggtagggctgggcattgctcattccactctggcttcctttggggttcccattaggtgtctacagggagaggtgaaattggaagttggaggtgtggagggttcaggagagggttctggaccacagatgttgaggtgggagttgtcagtgaacagatgatnnnnnnnnnnnnnnnnnnnnnnnnnnnnnnnnnnnnnnnnnnnnnnnnnnnnnnnnnnnnnnnnnnnnnnnnnnnnnnnnnnnnnnnnnnnnnnnnnnnnnnnnnnnnnnnnnnnnnnnnnnnnnnnnnnnnnnnnnnnnnnnnnnnnnnnnnnnnnnnnnnnnnnnnnnnnnnnnnnnnnnnnnnnnnnnnnnnnnnnnnnnnnnnnnnnnnnnnnnnnnnnnnnnnnnnnnnnnnnnnnnnnnnnnnnnnnnnnnnnnnnnnnnnnnnnnnnnnnnnnnnnnnnnnnnnnnnnnnnnnnnnnnnnnnnnnnnnnnnnnnnnnnnnnnnnnnnnnnnnnnnnnnnnnnnnnnnnnnnnnnnnnnnnnnnnnnnnnnnnnnnnnnnnnnnnnnnnnnnnnnnnnnnnnnnnnnnnnnnnnnnnnnnnnnnnnnnnnnnnnnnnnnnnnnnnnnnnnnnnnnnnnnnnnnnnnnnnnnnnnnnnnnnnnnnnnnnnnnnnnnnnnnnnnnnnnngtggctcacgcctctaatcccagcactttgggaggccgaggtgggcggatcac

SEQ ID NO: 20760 - DNA, 564 bp, Macaca Mulatta
  misc_feature (1)...(564): n = A,T,C or G
taggtatattggatcctcttatgttagtgtatcttggtttctctttggccacacttcaatattttccagaagatctgctaaagtcaatttttaacatcgaattcttatctagattggattctcaacttgaaagtatnnnnnnnnnnnnnnnnnnnnnnnnnnnnnnnnnnnnnnnnnnnnnnnnnnnnnnnnnnnnnnnnnnnnnnnnnnnnnnnnnnnnnnnnnnnnnnnnnnnnnnnnnnnnnnnnnnnnnnnnnnnnnnnnnnnnnnnnnnnnnnnnnnnnnnnnnnnnnnnnnnnnnnnnnnnnnnnnnnnnnnnnnnnnnnnnnnnnnnnnnnnnnnnnnnnnnnnnnnnnnnnnnnnnnnnnnnnnnnnnnnnnnnnnnnnnnnnnnnnnnnnnnnnnnnnnnnnnnnnnnnnnnnnnnnnnnnnnnnnnnnnnnnnnnnnnnnnnnnnnnnnnnnnnnnnnnnnnnnnnnnnnnnnnnnnnnnnnnnnnncagatttctcagttcgaatggaactctatggcactgtcncaaagaggatgctcgaatggactacctg

SEQ ID NO: 20761 - DNA, 766 bp, Macaca Mulatta
  misc_feature (1)...(766): n = A,T,C or G
gggaaattgttttccataaagaacagtataaacatattattcacatgtaatcaccaatagtaaatgaagatgtttatgaactggcattagaagctttttaaactgcgctgtgtgatgtgttctatctagcctaggggaggacattgcctagagggggagggaagatattttattgagaactacttacaaaagatctgtaagcttgaactcaggagtacagttttagctatctagactctaacagcttttgctttaaaattattaaattgtttcttaatgaaaaagaaaagatcttgctaaagttaaaataaagaacgtttcaccttttaaatattttattcttatgtggacttatttccacaaaactttggtgataattcttgagacaaaaggtggttaagtagcattattatgtaatgcttatataccatagagtttttaatagaagagaaatccatttcttctgagggtcactattaacagtggacttccttaaatttagtttaatgattgtaatgggtgctgcatttgcacattgcattaagttatgatgaaacaaattgttgttaaaaattaatgccaaaaaaaaatgtaaaacttgggttaaaaatccttttccactccttttgaannnnnnnnnnnnnnnnnnnaaggtttttttaatttccctttaaaaatggtaaaaaattggaactaaccccctaaatttttttttgaaatggtaaaaaaaaccctttttacaaattcccccaagagaaaaaaaaaa

SEQ ID NO: 20762 - DNA, 2785 bp, Macaca Mulatta
  misc_feature (1)...(2785): n = A,T,C or G
agtgaagagtgtcttcagatggtgtatagacagcgagttgctacggaaacatcgtttgatctccccagaagattactacaccgatacagtgccgtttcaccctgcacctaaagnnnnnnnnnnnnnnnnnnnnnnnnnnnnnnnnnnnnnnnnnnnnnnnnnnnnnnnnnnnnnnnnnnnnnnnnnnnnnnnnnnnnnnnnnnnnnnnnnnnnnnnnnnnnnnnnnnnnnnnnnnnnnnnnnnnnnnnnnnnnnnnnnnnnnnnnnnnnnnnnnnnnnnnnnnnnnnnnnnnnnnnnnnnnnnnnnnnnnnnnnnnnnnnnnnnnnnnnnnnnnnnnnnnnnnnnnnnnnnnnnnnnnnnnnnnnnnnnnnnnnnnnnnnnnnnnnnnnnnnnnnnnnnnnnnnnnnnnnnnnnnnnnnnnnnnnnnnnnnnnnnnnnnnnnnnnnnnnnnnnnnnnnnnnnnnnnnnnnnnnnnnnnnnnnnnnnnnnnnnnnnnnnnnnnnnnnnnnnnnnnnnnnnnnnnnnnnnnnnnnnnnnnnnnnnnnnnnnnnnnnnnnnnnnnnnnnnnnnnnnnnnnnnnnnnnnnnnnnnnnnnnnnnnnnnnnnnnnngatggtaatcgcgctgcagaacaccaccacgaccagtcgctacctgcgagtcctcccaccttccacgccatactttgctctaggactgnnnnnnnnnnnnnnnnnnnnnnnnnnnnnnnnnnnnnnnnnnnnnnnnnnnnnnnnnnnnnnnnnnnnnnnnnnnnnnnnnnnnnnnnnnnnnnnnnnnnnnnnnnnnnnnnnnnnnnnnnnnnnnnnnnnnnnnnnnnnnnnnnnnnnnnnnnnnnnnnnnnnnnnnnnnnnnntgtcaccggtgttggactgtggttactgcctcattgggggagtcaagatgaccagattcatctgcaaaaatgtgggtttcagtgttggcaggttcttcaaagtcccaaaacaagctggccaccactaagtttcnnnnnnnnnnnnnnnnnnnnnnnnnnnnnnnnnnnnnnnnnnnnnnnnnnnnnnnnnnnnnnnnnnnnnnnnnnnnnnnnnnnnnnnnnnnnnnnnnnnnnnnnnnnnnnnnnnnnnnnnnnnnnnnnnnnnnnnnnnnnnnnnnnnnnnnnnnnnnnnnnnnnnnnnnnnnnnnnnnnnnnnnnnnnnnnnnnnnnnnnnnnnnnnnnnnnnnnnnnnnnnnnnnnnnnnnnnnnnnnnnnnnnnnnnnnnnnnnnncacgtggagctggccttctactggcagatcatgaagcccaacctgcagcccctcatgcctggagaattcttcagcatggacagcatcaagtgccaccccgacaaggagaccgccttctccatcatgcccaggaagggggttctcagcccccacacagaccacgagttcatcctgagcttttctcctcatgagnnnnnnnnnnnnnnnnnnnnnnnnnnnnnnnnnnnnnnnnnnnnnnnnnnnnnnnnnnnnnnnnnnnnnnnnnnnnnnnnnnnnnnnnnnnnnnnnnnnnnnnnnnnnnnnnnnnnnnnnnnnnnnnnnnnnnnnnnnnnnnnnnnnnnnnnnnnnnnnnnnnnnnnnnnnnnnnnnnnnnnnnnnnnnnnnnnnnnnnnnnnnnnnnnnnnnnnnnnnnnnnnnnnnnnnnnnnnnnnnnnnnnnnnnnnnnnnnnnnnnnnnnnnnnnnnnnnnnnnnnnnnnnnnnnnnnnnnnnnnnnnnnnnnnnnnnnnnnnnnnnnnnnnnnnnnnnnnnnnnnnnnnnnnnnnnnnnnnnnnnnnnnnnnnnnnnnnnnnnnnnnnnnnnnnnnnnnnnnnnnnnnnnnnnnnnnnnnnnnnnnnnnnnnnnnnnnnnnnnnnnnnnnnnnnnnnnnnnnnnnnnnnnnnnnnnnnnnnnnnnnnnnnnnnnnnnnnnnnnnnnnnnnnnnnnnnnnnnnnnnnnnnnnnnnnnnnnnnnnnnnnnnnnnnnnnnnnnnnnnnnnnnnnnnnnnnnnnnnnnnnnnnnnnnnnnnnnnnnnnnnnnnnnnnnnnnnnnnnnnnnnnnnnnnnnnnnnnnnnnnnnnnnnnnnnnnnnnnnnnnnnnnnnnnnnnnnnnnnnnnnnnnnnnnnnnnnnnnnnnnnnnnnnnnnnnnnnnnnnnnnnnnnnnnnnnnnnnnnnnnnnnnnnnnnnnnnnnnnnnnnnnnnnnnnnnnnnnnnnnnnnnnnnnnnnnnnnnnnnnnnnnnnnnnnnnnnnnnnnnnnnnnnnnnnnnnnnnnnnnnnnnnnnnnnnnnnnnnnnnnnnnnnnnnnnnnnnnnnnnnnnnnnnnnnnnnnnnnnnnnnnnagctcctagggcaccaagcagatttctgcatggtgacagtctcccccagacatggcctgctgggccccagcgaggagtgccagctgaagttggagctgactgctcatacccagnnnnnnnnnnnnnnnnnnnnnnnnnnnnnnnnnnnnnnnnnnnnnnnnnnnnnnnnnnnnnnnnnnnnnnnnnnnnnnnnnnnnnnnnnnnnnnnnnnnnnnnnnnnnnnnnnnnnnnnnnnnnnnncagcacagagcagtggccagaccacccaaaggagctccgcctggactttggctcaacggtgccactgaggacccgtgtgaatcgccagctcattctcaccaatcactccccaatacagacccctttctccctcgagtttgagtacttcgggagcccccaaaacagcctcagcaaaaagaccagcc

SEQ ID NO: 20763 - DNA, 466 bp, Macaca Mulatta
  misc_feature (1)...(466): n = A,T,C or G
gatagtgatgaggaagaagaagacactgaaaatgttgaggctgcaagtagtgggaaagtcaccagaagtccatccccagttcctcaagaagatcatagtgaccctgagatgactgaagaggagaaagagtatcaaatgnnnnnnnnnnnnnnnnnnnnnnnnnnnnnnnnnnnnnnnnnnnnnnnnnnnnnnnnnnnnnnnnnnnnnnnnnnnnnnnnnnnnnnnnnnnnnnnnaaagctcctgcaaaacagctggcacagtccagtgcactggcttccctcactggactcggnnggtggactgggtggttatggatcaggagacagcgaagatgagaggagtgacagaggctctgagtcatctgacactgatgatgaagaattacggcatcgaatccggcaaaaacaggaagctttttggagaaaagaaaaagaacagcagctattacatgataaacagatggaa

SEQ ID NO: 20764 - DNA, 2046 bp, Macaca Mulatta
  misc_feature (1)...(2046): n = A,T,C or G
ggagctggtgaagatcctgcacaaggcactggaggccgcccagcaggagaagagggcatccagcgcatacctggcggcggctgaggacaaggactggctggagctggtgcagcacaaagtgcggcagatcgtggagctgggcgggcgggtggaggctctggagcaggagccggagagcctggcacacacagcgaacctgcgggagcaggaggtgcagtaactacagaagaacgtgcagctgcttatggacaagaaccacgccaagcagcaggtcatctgcaagctctctgaaaaggtcacccaggacttcacgcaaccccctgaccagtctcctttgccccccgacgctgccgacagggacttcctgannnnnnnnnnnnnnnnnnnnnnnnnnnnnnnnnnnnnnnnnnnnnnnnnnnnnnnnnnnnnnnnnnnnnnnnnnnnnnnnnnnnnnnnnnnnnnnnnnnnnnnnnnnnnnnnnnnnnnnnnnnnnnnnnnnnnnnnnnnnnnnnnnnnnnnnnnnnnnnnnnnnnnnnnnnnnnnnnnnnnnnnnnnnnnnnnnnnnnnnnnnnnnnnnnnnnnnnnnnnnnnnnnnnnnnnnnnnnnnnnnnnnnnnnnnnnnnnnnnnnnnnnnnnnnnnnnnnnnnnnnnnnnnnnnnnnnnnnnnnnnnnnnnnnnnnnnnnnnnnnnnnnnnnnnnnnnnnnnnnnnnnnnnnnnnnnnnnnnnnnnnnnnnnnnnnnnnnnnnnnnnnnnnnnnnnnnnnnnnnnnnnnnnnnnnnnnnnnnnnnnnnnnnnnnnnnnnnnnnnnnnnnnnnnnnnnnnnnnnnnnnnnnnnnnnnnnnnnnnnnnnnnnnnttgtgccctcagctgaactcaagcacctactgcgggcaggagtgccccgtgaacaccggcctcgtgtctggaggtggctggtccacctccgtgtccagcacctgcacactccaggctgctaccaggaactgctgagccgaggccgggcccgcgagcaccctgctgcccgccagattgagctggacctgaaccggaccttccccaacaacaagcacttcacctgccccacctccagcttccccgacaagctccgtcgggtgcttctggccttctcctggcagaaccccaccatcggctactgccaaggcctgaacaggnnnnnnnnnnnnnnnnnnnnnnnnnnnnnnnnnnnnnnnnnnnnnnnnnnnnnnnnnnnnnnnnnnnnnnnnnnnnnnnnnnnnnnnnnnnnnnnnnnnnnnnnnnnnnnnnnnnnnnnnnnnnnnnnnnnnnnnnnnnnnnnnnnnnnnnnnnnnnnnnnnnnnnnnnnnnnnnnnnnnnnnnnnnnnnnnnnnnnnnnnnnnnnnnnnnnnnnnnnnnnnnnnnnnnnnnnnnnnnnnnnnnnnnnnnnnnnnnnnnnnnnnnnnnnnnnnnnnnnnnnnnnnnnnnnnnnnnnnnnnnnnnnnnnnnnnnnnnnnnnnnnnnnnnnnnnnnnnnnnnnnnnnnnnnnnnnnnnnnnnnnnnnnnnnnnnnnnnnnnnnnnnnnnnnnnnnnnnnnnnnnnnnnnnnnnnnnnnnnnnnnnnnnnnnnnnnnnnnnnnnnnnnnnnnnnnnnnnnnnnnnnnnnnnnnnnnnnnnnnnnnnnnnnnnnnnnnnnnnnnnnnnnnnnnnnnnnnnnnnnnnnnnnnnnnnnnnnnnnnnnnnnnnnnnnnnnnnnnnnnnnnnnnnnnnnnnnnnnnnnnnnnnnnnnnnnnnnnnnnnnnnnnnnnnnnnnnnnnnnnnnnnnnnnnnnnnnnnnnnnnnnnnnnnnnnnnnnnnnnnnnnnnnnnnnnnnnnnnnnnnnnnnnnnntggaggttgggcacggaccagtggcccagccctgggtgtcccatcaccatgtgatcctggacacgtcccttcccctctctggccctcagtttccccaccgggacattgtgtgcagcaaagccattggttgggctacttcttcataggcatgcacttacccaggggtgcaaccttttgtcacctc

SEQ ID NO: 20765 - DNA, 924 bp, Macaca Mulatta
  misc_feature (1)...(924): n = A,T,C or G
gggggtatttgtctccttagcatcaggtacagtttacactacaatgtaaggtgcagatggagcatcagcagcgagcaaggccattcttcatccttaggatgtggcaatgaaatgacggtgcaaattcctttctctttcgtgaatctttccccccatttcctgtttacatgtaacccaacaaaatgcaatttctggtgccttctgtccaatcagttttttcctctgagtgagacgtacttggctacagatttctgccttgttttgcgacattgtcccattcgcacagatattttgggataataaaggaaaataagctacaaancnnnnnnnnnnnnnnnnnnnnnnnnnnnnnnnnnnnnnnnnnnnnnnnnnncaacaaaccaaaaaacaaaaacaacacacaacaccacaaccccaaaanaaacgctnngcggcacgcccacacccacagaaaaagactntngttgcgcccccctttgccccccagaaaaaacttttttgtaaacctccccttggtgcgccgggggggtctcccaaaagaaaaatttaagaaacgggggcctcacgccgctttcttcctcacggagaacaccaccggcgcgccacccccgggtgctcccgcgatcaacccccaccccaaaaaaaagaaccccggcggggggggtctcccccctannnnnnnnnnnnnnnnnnnnnnnnggagggagacactctcgacgggcctttcttcaagggactaaaaatacaacaggcggtacgccaggacctaggctttaataaaaaaaacaaaagacgccccccccaccccgcaggcctttatttttaacaaaaaaattgtcggccgcgcccttcctacacaaagcacctttcgcccgcaccttggagagatnactcctccacaaaaaccaggccgtgtgagtaaaa

SEQ ID NO: 20766 - DNA, 671 bp, Macaca Mulatta
gggggtggatatgaccaagttctgcaggaaaattccagtgaactataagtcaaaccttgcttaggtagagaaggagcaccaaacagctactccatatataaaagctgtacatttgtgggagttgaatagaatgggagggatgtctagtatatccagtatgattggtaaatgggaaatataattgattctgatcactcttggtcagcttctctttctttatctttctttctccttttttaagaaaacaagagttaagtttaacagttttgcattacaggcttgtgattcatgcttactgtaaagtggaagttgagattattttaaaacttcaagctcagtaattttgaacactgaaacattcatctaggacataataacaaagttcagtattgaccataactgttaaaacaatttttagctttcctcaagttagttatgttgtaggagtgtacctaagcagtaagcgtatttaggttaatgcagtttcacttatgttaaatgttgctcttataccacaaatacattgaaaacttcggatgcatgttgagaaacatgcttttctgtaaaactcaaatataggagctgtgtctacgattcaaagtgaaaacatttggcatgtttgttaattctagctttttggtttaatatcctgtaaggcacgtgagtgtaca

SEQ ID NO: 20767 - DNA, 1419 bp, Macaca Mulatta
  misc_feature (1)...(1419): n = A,T,C or G
cacgcccttccacttcctggtttcatcttcttggcttctgatatttatgaccatgcggtggaattcaataagtctnnnnnnnnnnnnnnnnnnnnnnnnnnnnnnnnnnnnnnnnnnnnnnnnnnnnnnnnnnnnnnnnnnnnnnnnnnnnnnnnnnnnnnnnnnnnnnnnnnnnnnnnnnnnnnnnnnnnnnnnnnnnnnnnnnnnnnnnnnnnnnnnnnnnntacgcaaatttgtgagcctcatcttttccatcttgtacttccagaaccccttcaccctgtggcactggctgggcaccctgtttgtcttcattgggaccttaatgtacacagaggtgtggaacaacctagggaccacaaaaagtgagcctcagaaggacaacaagaagaactgagacctgcctggagtacgtagaccggtgtcatcgtgagggagggaccnnnnnnnnnnnnaccaccgtttcgcttttgttaatgccgagctacccgcagtgctgagccagccatgccacaggaaatcttcaggaggaggggacttctcatattgctcatactgacacgtgtagactgaatagaaacccctcagccctaaaatagaaaaaagaacagttctggactattgaacagcccattcatttatttgttttgtttaccaaaatattcagtattattcttgtttattgaattctgagcctccatgaactactggcttactatccatggtcttggaaaacattgtcccttctgttgctgttctaatgcatctctgccacagcagtcattgtcatcctgtggccttatcccttttgtctcccatcaccttttccttcctcagcagcacctcactgtcagtcagacgctgcaggcaccaccatcaccaggagtggccaagtaaactgagannnnnnnnnnnnnnnnnnnnnnnnnnnnnnnnnnnnnnnnnnnnnnnnnnnnnnnnnnnnnnnnnnnnnnnnnnnnnnnnnnnnnnnnnnnnnnnnnnnnnnnnnnnnnnnnnnnnnnnnnnnnnnnnnnnnnnnnnnnnnnnnnnnnnnnnnnnnnnnnnnnnnnnnnnnnnnnnnnnnnnnnnnnnnnnnnnnnnnnnnnnnnnnnnnnnnnnnnnnnnnnnnnnnnnnnnnnnnnnnnnnnnnnnnnnnnnnnnnnnnnnnnnnnnnnnnnnnnnnnnnnnnnnnnnnnnnnnnnnnnnnnnnnnnnnnnnnnnnnnnnnnnnnnnnnnnnnnnnnnnnnnnnnnnnnnnnnnnnnnnnnnnnnnnnnnnnnnnnnnnnnnnnnnnnnnnnnnnnnnnnnnnnnnnnnnnnnnnnnnnnnnnnnnnnnnnnnnnnnccgggagatgaaggttgcagtgagctgaggtcttgctactgtactcctgcctgtgcaacagagtgagattctatct

SEQ ID NO: 20768 - DNA, 530 bp, Macaca Mulatta
actattatactattacctcctactgtgatgtgaaatgctcatactttataagtaattctatgcaaaattatagccaaaactagtatagaaaataatatgaaactttaaaaagcattggagtgtcagtacgttgaatcagtagtttcactttaactataaacaatttcgtaggacaccatttgggctagtttctgtgtaagtgtaaatactacaaaaacttatttatactgttcttatgtcatttgttatattcatagatttatatgatgatatgacatctggctaaaagcaaattattgcaaaactaaccactatgtacttttttataaatactgtatggacaaaaaaatggcattttttatattaaattgtttagctctggcaaaaaacaattttaagagctggtactaataaaggattattatgactgttaaattatttgtttgggattcctttgagtttattcacaagtagtattttccgtaagataatcatccttttaatttagatgttttgcattttcacaatgt

SEQ ID NO: 20769 - DNA, 643 bp, Macaca Mulatta
tctgcctgagattctttaaggagatagatgggatgaaagacatcaatgaaacagaaggggcgttcttgaagaattcattattttaagcagttagtcatttcattttaaaatttctttagaagctcaggaactattgttaatcaccatctgcctccaggcctttcatctcatgacaaacaaatgtaataatgatatcatgtcactctgttaaatgttcatactgtttcaagggcatatgattagatttatgtttttaaaatctgatgtctccatatcttgatggcttttggcagcatttcacacaaggatataaaatgtggttttcttaaatgaaatgtttcgtagctagaataaaattatttttacaagtagaacattcttggaaagaatttaacacccaataaggggaaaatataatgaaaaatctcaaggttggtaatacagccttactccctctagagctggaggacaggtttgtggttgaggacttctatgtccgacgtctacattcaggttctgacttcatatcttgaaaaaggatttcctccctttttcagtgtctcataaatgctactctggattgttgtaaatattagtgagatgggaggatttacagaagaaaagcaagtctaaaattttcctt

SEQ ID NO: 20770 - DNA, 887 bp, Macaca Mulatta
ggggctttggagacgctgccgccgaggaaagtcctgtactactagccatggtcaaccctaccgtgttcttcgacattgccgtcgacggcgagcctttgggccgcgtctccttcgagctgtttgcagacaaggttccaaagacagcagaaaattttcgtgctctgagcactggagagaaaggatttggttataagggttcctgctttcacagaattattccagggtttatgtgtcagggtggtgacttcacacgccataatggcactggtggcaagtccatctatggggagaaatttgaagatgagaacttcatcctaaagcatacaggtcctggcatcttgtccatggcaaatgctggacccaacacaaatggttcccagtttttcatctgcactgccaagactgagtggttggatggcaagcatgtggtctttggcaaagtgaaagaaggcatgaatatttgtggaggccatggagcgcttttgggtccacggaatgggcaagaaccagcaaagaaaaatcaccctttggctggaatggtggaaccaacatcgaaattaaagttttggacctttgtggttttttatccttaaaccgacccagaaccatttcccttttttggttagctctaagggaagaagccaccaccccttgcacacccccatttttggccttcggcaagctatctcccctaggagaatcctctttggtgggggactcctccgggcttgacacagagtttcccccccatttttgatggggtctctcccacatgggtcctctttccccccctgtggtgtttgtcacccccctccctccatatagggcccccaaaaagaactatgtgggcaatatgtgtgcccatccgaagaatttttttataaagt

SEQ ID NO: 20771 - DNA, 1858 bp, Macaca Mulatta
  misc_feature (1)...(1858): n = A,T,C or G
agctaattttcctgagcaagtagtagataatcttccagctgatatatccactggcatttactatggttgggccagtgttggaagtggagatgtccataagatggtggtgagcataggatggaacccatattacaagaatacgaagaagtctatgnnnnnnnnnnnnagaagtctatggataccatatcatgcataccttcaaagaggacttctatggggaaatcctcaatgttgccattgttgactacctgagaccagaaaagaactatgattctttagagtcacttatttcagcaattcaaggtgatactgaagaagctaagaaatgactagatttaccagaacacttgaaaatcaaagaagacaatttcttccaggtttctaaaagcaaaataatgaatggccactgatgaaaaatcgtattatttattcattcactgttttctagtgtttctgtgtttattactgtccagcctcatcttggttatatactaaaaatcaaacactttgctacagttgtgaattagtttaaaaagtacaatgtagttaccataccatgcttcaactgttaaattaagcccattatgtcatagcactaaaaagattcagttaaaaatcaagatttaaaatatatatattgattaaaatgtaccactagaaaggtattacatgtgtataagtatgggtaaaaaggcaagtcactagtttgagataaaaactaaaattatcatggtaaaataccagcatgtatgttcttgtatagtgtgtacttctaaacagaggcttataaaagtaaatgcattaaggccaagtgcagtggctcacacttgtaatcccagcactttgggaggccaaggtgggaggattgcttgagctgatgagttcaagaccagtctgggcaacatagtaagaccccatttctataaatnnnnnnnnngaaatgcattaaatagaaggttgatagtttatcataaacctgaggggaagaaactcaggcttcgtatttttgatattttgtgcattaatacattacaaacatgaagatgtttctaaaattttgttgtagtcattttctttgcagtcacatcattgtaccaccttcattattgtatagagctgcttcagttctgagtcctctggacttcccttgcctatctgctttttgttgttattgaagacagnnnnnnnnnnnnnnnnnnnnnnnnnnnnnnnnnnnnnnnnnnnnnnnnnnnnnnnnnnnnnnnnnnnnnnnnnnnnnnnnnnnnnnnnnnnnnnnnnnnnnnnnnnnnnnnnnnnnnnnnnnnnnnnnnnnnnnnnnnnnnnnnnnnnnnnnnnnnnnnnnnnnnnnnnnnnnnnnnnnnnnnnnnnnnnnnnnnnnnnnnnnnnnnnnnnnnnnnnnnnnnnnnnnnnnnnnnnnnnnnnnnnnnnnnnnnnnnnnnnnnnnnnnnnnnnnnnnnnnnnnnnnnnnnnnnnnnnnnnnnnnnnnnnnnnnnnnnnnnnnnnnnnnnnnnnnnnnnnnnnnnnnnnnnnnnnnnnnnnnnnnnnnnnnnnnnnnnnnnnnnnnnnnnnnnnnnnnnnnnnnnnnnnnnnnnnnnnnnnnnnnnnnnnnnnnnnnnnnnnnnnnnnnnnnnnnnnnnnnnnnctttgggtcccctcaaacagtacattgcatcattgttcactgtagcaacagatttggtggtgatggggggatagaggtagaagcagatataaggtaattttaaagttaatttattatgaatcactttcccctaatctgcataaaagaagttagaactgattttaataaaaatgctttgttttgcataaaaggtattcagaaaaacatctaaagctg

SEQ ID NO: 20772 - DNA, 625 bp, Macaca Mulatta
ggggagtgaggcaatttctcctgtctccctttgcaggatttcacgcccctaccatgtcctggcctgtggcagggaccctcatggttgagcccactgagtcggaggacaaggcagagctggacagattctgtgatgccatgatcagcattcggcaggaaattgctgacattgaggagggccgcatcgaccccagggtcaatccgctgaagatgtctccgcactccctgacctgcgttacctcctcccactgggaccggccttattccagagaggtggcagcgttcccactccccttcgtgaaaccagagaacaaattctggccaacaattgcccggattgatgacatatatggagatcagcacctggtttgtacctgcccacccatggaagtttatgagtctccattttctgagcaaaagagggcctcttcttagtcctaagtttaagggactgatttgatgcctctccccagatgatttgataagcaagaaagatttcatctcccaccccagcctcaagtaagagttttatatactgtgtatatctctgtaatctctgtcaagttaaatgtaatacagtagctgaagggagtcaaactgctggttggagatggattccttggtat

SEQ ID NO: 20773 - DNA, 316 bp, Macaca Mulatta
tatttgctatatttgatgcatcaaaaataattaagtacgtatgaagttttattattttaaatgtaaaaaatcatagaatttatcaaaattttaaaattaatgaaccaaaaaaacctctatatgcacaccaagacagagaaactttaaaattcatgtttactatgaaaaaaagattgattttctaagttcaaggatagtatgcctataacatataaatgaaatgaaaataaagggaaggaagaatactaaagcaccagcctctttcttccctcctcactttgcttaaatctaagccaaatgctctggattaatatag

SEQ ID NO: 20774 - DNA, 399 bp, Macaca Mulatta
  misc_feature (1)...(399): n = A,T,C or G
agaaatagtgaagtttaacgtccatagaatgaatgtagttattcctgcctctgttgcccacctgttcgcngaaagtacctttatgcttgaaaacattaggttctttggttactgcactgtagtttcaaatggatcctccagatggcattcatgtcttagaaagggcacagccattgtccacaatgcttctgcctactaattctagtggtcttgtgtaattcttgattgcttggcaaagtaaaaatggagctattttctgtctatataaatcttcttatatgaataaccattaaagtgattttgtatnnnnnnnnnnnnnnnnnnnnnnnnnnnnnnnnnntggnnnnnnnnnnnnnnnnnnnnnnnnnnnnnnnnnnnncnnnnnnnnnnnnnnnnnnn

SEQ ID NO: 20775 - DNA, 950 bp, Macaca Mulatta
cccttcccttccaatctcatgaccactaaccatttgctcagcaaaccctctcttggtgggtggcacagaggctggcatcagtcagggccctgtccaaacattgccagctcccagtgagcagggtgacctggtgaggctttgctgtcaccctatgtgcccagtggtggtccctatccttgcccagccctcccctccgcgatagcctggacaacagtgcaagccaaactttatctcattttctctcccacagatggaggtagtgagtaccttcaagagaagcggttcagttcagggtgctgtgcgccggcggtcttcagtcctcagccagcttcaagacgtaaccaatctttctacccctactcacgcaattctctctgctgccaatcccaccagtgctgctgggagtgagtcttgacttcccttttctctcataaatggcatctctggggaagaataagcctccccagctcagccttctctcttttccagtcttgcattctgctcaccgtggcttttctgttctttactgccctgtccagtcgttcctgcccagacggtgtctcttgaaagccatattcttttatgaaacgtattcaacccatggcacttccggacctcccgttctttgctttgtttggtttttgggtttatgtttagtgctccttgtgccattggttctcttttcttgaacttgtctgcctttgccgatggttcttcatgaacttgggccacttctgggggtgtctggtgtcaggctggggccttgctcagtgtttagtggtgcaacgtcagggcagcacgcgggctcagggctgcctttccggggctggaggggtggtgggtgcctttcccacactgtttgccacagaagaatccagcccccgtacccaggaactggagcagcgcttccagcatcctcccttaagtggtttcctaaggatgctgctgtc

SEQ ID NO: 20776 - DNA, 845 bp, Macaca Mulatta
gggcctccccatccggccagagcaggaggccgtgttcttcgccctgttcctgaccatggtgctgtacctgaacaaggtgctggggaacctgctcatcattctgctcatctggctggactctaactttcacactcccatgtatttcttcctcagccacttggccctcactgacgtctccttttcatctgtcactgtccctaagatgctgatggacatgtggactaagtacaaatcgatcctttatgaggaatgcatttctcagatgtatttttaaatattttttactgacctggacagcttccttattacatcaatggcgtatgaccaatatgctgccatatgtcaccctctccattacactgccatcatgagggaagagctctgtgtcttcttagtggctgtatcttggattctgtcttgtgccagctccctctctcacacccttctcctgacccagctgtctttctgtgctgcgaacaccatcccccacatcttctgtgaccttgctgccctgctcaagctgtcctggtcagatatcttcctcaatgagctggtcatgttcacagtaggggtggtggtcattaccctgccattcatgtgtattctggtatcatatggctacactggggccaccatcctgagggtcccttcaaccaaagggatccacaaagcattgtccacacgtgcctcccatctctctgtggtttctctctattatgggtcaatatttggccagtaacatttcccaactgtaagcagttctattgacaaggatgttactgtggctctcatgtacatcgtggtcacacccatgttgaacccctttatctacagccttaggaaca

SEQ ID NO: 20777 - DNA, 433 bp, Macaca Mulatta
ccataaaatgttttcttgaacatttcaatgtgctgttgtttggaaaggggtaatattgtgagctgaatcagcaataagtattagtctttttggactatggtattgttaaaaagtttgcagccctctcagatttgagtgttacttggtttatttatttatggctttaaataaaattgatttaacatttgttttgttttgaagatttttgtgtcacccttgatgatctgaaatacctaaatatgcctcaattgtagatgagaaccagggctttaaaatatatttattacatgtgccttctggaagacatcttgatcatgtggctttaatcgtatcattccaaatgaaagatatttggcattacactgacatatagtatcagctctcatgttttcatgattctgctttaaaaatgaacaacttcttatagcaagga

SEQ ID NO: 20778 - DNA, 636 bp, Macaca Mulatta
  misc_feature (1)...(636): n = A,T,C or G
gatcgactggcaatacctacagaatgctgccaagctcttggccaagtgtcgatacaccctgcagtacacctacccatatgcatattacatggagtccggacccaggaagaagctgtttgaataccagcaggctcagctggaggctgagatcgaaaacctctcatggaaagtggagcgtgcagacagctatgacagaggggacttggagaaccagatgcatatagcggagcagcggaggagaaccctgctgaaagatttccatgacacctaagttgggatgtggatgtgccggggtgaggaagatgtggccacaaggtctcccggctgccatactgcatgctgcaggctctgcctttcatgaccccaggcgacagccagggccccactcctgagagacactggcaacacctcttagttgatttctgttttcttctcttttcactttttgtttctaccagggtagaggccatgttgaactggcctcttttcaggacttttatttccccctggatggttgttgggagggagggaccgtgttttctgaatggctataaatagtataagatccatttacaatttatgtaacttttcaacggttggtccaattatnnnnnnnnnnnnnnnnnnnnnnnnnnn

SEQ ID NO: 20779 - DNA, 1725 bp, Macaca Mulatta
  misc_feature (1)...(1725): n = A,T,C or G
ggatagtaaagctctgaaggatgaaaatctacctcctgtcatctgccaggatgttgaaaatctccagngaaatttgtgaaggagcagaaacaagttcaagaagaaattagtagaatgtcttcaaaagcaatgcttaaggtacaagaagatattaaagctctgaagcagctcctgtcattggctgccagtggaatacagagaaatactctcaacattgacaaattgaaaatagaaactgctcaggnnnnnnnnnnnnnnnnnnnnnnnnnnnnnnnnnnnnnnnnnnnnnnnnnnnnnnnnnnnnnnnnnnnnnnnnnnnnnnnnnnnnnnnnnnnnnnnnnnnnnnnnnnnnnnnnnnnnnnnnnnnnnnnnnnnnnnnnnnnnnnnnnnnnnnnnnnnnnnnnnnnnnnnnnnnnnnnnnnnnnnnnnnnnnnnnnnnnnnnnnnnnnnnnnnnnnnnnnnnnnnnnnnnnnnnnnnnnnnnnnnnnnnnnnnnnnnnnnnnnnnnnnnnnnnnnnnnnnnnnnnnnnnnnnnnnnnnnnnnnnnnnnnnnnnnnnnnnnnnnnnnnnnnnnnnnnnnnnnnnnnnnnnnnnnnnnnnnnnnnnnnnnnnnnnnnnnnnnnnnnnnnnnnnnnnnnnnnnnnnnnnnnnnnnnnnnnnnnnnnnnnnnnnnnnnnnnnnnnnnnnnnnnnnnnnnnnnnnnnnnnnnnnnnnnnnnnnnnnnnnnnnnnnnnnnnnnnnnnnnnnnnnnnnnnnnnnnnnnnnnnnnnnnnnnnnnnnnnnnnnnnnnnnnnnnnnnnnnnnnnnnnnnnnnnnnnnnnnnnnnnnnnnnnnnnnnnnnnnnnnnnnnnnnnnnnnnnnnnnnnnnnnnnnnnnnnnnnnnnnnnnnnnnnnnnnnnnnnnnnnnnnnnnnnnnnnnnnaggctttggcagctcaagtacatctgggtttaacttcagcaatcctggcatcacggcatcagctggtttgacttttggggtgtccaatcctgcctctgcaggttttggaacaggaggacaactccttcagttgaagaaacctccagctggaaacaaaagaggaaaaagataaacatgggttgatgtgttgagagaatccataacagcaccgttcattctatgagtctatttttctaatgatgcagtaattaaattgcatcccaggagatttataaaattttgatatttttccctactctggaatttgaactttcttcatgtttgccatactgaacatcttttttcttgtgaatttaaagtccagttgtgtttcctttttagtttgattctcagtgtaagaaatgttctcattacatcagtgattgataatggttagaaaccattaacctaatactatttaacctagtgtttttgttgatgaggtttacattatgtgaatacatgcacatttgtttcttatacagatggtgtgaactctagggcctatactagaatcaatttgttccttgataaaggccttttgaattacactgcagggcatcttgtgaatatgtatgtaaatatttacagaataatacacacagttgtgtgtgcatatagaatatatttacgccggggtatggtggctcacgcctgtaatcccagcattttgggaggcggaggcaggtggatcacctgaggtcaggagttcgagaccagcctgactaacatggtgaaacccccatctctactaaaaatacaaaaa

SEQ ID NO: 20780 - DNA, 1310 bp, Macaca Mulatta
  misc_feature (1)...(1310): n = A,T,C or G
gggctcctatgacatggtatcaactctgatcaaacacaatactagtctggaccagccctgtgtcaagcgatggtcagcaatgcatgaagcagccaagcaaggccgaaaagatatcatatctctgctgctaaaacacggaggcaatgtccacctgagagatggatttggagtcacaccattaggcgttgctgccgaatatggtcactgtgatgtgttagaacatctaatccacaaaggnnnaggtggtgatgtgcttgctttggcggatgatggggcgtcggtgatgtttgaggcagcaggaggtggcaatcccgactgcatttccctcctgctggaatatggaggaagcggaaatgtacctaatcgagcagggcatcttcctatacaccgagctgcctatgaggggcattatcgcactgaaatatcttatcccagcaacatctaaaaatgcaattcggaaaagtgggctaacaccaattcactcagcagcagatggacaaagtgcacagtgtctagagctgctcattgaaaatggttttgatgtcaacactctacttgctgaccacatttcccagagctatgacgatgagaggaagactgcgctgtattttgccgtttctaataatgatgttcgttgcacagaagtccttctggctgcaggtgcagacccaaacttagatcccctcaactgtctacttgtggcagtgagggccaataattatgaaattgtccggctgcttctctcccatggcgccaatgtcaattgttattttatgcatgtgaatgacactcgtttccccagtgtcattcagtatgccttaaacgacgaggtaatgctgaggctattgctgaataannnnnnnnnnnnnnnnnnnnnnnnnnnnnnnnnnnnnnnnnnnnnnnnnnnnnnnnnnnnnnnnnnnnnnnnnnnnnnnnnnnnnnnnnnnnnnnnnnnnnnnnnnnnnnnnnnnnnnnnnnnnnnnnnnnnnnnnnnnnnnnnnnnnnnnnnnnnnnnnnnnnnnnnnnnnnnnnnnnnnnnnnnnnnnnnnnnnnnnnnnnnnnnnnnnnnnnnnnnnnnnnnnnnnnnnnnnnnnnnnnnnnnnnnnnnnnnnnnnnnnnnnnnnnnnnnnnnnnnnnnnnnnnnnnnnnnnnnnnnnnnnnnnnnnnnnnnnnnnnnnnnnnnnnnnnnnnnnnnnnnnnnnnnnnnnnnnnnnnnnnnnnnnnnnaagcttcctctaccaccagctattcaaagatacatattatttaaagagtatgatctctatggacaagagctaaaattgccataa

SEQ ID NO: 20781 - DNA, 633 bp, Macaca Mulatta
  misc_feature (1)...(633): n = A,T,C or G
cggcacgaggcggtggaccgtgggcagccaggntcggtgaaggatcccaagatggctgggcgaaaacttgctctaaaaaccattgactgggtagcttttgcggagatcataccccagaaccaaaaggccattgctagttccctgaagtcctggcatgagaccctcacctccaggttggctgctttacctgagactccaccagctatcgactgggcttactacaaggccaatgtggccaaggccggcttggtggatgactttgagaaaaagtttaatgccctgaagattcctgtgccacaggataaatatactgcccaggtggatgccgaagaaaaagaagatgtgaaatcttgtgctgagtgggtgtctctctcaaaggccaggattgtagaatatgagaaacagatggagaagatgaagaacttaattccatttgatcagatgaccattgaggacttgaacgaagctttcccagaaaccaaattagacaagaaaaagtatccctattggcctcaccaaccaatcgagaatttataaaattgagtccaggaggaagctctggcccttgtattacacattctggacattaaaaataataattacacagttaaaaaaagaatagcttcaaggggg

SEQ ID NO: 20782 - DNA, 2086 bp, Macaca Mulatta
  misc_feature (1)...(2086): n = A,T,C or G
tgttgaggatacctgtaagaaaggccttagtaggcctttctaaatctcctaaaggatgtgnnnnnnnnnnnnnnnnnnnnnnnnnnnnnnnnnnnnnnnnnnnnnnnnnnnnnnnnnnnnnnnnnnnnnnnnnnnnnnnnnnnnnnnnnnnnnnnnnnnnnnnnnnnnnnnnnnnnnnnnnnnnnnnnnnnnnnnnnnnnnnnnnnnnnnnnnnnnnnnnnnnnnnnnnnnnnnnnnnnnnnnnnnnnnnnnnnnnnnnnnnnnnnnnnnnnnnnnnnnnnnnnnnnnnnnnnnnnnnnnnnnnnnnnnnnnnnnnnnnnnnnnnnnnnnnnnnnnnnnnnnnnnnnnnnnnnnnnnnnnnnnnnnnnnnnnnnnnnnnnnnnnnnnnnnnnnnnnnnnnnnnnnnnnnnnnnnnnnnnnnnnnnnnnnnnnnnnnnnnnnnnnnnnnnnnnnnnnnnnnnnnnnnnnnnnnnnnnnnnnnnnnnnnnnnnnnnnnnnnnnnnnnnnnnnnnnnnnnnnnnnnnnnnnnnnnnnnnnnnnnnnnnnnnaggtttgcaagtgagattgcaggagtagatgatttgggaacaacaggcagaggaaatgatatgcaagttggcacatacattgaaaagatgttcatgtctgaactgtctgggaatatcattgatatctgccctgtaggtgccctaacctctaagccctatgcctttactgcccggccttgggaaacaannnnnnnnnnnnnnnnnnnnnnnnnnnnnnnnnnnnnnnnnnnnnnnnnnnnnnnnnnnnnnnnnnnnnnnnnnnnnnnnnnnnnnnnnnnnnnnnnnnnnnnnnnnnnnnnnnnnnnnnnnnnnnnnnnnnnnnnnnnnnnnnnnnnnnnnnnnnnnnnnnnnnnnnnnnnnnnnnnnnnnnnnnnnnnnnnnnnnnnnnnnnnnnnnnnnnnnnnnnnnnnnnnnnnnnnnnnnnnnnnnnnnnnnnnnnnnnnnnnnnnnnnnnnnnnnnnnnnnnnnnnnnnnnnnnnnnnnnnnnnnnnnnnnnnnnnnnnnnnnnnnnnnnnnnnnnnnnnnnnnnnnnnnnnnnnnnnnnnnnnnnnnnnnnnnnnnnnnnnnnnnnnnnnnnnnnnnnnnnnnnnnnnnnnnnnnnnnnnnnnnnnnnnnnnnnnnnnnnnnnnnnnnnnnnnnnnnnnnnnnnnnnnnnnnnnnnnnnnnnnnnnnnnnnnnnnnnnnnnnnnnnnnnnnnnnnnnnnnnnnnnnnnnnnnnnnnnnnnnnnnnnnnnnnnnnnnnnnnnnnnnnnnnnnnnnnnnnnnnnnnnnnnnnnnnnnnnnnnnnnnnnnnnnnnnnnnnnnnnnnnnnnnnnnnnnnnnnnnnnnnnnnnnnnnnnnnnnnnnnnnnnnnnnnnnnnnnnnnnnnnnnnnnnnnnnnnnnnnnnnnnnnnnnnnnnnnnnnnnnnnnnnnnnnnnnnnnnnnnnnnnnnnnnnnnnnnnnnnnnnnnnnnnnnnnnnnnnnnnnnnnnnnnnnnnnnnnnnnnnnnnnnnnnnnnnnnggattgcaagtcaagtagctgctttggaccttggctataaacctggggtggaagcaattcggaagaaccctcccaaggtgctgtttctcctgggagcagatggaggttgtatcacacgacaggatttgccaaaggattgtttcattatttatcaaggnnnnnnnnnnnnnnnnnnnnnnnnnnnnnnnnnnnnnnnnnnnnnnnnnnnnnnnnnnnnnnnnnnnnngctacatatgtcacactgagcgtatagctcagcagactaaggtagcagtgacacctcctggcttggcaagagaagactggaaaattataagagcactctctgagnnnnnnnnnnnnnnnnnnnnnnnnnnnnnnnnnnnnnnnnnnnnnnnnnnnnnnnnnnnnnnnnnnnnnnnnnnnnnnnnnnnnnnnnnnnnnnnnnnnnnnnnnnnnnnnnnnnnnnnnnnnnnnnnnnnnnnnnnnnngaaccagcagcttcttgctgacccacttgttccacctcagctaactataaaagacttctacatgaca

SEQ ID NO: 20783 - DNA, 436 bp, Macaca Mulatta
tggtgcccccaacaaaaatcgtggaatttgacttggcacaacaaactgtgattgatgccaaagattccaagtctttcaattgtcgtattgaatatgaaaaggttgacaaggctaccaagaacacactctgcaactatgacccttcaaaaacctgttaccaggagcagacccaaagtcatgtatcctggctctgctccaagccctttaaggtgatctgtatttacatttccttttatagtacagattataaactggtacagaaagtgtgccctgactacaactaccacagtgacacaccttactttccctcgggatgaaggtgaacatgggggtgagactaaagcctgaggaattaaaggtcatatgacagggctgatacctcaaagaagaaggtcacatctgttgcctggaatgtgtctaccttgctgctcttgta

SEQ ID NO: 20784 - DNA, 368 bp, Macaca Mulatta
  misc_feature (1)...(368): n = A,T,C or G
gtagcggggactcatctctggagaaggagttcctcggggccccagtggggccctcggtgagcacccccaacagccagcactcttctcccagccgctcactcagngccaactccatcaaggtggagatgtacagcgatgaggagtcgagcagactgctggggccagatgagcggctcctggaaaaggacgacagtgtgattgtggaagattcattgtctgagcccttgggctactgtgatgggagtgggccagagcctcactcccctgggggcatccggctgcctaatggcaagctcaagtgtgacgtttgcggcatggtctgtattggacccaacgtgctcatggtgcacaagcgcagccacactggt

SEQ ID NO: 20785 - DNA, 1368 bp, Macaca Mulatta
  misc_feature (1)...(1368): n = A,T,C or G
ggtgctggagatgtgcatgaaccactgtggggagaagttccacagtgaggtggccaaatttcgtttcctgaacgagctgatcaaagtgttgtccccaaannnnnnnnnnnnnnnnnnnnnnnnnnnnnnnnnnnnnnnnnnnnnnnnnnnnnnnnnnnnnnnnnnnnnnnnnnnnnnnnnnnnnnnnnnnnnnnnnnnnnnnnnnnnnnnnnnnnnnnnnnggaattataaaacaagaccctaaactaccagtggataaaatcttacccnnnnnnnnnnnnnnnnnnnnnnnnnnnnnnnnnnnnnnnnnnnnnnnnnnnnnnngcttctgacaaggcttctaaagagcaaccaccctgaggaccttcaggccgcaaaccggttaatcaagaatttggtcaaggaggnnaggaacaagaaaaatcggagaaggtgtccaagagggtcagtgcggtggaggaagtgcgaagccatgtgaaggtactgcaggagatgctgagcatgtaccgcaggccagggcaggccctgcccgaccaggaggccctgcaggnnnnnnnnnnnnnnnnnnnnnnnnnnnnnnnnnnnnnnnnnnnnnnnnnnnnnnnnnnnnnnnnnnnnnnnnnnnnnnnnnnnnnnnnnnnnnnnnnnnnnnnnnnnnnnnnnnnnnnnnnnnnnnnnnnnnnnnnnnnnnnnnnnnnnnnnnnnnnnnnnnnnnnnnnnnnnnnnnnnnnnnnnnnnnnnnnnnnnnnnnnnnnnnnnnnnnnnnnnnnnnnnnnnnnnnnnnnnnnnnnnnnnnnnnnnnnnnnnnnnnnnnnnnnnnnnnnnnnnnnnnnnnnnnnnnnnnnnnnnnnnnnnnnnnnnnnnnnnnnnnnnnnnnnnnnnnnnnnnnnnnnnnnnnnnnnnnnnngttgctggtcagaattgctgtgaggaaaagaggaatccctcctccagcacactgccaggcggtggcgttcagaacccttctgcagacaggaatttgttggacctcctctcaccacagccagctccaggccctctgnnnnnnnnnnnnnnnnnnnnnnnnnnnnnnnnnnnnnnnnnnnnnnnnnnnnnnnnnnnnnnnnnnnnnnnnnnnnnnnnnnnnnnnnnnnnnnnnnnnnnnnnnnnnnnnnnnnnnnnnnnnnnnnnnnnnnnnnnnnnnnnnnnnnnnnnnnnnnnnnnnnnnnnnnnnnnnnnnnnnnnnnnnnnnnnnnnnnnnnnnnnnnnnnnnnnnnnnnnnnnnnnnnnnnnnnnnnnnnnnnnnnnnnnnnnnnnnnnnnnnnnnnnnnnnnnnnnnnnnnnnnnnnnnnnnnnnnnggatatcatgtttcaggtggctgtgccaaa

SEQ ID NO: 20786 - DNA, 770 bp, Macaca Mulatta
  misc_feature (1)...(770): n = A,T,C or G
gggaggggagctttaggtaccggaccggcagtgtaaacagagacgctgcaaatcgcttgtggatggtgtaggccgctgcaggccaccatgaaccggcttccggatgattacgacccctacgcggttgaagagcctagcgacgaggatccggctttaagcagctctgaggatgaagtggatgtgcttttacatggaactcctgaccaaaaacgaaaactcatcagagaatgtcttactggagaaagtgaatcatctagtgaagatgaatttgaaaaggaaatggaagctgaattaaattctaccatgaaaacaatggaggacaagttatcctctctgggaactggatcttcctcaggaaatggaaaagttgccacagctcctacaaggtactacgatgatatatattttgattctgattctgaggatgaagacaaagcagtacaggtgannnnnnnnnnnnnnnnnnnncaacacaagattccaacaaatgacgaattactgtatgatcctganaaagataacagagatcaggcctgggttgatgcacagagaaggggttaccatggtttgggactacagaggtcatgtcaacaacagcctgttccaaatagtgatgctgtcttgaattgtcctgcctgcatgaccacactttgcccttgattgtcaaggcatgaatcgtacaaaactcaatatagagcaatgtttggtgatgaattgttctattaacaaagaggaaggtcttaagatataagccctcgagaaacaagaag

SEQ ID NO: 20787 - DNA, 755 bp, Macaca Mulatta
gggggcctgctcagctactgatgcacaggctgctgcagaggttaccggttttcccaacttgtagagacggctttgctcattaccaggcatccttcccatgtaggcgtagagaaggcggctgagggaccctcgcaacggatttccatcccagagaccgatacgagtgggtccattcctgttaccagctcctacgccttccgactaacctcaaaaaccaggtggtttgtaaatatttgaattacgttatgggattgctagacagactttcagtcttgcttggcctgaagaagaaagaggttcatgttttgtgccttgggctagataatagtggcaaaacaactatcattaacaaacttaaaccttcaaatgctcaatctcaaaatgtccttccaacaataggattcagcatagagaaattcaaatcatccagtttatcatttacagtgtttgacatgtcaggtcaaggaagatacagaaatctctgggaacactattataaagaaggtcaagctattatttttgtcgttgacagtagtgataggttaagaatggttgtggccaaagaagaactctatactcttctgaataatcctgatattaaacaccgtcgacatattccaatcttattctttgcaaataaaatggatcttagagatgcagtgacatctgtaaaagtgtctcagttgctgtgtttagagaacatcaaagataaaccctggcatatttgtgctagtgatgccataaaaggagaagga

SEQ ID NO: 20788 - DNA, 709 bp, Macaca Mulatta
  misc_feature (1)...(709): n = A,T,C or G
ctgtcgatatccaaccagcatgccttggactttattgtgggaagaccctattatttaaaaacggctcaactgaaatatatggagaatgtggggtannnnnnnnnnnnnnnnnnnnnnnnnnnnnnnnnnnnnnnnnnnnnnnnnnnnnnnnnnnnnnnnnnnnnnnnnnnnnnnnnnnnnnnnnnnnnnnnnnnnnnnnnnnnnnnnnnnnnnnnnnnnnnnnnnnnnnnnnnnnnnnnnnnnnnnnnnnnnnnnnnnnnnncacatcactgcattatttgaatgcagcatggcagctattatcaccttacttgtgagtgatccagttggtgttctttatattcgttcatgtcgagtattgatgctttctgactggtacacgatgctttacaacccaagtccagattacgttaccacagtgcactgtactcatgaagctgtctacccactnnnnnnnnnnnnnnnnnnnnnnnnnnnnnnnnnnnnnnnnnnnnnnnnnnnnnnnnnnnnnnnnnnnnnnnnnnnnnnnnnnnnnnnnnnnnnnnnnnnnnnnnnnnnnnnnnnnnnnnnnnnnnnnnnnnnnnnnnnnnnnnnnnnnnnnnnnnnnnnnnnnnnnnnnnnnnnnnnnnnnnattacgccttcccatacattatattagtgttatctttggttactctggctgtatacatgtctgcttctgaaatagag

SEQ ID NO: 20789 - DNA, 2208 bp, Macaca Mulatta
  misc_feature (1)...(2208): n = A,T,C or G
ntggcccccattcctccagcagaggtcgatgggctggagattaggactggacagaaggcatatttgaggatgcagnnnnnnnnnnnnnnnnnnnnnnnnnnnnnnnnnnnnnnnnnnnnnnnnnnnnnnnnnnnnnnnnnnnnnnnnnnnnnnnnnnnnnnnnnnnnnnnnnnnnnnnnnnnnnnnnnnnnnnnnnnnnnnnggggagcagaccaaggcgctggtcacccaactcaccctcttcaaccagatcctggtggagctgcgggatgatatacgagaccaggtnnnnnnnnnnnnnnnnnnnnnnnnnnnnnnnnnnnnnnnnnnnnnnnnnnnnnnnnnnnnnnnnnnnnnnnnnnnnnnnnnnnnnnnnnnnnnnnnnnnnnnnnnnnnnnnnnnnnnnnnnnnnnnnnnnnnnnnnnnnnnnnnnnnnnnnnnnnnnnnnnnnnnnnnnnnnnnnnnnnnnnnnnnnnnnnnnnnnnnnnnnnnnnnnnnnnnnnnnnnnnnnnnnnnnnnnnnnnnnnnnnnnnnnnnnnnnnnnnnnnnnnnnnnnnnnnnnnnnnnnnnnnnnnnnnnnnnnnnnnnnnnnnnnnnnnnnnnnnnnnnnnnnnnnnnnnnnnnnnnnnnnnnnnnnnnnnnnnnnnnnnnnnnnnnnnnnnnnnnnnnnnnnnnnnnnnnnnnnnnnnnnnnnnnnnnnnnnnnnnnnnnnnnnnnnnnnnnnnnnnnnnnnnnnnnnnnnnnnnnnnnnnnnnnnnnnnnnnnnnnnnnnnnnnnnnnnnnnnnnnnnnnnnnnnnnnnnnnnnnnnnnnnnnnnnnnnnnnnnnnnnnnnnnnnnnnnnnnnnnnnnnnnnnnnnnnnnnnnnnnnnnnnnnnnnnnnnnnnnnnnnnnnnnnnnnnnnnnnnnnnnnnnnnnnnnnnnnnnnnnnnnnnnnnnnnnnnnnnnnnnnnnnnnnnnnnnnnnnnnnnnnnnnnnnnnnnnnnnnnnnnnnnnnnnnnnnnnnnnnnnnnnnnnnnnnnnnnnnnnnnnnnnnnnnnnnnnnnnnnnnnnnnnnnnnnnnnnnnnnnnnnnnnnnnnnnnnnnnnnnnnnnnnnnnnnnnnnnnnnnnnnnnnnnnnnnnnnnnnnnnnnnnnnnnnnnnnnnnnnnnnnnnnnnnnnnnnnnnnnnnnnnnnnnnnnnnnnnnnnnnnnnnnnnnnnnnnnnnnnnnnnnnnnnnnnnnnnnnnnnnnnnnnnnnnnnnnnnnnnnnnnnnnnnnnnnnnnnnnnnnnnnnnnnnnnnnnnnnnnnnnnnnnnnnnnnnnnnnnnnnnnnnnnnnnnnnnnnnnnnnnnnnnnnnnnnnnnnnnnnnnnnnnnnnnnnnnnnnnnnnnnnnnnnnnnnnnnnnnnnnnnnnnnnnnnnnnnnnnnnnnnnnnatggggatgggcatcaggacaccaaggacaactgcccacagctgccaaatagctcccagctggactcagacaacgatggacttggagatgagtgtgatggggatgatgacaatgatggcatcccagattacgtgcctcctggtcctgataactgccgcctggtacccaatcccaatcagaaggactcagatggnnnnnnnnnnnnnnnnnnnnnnnnnnnnnnnnnnnnnnnnnnnnnnnnnnnnnnnnnnnnnnnnnnnnnnnnnnnnnnnnnnnnnnnnnnnnnnnnnnnnnnnnnnnnnnnnnnnnnnnnnnnnnnnnnnnnnnnnnnnnnnnnnnnnnnnnnnnnnnnnnnnnnnnnnnnnnnnnnnnnnnnnnnnnnnnnnnnnnnnnnnnnnnnnnnnnnnnnnnnnnnnnnngatacacggccttcaatggtgtggactttgaaggcaccttccatgtgaacacagtgactgacgatgactacgcaggctttctcttcagttatcaagacagtggccgattctacgtagtcatgtggaagcagactgagcagacctactggcaggctacaccctttcgggcggttgcccagcccgggctgcagctcaaggnaggcagtgacatcagtgtctggcccaggtgagcacctccgaaatgccctgtggcatactggccacacccctgatcaggtgcgactactgtggacggacccacgaaatgtgggctggcgggacaagacctcctatcgctggcagcttctgcaccggcctcaagttggctacattcgg

SEQ ID NO: 20790 - DNA, 115 bp, Macaca Mulatta
caggttctcaggcgagacgcacctgctattgccgaaccggccgttgttatacccctgagttccactccgggaagtgcgtattcaatggccgcacccacaaactctgctgtcgctg

SEQ ID NO: 20791 - DNA, 1190 bp, Macaca Mulatta
  misc_feature (1)...(1190): n = A,T,C or G
ggttcaaggaactggatttcaacatcaacangggtttcatttttgatccaattagccaattttggaaaaaagcccatattgatcaaggggatttaaaattaaaaagcaccttttccttgctacatatagattctttaaactaaaactccaagcagatatcagatacaaaacccaactgcaggattgttttaattgactatgacatggacttgttgcttacattttttaaaagtcatcatttatacagttatttaaaaaccatatgctctattgggcagaaaactttaaaatacatttttgagaattatactccatagtaaatacctatgtacttatactgaattcttgtgtcactgagaaccttaaccctactcttaagacatcttgcaataacttgcaactatcaattttttggagacatttttggtatttcggtcaagtgctgaagggattttactccaaaatctagggctagaacaaacttccaacactcccatacccaggtaacacaattatgaatattcagaaatcaatacctcttagatcgtttcagagctatgcctgataaatgacatttgaaaaataataatatagaaataattagctgaatttatactcctgaagccacttcatcttgaggctttatatttacagtgttgtccaggaggaattaaagaaaaaagttacactaattatttgtcaagctctattccagatgtctgcttaagacttgcagtttatgcgaaggtgaaccattatcttctaaaattacaccacactacgtcttgtagaactaatagtaaaatacatcaacccaaatcttatgaaggcagcacatctttaggagtaactagtatataaaaagtatcaacatcagtggtttgaatataaaaatttatttttaagtcaaagtatgcaacaaataaacctacagaaaacagattttcccatcacaatctgttgctttaccaaataatattttgaaaacacattccttcagtcattataaagttcttaaaatacaaaagaaattaaatctgtaagaaagtctagtagaccagatgctgttgtcaagacttgtatgttggtgtctctcgctttcagtacatcccacgccatccacctccactcatgccaccttgcccgtagtaacctccactgcctcaccaaccacgggccataaccaccca

SEQ ID NO: 20792 - DNA, 273 bp, Macaca Mulatta
  misc_feature (1)...(273): n = A,T,C or G
gatgtcagtgggggaggacctgcacgttcttacccagttggaggcctgtgttactatctttctcctcccgagtccatgggcgccatctttgaggatcccgtccatgtcgttgtttatatcatcttcatgttgggatcatgcgcatttttctctaagacatggattgaagtgtctggctcctcagccaaagatgtangtagctaaacagctgaaagaacagcagatggtaatgaggggccaccgggatacctctatggttcatgagcttaatag

SEQ ID NO: 20793 - DNA, 361 bp, Macaca Mulatta
ggggtaggcctggggtggtggcttggccgggactcctgccctggccccacctgctcacctcagctcctgccgttctttcatccaggcagctagcacctgcctcgactccgcgtcctgataggtctggggacacaaggtgtgcattgggtgcatgcacccaggcggctactgccctggccctcccacagccacctcggcccacacctgcatgcgctccagcagccccgtgagtgcttgctgccacgtcagcgagtgcatgtactgctctgtgttgatgatgcggatctcacgctccagctcagggatgatggcacccgtgcgccagccatgccgcagcatgagatcctggtgggtggggcgg

SEQ ID NO: 20794 - DNA, 406 bp, Macaca Mulatta
cacagggacaagaatatcaaaatttatgacatgtacgtaggccttgtaaacctcagggtggccggcaaccacacccagtggtatgaggtgaacagggtgatcctgcaccccacatatgaggtgtaccaccccgtcggaggtgacgtggccctggtgcagctgaagacccgcattgtgttttctgactccgtgctcccggtctgccttgcaactccagaagtcgaccttaccagtgccaattgctgggctacaggatggggactagtctcaaaacaaggtaggaatacagtgcagggctttgtgggcaggatgaaggcttctattccaccacagggaagaaaatgctctgccaactaaggggggccaggtgtttggggacaggaatccccacccgtcaatcaacatt

SEQ ID NO: 20795 - DNA, 179 bp, Macaca Mulatta
gggccctttggaactggtggagaagttgtacccagaagcagaggaaataggagccagtgtccgggatctgcctggtctgaaacccctctgggtcgagcaagagcatggcttcgattagcccttatgcaaaaaaaaatggccgattacttacgttgcttgattattcagagggatctctt

SEQ ID NO: 20796 - DNA, 82 bp, Macaca Mulatta
cagggatctctccacatgtggattgacatctttcctcgagatgtgcctgccccacccccagttgacatcaagcctcggcagc

SEQ ID NO: 20797 - DNA, 583 bp, Macaca Mulatta
  misc_feature (1)...(583): n = A,T,C or G
tcctaggactatacagacggaaaaggcccactttgggggataatgctgagagacactatgaaatcttggaatgatagccagtcagatctgtgtagcactgaccaagaagaggaagaagagatgatttttggtgaaaatgaagatgatttggatgagatgatggatttaagtgatctgcctacctcactttttgcttgcagcgtccatgaagccgtgtttgaggcacaagaggagaaggnnnnnnnnnnnnnnnnnnnnnnnnnnnnnnnnnnnnnnnnnnnnnnnnnnnnnnnnnnnnnnnnnnnnnnnnnnnnnnnnnnnnnnnnnnnnnnnnnnnnnnnnnnnnnnnnnnnnnnnnnnnnnnnnnnnnnnnnnnnnnnnnnnnnnnnnnnnnnnnnnnnnnnnnnncaggtgcagatgtctggtgaagtgcgggacaagtcctatctcctgccgccccagcctgtcaagcagttcctcatctctcctccagcctctcccccggtggggtggaagcagagcgaagatgcgatgcctgttataaattatgatttactctgtgctgtttccaaattgggaccag

SEQ ID NO: 20798 - DNA, 703 bp, Macaca Mulatta
atggcgctatggatgtatgcggagccccccgagggcagcggccggaatgggctctcccggttgcgggaagcgggcatcgctcggacccaggacactacagtttctctatgcgatctccagagctcgccttacccggggaatgcagcccacagaattcttccagtctctgggtggggacggagaagggaacgttcagattgagatggcccatggcaccaccacgcttgccttcaagttccagcatggagtgattgtagcagtggattctcgggcctcagctgggtcctacattgataccttacgggtgaacaaggtgattgagattaacccttacctgcttggcaccatgtctggctgtgcagcagactgtcagtactgggagcgcctgctggccaaggaatgcaggctgtactatctgcgaaatggagatcgtatttcagtgtcggcagcctccaagctgctgtccaacatgatgtgccagtaccggggcatgggcctctctatgggcagcatgatctgtggctgggataagaagggtcctggactctactacgtgaatgaacatgggactcggctctcaggaaatatgttctccactggtagtgggaacacttatgcctacggggtcatggacagtggctatcggcctaatcttagccctgaagaggcctatgaccttggccgcagggcgattgctcatgcc

SEQ ID NO: 20799 - DNA, 2576 bp, Macaca Mulatta
  misc_feature (1)...(2576): n = A,T,C or G
agttcagcccgccgccgctcttgcgggtcggactggggctgnnnnnnnnnnnnnnnnnnnnnnnnnnnnnnnnnnnnnnnnnnnnnnnnnnnnnnnnnnnnnnnnnnnnnnnnnnnnnnnnnnnnnnnnnnnnnnnnnnnnnnnnnnnnnnnnnnnnnnnnnnnnnnnnnnnnnnnnnnnnnnnnnnnnnnnnnnnnnnnnnnnnnnnnnnnnnnnnnnnnnnnnnnnnnnnnnnnnnnnnnnnnnnnnnnnnnnnnnnnnnnnnnnnnnnnnnnnnnnnnnnnnnnnnnnnnnnnnnnnnnnnnnnnnnnnnnnnnnnnnnnnnnnnnnnnnnnnnnnnnnnnnnnnnnnnnnnnnnnnnnnnnnnnnnnnnnnnnnnnnnnnnnnnnnnnnnnnnnnnnnnnnnnnnnnnnnnnnnnnnnnnnnnnnnnnnnnnnnnnnnnnnnnnnnnnnnnnnnnnnnnnnnnnnnnnnnnnnnnnnnnnnnnnnnnnnnnnnnnnnnnnnnnnnnnnnnnnnnnnnnnnnnnnnnnnnnnnnnnnnnnnnnnnnnnnnnnnnnnnnnnnnnnnnnnnnnnnnnnnnnnnnnnnnnnnnnnnnnnnnnnnnnnnnnnnnnnnnnnnnnnnnnnnnnnnnnnnnnnnnnnnnnnnnnnnnnnnnnnnnnnnnnnnnnnnnnnnnnnnnnnnnnnnnnnnnnnnnnnnnnnnnnnnnnnnnnnnnnnnnnnnnnnnnnnnnnnnnnnnnnnnnnnnnnnnnnnnnnnnnnnnnnnnnnnnnnnnnnnnnnnnnnnnggataagtccttgtgttcctggacagccactgtgaagtgaatatgatgtggctgcagcccttgctggccgccatccgtgaggaccggcatactgtggtgtgcccagtgatcgacatcatcagcgccgataccctggcctacagctcgtcccctgtcgtccgcggagggttcaactgggggctgcacttcaaatgggatcttgtccccctttctgagctaggagaagcggagggagccactgcaccaataaagtnnnnnnnnnnnnnnnnnnnnnnnnnnnnnnnnnnnnnnnnnnnnnnnnnnnnnnnnnnnnnnnnnnnnnnnnnnnnnnnnnnnnnnnnnnnnnnnnnnnnnnnnnnnnnnnnnnnnnnnnnnnnnnnnnnnnnnnnnnnnnnnnnnnnnnnnnnnnnnnnnnnnnnnnnnnnnnnnnnnnnnnnnnnnnnnnnnnnnnnnnnnnnnnnnnnnnnnnnnnnnnnnnnnnnnnnnnnnnnnnnnnnnnnnnnnnnnnnnnnnnnnnnnnnnnnnnnnnnnnnnnnnnnnnnnnnnnnnnnnnnnnnnnnnnnnnnnnnnnnnnnnnnnnnnnnnnnnnnnnnnnnnnnnnnnnnnnnnnnnnnnnnnnnnnnnnnnnnnnnnnnnnnnnnnnnnnnnnnnnnnnnnnnnnnnnnnnnnnnnnnnnnnnnnnnnnnnnnnnnnnnnnnnnnnnnnnnnnnnnnnnnnnnnnnnnnnnnnnnnnnnnnnnnnnnnnnnnnnnnnnnnnnnnnnnnnnnnnnnnnnnnnnnnnnnnnnnnnnnnnnnnnnnnnnnnnnnnnnnnnnnnnnnnnnnnnnnnnnnnnnnnnnnnnnnnagatctggatttataatgaagagcatgaattggttttaaatagtctcctttgtctagatatgtcagagactcgctcatcagacccaccacggctcatgaaatgccacgggtcaggaggatcccagcagtggacctttgggnnnnnnnnnnnnnnnnnnnnnnnnnnnnnnnnnnnnnnnnnnnnnnnnnnnnnnnnnnnnnnnnnnnnnnnnnnnnnnnnnnnnnnnnnnnnnnnnnnnnnnnnnnnnnnnnnnnnnnnnnnnnnnnnnnnnnnnnnnnnnnnnnnnnnnnnnnnnnnnnnnnnnnnnnnnnnnnnnnnnnnnnnnnnnnnnnnnnnnnnnnnnnnnnnnnnnnnnnnnnnnnnnnnnnnnnnnnnnnnnnnnnnnnnnnnnnnnnnnnnnnnnnnnctgggcgtgttagcagaggtgacacgcgtctgacagagatgggagctctgagtgtccacaggtgaagaagtnnnnnnnnnnnnnnnnnnnnnnnnnnnntttcacccagacattaaggttatttctgagctgctgttaaggaatttcttgcttatagaggcaaaccagaatatcattttaaccctagaattgggcttgtacagaaggataaaacccaggaaaatggatatttctattcagatttatttatgcctctttttaatcttctttaatgatgcagtggtttttatctgatcaggaacttgtcatgatttcctttcttatacttcataggagatagtgctnnnnnnnnnnnnnnnnnnnnnnnnnntgtttagtatgttgtgagtagatcatctaaaagaactgaagctacattatgtttttaacttcagaaggcatcatttataagacagtataagaggcagttaagtattataaattattttgatgaattgtgatactatctacatttaaaataaaaaatccttttgatta

SEQ ID NO: 20800 - DNA, 587 bp, Macaca Mulatta
  misc_feature (1)...(587): n = A,T,C or G
attctgcctaaatagaatactataggagcttaagtttacttccattaggtgaagatagaaaggataggctggacatacccaaagtagccagctggtcttcagcaaaacaaaaaagctaatgtcttctaatatcctgattttcagaaatggggaaattgcagattttgacaagcttaatgtgtatatgtagcaaaatggtttataagtacttggaaaaggaggtaatcgccaaatagttgccctttttttattatttttctgagatagttactcttattgcccaggccggagtgcggtggtgtgatctcagctcactctgcaacctctannnnnnnnnnnnnnnnnnnnnnnatgcccnnnnnnnnnnnnnnnnnnnnnnnnnnnnnacaagtcactatgcctggctaattttgtattttaagtagagaannnnnnnnnnnnnnnnnnnnnnnnnnnnnnnnnnnnnnnnnnnnnnnntaatctgcccaactctgtagctggaagtcagggaccccaaacggagggaccagctgaagctgcggcagaagaacataaattgtgaagattcatggaacattattagttcc

SEQ ID NO: 20801 - DNA, 277 bp, Macaca Mulatta
  misc_feature (1)...(277): n = A,T,C or G
ggcagtaaacggctttgaccctgctcctcctcctcctgntctgggctcctcgcgtccgtcgtcagcgccgggtatgctgcctctcagtgtgtgagtgcccagcctccaggtgggggctccctgccctcctccagcaacccaggacacccacgcctcacccctcggtgcctgggcccagccccgtgcccctccgtctgcctccgcacggctggcagagggcaggctgcatgcagtggcggctgctgggccctgcccagccccggaactctgcgtgata

SEQ ID NO: 20802 - DNA, 863 bp, Macaca Mulatta
  misc_feature (1)...(863): n = A,T,C or G
ggaatctttgtctgaagtggaagaaaaatacaagaaagccatggtttccaatgcacagttagacaatgagaagaacaatttgatctaccaagtagacacactcaaggatgttattgaagagcaggaggaacagatggcagaattttatagagaaaatgaagaaaaatcaaagnnnnnnnnnnnnnnnnnnnnnnnnnnnnnnnnnnnnnnnnnnnnnnnnnnnnnnnnnnnnnnnnnnnnnnnnnnnnnnnnnnnnnnnnnnnnnnnnnnnnnnnnnnnnnnnnnnnnnnnnnnnnnnnnnnnnnnnnnnnnnnnnnnnnnnnnnnnnnnnnnnnnnnnnnnnnnnnnnnnnnnnnnnnnnnnnnnnnnnnnnnnnnnnnnnnnnnnnnnnnnnnnnnnnnnnnnnnnnnnnnnnnnnnnnnnnnnnnnnnnnnnnnnnnnnnnnnnnnnnnnnnnnnnnnnnnnnnnnnnnnnnnnnnnnnnnnnnnnnnnnnnnnnnnnnnnnnnnnnnnnnnnnnnnnnnnnnnnnnnnnnnnnnnnnnnnnnnnnnnnnnnnnnnnnnnnnnnnnnnnnnnnnnnnnnnnnnnnnnnnnnnnnnnnnnnnnnnnnnnnnnnnnnnnnnnnnnnnnnnnnnnnnnnnnnnnnnnnnnnnnnnnnnnnnnnnnnnnnnnnnnnnnnnnnnnnnnnnnnnnnnnnnnnnnnnnnnnnnnnnnnnnnnnnnnnnnnnnnnnnnnnnnnnnnnnnnnnnnnngttacgaacagcactggacaagattgaggagatggagatgaccaacagccacctggccaagcggctggagaagatgaaggccaacaggacagcacttttggcccagcagtag

SEQ ID NO: 20803 - DNA, 400 bp, Macaca Mulatta
  misc_feature (1)...(400): n = A,T,C or G
gggagaacaatgacagtaaagtttagctgggagttgtctttgacagtgtttatttgatactgtctctcagagtttgcaaaccagattgtacaagtcattagcatcagatagctttaaagttgtgaccttcttgtacatgaatcttctagccagtttcctttcctttgtaataggtaatgagacatgaaatcctagaatgtgtgagaagttcagacagtaggcataaggaaactcgtttgcaggctgtctgtccagggctgcttcctgtcctgaaggggccagtgaatcttgggtatgtttattttatcctcacatttgtgtttttttagaagtgaatggtcaataaatggcttatctttcntnncnnnnnnnnnnnnnnnnnnnnnnnnnnnnnnnnnnn

SEQ ID NO: 20804 - DNA, 111 bp, Macaca Mulatta
atctgtgaaccataaagtagccctcatcagacactgaattggcagtgccttgctcttggattttccagcccccagaactgtgagaaataaatttctattgtttataagcta

SEQ ID NO: 20805 - DNA, 755 bp, Macaca Mulatta
  misc_feature (1)...(755): n = A,T,C or G
tggccctcccttttctccctgaagcccacccgttgcgaggtggggttcctgcccagatagcagcaacacagcccccagcccgggatagccctgctagccctggaagaggagaggggtgggtggcgcacagcagacaccggctcctctgcctgcccctgggatgcacgctgtgagcaagaccctggacctgggcagnnnnnnnnnnnnnnnnnnnnnnnnnnnnnnnnnnnnnnnnnnnnnnnnnnnnnnnnnnnnnnnnnnnnnnnnnnnnnnnnnnnnnnnnnnnnnnnnnnnnnnnnnnnnnnnnnnnnnnnnnnnnnnnnnnnnnnnnnnnnnnnnnnnnnnnnnnnnnnnnnnnnnnnnnnnnnnnnnnnnnnnnnnnnnnnnnnnnnnnnnnnnnnnnnnnnnnnnnnnnnnnnnnnnnnnnnnnnnnnnnnnnnnnnnnnnnnnnnnnnnnnnnnnnnnnnnnnnnnnnnnnnnnnnnnnnnnnnnnnnnnnnnnnnnnnnnnnnnnnnnnnnnnnnnnnnnnnnnnnnnnnnnnnnnnnnnnnnnnnnnnnnnnnnnnnnnnnnnnnnnnnnnnnnnnnnnnnnnnnnnnnnnnnnnnnnnnnnnnnnnnnnnnnnnnnnnnnnnnnnnnnnnnnnnnnnngctcccgccctgagggcagattcagcgccctgatctgggtggggcccccaggtcagccccctctgaagctcatccaggcggtggcaggctcccagcactgtgcccag

SEQ ID NO: 20806 - DNA, 197 bp, Macaca Mulatta
gggcagcgaggcacgggagggaaaaagcccatcgtggttcaacccggccgaggctgtccaggtcctgcgctactgctgcctcctggcccagagtatctccagtcaggtgtctgccagcgacatcggcgtcatcacgccctaccggaagcaggtacgccctgcccaggcacgcctggctctgcgaggcccctgcagcc

SEQ ID NO: 20807 - DNA, 668 bp, Macaca Mulatta
tcagaactaactggccaaccgtaagcctcccgctccaaagagtacatatgagtcaaataccaaacagctatcatatgatgaggttgtaaatcagtctagtccaagcaactgtactgtatactgtggaggtgttacttctgggctaacagaacaactgatgcgtcagactttttcaccatttggacaaataatggaaattcgagtctttccagataaaggatattcgtttgttcggttcaattcccatgaaagtgcagcacatgcaattgtttctgttaatggtactaccattgaaggtcatgttgtgaaatgctattggggcaaagaaactcttgatatgataaatcccgtgcaacagcagaatcaaattggatatccacaaccttatggccagtggggtcagtggtatggaaatgcacaacaaattggccagtatatgcctaatggttggcaagttcctgcatatggaatgtatggccaggcatggaaccagcaaggatttaatcagacacagtcttctgcaccatggatgggaccaaattatggagtgcaaccgcctcaagggcaaaatggcagcatgttgcccagtcagccttctgggtatcgagtggcagggtatgaaacccagtgaaaaaggactccagaatctaaagccagtggcttgaggc

SEQ ID NO: 20808 - DNA, 732 bp, Macaca Mulatta
  misc_feature (1)...(732): n = A,T,C or G
gaggctcncctgctgcttacagggccccactggacttatatcgggacctgcaggaggacgaggggtcggaggacgccagcctgtacggggagccgtcaccaggccctgactcgccctcggcagaggtggcctacaggccgccactgtgggagcagagtgccaaactgtggggcactgggggccgggcctgggagcccccagctgaggagctgccacaggccagcagcccaccctatggggccttggaggaggggctagaaccagaaccctccgccttctcctttgtttctctgcgacgtgagctgagtaggcctggggacctggccacccctgaaagctctgcaggggccagcccgaggcgtattcgggcagagggggtaccggcctcagcctataggtctgtctctgagcccccaggctaccaggcacacagctgcctgtcccctggcgccctgcccaccctctgctgtgacacctgtcgccagctgcacgctgcccactgtgcagccctgcccgcctgccgcccgggccactcgctgcgtgtgctgcttggcgacgcccagcggcgcttgtggctgcagcgtgcacagatggacactctgctctacagtagtcccggggcccggccctaggccagcggggccccaggtcaagggctcttgggagacagctcccgtggtcttttctctttgggaacgaggggtctgggcctctggtcgccgtatccctggg

SEQ ID NO: 20809 - DNA, 2051 bp, Macaca Mulatta
  misc_feature (1)...(2051): n = A,T,C or G
agtggtatctgggaccagttttgtggactcaaaggttttctacctgagaggcataacgcaggccaactgattcatcagaatcaggnnnnnnnnnnnnnnnnnnnnnnnnnnnnnnnggcacaggagcgagaggacatcattatgaannnnnnnngggacaccgagccgggctgccagaggacatggggcctgagcctgttggaatctacaacaacannnnnnnnnnnnnnnnnnnnnnnnnnnnnnnnnnnnnnnnnnnnnnnnnnnnnnnnnnnnnnnnnnnnnnnnnnnnnnnnnnnnnnnnnnnnnnnnnnnnnnnnnnnnnnnnnnnnnnnnnnnnnnnnnnnnnnnnnnnnnnnnnnnnnnnnnnnnnnnnnnnnnnnnnnnnnnnnnnnnnnnnnnnnnnnnnnnnnnnnnnnnnnnnnnnnnnnnnnnnnnnnnnnnnnnnnnnnnnnnnnnnnnnnnnnnnnnnnnnnnnnnnnnnnnnnnnnnnnnnnnnnnnnnnnnnnnnnnnnnnnnnnnnnnnnnnnnnnnnnnnnnnnnnnnnnnnnnnnnnnnnnnnnnnnnnnnnnnnnnnnnnnnnnnnnnnnnnnnnnnnnnnnnnnnnnnnnnnnnnnnnnnnnnnnnnggaggtgggctactgcagggacctgagccacattgcagccttgttcctcctttatctgtctgaggaggatgcattctgggcactggtgcagctgctggccagtgagaggcactcattgcagggnnnnnnnnnnnnnnnnnnnnnnnnnnnnnnnnnnnnnnnnnnnnnnnnnnnnnnnnnnnnnnnnnnnnnnnnnnnnnnnnnnnnnnnnnnnnnnnnnnnnnnnnnnnnnnnnnnnnnnnnnnnnnnnnnnnnnnnnnnnnnnnnnnnnnnnnnnnnnnnntctctcttgggctcatcctgcgcctgtgggacgtgtacttgctggaaggagaacaggtgttgatgccgatgacaagcattgtctttaaagttcnnnnnnnnnnnnnnnnnnnnnnnnnnnnnnnnnnnnnnnnnnnnnnnnnnnnnnnnnnnnnnnnnnnnnnnnnnnnnnnnnnnnnnnnnnnnnnnnnnnnnnnnnnnnnnnnnnnnnnnnnnnnnnnnnnnnnnnnnnnnnnnnnnnnnnnnnnnnagccaaacccgagcaagggtcctcaacacccaggcctgtgctggcttcacatggcaggacgaccctctgcaagggggacaggcaggcccctccaggcccaccagcccggttccagcggcccatttggctagtttccccaccatgggcacactcgttcttccacatcctgtcctggtggggctgtcagggaagacacctaccctatgggcacttggggtgtgcccagccaggccccggctcaggaaagatctcacggttcctggagattcctggagtggaactcgatgccccggctcccaacggacctggatgtagggggcccttggttcccccattatgatttcgaacagagctgttgggtgcgtgnnnnatcccaggaagaccagctggccacctgctggcaggcggaacaccctgcggagggggtgagattggctttcactgcacntgcacccagcactgattccaaccaggacacccccgtcgcagctagggacgagcagcagtgcgctcccacctcagggccttgcctctgccgcctctacttggaaaattctcagttccctccaggcttctagaagcatctagggcagggctcatggctggataacttcctgaggcttaacaacccaagcaaacttcacgtcctcattttattttttgttaaacttatgaaaattgattaagaaagtgtgcagctcgaaagaccttcacagatgggacacaccagcccccagatcacaaagccaaccatgcccagcccctcccagcacccccagccgtgtgaccagctttctgaattcccacaacaccgtgtgcctgcctttgtactctacccttatggaaggataacccccttcatgttttaaaataaatgttttctgtttaaat

SEQ ID NO: 20810 - DNA, 121 bp, Macaca Mulatta
gcttccagtccctgcagcctgctccacatttgggcacagaaggactcagacgggcactgagtgggcacgaggttttacaggagtggtcagacctcaggctttaatgaataaagacattact

SEQ ID NO: 20811 - DNA, 415 bp, Macaca Mulatta
tcctgtcctcagagtatcagagccaggagggtggctgactctgatgatagaacgagaaccaaatatgctcctgctgctccagtagagtggtcgtcacgtgaccgagattctaagctctcaaaccaaggcaagagtaaggaaactggaacaggagggcatgccaggctccagcctcccatgacagtgaaacattgccttagaatgactgttgttaatacaattgagtaaatagaacacgtaatcttgtgattaagttatgcacaatttgatttaaatttagtttctggcagttgctaggtttcactctggcatactctctcggtgtggaagctgctgattcagaaagagatgttccaaagctcatgtatttcctggacacatctaagtactgaataaaatgctggttaaataaatg

SEQ ID NO: 20812 - DNA, 75 bp, Macaca Mulatta
agctatcttgtctcgggcttactgaagattccttctaccgaactgccaattcagagcattttgagggtgagaagt

SEQ ID NO: 20813 - DNA, 888 bp, Macaca Mulatta
ggggccctttcccccccctctagcgccgctgggcctgcaggtctctgtcgacccgcggacgctggtctctgttccgcaggatggggtttgttaaagttgttaagaataaggcctactttaagagataccaagtgaaatttagaagacgacgagagggtaaaactgattactatgctcggaaacgcttggtgatacaggatattaataaatacaacacacccaaatacaggatgatagttcgtgtaacaaacagagatatcatttgtcagattgcttatgcccgtatagagggggatatgatagtctgcgcaacatatgcacacgaactgccaaaatacggtgtgaaggttggcctgaccaactatgctgcagcatattgtactggcctgctgctggcccgcacgccttctcaataggcttggccatggaccaagatctattgaaggccccagcggaacgtaactcggcgatgcaataccatgtgggaacagcgttcgatgggtcaccccaagagcccttcaccccgcccaattctgcaagccagggcccctgtccaccaacctacccactcgggccgactacggccccctccggcgcaccgtttccccgggaacctgttcgccacccaaggccccgaccgagcgcccacatcaagggtgcgaaagtggcaccccccccgccctctcatctccccccgacgccgcgcgcattgttcccgctctgccgctccgctgcggtcatcctactatccccctcggccctgttaaatccctcctgacgccgctccctcggtcgcctcgtgttcaaccatcgcgcgtggaccgcgatctacctaaccgcagcgcaaagtgcgctttcgttccctgacgaccccgctccgcgggcgat

SEQ ID NO: 20814 - DNA, 715 bp, Macaca Mulatta
  misc_feature (1)...(715): n = A,T,C or G
cctggtaagcatcttantcagattattttaattactgaatattcttagaagtttgggacagatttatgtaatctttataagtatgatttctgaagaaaagcaaatgcattagtatgtttgccttaaacttgtagactaaaccaattattgtaaaataaacagcgataacagtgatagtttttaactctctggtaattgtatcactctggaaaatgtggagtagctgtaataaatctactcctatataatgctttacagtgcaggtcttagtttttcttttttctcgtttcttttgaaatggcatctcgaacaaagtccaccaatccctttacaaaagaatgaactgctcctctgtgtgtacttcatagaaggtggaatcggacagaggcaggttagcgacagttattcctgaaatacaggagcaaagtacagtctgttgtggtttccaggattccacgcctagctcagccaattaagcatgagacatataccagtgagccacttagtagttacgcgagtggatagattggtatgtagagggaaagaggtctgctgtaaagaacaacacttgtttgtctgtggggaaagaaaagtagaatacttgagatgaaagttggcatacaaataggatactgtcgccagtagttatattacaaacactgtcggcctttctaatgtgaatgaacattactgtcattcctagtttaaagttagg

SEQ ID NO: 20815 - DNA, 638 bp, Macaca Mulatta
acctctgcggtccgccgagtggacgcccttaacctgcctgcctcgccagcccggctctgcccatcacccttttatgccgccgcctccagcccagcccggccaccgggtttgcaacgctctaagtcggacttgagcgagcgcttttctagggcagctgctgaccttgagcgcttttttaacttctgcggcctggacccggaggaggcaagagggttgggtgtggcccacctggcacgggccagctcggatatcgtgtccctggcagggcccagtgctgggccgggcagctctgaagggggctgctcccgccgcagctcggttactgttgaggagcgggcccgggagcgcgttccctatggcgtgtcggtggtggagcgcaatgcccgcgtgatcaagtggctgtatgggttaaggcaggcacgggagagcccagcagctgaaggctagacgccactggggaatttgccacaggacagatcaagtggtccctggacctctcttgcatccattctctggatggccatgtcagaggctccaccctggtgtgaacctggtgtggaggcaaaggcttagaggctggaccagcattcttgggcaaggactgactctgggagggttttgctcttgactttggacac

SEQ ID NO: 20816 - DNA, 888 bp, Macaca Mulatta
  misc_feature (1)...(888): n = A,T,C or G
gcaggtgccaccatgcacgtgaagaagtacctgctgaagtgcctgcaccggctgcagaagggccccggctacacgtacaaggagctgctggtgtggtactgcgataacaccaacacccacggccccaagcgtatcatctgcgaggggcccaagaagaaagccgtgtggttcctgctcaccctgctcttcactgctctcgtctgctggcagtggggcatcttcatcaggacctacttgagatgggaggtcagcgtctccctctcnnnnnnnnnnnnnnnnnnnnnnnnnnnnnnnnnnnnnnnnnnnnnnnnnnnnnnnnnnnnnnnnnnnnnnnnnnnnnnnnnnnnnnnnnnnnnnnnnnnnnnnnnnnnnnnnnnnnnnnnnnnnnnnnnnnnnnnnnnnnnnnnnnnnnnnnnnnnnnnnnnnnnnnnnnnnnnnnnnnnnnnnnnnnnnnnnnnnnnnnnnnnnnnnnnnnnnnnnnnnnnnnnnnnnnnnnnnnnnnnnnnnnnnnnnnnnnnnnnnnnnnnnnnnnnnnnnnnnnnnnnnnnnnnnnnnnnnnnnnnnnnnnnnnnnnnnnnnnnnnnnnnnnnnnnnnnnnnnnnnnnnnnnnnnnnnnnnnnnnnnnnnnnnnnnnnnnnnnnnnnnnnnnnnnnnnnnnnnnnnnnnnnnnnnnnnnnnnnnnnnnnnnnnnnnnnnnnnnnnnnnnnnnnnnnnnnnnnnnnnnnnnnnnnnnnnnnnnnnnnnnnnnnnnnnnnnnnnnnnnnnnnnnnnnnnnnnnnnnnnnnnggaacttcacgtccatcttctaccctcactatggcaactgttacatcttcaactggggcatgacagagaaggcacttccttcggccaaccctggacctgaat

SEQ ID NO: 20817 - DNA, 783 bp, Macaca Mulatta
ggggaaccagtggctggaatgtactgcaatgtctttgtcctctacttgcagatccactccttataccgccgcacaggtgccagctttcagaaggcccagcaagaatttgctgctggtgtcttctccaaccctgcggtgcgaaccgcagctgccaatgcagctgctggggctgctgaaaatgccttccgggccccgtgacccctgactgggatgccctcgccctgccacttgagggagctgacttagctcccgtccctaaggtctctgggacttggagagacatcagtacctgatggctcctccgtagtgctcccaatccaatggccatgactgctgaacctgacaggcgtgtggagagtccactgtgacctagtccccccatcaggccacactgctgccacctctcacacgccccaacccagcttccctttgctgtgccacagctgttgcttcggttatttaaataaaaagaaagtggaactggaactgacatccccgtttcctgaatcttcattgggaattaggccttatgaaagagaagagtgtggagtgaggtgggaaggtcggacccggctttagtgtaaactgggagataggaggggcagggcggtggagccccggtggctagcgcaggaaggaggtgggaagtccacggaaacgcgaaaccgggagacgccagggagccctgctccccacccctctccattaatgacggaaggagccaccgcctctgccgggaatgccaaggaatacgcagggctggagcctgaaaagctgggtggg

SEQ ID NO: 20818 - DNA, 176 bp, Macaca Mulatta
tttcaggactcagtggtctttgaggatgcggctgtgaacttcacccaggaggagtgggctttgctgggtccctctcagaagaaactctacagagatgtgatgcaagaaacctttgttaacttggcctctataggtaagactgaaattattccctcacttagtcaattagagaacaa

SEQ ID NO: 20819 - DNA, 487 bp, Macaca Mulatta
gagtgttgaaggagaacatcatgaaaaagctgtagaactgctgaaagctgcacaaggaaaggttaaattagtggtgcgatatacacccaaagtcttagaagaaatggagtcgcgctttgaaaaaatgagatcagcaaaacgcaggcaacagacctaatatatttcaaaacttgatatttcattttgcattttagctagagaagttttccttgtgacttactaatggctgcaatgccaatgattgtaagaaaacaaacaaatttatcatgaaattctccttgccattttataaatgcctattttaacatcatttatggttctagagatgcatacacttttttctgacaagaaaaagtaaaaggtgatgagggcaattctgtcctactgtttttacaggcctttttcaaatgcagattttgtcataaagttgttatagattttttaaaatgctttttttaatattaaaatgtacttttacattcttaat

SEQ ID NO: 20820 - DNA, 1514 bp, Macaca Mulatta
  misc_feature (1)...(1514): n = A,T,C or G
ggtggcaaaagctcggctggaagaaacagaccggaggacagcgaaagatgtgatggagaatggtgagannnnnnnnnnnnnnnnnnnnnnnnnnnnnnnnnnnnnnnnnnnnnnnnnnnnnnnnnnnnnnnnnnnnnnnnnnnnnnnnnnnnnnnnnnnnnnnnnnnnnnnnnnnnnnnnnnnnnnnnnnnnnnnnnnnnnnnnnnnnnnnnnnnnnnnnnnnnnnnnnnnnnnnnnnnnnnnnnnnnnnnnnnnnnnnnnnnnnnnnnnnnnnnnnnnnnnnnnnnnnnnnnnnnnnnnnnnnnnnnnnnnnnnnnnnnnnnnnnnnnnnnnnnnnnnnnnnnnnnnnnnnnnnnnnnnnnnnnnnnnnnnnnnnnnnnnnnnnnnnnnnnnnnnnnnnnnnnnnnnnnnnnnnnnnnnnnnnnnnnnnnnnnnnnnnnnnnnnnnnnnnnnnnnnnnnnnnnnnnnnnnnnnnnnnnnnnnnnnnnnnnnnnnnnnnnnnnnnnnnnnnnnnnnnnnnnnnnnnnnnnnnnnnnnnnnnnnnnnnnnnnnnnnnnnnnnnnnnnnnnnnnnnnnnnnnnnnnnnnnnnnnnnnnnnnnnnnnnnnnnnnnnnnnnnnnnnnnnnnnnnnnnnnnnnnnnnnnnnnnnnnnnnnnnnnnnnnnnnnnnnnnnnnnnnnnnnnnnnnnnnnnnnnnnnnnnnnnnnnnnnnnnnnnnnnnnnnnnnnnnnnnnnnnnnnnnnnnnnnnnnnnnnnnnnnnnnnnnnnnnnnnnnnnnnnnnnnnnnnnnnnnnnnnnnnnnnnnnnnnnnnnnnnnnnnnnnnnnnnnnnnnnnnnnnnnnnnnnnnnnnnnnnnnnnnnnnnnnnnnnnnnnnnnnnnnnnnnnnnnnnnnnnnnnnnnnnnnnnnnnnnnnnnnnnnnnnnnnnnnnnnnnnnnnnnnnnnnnnnnnnnnnnnnnnnnnnnnnnnnnnnnnnnnnnnnnnnnnnnnnnnnnnnnnnnnnnnnnnnnnnnnnnnnnnnnnnnnnnnnnnnnnnnnnnnnnnnnnnnnnnnnnnnnnnnnnnnnnnnnnnnnnnnnnnnnnnnnnnnnnnnnnnnnnnnnnnnnnnnnnnnnnnnnnnnnnnnnnnnnnnnnnnnnnnnnnnnnnnnnnnnnnnnnnnnnnnnnnnnnnnnnnnnnnnnnnnnnnnnnnnnnnnnnnnnnnnnnnnnnnnnnnnnnnnnnnnnnnnnnnnnnnnnnnnnnnnnnnnnnnnnnnnnnnnnnnnnnnnnnnnnnnnnnnnnnnnnnnnnnnnnnnnnnnnnnnnnnnnnnnnnnnnnnnnnnnnnnnnnnnnnnnnnnnnnnnnnnnnnnnnnnnnnnnnnnnnnnnnnnnnnnnnnnnnnnnnnnnagggccccagtggttctgtagagagtctggaggtgacctgcagacgggcagatgctggagagaagccaaaggcctttattcactgggtgtcacagcctttgatgtgtgaggttcgcctctatgagcgac

SEQ ID NO: 20821 - DNA, 400 bp, Macaca Mulatta
atgactattctgaatcttgtatctttgtgcctaaaaggagcaggatgacacagctgccatgctggccgacttcatcgattgtccccctgatgatgagaagccaccgcctcccacagagcctgactcctagccatcttctgcaccccactctttgtttccaataaagttttatgtccttagatagcgaccactgcttctgccttttgccacacctgggtccccagccagaagctcaggtgtctgctgggcttttcagggtatccatagtattccccagatgtctccatagctgtcctcttgtcaatgatccagagaggaaccatagacatatgggggtaatggactgtcccgtcactcagcacaaaggtgtcagaattgtaggtttctggctggatgctaa

SEQ ID NO: 20822 - DNA, 658 bp, Macaca Mulatta
  misc_feature (1)...(658): n = A,T,C or G
gctgtgaagtttgggaggatgtccaagaagcaaagggacagcctgtatgctgaggtgcagaagcaccagcagcggctgcaggaacagcggcagcagcagagtggggaggcagaagcccttgccagggtgtacagcagcagcattagcaacggcctgagcaacctgaacaacgagaccagcggcacttacgccaacgggcacgtcattgacctgcccaagtctgagggttattacaacgtcgattccggtcagccgtcccctgatcagtcaggacttgacatgactggaatcaaacagataaagcaagaacctatctacgacctcacatccgtacccaacttgtttacctatagctctttcaacaatgggcagttagcaccagggataaccannnnnnnnnnnnnnnnnnnnnnnnnnnnnnnnnnnnnnnnnnnnnnnnnnnnnnnnnnnnnnnnnnnnnnnnnnnnnnnnnnnnnnnnnnnnnnnnnnnnnnnnnnnnnnnnnnnnnnnnnnnnnnnnnnaagtccagggaagcactgtggcaacaatgtgccatccagatcactcacgccatccaatacgtggtggagtttgcaaagcggataacaggcttcatggagctctgtcaaaatgatcaaattctacttctgaagtcagg

SEQ ID NO: 20823 - DNA, 294 bp, Macaca Mulatta
aaggggaggtccacatggttagcaaggagggtaagtaccaggaatcagtcacttaaaatagacaccagaacttcacaggacatcacctccaaatagcatgctgggcagggcacaccatcttgaaaaatgaaataattaaaggtcatgggtaaacgttattttaatttaacagattaaacaagtatgggttataactgcaactctgcactggttcctagacccaacaaagaactaatccaatgttgattggtatttgtgccacaatttgcctaagcaaattgcaatattttggag

SEQ ID NO: 20824 - DNA, 305 bp, Macaca Mulatta
ctaagcccaaaaacagtgtatggaagaggcttaaatcaccattccggaagaagaaagattcagtaacttgaagagaagatgggaagtgtttatctgtgaactgcagtgctgtatcaaagcagtccagtaacctgcagtactgagcatggtgcttgctctttctcctaactgataagagggacatgcctactaggagtttttagtgatgtggtatttgaagtattgtctcttagttaagtatgatttattaacccagtggagcactgtctgcttttaaatcgtcacattagaatttgatctaccaa

SEQ ID NO: 20825 - DNA, 2022 bp, Macaca Mulatta
  misc_feature (1)...(2022): n = A,T,C or G
gactttccggaagctgctgggggatgtctgactagctctcatggagctccactaccttgctaagaagagcaaccaggcagacctctgggatgctagggactggagttcaagagggctgcctggtgaccaggcagatacagcagccacgagagctgctctctgctgtcagagacagtgtgcatccaccccaagagcaactgagatgcaagggtctaaacttagttcttctccagcatccccctcctcctctctgcaaaacagtactcttcagccagacacctttccaccaggacctctccactcagggaacaaccaaataacagcggaacggaaagtctgtaactgctgcagccaggaattagaaacttcttttacctatgtggacaaaaacgttaacttggagcagnnnnnnnnnnnnnnnnnnnnnnnnnnnnnnnnnnnnnnnnnnnnnnnnnnnnnnnnnnnnnnnnnnnnnnnnnnnnnnnnnnnnnnnnnnnnnnnnnnnnnnnnnnnnnnnnnnnnnnnnnnnnnnnnnnnnnnnnnnnnnnnnnnnnnnnnnnnnnnnnnnnnnnnnnnnnnnnnnnnnnnnnnnnnnnnnnnnnnnnnnnnnnnnnnnnnnnnnnnnnnnnnnnnnnnnnnnnnnnnnnnnnnnnnnnnnnnnnnnnnnnnnnnnnnnnnnnnnnnnnnnnnnnnnnnnnnnnnnnnnnnnnnnnnnnnnnnnnnnnnnnnnnnnnnnnnnnnnnnnnnnnnnnnnnnnnnnnnnnnnnnnnnnnnnnnnnnnnnnnnnnnnnnnnnnnnnnnnnnnnnnnnnnnnnnnnnnnnnnnnnnnnnnnnnnnnnnnnnnnnnnnnnnnnnnnnnnnnnnnnnnnnnnnnnnnnnnnnnnnnnnnnnnnnnnnnnnnnnnnnnnnnnnnnnnnnnnnnnnnnnnnnnnnnnnnnnnnnnnnnnnnnnnnnnnnnnnnnnnnnnnnnnnnnnnnnnnnnnnnnnnnnnnnnnnnnnnnnnnnnnnnnnnnnnnnnnnnnnnnnnnnnnnnnnnnnnnnnnnnnnnnnnnnnnnnnnnnnnnnnnnnnnnnnnnnnnnnnnnnnnnnnnnnnnnnnnnnnnnnnnnnnnnnnnnnnnnnnnnnnnnnnnnnnnnnnnnnnnnnnnnnnnnnnnnnnnnnnnnnnnnnnnnnnnnnnnnnnnnnnnnnnnnnnnnnnnnnnnnnnnnnnnnnnnnnnnnnnnnnnnnnnnnnnnnnnnnnnnnnnnnnnnnnnnnnnnnnnnnnnnnnnnnnnnnnnnnnnnnnnnnnnnnnnnnnnnnnnnnnnnnnnnnnnnnnnnnnnnnnnnnnnnnnnnnnnnnnnnnnnnnnnnnnnnnnnnnnnnnnnnnnnnnnnnnnnnnnnnnnnnnnnnnnnnnnnnnnnnnnnnnnnnnnnnnnnnnnnnnnnnnnnnnnnnnnnnnnnnnnnnnnnnnnnnnnnnnnnnnnnnnnnnnnnnnnnnnnnnnnnnnnnnnnnnnnnnnnnnnnnnnnnnnnnnnnnnnnnnnnnnnnnnnnnnnnnnnnnnnnnnnnnnnnnnnnnnnnnnnnnnnnnnnnnnnnnnnnnnnnnnnnnnnnnnnnnnnnnnnnnnnnnnnnnnnnnnnnnnnnnnnnnnnnnnnnnnnnnnnnnnnnnnnnnnnnnnnnnnnnnnnnnnnnnnnnnnnnnnnnnnnnnnnnnnnnnnnnnnnnnnnnnnnnnnnnnnnnnnnnnnnnnnnnnnnnnnnnnnnnnnnnnnnnnnnnnnnnnnnnnnnnnnnnnnnnnnnnnnnnnnnnnnnnnnnnnnnnnnnnnnnnnnnnnnnnnnnnnnnnnnnnnnnnnnnnnnnnnnnnnnnnnnnnnnnnnnnnnnngcttccaggtgacatcttgttactgctggtttggggaaaaccaccaatagaattgcagctagacttttggggactgtgcctagcaggctgtatcacttgctctaggctaagcaacaagcgctttcctcatggtagcagcagtccttaagcctaaagcc

SEQ ID NO: 20826 - DNA, 199 bp, Macaca Mulatta
cggtgcggggttagggatcccccgggagagaggaccaagcgaggagagttctccatcccctctccccgcgtggactcctgagcctgcgggtccagggtggggggctgtcactttattcgctacacacctcttctctcctataaggatgcgccccacccccttttcccctttctccgggcttggtttttttacggttttt

SEQ ID NO: 20827 - DNA, 872 bp, Macaca Mulatta
ctgcaggcctctgccctgaaggcctggggtgggaagaaggagaacctgaaggctgcacaggaggagtacgtcaagcgagccctggtaaggataggcaggggtgggcagggtccctgggtggacgggacttagaagaacccttctcactccacccctctccccgcttaggccaacagccttgcctgtcaaggaaagtacaccccgagcggtcatgctggagctgctgctagcgagtccctcttcgtctctaaccacgcctattaagcggaggtgttcccaggctgcccccaacactccaggccccgccccctcccactcttgaagagggggcctcctcctcggggctccagactggcttgcccgcgctcttgcctccctcgtgacagtggtgtatggtgtcgtctgtgaatgctaagtccatcaccctttccagcacactgccaaataaacagctatttaagggggagtcggccatccgtgtcttttgtctaatgcaggggagggcctggggaggcaacagagcccagaagaagaaagagcccctgttctctgttcttcctttcagggcagtaaaggggtgaaaggggaaaggactttcctgctctgttttatacttggccagggctttgagagaggctgagagcttgtgacattttcttccagccactacaggctctgccccttcacctaacagcatcagatagggctcacagctggggagtatggctgtaaccgctcatgtcttaggaggctgcagcctcagcctcacttttaggcccagaactcaagggggacagaagacccctgtgacagaaacccactaattagctcacttttcctgagtgacatgagctaggcaacataatgggtgt

SEQ ID NO: 20828 - DNA, 1867 bp, Macaca Mulatta
  misc_feature (1)...(1867): n = A,T,C or G
gcttgtgctgcagggaatacagccaggcccccaagatggacacttctgggcacttccatgactctggggtgggggacctggatgaagaccccaagtgcccctgtccatcctctggggatgnnnnnnnnnnnnnnnnnnnnnnnnnnnnnnnnnnnnnnnnnnnnnnnnnnnnnnnnnnnnnnnnnnnnnnnnnnnccctgggaccctcgctgcagcctcagcctccgcagcttnnnnnnnnnnnnnnnnnnnnnnnnnnnnnnnnnnnnnnnnnnncaccgcatcccctgtctcagctcgcccaactccagagccagcccgtccaccctggcctgctgcactcctctcccaccgctttcaggccccccccttcgtccaactccaccgccatcctccacccttcctccaggcaaggcagccagctcaatctcaatgaccacttgcttggccactctccaagttccacagctacaagtgggcctggcggaggcagccggcaccggcaggccagccccctggtgcaccggcgggacagcaaccccttcacggagatcgccatgagctcctgcaagtatagcggtggggtcatgaagcccctcagccgcctcagcgcctcccggaggaacctcatcgaggcggagactgagggccaacccctccagcttttcagtcctagcaaccccccggagatcgtcatctcctcccgggaggacaaccatgcccaccagaccctgctccatcaccctaatgccacccacaaccaccagcatgccggcaccaccgccagcagcaccaccttccccaaagccaacaagcggaaaaaccaaaacattggctataagctgggacacaggagggccctgtttgaaaagagaaagcgactgagtgactatgctctgatttttgggatgtttggaattgttgttatggtgatagagacccgagctctcttggggtnnnnnnnnnnaggactccatgttttcgtttgccctgaaatgcctnnnnnnnnnnnnnnnnnnnnnnnnnnnnnnnnnnnnnnnnnnnnnnnnnnnnnnnnnnnnccagctctttgtgatcgacaatggcgcggatgactggcggatagccatgacctacgagcgcatcctctacatcagcctggagatgctggtgtgcgccatccaccccattcctggcgagtacaagttcttctggacagcacgcctggccttctcctacacaccctcccgggcggaggccgatgtggacatcatcctgtctatccccatgttcctgcgcctgtacctgatcgcccgagtcatgctgctgcacagcaagctcttcaccgatgcctcgtcccgcagcatcggggccctcaacaagatcaacttcaacacccgctttgtcatgaagacgctcatgaccatctgccctggcactgtgcagctcgtgttcagcatctctctgtggatcattgctgcctaaacggtccgtgtctgcgaaannnnnnnnnnnnnnnnnnnnnnnnnnnnnnnnnnnnnnnnnnnnnnnnnnnnnnnnnnnnnnnnnnnnnnnnnnnnnnnnnnnnnnnnnnnnnnnnnnnnnnnnnnnnnnnnnnnnnnnnnnnnnnnnnnnnnnnnnnnnnnnnnnnnnnnnnnnnnnnnnnnnnnnnnnnnnnnnnnnnnnnnnnnnnnnnnnnnnnnnnnnnnnnnnnnnnnnnnnnnnnnnnnnnnnnnnnnnnnnnnnnnnnnnnnnnngatcaagaatgctgcagccaatgtccttcgggaaacatggttaatctataaacacacaaagctgctaaagaagattgaccatgccaaagtcaggaaacaccagaggaagttcctccaagctatccaccagt

SEQ ID NO: 20829 - DNA, 999 bp, Macaca Mulatta
  misc_feature (1)...(999): n = A,T,C or G
gttcagaataactcattgaaattgacattggccagtctgaatttcagggaattacctgctggagacaagagggatctcttcttcagatttgcagtctggggaagacagcctctattgtactttggaacctgagatatggtgatggcgggaggcctgnnnnnnnnnnnnnnnnnnnnnnnnnnnnnnnnnnnnnnnnnnnnnnnnnnnnnnnnnnnnnnnnnnnnnnnnnnnnnnnnnnnnnnnnnnnnnnnnnnnnnnnnnnnnnnnnnnnnnnnnnnnnnnnnnnnnnnnnnnnnnnnnnnnnnnnnnnnnnnnnnnnnnnnnnnnnnnnnnnnnnnnnnnnnnnnnnnnnnnnnnnnnnnnnnnnnnnnnnnnnnnnnnnnnnnnnnnnnnnnnnnnnnnnnnnnnnnnnnnnnnnnnnnnnnnnnnnnnnnnnnnnnnnnnnnnnnnnnnnnnnnnnnnnnnnnnnnnnnnnnnnnnnnnnnnnnnnnnnnnnnnnnnnnnnnnnnnnnnnnnnnnnnnnnnnnnnnnnnnnnnnnnnnnnnnnnnnnnnnnnnnnnnnntcagcccactctcagaatcaataaatgcccctaaggtgattgtaagctcacctcagatatactttttctcctctagaattttggtttattagatttttctagttatctttgcaaaagcgttaacaggctctgacttctgacattcaactagatgtagaagtatccaacccccggcatttcgtgggatgtattgaccaagataaaatgtgttcttattcaacaatgccacttcttgaccacttccatttttaggaattgtagtctctgagtcatggtgattagaagtactaatgaggtaaatgggaaaatgaaacttctactaacatttcatatagtagggagatgtctgtgaagagttataactggtacagattttgtgtttataaacaaggagacagaaaatgcagacaataaaaaatgttttatttagttttaa

SEQ ID NO: 20830 - DNA, 637 bp, Macaca Mulatta
  misc_feature (1)...(637): n = A,T,C or G
gggggcagacgcggggaacggcgcttggtgagagcgtgcggccaggtacaggcgccgtctcctctgattcgccacaacatggcaaatctttttataaggaagatggtgaaccctctgctatatcttagtcgtcacacagtgaagcctcgagtcctctccacatttctgatgggatcccttcgaggtgcagcccccgtggctgtgaaagccggggcagaagtacgctcacttctctcacccggcctcctgccccgcctgctgcctgcgctgagtttcaaaaccaaggtggttcttaagaagcgctgcagggactgttacctggtgaagaggcggggccggtggtacgtctgttgtaaaaccaacccgaggcacaagcagagacagatgtagaccctttccctccagagtcaggcacatactcatcattgcgtcacttgggagaacggttgtatttcatggaaggaattaccacatcaaggagtcaggngagagtgactggaagcaaacgtcttaaaagttacccatcacttttcagtgtaaatgagtaactatagaagacatagcatcatcttatttctaaaatgttcccattaaaaacattttcttattnnnnnnnnnnnnnnnnnnnnnnnnnnnn

SEQ ID NO: 20831 - DNA, 400 bp, Macaca Mulatta
atgagccaccacccatcgggccttcgggccggcttcagctccacctcataccgccgcaccttcgggccaccaccctcactatcccccggggccttctcctactcgtccagctcccgcttctccagcagccgcctgctgggctctgcttccccgagctcctcggtgcgcctgggcagcttccgtagcccccgggcgggagcgggcgccctcctgcgcctgccctcggagcgcctcgacttctccatggccgaggccctcaaccaggagttcctggccacgcgcagcaacgaaaagcaggagctgcaggagctcaacgaccgcttcgccaacttcatcgaaaaggtgcgctttctggagcagcttaaaggggccctgcgcggggagctgagccaagcccggg

SEQ ID NO: 20832 - DNA, 571 bp, Macaca Mulatta
  misc_feature (1)...(571): n = A,T,C or G
aaagtgaaatctatcacataaatttgaaagtttgattcaactagtagccatctttgctttaattgtattggctaatacaggataaacatgttntcatgtgttcattgaatataaaacataggcaaacttgattaaggttttatgtttccttctcaattacagatgatganaaactctcagaggtagaagacgctcaggaagcaagcatggaaacagatcctaagccatagacaagctaatcgcccaccactcccaggaatattgaaatagctacgtgaccataatgtgtttaaaatgtggtgtgctcttgagatatttaaagttttggcagtaaaatactctgtttttaaatatgaatgtgtatttcattcatatttcctcacacaaaggaaaatgacttcagtatagatttgtttttattaaaatgcatttttttattcttaagtggtaggaagcaacatccaaaaatgcttaataaaatgcttttaagctggatatgtttgtgctcattaatattccaggtagtttttaactggtaacatgggaggcttacaaaataagttgaaaattg

SEQ ID NO: 20833 - DNA, 98 bp, Macaca Mulatta
tttcgccatgttccacaaggtcagagttcctcgccagagcctcctgaaccggatgggagacgtcacccccgagggcacctacgtcagcccctttaagg

SEQ ID NO: 20834 - DNA, 2057 bp, Macaca Mulatta
  misc_feature (1)...(2057): n = A,T,C or G
atgaatctctgcagctggtttaaacacctgccggcatccatcgtcgagttccagccaacactccgaactctcgcacatcccatcagccaggaatacctgaaagacacactgcagaaatggatccacatgtngtgtaacgaagacattaaaaatggggtcaccaacctgctcatgtacgtgaagagcatgannnnnnnnnnnnnnnnnnnnnnnnnnnnnnnnnnnnnnnnnnnnnnnnnnnnnnnnnnnnnnnnnnnnnnnnnnnnnnnnnnnnnnnnnnnnnnnnnnnnnnnnnnnnnnnnnnnnnnnnnnnnnnnnnnnnnnnnnnnnnnnnnnnnnngactctgacaaaggaaggctttgactctatctccagtagctccaaggagctcctggtttcagctttgcaggaacttgaaagcagcaccagcaactccccttcaaataagcacatccactttgagtacaacatgtcgctcttcctctggtccgagagtcctaatgacctgccttccgacgcggcctgggtcagcgtggcaaaccggggtcagtttgccagtagcggcctctccatgaaagcacaagccattagcccttgtgtacagaacttctgttctgccctggattctaagctgaaggttaaactagatgacctcctggcttacctcccctctgatgactcgtcactgcccaaggacgtttctcccacacaggccaagagctctgcttttgacagatacgcagacgcagggactgtgcaggagatgctgcgcactcagtccgtggcatgcatcaagcacatcgtggactgcatccgggcagagctgcagagcattgaagaaggtgtgcaagggcaacaggatgccctcaacagtgctacgctgcactcagttcttttcatggccagactctgccagtccctgggagagctgtgcccccatctgaagcagtgcatcctaggaaaatcagagagctcagagaaaccagcaagggagtttcgggctctgagaaaacagggaaaggtgaaaactcaggaaatcattcctacacaggccaagtggcaagaggttaaagaagtactcctccagcagagcgtgatgggctaccgggtctggagcactgcagttgtgaaagtnnnnnnnnnnnnnnnnnnnnnnnnnnnnnnnnnnnnnnnnnnnnnnnnnnnnnnnnnnnnnnnnnnnnnnnnnnnnnnnnnnnnnnnnnnnnnnnnnnnnnnnnnnnnnnnnnnnnnnnnnnnnnnnnnnnnnnnnnnnnnnnagccatcctggtatgtacagtccttcctgtttagtttatgccaggaagttaatcgggttggaggccacgccttgccaaaggtgacattacaggagatgctgaaaagctgtatggttcaagtagtagctgcctatgagaaactttctgaagaaaaacagagtaannnnnnnnnnnnnnnnnnnnnnnnnnnnnnnnnnnnnnnnnnnnnnnnnnnnnnnnnnnnnnnnnnnnnnnnnnnnnnnnnnnnnnnnnnnnnnnnnnnnnnnnnnnnnnnnnnnnnnnnnnnnnnnnnnnnnnnnnnnnnnnnnnnnnnnnnnnnnnnnnnnnnnnnnnnnnnnnnnnnnnnnnnnnnnnnnnnnnnnnnnnnnnnnnnnnnnnnnnnnnnnnnnnnnnnnnnnnnnnnnnnnnnnnnnnnnnnnnnnnnnnnnnnnnnnnnnnnnnnnnnnnnnnnnnnnnnnnnnnnnnnnnnnnnnnnnnnnnnnnnnnnnnnnnnnnnnnnnnnnnnnnnnnnnnnnnnnnnnnnnnnnnnnnnnnnnnnnnnnnnnnnnnnnnnnnnnnnnnnnnnnnnnnnnnnnnnnnnnnncaggttgtccccccggcacactccacagctggtgacccgacagttcctggctccttgttcagacagctcgtcagcgaagaagacaacacgtctgcaccttcattattcaaactgggctggctctctagtatgactaagtaacatggcaacacgtctgtctctccctaaataaatactaccacattatttcttctaa

SEQ ID NO: 20835 - DNA, 998 bp, Macaca Mulatta
  misc_feature (1)...(998): n = A,T,C or G
gggagggctgcgcaggtttgccccttctgcgaatggaccactggaggggttcaaaggttcgcgtcccaatacgggaatgagcctctttgatctcttccggggctttttcggctttcctggacctcggagccacagagatcccttttttggagggatgactcgnnnnnnnnnnnnnnnnnnnnnnnnnnnnnnnnnnnggggttcatggggccgtgggaacccaaggttccatagtcctcagcacccccctgaggaatttggcttcggcttcagcttcagcccaggaggagggatacgtttccacgataacttcggctttgatgacctagtacgagatttcaatagcatcttcagcgatatgggggcctggaccttgccttcccatcctcctgaactcccaggtcctgagtcagagacacctggtgagagactgcgggagggacagacacttcgggactcaatgcttaagtatccagatagtcaccagcccaggattctttgggggggtcttggataacttatgagagtatacttatcgacgtcaactggtcatactatcgtattgagatatgcggacacaacatcctctcatcttgacgtggcttatttcaactnnnnnnnnnnnnnnnnnnnnnnnnnnnnnnnnnnnnnnnnnnnnnnnnnnnnnnnnnnnnnnnnnnnnnnnnnnnnnnnnnnnnnnnnnnnnnnnnnnnnnnnnnnnnnnnnnnnnnnnnnnnnnnnnnnnnnnnnnnnnnnnnnnnnnnnnnnnnnnnnnnnnnnnnnnnnnnnnnnnnnnnnnnnnnnnnnnnnaaccggcccggggggccgccccgnngntttcccngcccaccacacccgcggtcgcccaaaaaaatacccattttttacaaaaaaaacaactctcttttttgggagaaccccgcgtgagtattctcaatctnaccaccccaaccggggggggatatataataaggaaagaacaacacatcccctccgcc

SEQ ID NO: 20836 - DNA, 806 bp, Macaca Mulatta
tcttaagaaaaaagggagaaatattaatcagaaagttgattcttatgataatacggaaaagttaaccgttataaaaaagcaaagctcgagtttcctaaatgtaagcctttaaagtaatgaacattaaaaccaaacattatttcactgtcatttaagatatgtgttcattggggaatctcttgatttgcctgacattgacttcagcaaaagcaaagagctgtaaattaccatttactaaactagccaaatagtctgaatttccagaaaactaggcagaatgatcattcccagaaacatttcccggaaaatgtttcccagaaaactaggcagaatgatcattcaatggatcacagtgaagcaaagggcacaaccttttattttaccccttaattgtcaacagtcaacaggagttaactgacttcttgtggtgctcagactcttttatactggtgccaatgttttatcccatggattttactcattagtgtgtaaaggcaagccccatacaatgaagtctcagggtccatgaaagtagctggcttcaaaataaaatctttgagtgcatattttgttttgatacttattttgttgttttttcctttaaacacagaaaaagtcaacaatgacaggaataaacccaaatttgaactccattttctcccccccaaatattcaagcaaaactaatgagcaaacaaaagctaaccaggaatacttatttgttatgaagcaaagacctgttgatacttattttcttattgcaagaaagaccaattgtgtagaaatgttaagtctcagcatgtgtgc

SEQ ID NO: 20837 - DNA, 124 bp, Macaca Mulatta
agatagaacgtcagcgggagtatgtccagaggatttggcgagaggatcatctggacaatagcaatacatttggacttccccttaatatagtttgcaaacaacttatttccatcaacaatagctg

SEQ ID NO: 20838 - DNA, 215 bp, Macaca Mulatta
  misc_feature (1)...(215): n = A,T,C or G
ggaaagagccagacttctcagaggtcagtctgttcaacaagtgggaccccagggccttctgtatgttcagcaaagagagcttgcagtgacctccccaaaggatggnggctccatctccattctgggttctgatgatgccactacttgtcacattgtggtcctgaggcacacaggtancaggtaatggggccacctggctgacacattgtgacgga

SEQ ID NO: 20839 - DNA, 145 bp, Macaca Mulatta
tcataattttgggtcttcctgttcgaggaaaggtcacatgtatccatttattcccatcttctgttgcgtgtaccctcacagtatctgtctgtccataggtcttgcccatgtcttgctaagtatggcgatctatcaatggaatact

SEQ ID NO: 20840 - DNA, 1613 bp, Macaca Mulatta
  misc_feature (1)...(1613): n = A,T,C or G
ggtcgaagctgctgaggtggtttttcctaatggaaaatcatatacctttcnnnnnnnnnnnnnnnnnnnnnnnnnnnnnnnnnnnnnnnnnnnnnnnnnnnnnnnnnnnnnnnnnnnnnnnnnnnnnnnnnnnnnnnnnnnnnnnnnnnnnnnnnnnnnnnnnnnnnnnnnnnnnnnnnnnnnnnnnnnnnnnnnnnnnnnnnnnnnnnnnnnnnnnnnnnnnnnnnnnnnnnnnnnnnnnnnnnnnnnnnnnnnnnnnnnnnnnnnnnnnnnnnnnnnnnnnnnnnnnnnnnnnnnnnnnnnnnnnnnnnnnnnnnnnnnnnnnnnnnnnnnnnnnnnnnnnnnnnnnnnnnnnnnnnnnnnnnnnnnnnnnnnnnnnnnnnnnnnnnnnnnnnnnnnnnnnnnnnnnnnnnnnnnnnnnnnnnnnnnnnnnnnnnnnnnnnnnnnnnnnnnnnnnnnnnnnnnnnnnnnnnnnnnnnnnnnnnnnnnnnnnnnnnnnnnnnnnnnnnnnnnnnnnnnnnnnnnnnnnnnnnnnnnnnnnnnnnnnnnnnnnnnnnnnnnnnnnnnnnnnnnnnnnnnnnnnnnnnnnnnnnnnnnnnnnnnnnnnnnnnnnnnnnnnnnnnnnnnnnnnnnnnnnnnnnnnnnnnnnnnnnnnnnnnnnnnnnnnnnnnnnnnnnnnnnnnnnnnnnnnnnnnnnnnnnnnnnnnnnnnnnnnnnnnnnnnnnnnnnnnnnnnnnnnnnnnnnnnnnnnnnnnnnnnnnnnnnnnnnnnnnnnnnnnnnnnnnnnnnnnnnnnnnnnnnnnnnnnnnnnnnnnnnnnnnnnnnnnnnnnnnnnnnnnnnnnnnnnnnnnnnnnnnnnnnnnnnnngagctgaccatgccctgctcctcgctagaaatcaatattggaccctttttgtgaagattggtctctgtggtgtgattctcttcccaagtgtccctttctcctcccccggtgtcctttagtcttcctccacggggaacatctattcgggctttaatgtttaataaagtagaaagcactgtctggctgtgtgggtagagaccaccctttccctgcattagaccagcttgtgccatatgcgaatgtgtctgtgtgaagctgcattgttgggtaaaagccctgtggagtgccagagaaatgcactggcagagtgcaggatctgttctgaaaggcagatgtgctcctcagacatcagagcatcacattggagcggattactcctgcatagcaagattccatttctttctttattgataaaacaagataattgatgagagttcatgttgcgtgagtttgagataactgaggggtttagctttgattttctacatttgacatgtattgatcattgagaaacactaaaataacgatattcttagaaaacgtttaagaatcaattatggtccaacaattatagcttctgagatcagtttaaggtgaaagaaaattctgtaatataaggattcaaaatatgtgagggtgcacaggtattttttactctgtgatactctaagatggagtacatgcaacgaagatctgttctgctgtaagaggtaaaatggacaagtattggtatcaatgcagtatga

SEQ ID NO: 20841 - DNA, 739 bp, Macaca Mulatta
  misc_feature (1)...(739): n = A,T,C or G
tggcagcggctgccggcaaaacctctcgagtgagcccctgcccaagtgccgcgggggagaggccgcgagcgggaccgagaagtgggctggggggagaggtcgcggaggcggcgagcgaggccggggcccaggcagggaccggcaggggcccgggagtgacgggcacgccagggtcagggtnnnnnnnnnnnnnnnnnnnnnnnnnnnnnnnnnnnnnnnnnnnnnnnnnnnnnnncagccctgcaggcctcggggcaccgttgctgggctgtgccggcggcatgtgcgagggcccgtcccgcatctcggggcccatccccccagacccgacgctctgccctgactactaccggcggccggcctcggngctcaagggcgcctcgagggaaacgcgctgaagctggacttgctgacctcggaccgggccctggacgccaccgctccctgtggcccccgcatcggtcccggtgcccgagagatcctggagcgcggccggcgcggtgtcggggacgtgctgttgcaactcgaggggatctccctaggtcctggggcctctcttaagagnnggaaggaccctaaagaccatgagaaggagaacctgaggcggatcagggagattcagaagcgcttcagagaacaggagcgcagccgagagcatggacagcccaggcccctgaaagctctgtggcgctcacccaagtacgataaggtggagtcccaggtcaaggcccagctccag

SEQ ID NO: 20842 - DNA, 747 bp, Macaca Mulatta
  misc_feature (1)...(747): n = A,T,C or G
tagggtattcccagcctgtgagagaacatattgccgatttcaacacacagcagaacacgcagctggggaggctgtgtgacatcttagnnnnnnnnnnnnnnnnnnnnnnnnnnnnnnnnnnnnnnnnnnnnnnnnnnnnnnnnnnnnnnnnnnnnnnnnnnnnnnnnnnnnnnnnnnnnnnnnnnnnnnnnnnnnnnnnnnnnnnnnnnnnnnnnnnnnnnnnnnnnnnnnnnnnnnnnnnnnnnnnnnnnnnnnnnnnnnnnnnnnnnnnnnnnnnnnnnnnnnnnnnnnnnnnnnnnnnnnnnnnnnnnnnnnnnnnnnnnnnnnnnnnnnnnnnnnnnnnnnnnnnnnnnnnnnnnnnnnnnnnnnnnnnnnnnnnnnnnnnnnnnnnnnnnnnnnnnnnnnnnnnnnnnnnnnnnnnnnnnnnnnnnnnnnnnnnnnnnnnnnnnnnnnnnnnnnnnnnnnnnnnnnnnnnnnnnnnnnnnnnnnnnnnnnnnnnnnnnnnnnnnnnnnnnnnnnnnnnnnnnnnnnnnnnnnnnnnnnnnnnnnnnnnnnnnnnnnnnnnnnnnnnnnnagggggtgtgatcgaagcattcccacctgcagacagcatcaccaacctgacagtggacatgctgatagagcccaacgggaaaatcagcgtgctgtcaacaggggaccagcttcatgccgacagccccttcatctcctctggtaccaccgtgcctcagacctcagtggatcccc

SEQ ID NO: 20843 - DNA, 527 bp, Macaca Mulatta
  misc_feature (1)...(527): n = A,T,C or G
agcatggcctctgctgcctctgtgaccagcctggcagatgaagtcaactgccccatctgccagggtaccctgagggagccggtcactatcgactgcggccacaacttctgccggggctgccttactcgctactgtgagatcccaggcccagacctggaggagtcccctacttgcccactctgcaaagaacccttccgtcctgggagcttccggcccaactggcagctggctaacgtggtggagaacatcgagcgcctccagctggtgtccacactgggtttgggagaggaggatgcctgccaggagcacnnnnnnnnnnnnnnnnnnnnnnnnnnnnnnnnnnnnnnnnnnnnnnnnnnnnnnnnnnnnnnnnnnnnnnnnnnnnnnnnnnnnnnnnnnnnnnnnnnnnnnnnnnnnnnnnnnnnnnnnnnggaacaaatacataagtgtcttaaatgtctaagaaaagagagagaggagattcaagaaatccagtcaagagaaaataaaaggatgcaagtcctcct

SEQ ID NO: 20844 - DNA, 8319 bp, Macaca Mulatta
  misc_feature (1)...(8319): n = A,T,C or G
atggcgcagataccaggggaagtggacaacatggagggcctgcctgcctctaacaacaacaaccttgccacccgctgggagagtccggatcggggctgggagcgggagcagccagccgcctccaccgcagcggcctcgctctttgagtgctcccggatcaaggccttggcannnnnnnnnnnnnnnnnnnnnnnnnnnnnnnnnnnnnnnnnnnnnnnnnnnnnnnnnnnnnnnnnnnnnnnnnnnnnnnnnnnnnnnnnnnnnnnnnnnnnnnnnnnnnnnnnnnnnnnnnnnnnnnnnnnnnnnnnnnnnnnnnnnnnnnnnnnnnnnnnnnnnnnnnnnnnnnnnnnnnnnnnnnnnnnnnnnnnnnnnnnnnnnnnnnnnnnnnnnnnnnnnnnnnnnnnnnnnnnnnnnnnnnnnnnnnnnnnnnnnnnnnnnnnnnnnnnnnnnnnnnnnnnnnnnnnnnnnnnnnnnnnnnnnnnnnnnnnnnnnnnnnnnnnnnnnnnnnnnnnnnnnnnnnnnnnnnnnnnnnnnnnnnnnnnnnnnnnnnnnnnnnnnnnnnnnnnnnnnnnnnnnnnnnnnnnnnnnnnnnnnnnnnnnnnnnnnnnnnnnnnnnnnnnnnnnnnnnnnnnnnnnnnnnnnnnnnnnnnnnnnnnnnnnnnnnnnnnnnnnnnnnnnnnnnnnnnnnnnnnnnnnnnnnnnnnnnnnnnnnnnnnnnnnnnnnnnnnnnnnnnnnnnnnnnnnnnnnnnnnnnnnnnnnnnnnnnnnnnnnnnnnnnnnnnnnnnnnnnnnnnnnnnnnnnnnnnnnnnnnnnnnnnnnnnnnnnnnnnnnnnnnnnnnnnnnnnnnnnnnnnnnnnnnnnnnnnnnnnnnnnnnnnnnnnnnnnnnnnnnnnnnnnnnnnnnnnnnnnnnnnnnnnnnnnnnnnnnnnnnnnnnnnnnnnnnnnnnnnnnnnnnnnnnnnnnnnnnnnnnnnnnnnnnnnnnnnnnnnnnnnnnnnnnnnnnnnnnnnnnnnnnnnnnnnnnnnnnnnnnnnnnnnnnnnnnnnnnnnnnnnnnnnnnnnnnnnnnnnnnnnnnnnnnnnnnnnnnnnnnnnnnnnnnnnnnnnnnnnnnnnnnnnnnnnnnnnnnnnnnnnnnnnnnnnnnnnnnnnnnnnnnnnnnnnnnnnnnnnnnnnnnnnnnnnnnnnnnnnnnnnnnnnnnnnnnnnnnnnnnnnnnnnnnnnnnnnnnnnnnnnnnnnnnnnnnnnnnnnnnnnnnnnnnnnnnnnnnnnnnnnnnnnnnnnnnnnnnnnnnnnnnnnnnnnnnnnnnnnnnnnnnnnnnnnnnnnnnnnnnnnnnnnnnnnnnnnnnnnnnnnnnnnnnnnnnnnnnnnnnnnnnnnnnnnnnnnnnnnnnnnnnnnnnnnnnnnnnnnnnnnnnnnnnnnnnnnnnnnnnnnnnnnnnnnnnnnnnnnnnnnnnnnnnnnnnnnnnnnnnnnnnnnnnnnnnnnnnnnnnnnnnnnnnnnnnnnnnnnnnnnnnnnnnnnnnnnnnnnnnnnnnnnnnnnnnnnnnnnnnnnnnnnnnnnnnnnnnnnnnnnnnnnnnnnnnnnnnnnnnnnnnnnnnnnnnnnnnnnnnnnnnnnnnnnnnnnnnnnnnnnnnnnnnnnnnnnnnnnnnnnnnnnnnnnnnnnnnnnnnnnnnnnnnnnnnnnnnnnnnnnnnnnnnnnnnnnnnnnnnnnnnnnnnnnnnnnnnnnnnnnnnnnnnnnnnnnnnnnnnnnnnnnnnnnnnnnnnnnnnnnnnnnnnnnnnnnnnnnnnnnnnnnnnnnnnnnnnnnnnnnnnngctaccagccctgcgacccgcaggtcatctgcaaccgcgtgaaccacgtgcacggctgcttggcggagctgcaggagcaggcggcgcggcgacgggcagagctggaggcctcgcggagcctgtgggcgctgctgcaggagctggaggaggccgagagttgggcgcgcgacaaggagcgcctcctggaggctgcnnnnnnnnnnnnnnnnnnnnnnnnnnnnnnnnnnnnnnnnnnnnnnnnnnnnnnnnnnnnnnnnnnnnnnnnnnnnnnnnnnnnnnnnnnnnnnnnnnnnnnnnnnnnnnnnnnnnnnnnnnnnnnnnnnnnnnnnnnnnnnnnnnnnnnnnnnnnnnnnnnnnnnnnnnnnnnnnnnnnnnnnnnnnnnnnnnnnnnnnnnnnnnnnnnnnnnnnnnnnnnnnnnnnnnnnnnnnnnnnnnnnnnnnnnnnnnnnnnnnnnnnnnnnnnnnnnnnnnnnnnnnnnnnnnnnnnnnnnnnnnnnnnnnnnnnnnnnnnnnnnnnnnnnnnnnnnnnnnnnnnnnnnnnnnnnnnnnnnnnnnnnnnnnnnnnnnnnnnnnnnnnnnnnnnnnnnnnnnnnnnnnnnnnnnnnnnnnnnnnnnnnnnnnnnnnnnnnnnnnnnnnnnnnnnnnnnnnnnnnnnnnnnnnnnnnnnnnnnnnnnnnnnnnnnnnnnnnnnnnnnnnnnnnnnnnnnnnnnnnnnnnnnnnnnnnnnnnnnnnnnnnnnnnnnnnnnnnnnnnnnnnnnnnnnnnnnnnnnnnnnnnnnnnnnnnnnnnnnnnnnnnnnnnnnnnnnnnnnnnnnnnnnnnnnnnnnnnnnnnnnnnnnnnnnnnnnnnnnnnnnnnnnnnnnnnnnnnnnnnnnnnnnnnnnnnnnnnnnnnnnnnnnnnnnnnnnnnnnnnnnnnnnnnnnnnnnnnnnnnnnnnnnnnnnnnnnnnnnnnnnnnnnnnnnnnnnnnnnnnnnnnnnnnnnnnnnnnnnnnnnnnnnnnnnnnnnnnnnnnnnnnnnnnnnnnnnnnnnnnnnnnnnnnnnnnnnnnnnnnnnnnnnnnnnnnnnnnnnnnnnnnnnnnnnnnnnnnnnnnnnnnnnnnnnnnnnnnnnnnnnnnnnnnnnnnnnnnnnnnnnnnnnnnnnnnnnnnnnnnnnnnnnnnnnnnnnnnnnnnnnnnnnnnnnnnnnnnnnnnnnnnnnnnnnnnnnnnnnnnnnnnnnnnnnnnnnnnnnnnnnnnnnnnnnnnnnnnnnnnnnnnnnnnnnnnnnnnnnnnnnnnnnnnnnnnnnnnnnnnnnnnnnnnnnnnnnnnnnnnnnnnnnnnnnnnnnnnnnnnnnnnnnnnnnnnnnnnnnnnnnnnnnnnnnnnnnnnnnnnnnnnnnnnnnnnnnnnnnnnnnnnnnnnnnnnnnnnnnnnnnnnnnnnnnnnnnnnnnnnnnnnnnnnnnnnnnnnnnnnnnnnnnnnnnnnnnnnnnnnnnnnnnnnnnnnnnnnnnnnnnnnnnnnnnnnnnnnnnnnnnnnnnnnnnnnnnnnnnnnnnnnnnnnnnnnnnnnnnnnnnnnnnnnnnnnnnnnnnnnnnnnnnnnnnnnnnnnnnnnnnnnnnnnnnnnnnnnnnnnnnnnnnnnnnnnnnnnnnnnnnnnnnnnnnnnnnnnnnnnnnnnnnnnnnnnnnnnnnnnnnnnnnnnnnnnnnnnnnnnnnnnnnnnnnnnnnnnnnnnnnnnnnnnnnnnnnnnnnnnnnnnnnnnnnnnnnnnnnnnnnnnnnnnnnnnnnnnnnnnnnnnnnnnnnnnnnnnnnnnnnnnnnnnnnnnnnnnnnnnnnnnnnnnnnnnnnnnnnnnnccaggagatggcgctgtctggtgcggagctcccgggcacagtggaatcggtggaggaggcgttgaaacagcaccgggattttctcaccaccatggagctgaaccagcaaaagatgcaggtggccgtgcaggctgcggagggcctgctgaggcagggcaacatctatggggagcaggctcaggaggctgtgactcggctgctggnnnnnnnnnnnnnnnnnnnnnnnnnnnnnnnnnnnnnnnnnnnnnnnnnnnnnnnnnnnnnnnnnnnnnnnnnnnnnnnnnnnnnnnnnnnngctggatggctggatccatgagaagatgctgatggcgcgggatggcacgcgggaggacagccacaagctgcataagagatggctccggcaccaggcattcatggccgagctggctcagaataaggagtggctggagaagatnnnnnnnnnnnnnnnnnnnnnnnnnnnnnnnnnnnnnnnnnnnnnnnnnnccgtgcggaagaagctgggcgagatccgccagtgctgggcggagctggagagcaccacncaggccaaggcacggcagctctttgaggccagcaaagcagaccagctggtgcagagctttgctgagctggacaagaagctccttcacatggagagccagctgcaagacgtggaccctggaggggacctggccaccgtcaacagtcagctcaagaagctgcannnnnnnnnnnnnnnnnnnnnnnnnnnnnnnnnnnnnnnnnnnnnnnnnnnnnnnnnnnnnnnnnnnnnnnnnnnnnnnnnnnnnnnnnnnnnnnnnnnnnnnnnnnnnnnnnnnnnnnnnnnnnnnnnnnnnnnnnnnnnnnnnnnnnnnnnnnnnnnnnnnnnnnnnnnnnnnnnnnnnnnnnnnnnnnnnnnnnnnnnnnnnnnnnnnnnnnnnnnnnnnnnnnnnnnnnnnnnnnnnnnnnnnnnnnnnnnnnnnnnnnnnnnnnnnnnnnnnnnnnnnnnnnnnnnnnnnnnnnnnnnnnnnnnnnnnnnnnnnnnnnnnnnnnnnnnnnnnnnnnnnnnnnnnnnnnnnnnnnnnnnnnnnnnnnnnnnnnnnnnnnnnnnnnnnnnnnnnnnnnnnnnnnnnnnnnnnnnnnnnnnnnnnnnnnnnnnnnnnnnnnnnnnnnnnnnnnnnnnnnnnnnnnnnnnnnnnnnnnnnnnnnnnnnnnnnnnnnnnnnnnnnnnnnnnnnnnnnnnnnnnnnnnnnnnnnnnnnnnnnnnnnnnnnnnnnnnnnnnnnnnnnnnnnnnnnnnnnnnnnnnnnnnnnnnnnnnnnnnnnnnnnnnnnnnnnnnnnnnnnnnnnnnnnnnnnnnnnnnnnnnnnnnnnnnnnnnnnnnnnnnnnnnnnnnnnnnnnnnnnnnnnnnnnnnnnnnnnnnnnnnnnnnnnnnnnnnnnnnnnncagcgagcagatcagccggcggcagtctcaggtggaccgcctgtacgtggcgctcaaggagctgggtgaggagcgccgggtggctctggaacagcagtactggctgtaccagctcagccgccaggtgagcgagcttgagcactggatcgccgagaaggaggtggtggctggttcaccggagctcggccaggactttgagcatgtctcggtnnnnnnnnnnnnnnnnnnnnnnnnnnnnnnnnnnnnnnnnnnnnnnnnnnnnnnnnnnnnnnnnnnnnnnnnnnnnnnnnnnnnnnnnnnnnnnnnnnnnnnnnnnnnnnnnnnnnnnnnnnnnnnnnnnnnnnnnnnnnnnnnnnnnnnnnnnnnnnnnnnnnnnnnnnnnnnnnnnnnnnnnnnnnnnnnnnnnnnnnnnnnnnnnnnnnnnnnnnnnnnnnnnnnnnnnnnnnnnnnnnnnnnnnnnnnnnnnnnnnnnnnnnnnnnnnnnnnnnnnnnnnnnnnnnnnnnnnnnnnnnnnnnnnnnnnnnnnnnnnnnnnnnnnnnnnnnnnnnnnnnnnnnnnnnnnnnnnnnnnnnnnnnnnnnnnnnnnnnnnnnnnnnnnnnnnnnnnnnnnnnnnnnnnnnnnnnnnnnnnnnnnnnnnnnnnnnnnnnnnnnnnnnnnnnnnnnnnnnnnnnnnnnnnnnnnnnnnnnnnnnnnnnnnnnnnnnnnnnnnnnnnnnnnnnnnnnnnnnnnnnnnnnnnnnnnnnnnnnnnnnnnnnnnnnnnnnnnnnnnnnnnnnnnnnnnnnnnnnnnnnnnnnnnnnnnnnnnnnnnnnnnnnnnnnnnnnnnnnnnnnnnnnnnnnnnnnnnnnnnnnnnnnnnnnnnnnnnnnnnnnnnnnnnnnnnnnnnnnnnnnnnnnnnnnnnnnnnnnnnnnnnnnnnnnnnnnnnnnnnnnnnnnnnnnnnnnnnnnnnnnnnnnnnnnnnnnnnnnnnnnnnnnnnnnnnnnnnnnnnnnnnnnnnnnnnnnnnnnnnnnnnnnnnnnnnnnnnnnnnnnnnnnnnnnnnnnnnnnnnnnnnnnnnnnnnnnnnnnnnnnnnnnnnnnnnnnnnnnnnnnnnnnnnnnnnnnnnnnnnnnnnnnnnnnnnnnnnnnnnnnnnnnnnnnnnnnnnnnnnnnnnnnnnnnnnnnnnnnnnnnnnnnnnnnnnnnnnnnnnnnnnnnnnnnnnnnnnnnnnnnnnnnnnnnnnnnnnnnnnnnnnnnnnnnnnnnnnnnnnnnnatcgagaaaatcaaggcggaacagagcaagcagccgcccaccccactgctggggcgcaagttctttggggaccccacggaactggcggccaaggcggcgcccctgctgcggccagggggctatgaaaggggcttggagcccctggcccgccgggcctcggacacgctctcggccgaggtgcggactcgggtggggtatgtgcgccaggagctcaagcccgagcgccttcagccgcgcattgaccggctgccagagatcccggggagggtggagcacgcggccctgccggcctcaccagaggacgcggcggagaccctcgcggcccccgcagcccccgtggcggcggagcaggtccggccacggccggagcgccaggagtcagcggatcgcgcggaggagcttcccaggaggcgacggcccgagcggcaagagtcagtcgatcaatcagaggaggctgcgcggcggcggcggccagaacggcaggagtcagcggagcacgaggcggcacacagccttaccctgggccgctacgagcagatggagcggcggcgcgagcggcgtgagcggcgcttggagcggcaggagtccagcgaacaggagatgcccatcagaggagacctggtcaagggnnnnnnnnnnnnnnnnnnnnnnnnnnnnnnnnnnnnnnnnnnnnnnnnnnnnnnnnnnnnnnnnnnnnnnnnnnnnnnnnnnnnnnnnnnnnnnnnnnnnnnnnnnnnnnnnnnnnnnnnnnnnnnnnnnnnnnnnnnnnnnnnnnnnnnnnnnnnnnnnnnnnnnnnnnnnnnnnnnnnnnnnnnnnnnnnnnnnnnnnnnnnnnnnnnnnnnnnnnnnnnnnnnnnnnnnnnnnnnnnnnnnnnnnnnnnnnnnnnnnnnnnnnnnnnnnnnnnnnnnnnnnnnnnnnnnnnnnnnnnnnnnnnnnnnnnnnnnnnnnnnnnnnnnnnnnnnnngacgctaaccgcaagtcgtccaaccggnngtcgtgggtgagcctttactgtgtgcttagtaagggggaactgggcttctacaaggactccaagggcccggcatccgggagcacacacggtggggagccgctgctcagcctgcannnnnnnnnnnnnnnnnnnnnnnnnnnnnnnnnnnnnnnnnnnnnnnnnnnnnnnnnnnnnnnnnnnnnnnnnnnnnnnnnnnnnnnnnnnnnnnnnnnnnnnnnnnnnnnnnnnnnnnnnnnnnnnnnnnnnnnnnnnnnnnnnnnnnnnnnnnnnnnnnnnnnnnnnnnnnnnnnnnnnnnnnnnnnnnnnnnnnnnnnnnnnnnnnnnnnnnnnnnnnnnnnnnnnnnnnnnnnnnnnnnnnnnnnnnnnnnnnnnnnnnnnnnnnnnnnnnnnnnnnnnnnnnnnnnnnnnnnnnnnnnnnnnnnnnnnnnnnnnnnnnnnnnnnnnnnnnnnnnnnnnnnnnnnnnnnnnnnnnnnnnnnnnnnnnnnnnnnnnnnnnnnnnnnnnnnnnnnnnnnnnnnnnnnnnnnnnnnnnnnnnnnnnnnnnnnnnnnnnnnnnnnnnnnnnnnnnnnnnnnnnnnnnnnnnnnnnnnnnnnnnnnnnnnnnnnnnnnnnnnnnnnnnnnnnnnnnnnnnnnnnnnnnnnnnnnnnnnnnnnnnnnnnnnnnnnnnnnnnnnnnnnnnnnnnnnnnnnnnnnnnnnnnnnnnnnnnnnnnnnnnnnnnnnnnnnnnnnnnnnnnnnnnnnnnnnnnnnnnnnnnnnnnnnnnnnnnnnnnnnnnnnnnnnnnnnnnnnnnnnnnnnnnnnnnnnnnnnnnnnnnnnnnnnnnnnaccccctccccgcctttacctcacttccaatgctgccttgatctctgtctgggaggggggagtgaaggggccctagcccctgcactccaccgcctcagagccatgcggttaattcctgacttagtttaattgtgcaaaacgtcgatcttcctcctcccccgccccg

SEQ ID NO: 20845 - DNA, 1163 bp, Macaca Mulatta
  misc_feature (1)...(1163): n = A,T,C or G
tggaaaagattgaggaacagtttgctaatctgcacattgttaaatcttcctcaggaaccaaagagcccacttaccttcttggtannnnnnnnnnnnnnnnnnnnnnnnnnnnnnnnnnnnnnnnnnnnnnnnnnnnnnnnnnnnnnnnnnnnnnnnnnnnnnnnnnnnnnnnnnnnnnnnnnnnnnnnnnnnnnnnnnnnnnnnnnnnnnnnnnnnnnnnnnnnnnnnnnnnnnnnnnnnnnnnnnnnnnnnnnnnnnnnnnnnnnnnnnnnnnnnnnnnnnnnnnnnnnnnnnnnnnnnnnnnnnnnnnnnnnnnnnnnnnnnnnnnnnnnnnnnnnnnnnnnnnnnnnnnnnnnnnnnnnnnnnnnnnnnnnnnnnnnnnnnnnnnnnnnnnnnnnnnnnnnnnnnnnnnnnnnnnnnnnnnnnnnnnnnnnnnnnnnnnnnnnnnnnnnnnnnnnnnnnnnnnnnnnnnnnnnnnnnnnnnnnnnnnnnnnnnnnnnnnnnnnnnnnnnnnnnnnnnnnnnnnnnnnnnnnnnnnnnnnnnnnnnnnnnnnnnnnnnnnnnnnnnnnnnnnnnnnnnnnnnnnnnnnnnnnnnnnnnnnnnnnnnnnnnnnnnnnnnnnnnnnnnnnnnnnnnnnnnnnnnnnnnnnnnnnnnnnnnnnnnnnnnnnnnnnnnnnnnnnnnnnnnnnnnnnnnnnnnnnnnnnnnnnnnnnnnnnnnnnnnnnnnnnnnnnnnnnnnnnnnnnnnnnnnnnnnnnnnnnnnnnnnnnnnnnnnnnnnnnnnnnnnnnnnnnnnnnnnnnnnnnnnnnnnnnnnnnnnnnnnnnnnnnnnnnnnnnnnnnnnnnnnnnnnnnnnnnnnnnnnnnnnnnnnnnnnnnnnnnnnnnnnnnnnnnnnnnnnnnnnnnnnnnnnnnnnnnnnnnnnnnnnnnnnnnnnnnnnnnnnnnnnnnnnnnnnnnnnnnnnnnnnnnnnnnnnnnnnnnnnnnnnnnnnnnnnnnnnnnnnnnnnnnnnnnnnnnnnnnnnnnnnnnnnnnnnnnnnnnnnnnnnnnnnnnnnnnnnnnnnnnnttactaagaaagagagcatcattatagcatcttctgtgcaccaacgagtacgagttcatagctaatgattcttataaaagaaggaaaaagcagtga

SEQ ID NO: 20846 - DNA, 736 bp, Macaca Mulatta
gcttagtacaattgggaaccatacacttccggcatgtttggaaatcaaaatgtcacattctcgggggaggaagcccagaaaattgggtatgttctagagatttaccaccattgcttttttctttaataaagtttaggaaagtagaatttttattatgtgctgtatgtttgcataaatcacctttctcctttgtggttaagggcatatatgccaacccccagctttgtcctagagacagtatagatccttaagtcataggaaaacttaaaacactttattggagtaatctagaaaattttaaaactgttacatctttggtatttataaatgtgatactttctgtgggtacttctatagaggcactacaggatcagaaaatgcaaactgaatcattttagcaccttttgatataaatagaaatgcactgatgcagaggtaaaaaattttagaacttttgttgggaaactataaataattggtcctttcccatcagttctgcattggcttctccaactgtcaaggtttaggattgtatttttatattgatcacatgtgctttaatttcttggccagaaggaatccatagcaaaaatcacatttagagtcttaaactcttagttgaatgaatttgaccttttaaatattaatgataagtgtttacaagaagttgctaagagcaacagttaaaattctattacctttttaaacttgcaataaccttcattttaaaaataca

SEQ ID NO: 20847 - DNA, 298 bp, Macaca Mulatta
gttatccccaagctaaactgcgtgttcactgtggaaatcgatggctttatttcctacatttacgggagcaaattccagcttcggtcaagtgaacggtctgcgaagaagttcaaagcgaagggaacaattgacctgtgaattctttgccatctaacgcagttgtttatgacagctgaaaactggacactcctaaatgccaacctttcagtgaagagatggttaagccaattctgcttatagaccacctccagccagtgacgttctgagttgaggatgctcaacaacatgggtaggtcgc

SEQ ID NO: 20848 - DNA, 773 bp, Macaca Mulatta
catggtgcggaacgcttaagttccacgagcagaaactgctgaagcaggtggacttcctgaactgggaggtcaccgaccacaacctgcacgagctgcgcgtactgcggcgttaccggctgcagcggcgtgaggactacacgcgctacaaccagctgagccgtgcggtccgtgaactggcgcggcgcctgcgcgacctgcccgaacgcgaccagttccgcgtgcgcgcttcggccgcgctgctggacaagctgtatgctctcggcctggtgcccacgcgcggttcgctagaactctgcgacttcgtcacggcctcgtccttttgccgccgccgccttcccaccgtgctcctcaagctgcgcatggcgcagcaccttcaggctgccgtagcctttgtggagcaagggcacgtacgcgtgggccctgatgtggttaccgaccccgccttccttgtcacgcgcagcatggaggactttgtcacttgggtggactcgtccaagatcaagcggcacgtgctggagtacaatgaggagcgcgatgacttcgatctggaagcctagcggatctcctactttccatggctgtcttttacagatgggaaaactgaggcctgattctggagattctatgagggtgctttccccaagggtgtcagatggtcgtaggttcttaagaacttgattcatcagtggcaggccttgcatagagccacgggagatgcgtccttgttttccaggacatgtcctagaacttggactactgattattattgactc

SEQ ID NO: 20849 - DNA, 107 bp, Macaca Mulatta
ggagatccgtgttctccaagcccacatctcagacacctcggttatagtcaagatggacaacagccgagacctgaacatggactgcatcgtcgctgagatcaaggctc

SEQ ID NO: 20850 - DNA, 562 bp, Macaca Mulatta
taagcttatagtaaggatacattcaagcttggttaaaaaataataataataaaacatgcatcatttttcatttgccaaccaagcacaaagttattttatactgactgtatattttaaagtatactctcagatatggcctcttacagtatttaagatatagcaaggacatggctgattttttttttataaaaattggcactaataagtgggtttattggtcttttctaattgtataatttaatttagtacaaagtttgtaaaatatcagaggatatatatatattgtttctacgacatggtattgcatttatatctttttactacagtgatctgtgacagcagcagcttcatgttgtattttttttactgaaattgtacaatatccatcttaaagacatcaactattctaaaaattgtgtacaggatattcctttagtggtggaattaaaatgtacgaatatttgcttttttcaaaaaaatgtattttctgttaaaagtttaaagatttttgctatatattatggaaaaggaaatgtaatcgtaaatattaattttgtaccta

SEQ ID NO: 20851 - DNA, 571 bp, Macaca Mulatta
aatgtgtgttctggaaaaatggactctctatcttcagattattcaacttctccacctatcacctctacaacttggccttcgttggagaagttttagttggcttattcctggaacaagaccacctagaggcttttagccctgtcaccctgccctcttctgaggtttggaccttgttttaaattctgtgtgtggtggacttgagaccatctcttgtaatggaggtagtgggactatcactgagggggtcagcctatccaggtaggctactgttgtagtcaaacccatcacttaaattctgccacagtctgtgcatagactgttggttgatcctccaggcattttgtcctattaagccaaataggtggatatcatgggatggatgaggtcatgatgaaaacagatttactagatttatggacctagtatactatgtacatatggaaaactgaattttacaatctataggtacctttggtcataaagagtaaaagtctatagttttctagaaaataattcttaaatctgggtttcatgtctagatttaaatcatatcatgtatctgtagtgcttc

SEQ ID NO: 20852 - DNA, 520 bp, Macaca Mulatta
  misc_feature (1)...(520): n = A,T,C or G
cacctggtgaatactcagtacacatttgctgaatgaatgaacaccctgtctgcagcaggacatggacaaataggctctgccatcaggaaatgggaagcaagacaacaggctaaactcaagaggacagaggctggtaaggaggtaaagcaggcccaatgaaatgaccagacagcccaaactgtcaggaagaaagcaggcatttgatgctggtaattgtaccaaaggtatgtaagagaatgaatgtcattgtnnnnnnnnnnnnnnnnnnnnnnnnnnnnnnnnnnnnnnnnnnnnnnnnnnnnnnnnnnnnnnnnnnnnnnnnnnnnnnnnnnnnnnnnnnnnnnnnnnnnnnnnnnnnnnnnnnnnnnnnnnnnnnnnnnnnnnnnnnnnnnnnnnnnnnnnnnnnnnctcagggtgattctgttacttacctataaggccacatagttagtaacaagccaatattcaaattcagatgatttttactcccaaggacaataaatccaactcaatgacttca

SEQ ID NO: 20853 - DNA, 780 bp, Macaca Mulatta
  misc_feature (1)...(780): n = A,T,C or G
gggaggaaattgctggtgcagtgaaagcagtgtgtactgactgactgctctgcctgtgtctttatcactttagagggatcagctctgtcagagagtcttgggaggacacagttcaccctctgcagcagcctatttctggatgatgcctgggaatcttcagtttatgtaccactaatgaaatggacatccagtggtctagagaaaatggacagagatctccagtgctttggccgaaggatcaacttttcagactgcagatcatgccagggatgcttgggtggttgttctaaaaatggagcttgaagcagctggtgataaaactggaggtgggtctcgcatgaatccagcactgaaaaccaagatctagaagcaggcctggtgctgctgctttgctactggagtccaggtagcacgggggaaataagagattctgaggaacctgtcctcctctaactgctgaagcctctgccagggctgctgcacaagctcattgctgcctgtcatccaagatatgtaggaaacaacaatcaataaatggcnnnnnnnnnnnnnnnnnnnnnnnnnnnnnnnnnnnnnnnnnnnnnnnnnnnnnnnnnnnnnnnnnnnnnnnnnnnnnnnngtcttctnnnnnnnnnnnnnnnnnnnnnnnnnnnnnnnnnnncgcaccaccacatgcagctaatttttctatttttagtagagacagagtttcaccatcttggccaggaatggtctcgatctcctgaacttttgtgatctgccntgccntcagccctcccc

SEQ ID NO: 20854 - DNA, 381 bp, Macaca Mulatta
  misc_feature (1)...(381): n = A,T,C or G
atgctgtgccctgctgtcctgggcctcagcctctgggctctcctgcaccttgggacaggggccccattgtgcctgtcacagcaacttaggatgaaaggggactacgtgctgggggggctattccccctaggtgaggccgaggaggctggcctcggcagccggacacggcccagcagccccgtgtgcaccaggtnccaggttctcctcgaatggcctgctgtgggcactggccatgaagatggccgtggaggagatcaacaacaggtcggacctgctgccggggctgcgcctaggccacgacctcttcgacacgtgctcggagcctgtggtggccatgaagcccagtctcatgttcctggccaaggcagacagccgcgacat

SEQ ID NO: 20855 - DNA, 652 bp, Macaca Mulatta
  misc_feature (1)...(652): n = A,T,C or G
ctgtacaggacggaggactattttcctgcagacaccagggaggcacagcaccaccccccgcacctgccctcggcctttgtgagctttgtggtttcccatcaggaatgctggaaaagtgacattgtgtacatgctgcagcttgggggtttttttctttgtattgctgtttattttatattttaaagagatttttttaaatgtcgagatgggctctcactatgttgtccaggctgatctcaaactcctgggctcaagtgatccacctgccttggccttccgaagtggtgggatcacgggcagcagcctccgcgcccaggctgctgccattttcagatttcctccctgcctcatgtgagactacagggtttggagaagcagttggaacccacgtgtggtgcctcccacgttggcctgcctggggttctacaggggttgaggggccaggcctggccggggctgatggacagtggggactttccttctctccatgatggctttgtagcagctccatggtcctctctgtgatggggttttgcacggggtgcgctctgccactgtggtgggtggntgggtggatgggtgctggttgtgttgcctctagacctcggtgcccacagccttgaggatccttccaataaaggtgtcgagagct

SEQ ID NO: 20856 - DNA, 252 bp, Macaca Mulatta
cagtcctatatagtttctggaaaagactatcctcgcgtggagttggacacccatggttgtggcctgcgctgctcagccctaagtgacccttctcaggacctgcagttcattgtggccggggatgagtgtgtctacttgtatcagcctgatgaacgtgggccctgcttcgcctttgagggccacaagctcattgcccactggtttagaggctaccttgtcattgtctcccgtgaccggaaggtttctcccaag

SEQ ID NO: 20857 - DNA, 1526 bp, Macaca Mulatta
  misc_feature (1)...(1526): n = A,T,C or G
ggtggacccaagagccatatcagtgctagcaaaatggcagaattcatatagcatcaaagttgtcctgcaagagcttcggcgcctaatgatgtctaaagaaaatatgaaactccctcagccgcccgaaggacagtgttacagcaattaatcaaaaagaaaaaccacagnnnnnnnnnnnnnnnnnnattcgatttaagcagtcttcattttccacagtagtaaattttctagatacgtcttgtagacctcaaagtactggaaaggaagctcccattcaaaggaaatttatcttaagatactgtaaatgatactaattttttgtccatttgaaatatataagttgtgctataacaaatcatcctgtcaagtgtaaccactgtccacgtagttgaacttctgggatcaagaaagtctataaagttgattcccatcataactggtggggcnnnnnnnnnnnnnnnnnnnnnnnnnnnnnnnnnnnnnnnnnnnnnnnnnnnnnnnnnnnnnnnnnnnnnnnnnnnnnnnnnnnnnnnnnnnnnnnnnnnnnnnnnnnnnnnnnnnnnnnnnnnnnnnnnnnnnnnnnnnnnnnnnnnnnnnnnnnnnnnnnnnnnnnnnnnnnnnnnnnnnnnnnnnnnnnnnnnnnnnnnnnnnnnnnnnnnnnnnnnnnnnnnnnnnnnnnnnnnnnnnnnnnnnnnnnnnnnnnnnnnnnnnnnnnnnnnnnnnnnnnnnnnnnnnnnnnnnnnnnnnnnnnnnnnnnnnnnnnnnnnnnnnnnnnnnnnnnnnnnnnnnnnnnnnnnnnnnnnnnnnnnnnnnnnnnnnnnnnnnnnnnnnnnnnnnnnnnnnnnnnnnnnnnnnntcctcctcaagttgctttttgcaccatcaccacctaacaccttccatgacacttccttgctttggccagaagccatcaggtaaggttggaaagagtctttgacctccctttgtttagttttggaaccgtacttactcactctccaccagcctgggaaatgggtattgggtcctcagccctgccactctgctgtcatcagctgatgcattgtttttaactcaggttttgataaggtgaaaataatagtcaccagggttactcagacctgccagctctcagagtccttggtggttaaacttggagaagggccacataaagacacttggaagcacacatgatccctctgaattgttttactttcctgtaattgcttttgcttttaaaaatcgaagttttaaacagggctttcatttggtcatccttgcgatccactggggtctagtttggaatctgacaactggaacaaaaagaaccctgaatctggtgcatgccttggttttggtactgctgctgcttctcaagatcctcagcagggattaagaaagaaccaggtgtgcacagcagatccctgaaattggcaggcttgacctcctggcagattgcttcgtctttccactttctgttcaggaccactaaatgctgatgcataccaaaataaaagcaattcatt

SEQ ID NO: 20858 - DNA, 2201 bp, Macaca Mulatta
  misc_feature (1)...(2201): n = A,T,C or G
cactgtgtgagcctcagcctggcccagctttcagccaccatttttcgaaaggaaggcctggaggcctggccacagcttttgcagcttcttcagcacagtacccacagcccccacagcccagagagagagnagatggggcttttgctgctaagtgtggtggtgacctcccggcccgaggccttccaaccccaccaccgggagctgcttcggcttctgaatgagactcttggtgaggtgggctctcctgggctgctcttctactccctgcgcactctgaccaccatggccccctacctcagcactgaagannnnnnnnnnnnnnnnnnnnnnnnnnnnnnnnnnnnnnnnnnnnnnnnnnnnnnnnnnnnnnnnnnnnnnnnnnnnnnnnnnnnnnnnnnnnnnnnnnnnnnnnnnnnnnnnnnnnnnnnnnnnnnnnnnnnnnnnnnnnnnnnnnnnnnnnnnnnnnnnnnnnnnnnnnnnnnnnnnnnnnnnnnnnnnnnnnnnnnnnnnnnnnnnnnnnnnnnnnnnnnnnnnnnnnnnnnnnnnnnnnnnnnnnnnnnnnnnnnnnnnnnnnnnnnnnnnnnnnnnnnnnnnnnnnnnnnnnnnnnnnnnnnnnnnnnnnnnnnnnnnnnnnnnnnnnnnnnnnnnnnnnnnnnnnnnnnnnnnnnnnnnnnnnnnnnnnnnnnnnnnnnnnnnnnnnnnnnnnnnnnnnnnnnnnnnnnnnnnnnnnnnnnnnnnnnnnnnnnnnnnnnnnnnnnnnnnnnnnnnnnnnnnnnnnnnnnnnnnnnnnnnnnnnnnnnnnnnnnnnnnnnnnnnnnnnnnnnnnnnnnnnnnnnnnnnnnnnnnnnnnnnnnnnnnnnnnnnnnnnnnnnnnnnnnnnnnnnnnnnnnnnnnnnnnnnnnnnnnnnnnnnnnnnnnnnnnnnnnnnnnnnnnnnnnnnnnnnnnnnnnnnnnnnnnnnnnnnnnnnnnnnnnnnnnnnnnnnnnnnnnnnnnnnnnnnnnnnnnnnnnnnnnnnnnnnnnnnnnnnnnnnnnnnnnnnnnnnnnnnnnnnnnnnnnnnnnnnnnnnnnnnnnnnnnnnnnnnnnnnnnnnnnnnnnnnnnnnnnnnnnnnnnnnnnnnnnnnnnnnnnnnnnnnnnnnnnnnnnnnnnnnnnnnnnnnnnnnnnnnnnnnnnnnnnnnnnnnnnnnnnnnnnnnnnnnnnnnnnnnnnnnnnnnnnnnnnnnnnnnnnnnnnnnnnnnnnnnnnnnnnnnnnnnnnnnnnnnnnnnnnnnnnnnnnnnnnnnnnnnnnnnnnnnnnnnnnnnnnnnnnnnnnnnnnnnnnnnnnnnnnnnnnnnnnnnnnnnnnnnnnnnnnnnnnnnnnnnnnnnnnnnnnnnnnnnnnnnnnnnnnnnnnnnnnnnnnnnnnnnnnnnnnnnnnnnnnnnnnnnnnnnnnnnnnnnnnnnnnnnnnnnnnnnnnnnnnnnnnnnnnnnnnnnnnnnnnnnnnnnnnnnnnnnnnnnnnnnnnnnnnnnnnnnnnnnnnnnnnnnnnnnnnnnnnnnnnnnnnnnnnnnnnnnnnnnnnnnnnnnnnnnnnnnnnnnnnnnnnnnnnnnnnnnnnnnnnnnnnnnnnnnnnnnnnnnnnnnnnnnnnnnnnnnnnnnnnnnnnnnnnnnnnnnnnnnnnnnnnnnnnnnnnnnnnnnnnnnnnnnnnnnnnnnnnnnnnnnnnnnnnnnnnnnnnnnnnnnnnnnnnnnnnnnnnnnnnnnnnnnnnnnnnnnnnnnnnnnnnnnnnnnnnnnnnnnnnnnnnnnnnnnnnnnnnnnnnnnnnnnnnnnnnnnnnnnnnnnnnnnnnnnnnnnnnnnnnnnngccctcacctgaatgtgcggaaggcccttatgaggctctgggncagnnttgctgggcactgcacaccgtaaaggcaaagctgcccctcagaacccaacactgctgngctttgcaggctgccctggcccgagtggtgccatcctacatgcattcagtgaacagggagcgggagcgccaggtggtgatggccgtgctggaggccctgacaggggtgctccgcagctgtgggaccctcactctgaagccccctgggcgcctggctgagctctgtagcatgctctttgttgtgctgcagaggaagnagacagcctgtcaggatactgacgaggaggaggaagaggaagatgatgatcagg

SEQ ID NO: 20859 - DNA, 556 bp, Macaca Mulatta
aggcaaactataggataacacagagccctttttgaaaataacttggcgttggagtattttaccctctagctgttttacttagaatgtaacatatgctgcctacccacctcaaaatgtctgtactgcaagagggccctgggcctctgtttccagattcacatttgtctggccagagttggaatcccaaaggaagagcatgggtggcagatggtagggaattgaactggcctgtgcagtgggcacggagcacaaggagtcacagcacgcctcctgccttaccatggcagtacggagacagtccagaggctggtcttcttgccacggggtgttgttgtctctggtggtgctgcatgtctgtggctcacctttattcttgaaactgaggtttacctggatctggatactgaggctagagcccacagcagcatgagggtgggcctgtggccccccaaactaggggccgtaggttcatcacagtgtttccttttgtctcctaaagatagggatctacttttgaagggaattgttcctcccaaataaatttgctttatcttgg

SEQ ID NO: 20860 - DNA, 675 bp, Macaca Mulatta
caggccttgcagtaagcaggtgcctgatgtttgctagtcctgtcgctgtggccaggggctcctgggaaaggtggagcggtttggcttcaccagcgcgctaaaggcccgcaggggagagtaaattaagcgcagttaggaggtaatagagggggaggcacaaagggccctcctccttattcttggcctttagggaaaaggagtcttcctctcggtgcctggggaataggaaggtggctggcaagaaaagtccagagggaagagaaaggagggggttgagacatctggatcagagggagaagggcctgaaactcctgggttttgggtccgcagggcactggggtatgcagactccccagctggacccaggaggggcgcagggtccgggcgcgctggcgtcccgcaggtgaggggtggagctgcagggctgctgcggattggctgtggcgggggggcgtgtgcgccaaccgctgattggccgcggcgggggcgggagctgtccgtgggcgccgcccctacagctcggggctggcggttgggcagcaggacccgggtggagcgcagaaaaacagggcgaggccctgcgggggaagggtcccgcggtttggctgttcgggcctgtggctgttggggtggcaggacagtgacccggggacaggacttgggggcactgtgggg

SEQ ID NO: 20861 - DNA, 542 bp, Macaca Mulatta
tacccttcagctttgaccccaacaccgcagccggctggctctccgtgtctgacgacctcaccagcgtcaccaaccacggctaccgcgtgcaggtggagaacccggaacgcttctcctcggcgccctgcctgctgggctcccgtgtcttctctcagggctcgcacgcctgggaggtggccctgggggggctgcagagctggcgggtgggcgtggtgcgtgtgcgccaggactcgggcgctgagggccactcacacagctgctaccacgacacacgctcgggcttctggtacgtctgccgcacgcagggcgtggagggggaccactgcgtgacctcggacccagccacgtcgcccctggtcctggccatcccacgccgcctgcgtgtggagctggagtgcgaggagggcgagctgtctttctatgacgctgagcgccactgccacctgtacaccttccacgcgcgctttggggaagtgcggccctacttctacctggggggtgcacggggagctgggccttcagagcctttgcgcatctgcccc

SEQ ID NO: 20862 - DNA, 2313 bp, Macaca Mulatta
  misc_feature (1)...(2313): n = A,T,C or G
caggtctgggactacactgattaacgttgtggtcctggacgtcaatgacaatgcccctgaatttgagaagccagtctatgaagttcatgtacctgagagcagccctctggactccttgatcatcaaagtgtctgctacagatttagatgcaggaataaatggagaactgtcttattcattttcccatgtctccagagatgtacggaaaacatttgaaatccatccaattgctggcgaagtctatttaaaagcacctctagatttcgagattattcaatcttacatcataaacattcaggccattgacagtgggagcctttctggagaatcaaacattttagttcgggttgtagatgtgaatgacaacccgccagaaatagccatgacatctcttaccagccccataccggaaaactcttcacctgagatggtggtcgctgtcttcagcatacgagaccaagactctggagacaatgggagaatggtttgctcaattcaggacaacctcccctttgtcttgaagcctaccttcaagaatttttactctctggtaacagagcacccactggacagagagatcagaaatgaatataacattaccatcaccgtgaccgacttggtgacacccaggctgaaaaccgagcacaacataactgtgctggtctccgacgtcaatgacaacgcccccgccttcacccaaacctcctacactctgttcgtccgcgagaacaacagccccgccctgcacatcggcagcgtcagcgccacagacagagactcaggcaccaacgccctggtcacctactcgctgctaccgtcccaggaccctcacctacccctcccctccctggtctccatcaacgcagacagtggccacctgttcgccctcaggtcgctggactacgaggccctgcaggagttcgagttccgcgtgggcgccacagaccgcggctccccggcgctgagcagcgaggcgctggtgcgcgtgctggtgctggacgccaacgacaactcgcccttcgtgctgtacccgctgcagaacggctccgcgccctgcacagagctggtgccccgggcggcccagccgggctacctggtgaccaaggtggtggcagtggacggcgactcgggtcagaacgcctggctgtcctaccagttgctcaaggtcacggagcccgggctgttcggtgtgtgggcgcacaatggcgaggtgcgcaccgccaggccgctgagcgagcgcgacggggccaagcacaggctggtggtgctggtcaaggacaatggcgagcctccgcgctcgggcaccaccacgctgcacgtgttcctnnnnnnnnnnnnnnnnnnnnnnnnnnnnnnnnnnnnnnnnnnnnnnnnnnnnnnnnnnnnnnnnnnnnnnnnnnnnnnnnnnnnnnnnnnnnnnnnnnnnnnnnnnnnnnnnnnnnnnnnnnnnnnnnnnnnnnnnnnnnnnnnnnnnnnnnnnnnnnnnnnnnnnnnnnnnnnnnnnnnnnnnnnnnnnnnnnnnnnnnnnnnnnnnnnnnnnnnnnnnnnnnnnnnnnnnnnnnnnnnnnnnnnnnnnnnnnnnnnnnnnnnnnnnnnnnnnnnnnnnnnnnnnnnnnnnnnnnnnnnnnnnnnnnnnnnnnnnnnnnnnnnnnnnnnnnnnnnnnnnnnnnnnnnnnnnnnnnnnnnnnnnnnnnnnnnnnnnnnnnnnnnnnnnnnnnnnnnnnnnnnnnnnnnnnnnnnnnnnnnnnnnnnnnnnnnnnnnnnnnnnnnnnnnnnnnnnnnnnnnnnnnnnnnnnnnnnnnnnnnnnnnnnnnnnnnnnnnnnnnnnnnnnnnnnnnnnnnnnnnnnnnnnnnnnnnnnnnnnnnnnnnnnnnnnnnnnnnnnnnnnnnnnnnnnnnnnnnnnnnnnnnnnnnnnnnnnnnnnnnnnnnnnnnnnnnnnnnnnnnnnnnnnnnnnnnnnnnnnnnnnnnnnnnnnnnnnnnnnnnnnnnnnnntattttctgagtgttctgactgtggatcctctaaccaaagcagtttttatatgattgagaatattattatagaagtaaatgcatgatattaacaaaaacataattgcttgttatctggttaggttggtttctaagatgttatctaatttaggtttctttttttaaaacctataatcttttcattctacttttctggcaaacattgcagagaatgtttcctctactgaggnnnnnnnnncataattatgtgtgaaccatatatatgctagtagatgttgttttatttaaatatattcaaaaccttgtttggattaagatg

SEQ ID NO: 20863 - DNA, 398 bp, Macaca Mulatta
cagtttcttttgaaaaggctctttgggggtctcagcttctcgtacagtgttgaggatgatggtggcttagattccctggctggaagtgctgcatgaccatggtaaccacgccctctcttttctggcttttgcaggtgttctttgcctctgttcggtctggtggcagcagtcaggtttatttcatgaccttaggcaggacttctcttctgagctggtagaagcagtgtgatccagggattactggcctccagagtcttcaagatcctgagaacttggaattccttgtaactggagcttggagctgcaccgagggcaaccaggacagctgtgtgtgcagacctcacgtgttgggttctctcccctccttcctgttcctgttttaccagtttatccccatt

SEQ ID NO: 20864 - DNA, 219 bp, Macaca Mulatta
  misc_feature (1)...(219): n = A,T,C or G
tgacgagcgggccgggccaggccaggacagtttgaggcggncggcgcgggcctggccccgggatggcgatgttccgcagcctggtggcctcggctcagcagcggcagccaccggccgggccggcgggcggcgacagcggcctggaggcgcagtacacctgccccatctgcctggaggtctatcaccggcccgtggccatcggcagctgcggccacacgt

SEQ ID NO: 20865 - DNA, 1473 bp, Macaca Mulatta
  misc_feature (1)...(1473): n = A,T,C or G
aggttgaaaatatcctcttgcatgaccgaggccactatgtcctgtgtgactttggaagtgccaccaacaaattccagaatccacaaactgagggagtcaatgcagtagaagatgagattaagannnnnnnnnnnnnnnnnnnnnnnnnnnnnnnnnnnnnnnnnnnnnnnnnnnnnnnnnnnnnnnnnnnnnnnnnnnnnnnnnnnnnnnnnnnnnnnnnnnnnnnnnnnnnnnnnnnnnnnnnnnnnnnnnnnnnnnnnnnnnnnnnnnnnnnnnnnnnnnnnnnnnnnnnnnnnnnnnnnnnnnnnnnnnnnnnnnnnnnnnnnnnnnnnnnnnnnnnnnnnnnnnnnnnnnnnnnnnnnnnnnnnnnnnnnnnnnnnnnnnnnnnnnnnnnnnnnnnnnnnnnnnnnnnnnnnnnnnnnnnnnnnnnnnnnnnnnnnnnnnnnnnnnnnnnnnnnnnnnnnnnnnnnnnnnnnnnnnnnnnnnnnnnnnnnnnnnnnnnnnnnnnnnnnnnnnnnnngactgacagatcccattcccaccacagagacttcaattgcaccccgccagaggcctaaagctgggcagactcagccgaacccaggaatccttcccatccagcccgccctgacgccccggaagagggccactgttcagcccccacctcaggctgcaggnnnnnnnnnnnnnnnnnnnnnnnnnnnnnnnnnnnnnnnnnnnnnnnnnnnnnnnnnnnnnnnnnnnnnnnnnnnnnnnnnnnnnnnnnnnnnnnnnnnnnnnnnnnnnnnnnnnnnnnnnnnnnnnnnnnnnnnnnnnnnnnnnnnnnnnnnnnnnnnnnnnnnnnnnnnnnnnnnnnnnnnnnnnnnnnnnnnnnnnnnnnnnnnnnnnnnnnnnnnnnnnnnnnnnnnnnnnnnnnnnnnnnnnnnnnnnnnnnnnnnnnnnnnnnnnnnnnnnnnnnnnnnnnnnnnnnnnnnnnnnnnnnnnnnnnnnnnnnnnnnnnnnnnnnnnnnnnnnnnnnnnnnnnnnnnnnnnnnnnnnnnnnnnnnnnnnnnnnnnnnnnnnnnnnnnnnnnnnnnnnnnnnnnnnnnnnnnnnnnnnnnnnnnnnnnnnnnnnnnnnnnnnnnnnnnnnnnnnnnnnnnnnnnnnnnnnnnnnnnnnnnnnnnnnnnnnnnnnnnnnnnnnnnnnnnnnnnnnnnnnnnnnnnnnnnnnnnnnnnnnnnnnnnnnnnnnnnnnnnnnnnngattcaagccccagtaagacaacagccaaaggttcagacaaccccacctcctgccgtccagggacagaaagttggatctctcactccaccctcatcccccaaaacccagcgtgctgggcacaggcgtattctcagtgacgtaacccacagtgccgtctttggggtccctgccagcaaatcaacccagctgctccaggcagctgcagctgaggccagtctcaataagtccaag

SEQ ID NO: 20866 - DNA, 140 bp, Macaca Mulatta
actagcaggtcctatatgaatctcataaaggaagaatgttaagaccagtgaaacatttggatagccctaattcctaagtcaaactctactaacaaactcaaatatggcaacaaactcaaatatggcaacaatcatttaat

SEQ ID NO: 20867 - DNA, 1248 bp, Macaca Mulatta
  misc_feature (1)...(1248): n = A,T,C or G
atttacgggcaatgtcaagctcaaaggcatcattataatgggagaggacgatgactcacacccctctgagatgagactgtnnnnnnnnnnnnnnnnnnnnnnnnnnnnnnnnnnnnnnnnnnnnnnnnnnnnnnnnnnnnnnnnnnnnnnnnnnnnnnnnnnnnnnnnnnnnnnnnnnnnnnnnnnnnnnnnnnnnnnnnnnnnnnnnnnnnnnnnnnnnnnnnnnnnnnnnnnnnnnnnnnnnnnnnnnnnnnnnnnnnnnnnnnnnnnnnnnnnnnnnnnnnnnnnnnnnnnnnnnnnnnnnnnnnnnnnnnnnnnnnnnnnnnnnnnnnnnnnnnnnnnnnnnnnnnnnnnnnnnnnnnnnnnnnnnnnnnnnnnnnnnnnnnnnnnnnnnnnnnnnnnnnnnnnnnnnnnnnnnnnnnnnnnnnnnnnnnnnnnnnnnnnnnnnnnnnnnnnnnnnnnnnnnnnnnnnnnnnnnnnnnnnnnnnnnnnnnnnnnnnnnnnnnnnnnnnnnnnnnnnnnnnnnnnnnnnnnnnnnnnnnnnnnnnnnnnnnnnnnnnnnnnnnnnnnnnnnnnnnnnnnnnnnnnnnnnnnnnnnnnnnnnnnnnnnnnnnnnnnnnnnnnnnnnnnnnnnnnnnnnnnnnnnnnnnnnnnnnnnnnnnnnnnnnnnnnnnnnnnnnnnnnnnnnnnnnnnnnnnnnnnnnnnnnnnnnnnnnnnnnnnnnnnnnnnnnnnnnnnnnnnnnnnnnnnnnnnnnnnnnnnnnnnnnnnnnnnnnnnnnnnnnnnnnnnnnnnnnnnnnnnnnnnnnnnnnnnnnnnnnnnnnnnnnnnnnnnnnnnnnnnnnnnnnnnnnnnnnnnnnnnnnnnnnnnnnnnnnnnnnnnnnnnnnnnnnnnnnnnnnnnnnnnnnnnnnnnnnnnnnnnnnnnnnnnnnnnnnnnnnnnnnnnnnnnnnnnnnnnnnnnnnnnnnnnnnnnnnnnnnnnnnnnnnnnnnnnnnnnnnnnnnnnnnnnnnnnnnnnnnnnnnnnnnnnnnnnnnnnnnnnnnnnnnnnnnnnnnnnnnnnnnnnnnnnnnnnnnnnnnnnnnnnnnnnnnnnnnnnnnnnnnnnnccttggaacttccttaatgtttattagcttctaactagtgttgtaagtccaatgccagaatttggagatctgagttcttcttttcatggcttttattcactgtgactaataagcttcctaataaatccttgccagacttaa

SEQ ID NO: 20868 - DNA, 104 bp, Macaca Mulatta
agccaactcgtggagaaggtgtaggagtaattggagtcattgagtgcaatttcctaaaacctgcctacaacaaacaagactttgagtataccaaggagtaccgg

SEQ ID NO: 20869 - DNA, 101 bp, Macaca Mulatta
ggcccctgcctctctgaatgatacaagtttgctccatgatccttgtctgggtacgttcggtggaccagtgttcccatggcttgtgttgggaggctatgatg

SEQ ID NO: 20870 - DNA, 4049 bp, Macaca Mulatta
  misc_feature (1)...(4049): n = A,T,C or G
tggtgagagacgtgatgttctaccggttgctgtcaattgttggaagacaaagagccagcccaggatggcagaactggtcctctgcaagaaacagcgcgtcagctgcagaggcacgttccatggccctgcccacccaggcacaggtggtcatctgtggaggtggaatcatgggcacatctgtggcctatcacctctccaaaatggggtggaaggatattgtccttttggagcagggcaggnnnnnnnnnnnnnnnnnnnnnnnnnnnnnnnnnnnnnnnnnnactgccaggcacttgaccatggagcagaagatggcagactactcaaacaaactctaccatcagttagagcaagaaacagggatccaaacaggnnnnnnnnnnnnnnnnnnnnnnnnnnnnnnnnnnnnnnnnnnnnnnnnnnnnnnnnnnnnnnnnnnnnnnnnnnnnnnnnnnnnataggtatcccttctgagatcatctcccccaagaaagtggccgaacttcaccatctcctcaacgtgcacgacctggtgggggccatgcatgttcccgaggatgcagtggtgtcctctgctgacgtggctcttgccctggcaagtgcagcctcccaaaatggtnnnnnnnnnnnnnnnnnnnnnnnnnnnnnnnnnnnnnnnnnnnnnnnnnnnnnnnnnnnnnnnnnnnnnnnnnnnnnnnnnnnnnnnnnnnnnnnnnnnnnnnnnnnnnnnnnnnnnnagtgggcatacgagctgggtctgtccaacgaggagccggttagtatcccgctacatgcctgcgaacacttctacctcctgactcgccccttggagacccctctgcagagcagcacaccaanctattgtggatgctgatggaagaatttatattcggaactggcagggtggcatcttgtctgggggctttgagaagaacccgaaaccaattttcactgagggcaagaaccagctggagattcagaatctacaggaagactgggatcactttgngagcctctgttgagttcccttctgaggaggatgccagaattacagactctggagatcatgaagttggtgaattgcccacagaccttcacaccagacatgagatgcatcatgggcgagtctcctgcagcgcagggctactttgtcctggcaggaatgaactctgctggcctttcatttggtggaggagccagaaagtangtaccttgctgaatggatggtacatggttatccctcagaaaacgtttgggaattggacctgaaacgttttggagccctccagagcagccgtacctttctgcgccaccgggtcatggaagtcatgctttgatgtatgatctgaaggttccccgctgggacttccagaccggtaggcagttacgcacctctcctctctatgaccggctggatgcacagggagccaggtggatggagaaacacggatttgagaggccaaagtactttgttccccctgacaaggnnnnnnnnnnnnnnnnnnnnnnnnnnnnnnnnnnnnnnnnnnnnnnnnnnnnnnnnnnnnnnnnnnnnnnnnnnnnnnnnnnnnnnnnnnnnnnnnnnnnnnnnnnnnnnnnnnnnnnnnnnnnnnnnnnnnnntccactggggatcaggcattagaagttctacagtacctcttttccaatgacctggatgtgcctgtgggccacattgtgcataccggcatgctcaacgagggtggagggtatgaaaatgactgcagcatagcacgactgaacaagcgcannnnnnnnnnnnnnnnnnnnnnnnnnnnnnnnnnnnnnnnnnnnnnnnnnnnnnnnnnnnnnnnnnnnnnnnnnnnnnnnnnnnnnnnnnnnnnnnnnnnnnnnnnnnnnnnnnnnnnnnnnnnnnnnnnnnnnnnnnnnnnnnnnnnnnnnnnnnnnnnnnnnnnnnnnnnnnnnnnnnnnnnnnnnnnnnnnnnnnnnnnnnnnnnnnnnnnnnnnnnnnnnnnnnnnnnnnnnnnnnnnnnnnnnnnnnnnnnnnnnnnnnnnnnnnnnnnnnnnnnnnnnnnnnnnnnnnnnnnnnnnnnnnnnnnnnnnnnnnnnnnnnnnnnnnnnnnnnnnnnnnnnnnnnnnnnnnnnnnnnnnnnnnnnnnnnnnnnnnnnnnnnnnnnnnnnnnnnnnnnnnnnnnnnnnnnnnnnnnnnnnnnnnnnnnnnnnnnnnnnnnnnnnnnnnnnnnnnnnnnnnnnnnnnnnnnnnnnnnnngggcatggatttcattggtcgtgatgccctcctgctgcagaagcagaatggagtgtataaacgcctcaccatgttcatcctggacgaccatgacacagacctagacctttggccttggtggggagagcccatttaccggaatgggcagtacgttggcaagaccaccagcagtgcctacagctacagcctagagcgccacgtttgcctgggctttgttcacaacttttccgaggacacgggggaagagcaggtggtgacagcggatttcatcaaccggggagagtatgagattgacatcgcgggataccgcttccaggccaaggccaagctctaccccgtcgcctccctcttcacccagaagcgccgaaaggatgacatggagctgagtgacttacatgggaagtgatgccagggcaacctcaccttctccccatcatcttgtcctggagcgggcgtctccttggagcttttcttccttctgcctccgttcctcttatggagcttttgcctcccatctctcatctccttgatataattttgaacttgacctactttaaaaatttttgctctgcagccttccttgtccttccacctcctcctcctaatagtcactctggactctttttcccttcccacccccactcagctttcatggtggcaggaggtgtgtctgacaggcaggacagaaacaagctccactgtggacatgagtgacggtgacagctgctttcaaattctgcatctcaaagcagagcaagctggggtggtgcaggcctcggggcacgagtccctctcccttgggttgcattttcttggagcagcctatttattctgctggggttgccgtgtgtcagatgcagccctcaggggcagctcgtnnnnnnnnnnnggcagctcgttctcctgtaccgctgtgctgtgggctggcactggatacctctggcaagaggatgatcatctacctcactgatgagaggcatcgcacagacgttctctggtctgtagtggagataagcaattaaccgggcaccaccctcgtcctccctgcagaagctgttagcagacctttgggccagggcagcctccctataattttcttcatctcttgctgatctctataataaggttgctttttctttcttagttgagtaagcaagtaagccacagtggttgaaagggaaaaaccatgttgccttgtgtgttgcttttcctagtcaaaagggtctgacctgagaatgtccccgccgcagtggcgctgagtggtctgctgtggaaacgctgctgcttttctctcagctgtccaaagttcagccgtccctccctcgtcttctcccagtgtgcctgactttgtcaggccagcctcacctgtccccttcacagttggcccatcaagtcatgtttccctccttttagaacagggagggaaagggatcaggtgtgttgtcctgggcccttcaaccttgtgggccgtgctgagttccagagaactgccagaattctgggtttgactctccagcacagagcagagctccgcagaggtgacccacattagtccactgagagttctgagtccaggggttgtacgttgcataaggctagagactgcttttcctcctttcaccccaggctctttgtttccctccacccacccttccatatcctctggaagacgacgtgcgtgcccaggagtgccctgcacttccaggcagtgtctctgttttcccaaggtgaaacttaggtatcagcagtccagtctcaacacttcattttccccttgcatatcaactgccctaatctgac

SEQ ID NO: 20871 - DNA, 161 bp, Macaca Mulatta
ggggctgactctacttatccagagttgacagacaaacacaagcttgcagatatatgtaaaagtctaaatttccggcacaaaatggctcaatatgcccaacgtgcatcagtggcttttcatacccaggtatttgccttctgtcgatactgctagaaaagatg

SEQ ID NO: 20872 - DNA, 538 bp, Macaca Mulatta
actgtgagctttctgatcactgtattaaactacaaaaaagaaaaagcaatgtagagtcagcccttggtcatggattaaagtctcttaatcgtaaatctccctctaactccaatagcagtgaagatgctgattctgcatcagaattagctgactctgaaggagatgaggagtataatgccatgatgaaaaactgccttcgtgtgaatctcactttagctgatttggaacaattggctggcagtgatctgaaggttccaaatggagatactgagagtgatggaccagaaaccaccacccagtgcaagtttgacagaggctccaaaagccccaaggctcccacttgcctccgcagaggccaacagtgtattcatcctgaggagattgtggcttccctgttagaaggagagaacacctgtggcaaacagaaaccaaaggaaaacaatttaaagccaaaattccaggctttcaagggaataggctgtctatatgaaaaggagtcgatgaaaaaatcctaaaggacaatgttgcctctaacaat

SEQ ID NO: 20873 - DNA, 1014 bp, Macaca Mulatta
tgttactcatgtggacctggccttaacctacattttggttttatagttccttatgtgtttaaagcattatttatgtttgaattcctagcctaaatgctagccattgatatatgtcaaaatttaccctaatgatttggtctggtgaccttcagtgttgggaaaagtgactatcatggttataagtaagggtataatgaaacttagtatttcaaaatctattttttgagaagttctaagttaaacagctcttaaaatgtattatgtacgtggttgtggaaggaagagagatgtttcattatgagatcccaggcaaatggcaatatgtttgaggattgtctcctacataaaacagtgtaggcaatataacctcaaaattgcaaagcaatagttagatgcggaggttagaatttatcatgtaaacaaaaaatctttcaggaaaatgtaagacattgtagtcagtaagctgatgaagtcataagaggccatggctgaatcactgttagattgcagaaaagaagtcaggggccctctgccaaattgtgcctaacgtccctcagagactgttgattgttctttccccatctacttgtgtgattttacttgcataaaatcacagtgaaagaggggagaatcatctttaaaaagtgattgcataagtagtcctgggtttcagaagattacagctatcatttatataggaattacttgatttttctaagtcactctgatcaaaagggaccactgctttgacaatcaactctaaatacaaacaagagaggccaggcgcggtggctcacgcctgtcatcccagcactttggaaggctgaggcgggcggatcatctgaggtcaggagttcaagaccagcctgaccaacatggcgaaaccccatctctactaaaaatacaaaattagccgggtgtggtggtgggcgcctgtagtcccaactacttgggaggctgaagcaggaaaatcatttgaaccagggaggtggaggttgcagtgagccgagattg

SEQ ID NO: 20874 - DNA, 633 bp, Macaca Mulatta
  misc_feature (1)...(633): n = A,T,C or G
aggtacaagtaagttagtggataacagaccacctgccctagcaaaattcctcccgaatagtcaagaattaggcaacaccagtagctcagagggtgaaaaagactcgcccccaccggagtgggattctgttccagttcacaaacccggcagcnnnnnnnnnnnnnnnnnnnnnnnnnnnnnnnnnnnnnnnnnnnnnnnnnnnnnnnnnnnnnnnnnnnnnnnnnnnnnnnnnnnnnnnnnnnnnnnnnnnnnnnnnnnnnnnnnnnnnnnnnnnnnnnnnnnnnnnnnnnnnnnnnnnnnnnnnnnnnnnnnnnnnnnnnnnnnnnnnnnnnnnnnnnnnnnnnnnnnnnnnnnnnnnnnnnnnnnnnnnnnnnnnnnnnnnnnnnnnnnnnnnnnnnnnnnnnnnnnnnnnnnnnnnnnnnnnnnnnnnnnnnnnnnnnnnnnnnnnnnnnnnnnnnnnnnnnnnnnnnnnnnnnnnnnnnnnnnnnnnnnnnnnnnnnnnnnnnnnnnnnnnnnnnnnnnnnnnnnnnnnnngctcgggtttgtggagtcccgtcagcaacccaagcagccctgacttcactcccctcaattcgttctccgcctttggaaattcttttaatctaactggtg

SEQ ID NO: 20875 - DNA, 683 bp, Macaca Mulatta
ggggctgagcagcagttttgaggatgaccccttcttctctgagtccattcttgcacaccgagaaaatatgccacagatgatgagaagtttatctgaaccctttggaagagacttgctcagtatccctgatggtagagggagagctcgtaatcatagaggacataatgatgaagattctttgactcatacagatgtcagcccttttcagacagtggaccaaatggtgtcaaatatgagaaactatatgcagaaattagaaagaaactttggtcaactttcactggatccaaatggacattcattttgttcttcctcagttatgacttattccaaaataggagatgaaccaccaaaggtttttcaggcctcaactcaaacccgtagagctccaggaggaataaaggaaaccaggaaagcaatgagagattctgacagtggactagaaaaaatggctattggtcatcatatccatgaccgagctcatgtcattaaaaagtcaaagaacaggaagactggagatgaagaggtcaaccaggagttcataatatgaatgaaatgatgctcatgcttttgatgagatggcaagtgaggtttgagtacaaccagacgaccatctaaaacctagatgagagtgttgtctgagatctggctccagacttaaagaggagaactcacaagtcgct

SEQ ID NO: 20876 - DNA, 209 bp, Macaca Mulatta
  misc_feature (1)...(209): n = A,T,C or G
nnnnnnnnnnnnnnnnnnnnnnnnnnnnnnnnnnnnnctggatctctggttttctccaggctgcctaattaactgctttgtacatgttcctatccggagacagtgctgaggggttagggccagagccttcattaaggagaaatgaaatattcctcctgtgtatgtgggaggggcccttgctcctgcggctgcttccaccctcgcccccc

SEQ ID NO: 20877 - DNA, 504 bp, Macaca Mulatta
tggcccttgagttcctggacactggctgcctccaggcctctccatgccaccaccagtggtgtgccgcttgctgtaccaagaacctgctctctctctgcctcccttccctggtaagatgataattcaacattcattcaacagatatttgagtgccaatctgccacatattggagagggaagaggaagaaagcacacatgtttttttttaggaaagaaactatgaccgtgacccctatacactctgcattcttttattgtcattaggctttgaccctggcacctccctccagctgcccactcatgggcccttcaccacctgcccaggatctcacccagtactgacagctcctctttctggagagccccaagggccccctagccaaccccgcacgtgagtagggagagaaggatgtgtgtcatgagcctaagcctgtgctgtgtccaaccacagtgctggtgtccaaccacagtggataataaagatgaaaaggtttctgactaata

SEQ ID NO: 20878 - DNA, 170 bp, Macaca Mulatta
ggtttatggtgataaagacgctgatggattctaccgtggagaaacctgtgcccggcttggccttattccttgtaacatggtctctgaaatacaagcagatgacgaggagatgatggatcagcttctcagacagggctttctccctctgaatacacctgtggagaaaatag

SEQ ID NO: 20879 - DNA, 1058 bp, Macaca Mulatta
  misc_feature (1)...(1058): n = A,T,C or G
ggaagcacnnnnnnnnnnnnnnnnnnnnnnnnnnnnnnnnnacagttatgaaaatttctatctagcctccgttttgaatggttttaagaaactttgtatatggaggatggaaatgcttatatatttattgaaaatccttttatttgaaattaaaattatttggtaaataattgtttgatatttggggagggttttggaggggaggtaatgtcactgataaattaaaagcctgttgattttgcagaaaggtactgttagtgactgataggatgcctttgttttgtacatgaaccaaatctttgttttacgtttcttttatccaaaatatttaggcatctgacattttcaaccagaatttcaattacatactgtgatttttatttgttgcaatacattaaaatttcagaggtactttggggctcaaaagctaggatttctaagtcagtatgtgcatttcacatgataaagctgttaatggtgagcaaagtattatatactaactagatttttccacatctgtatagtatattatatgtattttgtggtattgagagtatagaaagtttagagtgtcaaacatgcgtttaatgtgtatttttaaacaaattttatggcaattaaaatatttggagacaagggtatcacatttcaatttgtaaagattctttttaaactttactggtgtcatttaagatgcctttgtacaatgccccaaaccatagcctggaggaaaactaaggtttaaataaattatcaaaatagattttctgtattaaagtnnnnnnnnnctcactccttaaacncaactaaaaccccgnnnnnnnnnnnnnnnnnnnnnnnnnnnnnnnnnnnnnnnnnnnnnnnnnnnnnnnnnnnnnnnnnnnnnnnnnnnnccnnnnnnnnnnnnnnnnnnnnntttttctaaacattttttggggcgggggcccaaaaagaaagtaaaaatgatatattcttttccaagaaaccgggcaaaaaaggtctggatcccccaaaaaaaccccggggcaaaggagtttaaaaaaccaagggtttcgggt

SEQ ID NO: 20880 - DNA, 661 bp, Macaca Mulatta
caagtgacttaatcaaactagaatgtgcatttctcaacctttgatgtcctttcacagccatacttagactctttttgcctttttaaattgtttctattattatagatttatatctgcacttgatctgtgactttgtaatttgtaagaaaactctgtagaaagccctgccatgacttccacgtggggtcccgggggtcctgcttttaacattgccttccagctttgcacccagcatgctgtctacgtgctgattacaggcagttgtactttccttggcaggattagggacacttgtggaggccgggctcacccctgagcagataaagagactctccctgaggtggcttcagcgtaagcttttggcagccacccaactcagttctcacgtcttctactcctaccttctctgtctttgaatttggatattccttccctggtccaagctcctatcttcagtcaaatgctgtttttactgcttcctaaggatagattatcaagaagtttaacagctcggccagctcagtgaaacactgaagctaatgggatgttgggtaagaaggttctgtgccgtctcattgaaaaccgagccggtcaaccacaaggctggcggggtgtgatccttgtaacgtcttgttgtgtctgttactcacggatgtcggta

SEQ ID NO: 20881 - DNA, 1905 bp, Macaca Mulatta
  misc_feature (1)...(1905): n = A,T,C or G
tgatgatgaaaacacatttaaaatcttagttgcaacagatattcatcttggatttatggagaaagatgcagtcagaggaaacgatacgtttgtaaccctcgatgaaattttaagacttgcccagggaaatgaagtnnnnnnnnnnnnnnnnnnnnnnnnnnnnnnnnnnnnnnnnnnnnnnnnnnnnnnnnnnnnnnnnnnnnnnnnnnnnnnnnnnnnnnnnnnnnnnnnnnnnnnnnnnnnnnnnnnnnnnnnnnnnnnnnnnnnnnnnnnnnnnnnnnnnnnnnnnnnnnnnnnnnnnnnnnnnnnnnnnnnnnnnnnnnnnnnnnnnnnnnnnnnnnnnnnnnnnnnnnnnnnnnnnnnnnnnnnnnnnnnnnnnnnnnnnnnnnnnnnnnnnnnnnnnnnnnnnnnnnnnnnnnnnnnnnnnnnnnnnnnnnnnnnnnnnnnnnnnnnnnnnnnnnnnnnnnnnnnnnnnnnnnnnnnnnnnnnnnnnnnnnnnnnnnnnnnnnnnnnnnnnnnnnaggatccattccagatgaaaggctctatcgaatgtttgtcaataaaaaagtaacaatgttgagaccaaaagaagatgagaactcttggtttaacttatttgtgaatcatcagaacaggnnncaggagtaaacatggaagtactaacttcattccagaacaatttttggatgacttcattgatcttgttatctggggccatgaacatgagtgtaaaatagctccaaccaaaaatgaacaacagctgttttatatctcacaaccgggaagctcagtggttacttccctttccccaggagaagctgtaaagaannnngttggtntgctgcgtattaaagggaggaagatgaatatgcagaaaattcctcttcacacagtgcggcagtttttcatggaggatattgttctggctaatcatccagatatttttaacccagataatcctaaagtaacccaagccatacaaagcttctgtttggagaanagattgaagaaatgcttgaaaatgctgaacgggaacgtctgggtaattctcgccagccagagaagcctcttgtacgactgcgagntggactatagtggaggttttgaacctttcagtgttcttcgctttagccagaaatttgtggatcgggtagctaatccaannnnnnnnnnnnnnnnnnnnnnnnnnnnnnnnnnnnnnnnnnnnnnaggagaagagataaactttgggaagcttatcacaaaaccttcagaaggaacaactttaagggtagaagatcttgtaaaacagtattttcaaannnnnnnnnnnnnnnnnnnnnnnnnnnnnnnnnnnnnnnnnnnnnnnnnnnnnnnnnnnnnnnnnnnnnnnnnnnnnnnnnnnnnnnnnnnnnnnnnnnnnnnnnnnnnnnnnnnnnnnnnnnnnnnnnnnnnnnnnnnnnnnnnnnnnnnnnnnnnnnnnnnnnnnnnnnnnnnnnnnnnnnnnnnnnnnnnnnnnnnnnnnnnnnnnnnnnnnnnnnnnnnnnnnnnnnnnnnnnnnnnnnnnnnnnnnnnnnnnnnnnnnnnnnnnnnnnnnnnnnnnnnnnnnnnnnnnnnnnnnnnnnnnnnnnnnnnnnnnnnnnnnnnnnnnnnnnnnnnnnnnnnnnnnnnnnnnnnnnnnnnnnnnnnnnnnnnnnnnnnnnnnnnnnnnnnnnnnnnnnnnnnnnnnnnnnnnnnnnnnnnnnnnnnnnnnnnnnnnnnnnnnnnnnnnnnnnnnnnnnnnnnnnnnnnnnttaaatctacaagacagcagctttcccgaaatgtcactactaagattatttcagaggnnnggtgattgaggtagattaccagatgaggaagaagacatttttcctaccacttcaaagacagatcaaaggt

SEQ ID NO: 20882 - DNA, 167 bp, Macaca Mulatta
agggcattggccctaaactgtgatgctccattggatgataaaattggagcagagtctcggaattggagagctggtaagccagtcagagtgatacgcagttttaaagggaggaagatcagcaaatatgctcctgaagaaggcaacagatatgatggcatttataaggt

SEQ ID NO: 20883 - DNA, 1555 bp, Macaca Mulatta
  misc_feature (1)...(1555): n = A,T,C or G
gctgggtgtggttgctcacgcctgtaatcgcagcacttcgggagactgaggcgggcagatcacgaggtcggagttcgagaccagggtgaccaacatggtaaaaccccatctctactaaaaatacaaaattggccacgcatggtggcgcatgcctgtaattccagctactcaggaggctgaggcagcagaattgcttgaaccctggaggtggaggttgcagtgagccaagatagcgccattgcactccagcnnnnnnnnnnnnnnnnnnnnnnnnnnnnnnnnnnnnnnnnnnnnnnnnnnnnnnnnnnnnnnnnnnnnnnnnnnnnnnnnnnnnnnnnnnnnnnnnnnnnnnnnnnnnnnnnnnnnnnnnnnnnnnnnnnnnnnnnnnnnnnnnnnnnnnnnnnnnnnnnnnnnnnnnnnnnnnnnnnnnnnnnnnnnnnnnnnnnnnnnnnnnnnnnnnnnnnnnnnnnnnnnnnnnnnnnnnnnnnnnnnnnnnnnnnnnnnnnnnnnnnnnnnnnnnnnnnnnnnnnnnnnnnnnnnnnnnnnnnnnnnnnnnnnnnnnnnnnnnnnnnnnnnnnnnnnnnnnnnnnnnnnnnnnnnnnnnnnnnnnnnnnnnnnnnnnnnnnnnnnnnnnnnnnnnnnnnnnnnnnnnnnnnnnnnnnnnnnnnnnnnnnnnnnnnnnnnnnnnnnnnnnnnnnnnnnnnnnnnnnnnnnnnnnnnnnnnnnnnnnnnnnnnnnnnnnnnnnnnnnnnnnnnnnnnnnnnnnnnnnnnnnnnnnnnnnnnnnnnnnnnnnnnnnnnnnnnnnnnnnnnnnnnnnnnnnnnnnnnnnnnnnnnnnnnnnnnnnnnnnnnnnnnnnnnnnnnnnnnnnnnnnnnnnnnnnnnnnnnnnnnnnnnnnnnnnnnnnnnnnnnnnnnnnnnnnnnnnnnnnnnnnnnnnnnnnnnnnnnnnnnnnnnnnnnnnnnnnnnnnnnnnnnnnnnnnnnnnnnnnnnnnnnnnnnnnnnnnnnnnnnnnnnnnnnnnnnnnnnnnnnnnnnnnnnnnnnnnnnnnnnnnnnnnnnnnnnnnnnnnnnnnnnnnnnnnnnnnnnnnnnnnnnnnnnnnnnnnnnnnnnnnnnnnnnnnnnnnnnnnnnnnnnnnnnnnnnnnnnnnnnnnnnnnnnnnnnnnnnnnnnnnnnnnnnnnnnnnnnnnncagctcacctgttcttcaggaccagccctgnnnggcccaggcccaggctccgagaggccatgtcccaacctgccctggccccggagaagctgcgccgccacctgtcccccttccttggtggggcctggctttggggcaagactgagtcacgggggaagggggatcccgtacctgctgctgcttcctctgtcttggctaacctctgtccccctgaacccctaaccataccccaagagctcccaaagcctgagaccagggtcatttgtccctacctccccgcctggccctgctgttgctagtacctgttatttattacctggaggcctgtccagcacccaccctacccccataaagcattgtttac

SEQ ID NO: 20884 - DNA, 756 bp, Macaca Mulatta
ccttgtgctttttagagctaagcctgggatgaccaaattcaccgcagctccttcattcacggggctggacgtagctgggaccgagtccatgttactggctcggtactcaacacaacccaagtttcatcccaggaaatgtcctcgcagtggatgcagttcacatgctgaggaacgcccagctctggacagagttcttataaatgtataaattaggctcagaaaccactgcagtctgacctgctgtacaggctgcccacactgctgacctcgctggtgagcagcatgtcacttctgagccatctgctgctctctcgtttcttcaccccaactgtcccttgttttcgatcaatggggaccagccactgccccaggagcactttagggctctcagttcaaaccaaaggacagttgaactcggatatgtttcatgcgggattctgggagctttctgggaattcagctggagtcaagtcaagatgctctcaaggacctttcggacacagagccccaaagtggaccctggtgaggcaggggtggtcctgcctccacttcccaagcctgagccaagctcatcttcactgaatttctcatttggccgagtaacaactgaacttcgtggtttggtgtttagccttcagtttattccactacctcccacccagaggtttgtgcgagcctgttttgcagggttgtgtgaaaccagggcacttctttgtaagaggttttgcccattcagccacggtcatgtgacatgca

SEQ ID NO: 20885 - DNA, 380 bp, Macaca Mulatta
  misc_feature (1)...(380): n = A,T,C or G
agaagcctcagtgaaaggtagggaactttctttccnnnnnnnnnnnnnnnnnnnnnnnnnnnnnnnnnnnnnnnnnnnnnnnnnnnnnnnnnnnnnnnnnnnnnnnnnnnnnnnnnnnnnnnnnnnnnnnnnnnnnnnnnnnnnnnnnnnnnnnnnnnnnnnnnnnnnnnnnnnnnnnnnnnnnnnnnnnnnnnnnnnnnnnnnnnnnnnnnnnnnnnnnnnnnnnnnnnnnnnnnnnnnnnntactgtgtgcatttttgtgtccattgtttaaatgtaatgatattggacaaaaaatatacagtaaaattaagtcagttctgctgaaactggattttggaattggagaatatattaatcagaagaaacgtgagagatct

SEQ ID NO: 20886 - DNA, 95 bp, Macaca Mulatta
gttcaagaggatgttgaaccgtgaactcacacacctgtcagaaatgagcaggtcgggaaaccaggtctcagagtacatttccacaacattcctgg

SEQ ID NO: 20887 - DNA, 653 bp, Macaca Mulatta
cttcctgcgcaggagccgcagggccgtaggcagccatggcgcccagccggaatggcgtgatcttgaagccccacttccacaaggactggcagcggcgcgtggccacgtggttcaaccagccggcccggaagatccgcagacgcaaggcccggcaagccaaggcgcgccgcatcgccccgcgccccgcgtcggggcccatccggcccatcgtgcgctgccccacggttcggtaccacacgaaggtgcgcgctggccgcggcttcagcctggaggagctcagggtggccggcgttcacaagaaggtggcgcggaccatcggcatctctgtggatccgaggaggcggaacaagtccacggagtccctgcaggccaacgtgcagcggctgaaggagtaccgctccaaactcatcctcttccccaggaagccctcggaccccaagaagggagacagttctgctgaagaactgaaactggccacccagctgacgggaccggtcatgcccatccggaatgtctataagaaggagaaagctcgagtcattactgaggaggagaagaatttcaaagccttcgctagtctccgcatggcccgtgccaacgcccggctcttcggcatacgggcaaaaagagccaaggaagccgcagaacaggat

SEQ ID NO: 20888 - DNA, 643 bp, Macaca Mulatta
  misc_feature (1)...(643): n = A,T,C or G
aggctggactggcagtctcttggacttctcttcagtgaagaaaaagcgtcaggtggaaatggaatgccctgccccaggaacatggcggaagcacaggttctgtacctcagatggaccctgggacttcaggttctcagttggcttccccagattctgatcctacggctacagagtgtatataacgaaataaaagcaaatgtttgaactagtatgcggccttacttacaaagaaaaccttttttcaccctgatttctaattgtttcattgaaacggctgtaaaatggatgatttctccaggaagaaatctgctttnnnnnnnnnnnnnnnnnnnnnnnnnncaaaactggtaatgatttggagtaatcatatgggcatattgaatccgggtagtgttttgctggtggtagagtggttgagactccctgggaggactttttccgccttcgctcctacaggtttaagattctttttaagccaggcatggtggctaacctgaggctaggacttcgagactnnnnnnnnnnnnnnnnnnnnnnnnnnnnnnngctaaaacatacacaatcattttcgtatctttacccaggcgtggtggtgcatgcctcnnnnnnnnnnnnnnnnnnnnnnnnnnatangagaactgct

SEQ ID NO: 20889 - DNA, 856 bp, Macaca Mulatta
cttgaaccagattatagatttaaaagtatatgacatgtattttgtatttaaagctagaatagccagtatttatgttttttataaaactgtgcaatacgaatcatgcaatcacaataaatttgtagctcccgagtgtcctaaagggagtgcacatctttgaagctggtgtgttaatactatgtaataaatggttaattatcaaatgatgctgctgccaaaattatattaatagtgagtttcaggcccctgggcattttgtaccatgtaattatcctatggtgatgctgtttctcgttgttagtggcagtagtgcctccgtctcctagtgataatgctccaagtctatgaactgttaaatcagcattcattttaagaaaagcaactttagtttcaaagatacttttaagcttctaaattgatcatttaaactatttctttaaataagagagccaaattagaggctcatactttagcttgtgaagaagataatgaattttttaaagggaactttttatgcaatgttcaggataaatgcatactgctggccaatcagtgtcatctcctgggtaaattttgatgtcacgttataaagatatgcataattgatggtttctagattatctagtccaaacaatagtttatttttttcttcatttgaaccaacatgctacagtagctaagaaagtattaaaactatatccatccatataaagatgaaatatggacctatcttcattagaaagtcataagttgaacaccgaccattttatttccttcttgaaaagaacccacaatttttaattttggccacaatggaattttctcttttcccttggaaggggaatggaaaaaaata

SEQ ID NO: 20890 - DNA, 170 bp, Macaca Mulatta
tggaagaatttaaaaatgatatgctaactgagaaagatgcccgatacctggctgttaaagaagtgttttgtcatctaattgaatgcaataaagatattccagggatttctcagatcaattggattattcatgtggttgattccccaattaataatgcctttgtgcttcca

SEQ ID NO: 20891 - DNA, 2295 bp, Macaca Mulatta
  misc_feature (1)...(2295): n = A,T,C or G
ggtgatttggattattattggttggatcctgccacgtggcacagccgggagacatcacctattagttcgnnnnnnnnnnnnnnnnnnnnnnnnnnnnnnnnnnnnnnnnnnnnnnnnnnnnnnnnnnnnnnnnnnnnnnnnnnnnnnnnnnnnnnnnnnnnnnnnnnnnnnnnnnnnnnnnnnnnnnnnnnnnnnnnnnnnnnnnnnnnnnnnnnnnnnnnnnnnnnnnnnnnnnnnnnnnnnnnnnnnnnnnnnnnnnnnnnnnnnnnnnnnnnnnnnnnnnnnnnnnnnnnnnnnnnnnnnnnnnnnnnnnnnnnnnnnnnnnnnnnnnnnnnnnnnnnnnnnnnnnnnnnnnnnnnnnnnnnnnnnnnnnnnnnnnnnnnnnnnnnnnnnnnnnnnnnnnnnnnnnnnnnnnnnnnnnnnnnnnnnnnnnnnnnnnnnnnnnnnnnnnnnnnnnnnnnnnnnnnnnnnnnnnnnnnnnnnnnnnnnnnnnnnnnnnnnnnnnnnnnnnnnnnnnnnnnnnnnnnnnnnnnnnnnnnnnnnnnnnnnnnnnnnnnnnnnnnnnnnnnnnnnnnnnnnnnnnnnnnnnnnnnnnnnnnnnnnnnnnnnnnnnnnnnnnnnnnnnnnnnnnnnnnnnnnnnnnnnnnnnnnnnnnnnnnnnnnnnnnnnnnnnnnnnnnnnnnnnnnnnnnnnnnnnnnnnnnnnnnnnnnnnnnnnnnnnnnnnnnnnnnnnnnnnnnnnnnnnnnnnnnnnnnnnnnnnnnnnnnnnnnnnnnnnnnnnnnnnnnnnnnnnnnnnnnnnnnnnnnnnnnnnnnnnnnnnnnnnnnnnnnnnnnnnnnnnnnnnnnnnnnnnnnnnnnnnnnnnnnnnnnnnnnnnnnnnnnnnnnnnnnnnnnnnnnnnnnnnnnnnnnnnnnnnnnnnnnnnnnnnnnnnnnnnnnnnnnnnnnnnnnnnnnnnnnnnnnnnnnnnnnnnnnnnnnnnnnnnnnnnnnnnnnnnnnnnnnnnnnnnnnnnnnnnnnnnnnnnnnnnnnnnnnnnnnnnnnnnnnnnnnnnnnnnnnnnnnnnnnnnnnnnnnnnnnnnnnnnnnnnnnnnnnnnnnnnnnnnnnnnnnnnnnnnnnnnnnnnnnnnnnnnnnnnnnnnnnnnnnnnnnnnnnnnnnnnnnnnnnnnnnnnnnnnnnnnnnnnnnnnnnnnnnnnnnnnnnnnnnnnnnnnnnnnnnnnnnnnnnnnnnnnnnnnnnnnnnnnnnnnnnnnnnnnnnnnnnnnnnnnnnnnnnnnnnnnnnnnnnnnnnnnnnnnnnnnnnnnnnnnnnnnnnnnnnnnnnnnnnnnnnnnnnnnnnnnnnnnnnnnnnnnnnnnnnnnnnnnnnnnnnnnnnnnnnnnnnnnnnnnnnnnnnnnnnnnnnnnnnnnnnnnnnnnnnnnnnnnnnnnnnnnnnnngtgaactgcagccctttcttgacagggctaggagtgctagtaccaactgcttgagaccagatactagtttgcattcaccagaacgagaaagnnnnnnnnnnnnnnnnnnnnnnnnnnnnnnnnnnnnnnnnnnnnnnnnnnnnnnnnnnnnnnnnnnnnnnnnnnnnnnnnnnnnnnnnnnnnnnnnnnnnnnnnnnnnnnnnnnnnnnnnnnnnnnnnnnnnnnnnnnnnnnnnnnnnnnnnnnnnnnnnnnnnnnnnnnnnnnnnnnnnnnnnnnnnnnnnnnnnnnnnnnnnnnnnnnnnnnnnnnnnnnnnnnnnnnnnnnnnnnnnnnnnnnnnnnnnnnnnnnnnnnnnnnnnnnnnnnnnnnnnnnnnnnnnnnnnnnnnnnnnnnnnnnnnnnnnnnnnnnnnnnnnnnnnnnnnnnnnnnnnnnnnnnnnnnnnnnnnnnnnnnnnnnnnnnnnnnnnnnnnnnnnnnnnnnnnnnnnnnnnnnnnnnnnnnnnnnnnnnnnnnnnnnnnnnnnnnnnnnnnnnnnnnnnnnnnnnnnnnnnnnnnnnnnnnnnnnnnnnnnnnnnnnnnnnnnnnnnnnnnnnnnnnnnnnnnnnnnnnnnnnnnnnnnnnnnnnnnnnnnnnnnnnnnnnnnnnnnnnnnnnnnnnnnnnnnnnnnnnnnnnnnnnnnnnnnnnnnnnnnnnnnnnnnnnnnnnnnnnnnnnnnnnnnnnnnnnnnnnnnnnnnnnnnnnnnnnnnnnntccagagaagtacagaaacaggcatggcagctgaaatgaggaagatggtaaggcagccgagccgagagtctactgatggcagcatcaacagttacagctctgagggca

SEQ ID NO: 20892 - DNA, 792 bp, Macaca Mulatta
  misc_feature (1)...(792): n = A,T,C or G
ggggtacttcgtatttttttttaattgccttgtttgccttcaacttccttgattttcatggtttacatgggtgtgtgtaggggtcatgtctgtgtctgatgagtgtggaatctctggatgtgtactgtcagtcgtgtccaccaggcctcgaatatcatatgggaaatgtcatagttaaaagtgtacagccaggcccgtgttctgttaatagcgtgaaattgtcannnnnnnnnnnnnnnnnnnnnnnnnnaggaaccaaatgtgaccttgtgtatatgttggtagctgacagtcttcaaggctactgatgggtggccccttaaattaatcttgtctttgattgctgtgtgcagggaaaggtgtccccgttcgttcatgctgttttgggcggatggggggtatttgcaagaatactcattttgatgtaataggtcctcttgtcagagatgctctaccacagacattaatagctgagcagcagccacatggattgattgtatccactcaccattgacgatggcattgagcgtagctagcttatttccatccctacgtgtttttgagcttgctcttacgttttaagaagtgccaggggtacattttttgcactgaaatctaaagatgttttaaaaaacacttttcacaaaactaagtcctttgtcattgcattattttactccaggtgtttgaacaatttttgtaggttaaatttatgaaagaatttttttcaataaaaaaataccttttttcaggaacccaatnctatagaataaaatagctagcatattacca

SEQ ID NO: 20893 - DNA, 667 bp, Macaca Mulatta
  misc_feature (1)...(667): n = A,T,C or G
gccagagattttatagtgattcacaccacttgaaaagagagcgacatgaaaaggaatgggagcaagaatctgaaaggcatagacgcagagacagaagccaagacaaggacagagacagaaaaaccagggaggaagggcataaagataaagagagggcacggttatcacatggtgatcgaggaacagatggaaaagcaagcagagatagtaggagtgtagacaagaagccagataaacctaaaagtgaagactatgagaaggacaaagaacgagaaaaaagtaaacatagagaaggagaaaaggacagggataggtaccacaaagatagggaccacactgacagaactaaaagcaaaaggtaaaatttgcaggctgcttcaggattacatttaaataactgttaaatgttgtatcttgtaaacaaaagaaagattgcctgctaggattgtgccatctttaaaatttttactatcagtcatttgcagaacagtaaattctatgtgttggtgcagagtgtcctgtaccagtgctcatcatcccttcttcataccaactgtccctagttataggaatttnnnnnnnnnnnnnnnnnnncattgctgtatattcaaagatttgttttattaatatgcaataaaggcttagnnnnnnnnnnnnnnnnnnnnnn

SEQ ID NO: 20894 - DNA, 750 bp, Macaca Mulatta
aatttttgcctctggcactcagctttgtgtatttcgaaatggagataagtatagggaggtcatggaaggaaaattgccagaattcccaaaccatgtaacactcattgagaattccagatccattatatctaaagggcaagtgaaggaaacagtattgtgaactgggtataactccttgattcttacctagtacattcttaatttgtgagacccaaaggttgataaataataatttaagattgtacagtactctaaacatctgcaaaggtctagatgttatcagtattactagtttttatttctgccagtagctcccttttaggttacattgttgtcctctttccagtgtggcgtctgttattggttttttactatggcaagttcattaaaaagcttgctccattgttgtcttcaagtaatgcccataaggaggtggaagatacctgagacaattaaggctttagcttctaggcaagagaaataacattgcattaaattccaagtttctttctgctagacttgaatgtgtctagccactctaatttatggggccttttggtttttttcctattgtactttgtatgtagaattgttttgaaatatcaagcatatttgctttgaatttgagctctttcttaattttgtattctttgaataaaatgtaaatccaatatttattaaagatttcctttcattgctgctatgcagaaacctaggaagaatggggaatctttgtaggatttctatctt

SEQ ID NO: 20895 - DNA, 624 bp, Macaca Mulatta
  misc_feature (1)...(624): n = A,T,C or G
agtgtagtgttcttcagagtctgaaagagctattgcagaattggctgttgtggctttctatggacattcacatgaaacctgttacaaacagtcctcnnnnnnnnnnnnnnnnnnnnnnnnnnnnnnnnnnnnnnnnnnnnnnnnnnnnnnnnnnnnnnnnnnnnnnnnnnnnnnnnnnnnnnnnnnnnnnnnnnnnnnnnnnnnnnnnnnnnnnnnnnnnnnnnnnnnnaaggtgtgtgacatatatataaattataaccttccgttagtggtgttgtttcctcaagggatcttctattctgcactcctcagcctggataccagcatcctgaaccagctgtgttttattatgcacnnnnnnnnnnnnnnnnnnnnnnnnnnnnnnnnnnnnnnnnnnnnnnnngacaaaatcagagttcaatttcagcagcaagacttatcaagaatttaatcactatttgacatcaatggttggttgcctgtggacgtctaaaccctttgggaaaggaatatatattgaccctgaaatcctagattaaactggagtgactgaatataaaaacagtttaaatgtaatccatcatccttctttcttgagttatgctgtttcctttttgctgcagg

SEQ ID NO: 20896 - DNA, 794 bp, Macaca Mulatta
  misc_feature (1)...(794): n = A,T,C or G
ggggcaccgttccaagagaaagattccggcagcgatgaagatttcctaatggaagatgatgatgatagtgactatggcagtnnnnnnnnnnnnnnnnnnnnnatggttaagaagtccaaacctnnnnnnnnnnnnnnnnnnnngccgaaacccaggctaaaggctacagtgacgccaagtccagtgaaaggcaaagggaaagtgggtcgccccacagcttcaaaggcatcaaaggaaaagactccttctcccaaagaagaagatgaggaaccagaaagcccgccagaaaagaaaacatctacaagccccccacccgagaaatctggggatgaagggtctgaagatgaagccccgtctggggaggattagaagtgatgatggtctggggagagatttnnnnnnnnnnnnnnnnnnnnnnnnnnnnnnnnnnnnnnnnnnnnnnnnnnnnnnnnctacttaagatagaacatggttttggctatggcttgactcatgggctttcagtgcttttttccatttgttgaaagtaacannnnnnnnnnnnnnnnnnnnnnnnnnnnnnnnnncaaaccattgtatgtttaagtgtttaagtcacctttttgtctattggtctctttgccagccctcccctttcccaatgaaagccatgtcaaattaaatcactggattgactgcttcatctttttggtttttaatgaaaggtataccacagttgtaaagcaataagatttgagatgaactttatttgaaacttttgctttttgctaaaaaataccaagtttgaataatat

SEQ ID NO: 20897 - DNA, 693 bp, Macaca Mulatta
tctataggcatatatttagtaggatggtctctcattcctggtggaggaacttctctcatgatgggtttgactactttatttaaccagaattgggtttttagctcccaaaagtgttcctgctttaaataacacctggaaggctggatgaatcatatgtttcctttatgtttggttctttctcctgaacatctgaatacttctgatgaagttgttttgaattaaattagaaatagctgcattcctaagggaagactgttctctccttatgttcataatatttagtttgtagttgcttcatttggtggctctaaccaaagcagttcatcctgggacatcagtcaaacactgccatttctttttaatatctgacattaccttagcattcttctttttcagatttttcaatatctggactttttaaacatttagttgagttcttatttactattaaaataaaatttattgatggctttcttacaaatttcagattctattctatgtttatactggatgagagttttctcaaatgcaggcaaaacaatattcaattccatgatgttgttggtttactttccttctagacactaaatattcacaatgtcggaaatatctgagactatggcttcacttcttgataccttccttttgccataagatgtattcgctttatttctgagtttttgcttgactttc

SEQ ID NO: 20898 - DNA, 396 bp, Macaca Mulatta
acatcctattgataaagtaaaactatttaccgtgactgtgttctgctttctttcatttcttaatttaattcggatgcaatagacttttctcctaacacagatgtcagactccagagtggagtgattttggggggggttcgtctgtctggttttacataaagagctttgtttgcatttggagatgacagaggcttctgtcctttgcagtgtgaggctcatctaggtcacgtgtttcctgatggacctggacccaatggtcagaggttttgcatcaacagtgtggctctgaagttcaaaccaaggaaacactgactgtcttcaagagtacggttcccttgccaccccttcatgcgcactctcaatttccataattcgcttgaatgacttgctttgttt

SEQ ID NO: 20899 - DNA, 668 bp, Macaca Mulatta
  misc_feature (1)...(668): n = A,T,C or G
gaagcagagggaccgcgagctgcgccggaatcagannnnnnnnnnnnnnnnnnnnnnnnnnnnnnnnnnnnnnnnnnnnnnnnnnnnnnnnnnnnnnnnnnnnnnnnnnnnnnnnnnnnnnnnnnnnnnnnnnnnnnnnnnnnnnnnnnnnnnnnnnnnnnnnnnnnnnaggccgtgaagctacaggagcaggagcagatggaggagaagctgcggctgcagcagcaggaggagcggcggcggctgcaggaggccgagctgcggcgcgtggaggaggagaaggagcgcgcgctgggcctgcagcggaaggagcgggagctgcgcgagcggctgctgagcatcctgctgagcaagaagccggacgacgcccacgcgcaagacgagctgggcgtggcgcacgccgacctgctgcagccgatactggacatcctgcagaccgtgtcgtccggctgcgtgagcgccgccgcgctgcaccccctcgggggccagctccccgccggggcccccaaggagaccgcggcccagccggaggccgacggcgctccccaaagcgtgaacggcagcgtggccgaggaggccccgtgcagggagggtcagagctgctgccgcgcggcccccgaggacggctctccggagaagaggtgccccggcggcgtcctctcctgcat

SEQ ID NO: 20900 - DNA, 2079 bp, Macaca Mulatta
  misc_feature (1)...(2079): n = A,T,C or G
tttcctgtgaatttctttcagctggaaatggagaagcttcagctacaagcccttgagcaagagcacaagaagctggccgcccgcctcgaggaagagcgcggcaagaacaagcaggtggtcctgatgctggtcaaagagtgcaagcagctctccggcaaggtcatagaggaggcccagaagctcgaagacataatggccaaactggaagaggaaaagaaaaagacaaatgaattagaagaagaactctctgctgagaaacgaagaagcacagaaatggaagctcagatggaaaaacagctctctgagtttgacaccgagcgggaacagcttcgtgccaagctgaaccgggaagaagcacacaccactgacctcaaagaggagatagacaagatgaagaaaatgattgagcaactgaaaaggggaagtgacagtaaaccaagcctctctcttccacggaagacaaaagataggcgtttggtttccatatctgtgggaacagaaggaactgtgacaaggtctgttgcatgccagacagacctagtgacagaaagtgctgaccatgtgaaaaagttgcctttaaccatgcctgtaaaaccttccacagggagccccctagtttctgcaaatgcaaaagggagcgtgtgcactagtgccacaatggccagaccaggnaccaggcatagctcctcagaactcccaggctccacctatgcacagtttacattcaccatgtgccaacgcctctttgcatccaggtctaaacccacgaatccaagcagctagatttagatttcagggcaatgctaacgacccagaccaaaatggaaatactacccaaagtcctccgtcaagagatatgtcacctacaagtcgtgacaacctagtggccaaacaactagctcggaatactgtgacccaagcactgtcaagatttacaagccctcaagcaggtgctccctcaaggcctggagcgcccccaacaggggatgttggcactcaccctccagtcggtcggaccagtttaaagactcacagtgttgcacgagttgacagaggaaatcctcctcctatccctccaaaaaagccagggctctcccaaactccttctccaccacacccccaactcaaggttattatagacagcagcagggcctcgaacacaggggccaaagttgataacaaaactgtggcttcgcctccttccagtttgccacaagggaacagggtgaccaatgaggacaaccttcctaagtcatcctcccctcagctgccaccaaaaccatccatagatttaactgtggcacctgcaggctgtaccgtttcagccctggccacatctcaggtgggtgcctggcctgctgcaacccccggactgaaccaacctgcatgttcagacagttcccttgtcattcctaccaccattgccttttgctcttccataaaccccgttagtgcctcatcctgtagaccaggtgcctcagacagcctcctggtaacagcatcaggnnnnnnnnnnnnnnnnnnnnnnnnnnnnnnnnnnnnnnnnnnnnnnnnnnnnnnnnnnnnnnnnnnnnnnnnnnnnnnnnnnnnnnnnnnnnnnnnnnnnnnnnnnnnnnnnnnnnnnnnnnnnnnnnnnnnnnnnnnnnnnnnnnnnnnnnnnnnnnnnnnnnnnnnnnnnnnnnnnnnnnnnnnnnnnnnnnnnnnnnnnnnnnnnnnnnnnnnnnnnnnnnnnnnnnnnnnnnnnnnnnnnnnnnnnnnnnnnnnnnnnnnnnnnnnnnnnnnnnnnnnnnnnnnnnnnnnnnnnnnnnntgtgtagaattattaattgcatatgatgctaacattaatcatgctgctgatggaggacagacacctctatacctggcctgtaaaaatgaaaataaagaatgtattaaactcttgttggaagccggaaccaaccgaagtgtaaaaaccacaggatggctggacaccagttcatgcagctgtggacactggtaatgtggacagcctcaagcttcttatgtaccatagaataccagcttgtggaaattctttcaatgaggaggagtccgagtc

SEQ ID NO: 20901 - DNA, 2142 bp, Macaca Mulatta
  misc_feature (1)...(2142): n = A,T,C or G
tgactgtatttttaaattcattgacacccaaattctatgtggcacttacagggacatcttcattgatatcaggactaatatttnnnnnnnnnnnnnnnnnnnnnnnnnnnnnnnnnnnnnnnnnnnnnnnnnnnnnnnnnnnnnnnnnnnnnnnnnnnnnnnnnnnnnnnnnnnnnnnnnnnnnnnnnnnnnnnnnnnnnnnnnnnnnnnnnnnnnnnnnnnnnnnnnnnnnnnnnnnnnnncagaatgtaaggtatggagaaaccctctaaatcttttcagaggagcagaatataggagnnnnnnnnnnnnnnnnnnnnnnnnnnnnnnnnnnnnnnnnnnnnnnnnnnnnnnnnnnnnnnnnnnnnnnnnnnnnnnnnnnnnnnnnnnnnnnnnnnnnnnnnnnnnnnnnacagttatgcagaaggcctggagggaaagaaatcctccagctcgaatcaaagcagcctatcaagctttagaattgaacaatgannnnnnnnnnnnnnnnnnnnnnnnnnnnnnnnnnnnnnnnnnnnnnnnnnnnnnnnnnnnnnnnnnnnnnnnnnnnnnnnnnnnnnnnnnnnnnnnnnnnnnnnnnnnnnnncagcagtgccagcaccaaagtcctcagcatgaagctcaactgannnnnnnnnnnnnnnnnnnnnnnnnnnnnnnnnnnnnnnnnnnnnnnnnnnnnnnnnnnnnnnnnnnnnnnnnnnnnnnnnnnnnnnnnnnnnnnnnnnnnnnnnnnnnnnnnnnnnnnnnnnnnnnnnnnnnnnnnnnnnnnnnnnnnnnnnnnnnnnnnnnnnnnnnnnnnnnnnnnnnnnnnnnnnnnnnnnnnnnnnnnnnnnnnnnnnnnnnnnnnnnnnnnnnnnnnnnnnnnnnnnnnnnnnnnnnnnnnnnnnnnnnnnnnnnnnnnnnnnnnnnnnnnnnnnnnnnnnnnnnnnnnnnnnnnnnnnnnnnnnnnnnnnnnnnnnnnnnnnnnnnnnnnnnnnnnnnnnnnnnnnnnnnnnnnnnnnnnnnnnnnnnnnnnnnnnnnnnnnnnnnnnnnnnnnnnnnnnnnnnnnnnnnnnnnnnnnnnnnnnnnnnnnnnnnnnnnnnnnnnnnnnnnnnnnnnnnnnnnnnnnnnnnnnnnnnnnnnnnnnnnnnnnnnnnnnnnnnnnnnnnnnnnnnnnnnnnnnnnctttcatcatgtttctgtttacccaaagaaggagcttcctttgttcatccatttcacagcaggattttgctcttctacagcaatgatagccattctcacacaccagtttcctgaaatcatgggtatttttgctaaagctgtnnnnnnnnnnnnnnnnnnnnnnnnnnnnnnnnnnnnnnnnnnnnnnnnnnnnnnnnnnnnnnnnnnnnnnnnnnnnnnnnnnnnnnnnnnnnnnnnnnnnnnnnnnnnnnnnnnnnnnnnnnnnnnnnnnnnnnnnnnnnnnnnnnnnnnnnnnnnnnnnnnnnnnnnnnnnnnnnnnnnnnnnnnnnnnnnnnnnnnnnnnnnnnnnnnnnnnnnnnnnnnnnnnnnnnaagcttcttatgaacattattgttattcctggggaaaccccaccttggaagctgtcaaaaaggacaactgtagatgaagttgtcttccttttttcttcattcagcttagcctttctgtttggccagggctgcttacaggagctgttagggttgaagtaaagtcaccacattttggctcctttggtcagagaaagaactctaatgtccagctgctccatccatatacccatagaatggaagtgagtaaaggaaaattttaagccaggatagttaacagttagggggccaatgggagaatgcttgccttgcatttgcaaatccagaatgaataaaacatcttaagtaaatgaggaatagccacaaagatgctcagagataatataagccatgagtgggaagtgggaaaatgagtttgtaaactcctctcttttctatccctttacctttgaggtcagggacaggcatacagcccactggctattgccctatacctaccaatcacccaaagaaaataatagcttctgagaaagctcaattcactgtagcaactgtgatatatttaccctaataaagccaccactt

SEQ ID NO: 20902 - DNA, 453 bp, Macaca Mulatta
  misc_feature (1)...(453): n = A,T,C or G
ggaagcgtgagcaggactttgacctgcagttgctggaacgggtcgtgcaaggggaaaaaaaggacaaggaggagaatggctggttgaaagtgcaggccatgcctgtcactgagttggacctggagcctcaagactatgacttggacatcagcagagagnnnnnnnnnnnnnnnnnnnnnnnnnnnnnnnnnnnnnnnnnnnnnnnnnnnnnnnnnnnnnnnnnnnnnnnnnnnnnnnnnnnnnnnnnnnnnnnnnnnnnnnnnnnnnnnnnnnnnnnnnnnnnnnnnnnnagcatgtgcaacctgcagccgacctcaggacaggaccggaacagtgtggctgacctggactttcagctgcaggagcaggagcgcatcatcaacatctcctatgccctggcctccgannnnnnnnnnnnnnnnngcaggtggcaggtaaggccatggcccagcc

SEQ ID NO: 20903 - DNA, 2379 bp, Macaca Mulatta
  misc_feature (1)...(2379): n = A,T,C or G
gttgtcgtactgctccgacagatttagttttcatcttagatggctcttatagtgttggcccagaaaactttgaaatagtgaaaaagtggcttgtcaatatcacaaaaaactttgacatagggccaaagtttattcaagttggagtggttcaatatagtgactaccctgtgctggagattcctcttggaagctatgattcaggagaacatttaacagcagcagtggaatccatactctacttaggaggaaacacaaggacagggaaggctatccagtttgccctcgattacctttttgccaagtcctcacgatttctgactaagatagcagtggtacttacggatggcaaatcccaggatgacgtcaaggatgcagctgaagcagcaagagatagtaagataacattatttgccattggtgttggttcagaaacagaagatgccgaacttagagctattgccaacaagccttcgtctacttatgtgttttatgtggaagactatattgcaatatccaaaataagggaagtgataaagcagaaactttgtgaagnnnnnnnnnnnnnnnnnnnnnnnnnnnnnnnnnnnnnnnnnnnnnnnnnnnnnnnnnnnnnnnnnnnnnnnnnnnnnnnnnnnnnnnnnnnnnnnnnnnnnnnnnnnnnnnnnnnnnnnnnnnnnnnnnnnnnnnnnnnnnnnnnnnnnnnnnnnnnnnnnnnnnnnnnnnnnnnnnnnnnnnnnnnnnnnnnnnnnnnnnnnnnnnnnnnnnnnnnnnnnnnnnnnnnnnnnnnnnnnnnnnnnnnnnnnnnnnnnnnnnnnnnnnnnnnnnnnnnnnnnnnnnnnnnnnnnnnnnnnnnnnnnnnnnnnnnnnnnnnnnnnnnnnnnnnnnnnnnnnnnnnnnnnnnnnnnnnnnnnnnnnnnnnnnnnnnnnnnnnnnnnnnnnnnnnnnnnnnnnnnnnnnnnnnnnnnnnnnnnnnnnnnnnnnnnnnnnnnnnnnnnnnnnnnnnnnnnnnnnnnnnnnnnnnnnnnnnnnnnnnnnnnnnnnnnnnnnnnnnnnnnnnnnnnnnnnnnnnnnnnnnnnnnnnnnnnnnnnnnnnnnnnnnnnnnnnnnnnnnnnnnnnnnnnnnnnnnnnnnnnnnnnnnnnnnnnnnnnnnnnnnnnnnnnnnnnnnnnnnnnnnnnnnnnnnnnnnnnnnnnnnnnnnnnnnnnnnnnnnnnnnnnnnnnnnnnnnnnnnnnnnnnnnnnnnnnnnnnnnnnnnnnnnnnnnnnnnnnnnnnnnnnnnnnnnnnnnnnnnnnnnnnnnnnnnnnnnnnnnnnnnnnnnnnnnnnnnnnnnnnnnnnnnnnnnnnnnnnnnnnnnnnnnnnnnnnnnnnnnnnnnnnnnnnnnnnnnnnnnnnnnnnnnnnnnnnnnnnnnnnnnnnnnnnnnnnnnnnnnnnnnnnnnnnnnnnnnnnnngcaaaaggtgaaaaggggaatgctggcttccctggcctccctggacctgctgnggagaaccaggaagacatggaaaggatggattaatgggtagtcccggtttcaaggnaagggagaagcaggatcccctggagctccagggcaggatggaacacggggagagcctgnnnnnnnnnnnnnnnnnnnnnnnnnnnnnnnnnnnnnnnnnnnnnnnnnnnnnnnnnnnnnnnnnnnnnnnnnnnnnnnnnnnnnnnnnnnnnnnnnnnnnnnnnnnnnnnnnnnnnnnnnnnnnnnnnnnnnnnnnnnnnnnnnnnnnnnnnnnnnnnnnnnnnnnnnnnnnnnnnnnnnnnnnnnnnnnnnnnnnnnnnnnnnnnnnnnnnnnnnnnnnnnnnnnnnnnnnnnnnnnnnnnnnnnnnnnnnnnnnnnnnnnnnnnnnnnnnnnnnnnnnnnnnnnnnnnnnnnnnnnnnnnnnnnnnnnnnnnnnnnnnnnnnnnnnnnnnnnnnnnnnnnnnnnnnnnnnnnnnnnnnnnnnnnnnnnnnnnnnnnnnnnnnnnnnnnnnnnnnnnnnnnnnnnnnnnnnnnnnnnnnnnnnnnnnnnnnnnnnnnnnnnnnnnnnnnnnnnnnnnnnnnnnnnnnnnnnnnnnnagcccagctaccagtcttacttcagagtggaagaattagaaattgtgatcattgccagtcccaacatggctccccgggtattcctgggccacctggtcctgtaggaccagagggtccccgaggattacctggtttgccaggaagagatggtgttcctggattaatgggtgtccctggacgtccaggtatcagaggattaaaaggnaggcctaccaggaagaaatggggaaaaagggagccaagggtttgggcatcctggagaacaaggtcctcctggtccccc

SEQ ID NO: 20904 - DNA, 1218 bp, Macaca Mulatta
  misc_feature (1)...(1218): n = A,T,C or G
attcaaaggtgtgcggcaggtctctgttcacatggctcaactggaaacctgtttcatgaacaagcttactcaggaaccatctggtggtattccagcacattgttcttcagggggacgactctaagtcgctttgtggtggcagcagcttagaatcagtatttgtggttgggaaagatggacttacgggagcttggtnnnnnnnnnnnnnnnnnnnnnnnnnnnnnnnnnnnnnnnnnnnnnnnnnnnnnnnnnnnnnnnnnnnnnnnnnnnnnnnnnnnnnnnnnnnnnnnnnnnnnnnnnnnnnnnnnnnnnnnnnnnnnnnnnnnnnnnnnnnnnnnnnnnnnnnnnnnnnnnnnnnnnnnnnnnnnnnnnnnnnnnnnnnnnnnnnnnnnnnnnnnnnnnnnnnnnnnnnnnnnnnnnnnnnnnnnnnnnnnnnnnnnnnnnnnnnnnnnnnnnnnnnnnnnnnnnnnnnnnnnnnnnnnnnnnnnnnnnnnnnnnnnnnnnnnnnnnnnnnnnnnnnnnnnnnnnnnnnnnnnnnnnnnnnnnnnnnnnnnnnnnnnnnnnnnnnnnnnnnnnnntgccggtggcagatatcaaagccgtggtgacgggaaaggactgccctcatatgaaagagaaaggtgcccttaaacaaaacaagnnggaggtgcttgaactcgctttctccatcttgtatgactcaaactgccaactgaacttcatcgctcctgacaagcatgagnagtactgtatctggacggatggactgaatgcgctactcgggaaggacatgatgagcgacctgacgcggaatgacctggacaccctgctcagcatggaaatcaagctccgcctactggatctggaaaacatccagatccctgatgcacctccgccgattcccaaggagcccagcaactatgacttcgtctatgactgtaactgaagtggccgggcccagacacgccccttccaaaactggaacacctagctaacaggagagaggaatgaaaacatgcccacgccttggaaccctcctttggtaaagggaagctgtgggtccacactcccttcagcatcacctctaaccccggcaactttcagcccctagctggcatcttgctcaccaccctgattctgttcctcggctccactgcttcaggtcacttcccatggctgcagtccaccagtgggacaagagcaaagcctactgctagt

SEQ ID NO: 20905 - DNA, 148 bp, Macaca Mulatta
ggcaaggaggctgaggagcaggagaaatgaaggagaactctccaaggcctgccttgttgtccaaccaacacctacttcatttttccttaggtggaaccatacaagagtgggcatataaaggacatctgggaagtcccctggggtctca

SEQ ID NO: 20906 - DNA, 1664 bp, Macaca Mulatta
  misc_feature (1)...(1664): n = A,T,C or G
tatagagcaattgaaaactacaaagcagcagttaacaaatcaaggaaatgctaaatgtacagactctgtgaataatacccatgttgaaaacgaatctttggataattttctaaaagaaacaaacaaagagaacttgccccatatcttaacagaacctgagaggaagccagatcctaatttatgtaccacaagtaagccaaagactaacttttctaatcaaaccaagaacagtttggttcctaaacaagccttgggcaaaagttcagttaatagtgctgttctgaaagagagagttaataaacaatttgttggagaaacacaaagcaggactttcccagtaaaatcacagcaactctctagaggagcagatcttgcaagaccaggagtaaaaccctcaagaacggttccctctcactttattcagacccttagtaaagttcagtcatcaaagaaactggtggtcaagaacatcaaagatgtaaaggttaataggggtaaatatgaaagaccaaatgaaactaagttacagtcataccctgttattgaacagagaatgaaacataccaaacccagaacataccccaatttgcttcagggtgaatataacaacagacatccagacatcaagcaagatcggaagtccacccaaccttgttgtatacctcagacatcatgcgtactgcaaaaaccgaaagccataagccagaggcctaatctgacagttggcagatttgattcagccattccaagcacccctagtataagaccaaatggaaccagttgtaataaacgtaacaataatgactttcaacaaaaagcacggactttnnnnnnnnnnnnnnnnnnnnnnnnnnnnnnnnnnnnnnnnnnnnnnnnnnnnnnnnnnnnnnnnnnnnnnnnnnnnnnnnnnnnnnnnnnnnnnnnnnnnnnnnnnnnnnnnnnnnnnnnnnnnnnnnnnnnnnnnnnggaaacaactagaagaatggcagaaatctaagggaaaaatctataaacggccccctatggaaattaaaacaaaaagaaaagtaataaaggaaatgaatatttcattctggaagagcattgaaaaagaagaggaggaaaagaaagcacaactcgaactgtccagtaaaattaacaacactctgacagaatgtctgaacctcatcgaaggggnggtgtaccttctaatgaaatacttaacatattgtccagcattcctgaagctgaaaaattcgctaaattctggatctgcaaagcaaagttgttggcaagtaaaggcacctttgatgttatcggcctatatgaagaggccattaaaaatggggcaacannnnnnnnnnnnnnnnnnnnnnnnnnnnnnnnnnnnnnnnnnnnnnnnnnnnnnnnnnnnnnnnnnnnnnnnnnnnnnnnnnnnnnnnnnnnnnnnnnnnnnnnnnnnnnnnnnnnnnnnnnnnnnnnnnnnnnnnnnnnnnnnnnnnnnnnnnnnnnnnnnnnnnnnnnnnnnnnnnnnnnnnnnnnnnnnnnnnnnnnnnnnnnnnnnnnnnnnnnnnnnnnnnnnnnnnnnnnnnnnnnnnnnnnnnnnnagaataaacgggatgccggaagtgcaagacatgaaacttatcactcctgtacggcgttcgtcgaggatgagcgagcag

SEQ ID NO: 20907 - DNA, 497 bp, Macaca Mulatta
  misc_feature (1)...(497): n = A,T,C or G
aggcagccctgcagcggcaggaggaactcgagacgttgtgcgtgcagctgcagcggcaggtcagggagatggagnnnnnnnnnnnnnnnnnnnnnnnnnnnnnnnnnnnnnnnnnnnnnnnnnnnnnnnnnnnnnnnnnnnnnnnnnnnnnnnnnnnnnnnnnnnnnnnnnnnnnnnnnnnnnnnnnnnnnnnnnnnnnnnnnnnnnnnnnnnnnnnnnnnnnnnnnnnnnnnnnnnnnnnnnnnnnnnnnnnnnnnnnnnnnnnnnnnnnnnnnnnnnnnnnnnnnnnnnnnnnnnnnnnnnnnnnnnnnnnnnnnnnnnnnnnnnnnnnnnnnnnnnnnnnnnnnnnnnnnnnnnnnnnnnnnnnnnnnnnnnnnnnnnnnnnnnnnnnnnnnnnnnnnnnnnnnnnnnnncagcgctgcctccgagacatattggatggcttctttccatcagagctccagcgactgtaccccaatggggtcccctttaaggtg

SEQ ID NO: 20908 - DNA, 182 bp, Macaca Mulatta
tagaacctatgtgcagacacattagaaaaggattggaacaaggtaacttgaaaaaggctttagtgaatgtggaatggaatatttgccaagactgtaagactgacaataaagtgaaagataaagctgaagaagaaacagaagaaaagccttcagtttggttatgtcttaaatgtggccatcag

SEQ ID NO: 20909 - DNA, 783 bp, Macaca Mulatta
ggggtttgaagaagatctctgcctacatgaagtccagccgattccaccgaggtcttttgtttggaacgacagccacgtggaacagcacatagggccccgtgatgccagaagatggaagggaagagatcttcttcaaacctgtgacccgggagaacagcctgactccctggacccaccttctttctttctccttctttctgctctcttctcttccccaaggcctcattggcttcctttcttctaacatcatccctccctgcatcaaggctctttaaagcttcagctccccaccgtcttccatcacagtccccctcctaacgtctttcttttcctgcactaacgccaacctgactgcttttcctgtcagtgcttgtctgttctttgagaagccagactgatctctgagctccctagcactgtcctcaaagaccatctgcatgccctgcctccctttgctaggtccctaccccagccctgtgtgatgcccagtaaagcccaaaccatgcctgccttgtgttgtcttattccctgaggctcccttgactcaagactgtgctcgaattgtgagtggttttttgtcttctgttgtccacagccagagcttattggatgggtgtgtgtgtgtgtttgggaatggtgggtcaggcaggttcataaattttcctttggtaatttccgcccctctagccacattcccttttgtttcctccctgtggggggattactaccagaaagggtccttctgggccccagtttcctcccctccatccagcttttcccggg

SEQ ID NO: 20910 - DNA, 107 bp, Macaca Mulatta
gccatggatcatctgcagtcattcattgcagatagtgatcgtagaacagaagtggccaagaaaagattagccttaaaacaagaagagattagtgctgaagtagcagc

SEQ ID NO: 20911 - DNA, 751 bp, Macaca Mulatta
  misc_feature (1)...(751): n = A,T,C or G
ggacttttaaatcaggcatggcnnnnnnnnnnnnnnnnnnnggcattttgggaggtcgaggcaggcgannnnnnnnnnnnnntnnnnnnnnnnnnnnnnnnnnnnnnnnntaaaaccccatctgtactaaaaatacaaaaacaaactgggtgtggtggcgggnnnnnnnnnnnnnnnnnnnnnnnnnnntnnnnnnnnnnnnnnnnnnnnnnnnnnnnnnnnnnnnnnnaatcataccattgtactcatcctgggtgacagagcaaaactccacctnnnnnnnnnnnnnnnnnntgtacttttaggaattcagacctagatagatttgcatttggataacagaaccctacctatatctttgtagaagcagcttctcactgaattttaactgtaacaattactgaaggtgaaaatagaagttgggtcatctttgaacacctaccttttatcaatgaatatttttaggccctgttcttaagtatctgagtcacaaggtggcatcttgggtctaccttcagtgagacttgcgtttcaagggaggggtgtatgtgcatccttggtctcagttatgtaaactctgatccataaaaaagtggtaacacatgccacatggggatagttggtggagatgatagaagggagttaagcaaagggcccagccctctcagcaagaagcttccaaattacgggtgcccattttcccctgcaactttaggtgaaaaggttttttcctgaatttggaagcctgaat

SEQ ID NO: 20912 - DNA, 548 bp, Macaca Mulatta
  misc_feature (1)...(548): n = A,T,C or G
agaggccgaggccacggccaagcggccgcgcacgaccatcaccgccaagcagctggaaacgctgaagagcgcctacaacacctcgcccaagccggcgcgccacgtgcgtgagcagctctcgtccgagacgggcctggacatgcgagtggtgcaggtncaggtttggttccagaaccgccgggccaaggagaagaggctgaagaaggatgccggccggcagcgctggggacagtatttccgaaacatgaagcgctctcgcggcggctccaagtcggataaggacagcgttcaggaggggcaggacagcgacgccgaggtctccttccccggtnggtggagggcagacgctgactgagcctctgcttctgttgcagatgagccttctttggcggaaatgggcccggccaccggcctctacgggagcttgggggaacccacaccggccttgggccggccctcgggagccctgggcaacttcgcactagagcatggaggcctggcaggcccagagcagtaccgagagctgcgtcccggcagcccctatggtg

SEQ ID NO: 20913 - DNA, 1803 bp, Macaca Mulatta
  misc_feature (1)...(1803): n = A,T,C or G
tgaggatgtctgatactgttactgtaaaagatgaaactgcaacaatgaaggatttggaggcagaagtgaaagatacaaccagagttgaaaatcttatcaaatcagaaaactatgggaagattttggtagagaagaatgaacattgtattgagaacaatatagatctgcaggtaaacaggaatttttctctgactacaaatactaaatattcagtatatatttatgtttattttcatacaaaactcacttctcagaattctaaaagggtaagttgannnnnnnnnnnnnnnnnnnnnnnnnnnnnnnnnnnnnnnnnnnnnnnnnnnnnnnnnnnnnnnnnnnnnnnnnnnnnnnnnnnnnnnnnnnnnnnnnnnnnnnnnnnnnnnnnnnnnnnnnnnnnnnnnnnnnnnnnnnnnnnnnnnnnnnnnnnnnnnnnnnnnnnnnnnnnnnnnnnnnnnnnnnnnnnnnnnnnnnnnnnnnnnnnnnnnnnnnnnnnnnnnnnnnnnnnnnnnnnnnnnnnnnnnnnnnnnnnnnnnnnnnnnnnnnnnnnnnnnnnnnnnnnnnnnnnnnnnnnnnnnnnnnnnnnnnnnnnnnnnnnnnnnnnnnnnnnnnnnnnnnnnnnnnnnnnnnnnnnnnnnnnnnnnnnnnnnnnnnnnnnnnnnnnnnnnnnnnnnnnnnnnnnnnnnnnnnnnnnnnnnnnnnnnnnnnnnnnnnnnnnnnnnnnnnnnnnnnnnnnnnnnnnnnnnnnnnnnnnnnnnnnnnnnnnnnnnnnnnnnnnnnnnnnnnnnnnnnnnnnnnnnnnnnnnnnnnnnnnnnnnnnnnnnnnnnnnnnnnnnnnnnnnnnnnnnnnnnnnnnnnnnnnnnnnnnnnnnnnnnnnnnnnnnnnnnnnnnnnnnnnnnnnnnnnnnnnnnnnnnnnnnnnnnnnnnnnnnnnnnnnnnnnnnnnnnnnnnnnnnnnnnnnnnnnnnnnnnnnnnnnnnnnnnnnnnnnnnnnnnnnnnnnnnnnnnnnnnnnnnnnnnnnnnnnnnnnnnnnnnnnnnnnnnnnnnnnnnnnnnnnnnnnnnnnnnnnnnnnnnnnnnnnnnnnnnnnnnnnnnnnnnnnnnnnnnnnnnnnnnnnnnnnnnnnnnnnnnnnnnnnnnnnnnnnnnnnnnnnnnnnnnnnnnnnnnnnnnnnnnnnnnnnnnnnnnnnnnnnnnnnnnnnnnnnnnnnnnnnnnnnnnnnnnnnnnnnnnnnnnnnnnnnnnnnnnnnnnnnnnnnnnnnnnnnnnnnnnnnnnnnnnnnnnnnnnnnnnnnnnnnnnnnnnnnnnnnnnnnnnnnnnnnnnnnnnnnnnnnnnnnnnnnnnnnnntagaagcacctatttggctcctccaacaagatcggtccaaagtagtcagacttcttatgtggcagctcaggggtcccagagagaatgttccaagaaagccaagcaaagctgcaaggtttcttttgacgtaggcccagaagttccagaacgttacttcagctatcttcttttgacgacataagtcattaaagccaggccagaagatggggaattagaccctacctctcagtaggaaagaatttgtagccacctttaaactaccacaaaaagttattcaaaaaaaaattgtttaggccgggagtggtggctgtaatcccaacactttgggaggccgaggtgagtggatcacgaggtcaggagattgagaccaacctgaccaacatggtgaaaccccaactctagtgaaaatacaaaaaattagccgggtgtggtggtacgcacctgtagtcccagct

SEQ ID NO: 20914 - DNA, 4705 bp, Macaca Mulatta
  misc_feature (1)...(4705): n = A,T,C or G
aaaaacgctatggcaaagagaataaaagctaagcccacttcagacaaacctggaagtccatatcgctctgtcacacacttcgactcactagctgtaatagacatccctggagcagatactctggataaattatttgaccatgctgtatccaagtttgggaagaaggacagccttgggaccagggaaatcctaagtgaagaaaatgaaatgcagccaaatggaaaagtttttaagaannnnnnnnnnnnnnnnnnnnnnnnnnnnnnnnnnnnnnnnnnnnnnnnnnnnnnnnnnnnnnnnnnnnnnnnnnnnnnnnnnnnnnnnnnnnnnnnnnnnnnnnnnnnnnnnnnnnnnnnnnnnnnnnnnnnnnnnnnnnnnnnnnnnnnnnnnnnnnnnnnnnnnnnnnnnnnnnnnnnnnnnnnnnnnnnnnnnnnnnnnnnnnnnnnnnnnnnnnnnnnnnnnnnnnnnnnnnnnnnnnnnnnnnnnnnnnnnnnnnnnnnnnnnnnnnnnnnnnnnnnnnnnnnnnnnnnnnttagatatcagttgtgtaaaatatctcatttatgtggacaataagactatcaataaagcagagtacccggaaggttttgagattcacagcatgcaatcagtagaagagttgggatccaacccagaaaactnnnnnnnnnnnnnnnnnnnnnnnnnnnnnnnnnnnnnnnnnnnnnnnnnnnnnnnnnnnnnnnnnnnnnnnnnnnnnnnnnnnnnnnnnnnnnnnnnnnnnnnnnnnnnnnnnnnnnnnnnnnnnnnnnnnnnnnnnnnnnnnnnnnnnnnnnnnnnnnnnnnnnnnnnnnnnnnnnnnnnnnnnnnnnnnnnnnnnnnnnnnnnnnnnnnnnnnnnnnnnnnnnnnnnnnnnnnnnnnnnnnnnnnnnnnnnnnnnnnnnnnnnnnnnnnnnnnnnnnnnnnnnnnnnnnnnnnnnnnnnnnnnnnnnnnnnnnnnnnnnnnnnnnnnnnnnnnnnnnnnnnnnngaaatcatggatagaatttataagaatgttatgagcaaagtccaagagatgaattatattcagaaaactctgttcaagataggatatgattacaaattggaacagatcaaaaagggatatgatgcacctctttgcaatctgtnnnnnnnnnnnnnnnnnnnnnnnnnnnnnnnnnnnnnnnnnnnnnnnnnnnnnnnnnnnnnnnnnnnnnnnnnnnnnnnnnnnnnnnnnnnnnnnnnnnnnnnnnnnnnnnnnnnnnnnnnnnnnnnnnnnnnnnnnnnnnnnnnnnnnnnnnnnnnnnnnnnnnnnnngtaactgactatactactggaagagttggagcccctcttatttgctgtgaaattaagctaaannnnnnnnnnnnaggcggttatacaattaaagacaagccaaaccccagaggtgaaattgtaattggtaacggaacatctccatgnnnnnnnnnnnnnnnnnnnnnnnnnnnnnnnnnnnnnnnnnnnnnnnnnnnnnnnnnnnnnnnnnnnnnnnnnnnnnnnnnnnnnnnnnnnnnnnnnnnnnnnnnnnnnnnnnnnnnnnnnnnnnnnnnnnnnnnnnnnnnnnnnnnnnnnnnnnnnnnnnnnnnnnnnnnnnnnnnnnnnnnnnnnnnnnnnnnnnnnnnnnnnnnnnnnnnnnnnnnnnnnnnnnnnnnnnnnnnnnnnnnnnnnnnnnnnnnnnnnnnnnnnnnnnnnnnnnnnnnnnnnnnnnnnnnnnnnnnnnnnnnnnnnnnnnnnnnnnnnnnnnnnnnnnnnnnnnnnnnnnnnnnnnnnnnnnnnnnnnnnnnnnnnnnnnnnnnnnnnnnnnnnnnnnnnnnnnnnnnnnnnnnnnnnnnnnnnnnnnnnnnnnnnnnnnnnnnnnnnnnnnnnnnnnnnnnnnnnnnnnnnnnnnnnnnnnnnnnnnnnnnnnnnnnnnnnnnnnnnnnnnnnnnnnnnnnnnnnnnnnnnnnnnnnnnnnnnnnnnnnnnnnnnnnnnnnnnnnnnnnnnnnnnnnnnnnnnnnnnnnnnnnnnnnnnnnnnnnnnnnnnnnnnnnnnnnnnnnnnnnnnnnnnnnnnnnnnnnnnnnnnnnnnnnnnnnnnnnnnnnnnnnnnnnnnnnnnnnnnnnnnnnnnnnnnnnnnnnnnnnnnnnnnnnnnnnnnnnnnnnnnnnnnnnnnnnnnnnnnnnnnnnnnnnnnnnnnnnnnnnnnnnnnnnnnnnnnnnnnnnnnnnnnnnnnnnnnnnnnnnnnnnnnnnnnnnnnnnnnnnnnnnnnnnnnnnnnnnnnnnnnnnnnnnnnnnnnnnnnnnnnnnnnnnnnnnnnnnnnnnnnnnnnnnnnnnnnnnnnnnnnnnnnnnnnnnnnnnnnnnnnnnnnnnnnnnnnnnnnnnnnnnnnnnnnnnnnnnnnnnnnnnnnnnnnnnnnnnnnnnnnnnnnnnnnnnnnnnnnnnnnnnnnnnnnnnnnnnnnnnnnnnnnnnnnnnnnnnnnnnnnnnnnnnnnnnnnnnnnnnnnnnnnnnnnnnnnnnnnnnnnnnnnnnnnnnnnnnnnnnnnnnnnnnnnnnnnnnnnnnnnnnnnnnnnnnnnnnnnnnnnnnnnnnnnnnnnnnnnnnnnnnnnnnnnnnnnnnnnnnnnnnnnnnnnnnnnnnnnnnnnnnnnnnnnnnnnnnnnnnnnnnnnnnnnnnnnnnnnnnnnnnnnnnnnnnnnnnnnnnnnnnnnnnnnnnnnnnnnnnnnnnnnnnnnnnnnnnnnnnnnnnnnnnnnnnnnnnnnnnnnnnnnnnnnnnnnnnnnnnnnnnnnnnnnnnnnnnnnnnnnnnnnnnnnnnnnnnnnnnnnnnnnnnnnnnnnnnnnnnnnnnnnnnnnnnnnnnnnnnnnnnnnnnnnnnnnnnnnnnnnnnnnnnnnnnnnnnnnnnnnnnnnnnnnnnnnnnnnnnnnnnnnnnnnnnnnnnnnnnnnnnnnnnnnnnnnnnnnnnnnnnnnnnnnnnnnnnnnnnnnnnnnnnnnnnnnnnnnnnnnnnnnnnnnnnnnnnnnnnnnnnnnnnnnnnnnnnnnnnnnnnnnnnnnnnnnnnnnnnnnnnnnnnnnnnnnnnnnnnnnnnnnnnnnnnnnnnnnnnnnnnnnnnnnnnnnnnnnnnnnnnnnnnnnnnnnnnnnnnnnnnnnnnnnnnnnnnnnnnnnnnnnnnnnnnnnnnnnnnnnnnnnnnnnnnnnnnnnnnnnnnnnnnnnnnnnnnnnnnnnnnnnnnnnnnnnnnnnnnnnnnnnnnnnnnnnnnnnnnnnnnnnnnnnnnnnnnnnnnnnnnnnnnnnnnnnnnnnnnnnnnnnnnnnnnnnnnnnnnnnnnnnnnnnnnnnnnnnnnnnnnnnnnnnnnnnnnnnnnnnnnnnnnnnnnnnnnnnnnnnnnnnnnnnnnnnnnnnnnnnnnnnnnnnnnnnnnnnnnnnnnnnnnnnnnnnnnnnnnnnnnnnnnnnnnnnnnnnnnnnnnnnnnnnnnnnnnnnnnnnnnnnnnnnnnnnnnnnnnnnnnnnnnnnnnnnnnnnnnnnnnnnnnnnnnnnnnnnnnnnnnnnnnnnnnnnnnnnnnnnnnnnnnnnnnnnnnnnnnnnnnnnnnnnnnnnnnnnnnnnnnnnnnnnnnnnnnnnnnnnnnnnnnnnnnnnnnnnnnnnnnnnnnnnnnnnnnnnnnnnnnnnnnnnnnnnnnncccaacttgcctttgaagagtgaaaaaccattatcatcaagtagactactattcagcttttattcctgccctgctgtttacccattaagaatgagtttcttagacttttccaatatgtgatttttttttcccatttagaatggtgattttaaatgtgtgagtgcatgcactgtcttatctcagatatttgcaccctcgctccgtccccgactcccaaaagctggaacactgccaactgatctgttacataggtcctgtagaaacacatcattaacacttaaggttgggtgctgctaattctttgcaaaaatccaaacattgttaagggaccagggagatgccactaccccttgattttccatccaaaaatatacatgtttatgtaagcaaatctttccatattcatagtgacttttcaagtatttaagactaaagattttgatctcacatttttatactgtttaaattgctcacaattattacatatatgtcagccatcaaataaagttgtactttaaaaatttactacaatatggacatttctaagtcaaacacttgtgacttttgctttaattccgtgaatgttcctgcctccttgatatttgtatttattctttttttctctagagtggagggtataattgtgtgatatttcagaaatatagataaatggttcaaaaagtcacagttgagattcatgtttctttgatcatgaataactgattagtgattcttgcctatattttcctgatagcatatgacaaatgtttctaaggtaacaagatgagaacagataaagattgtgtggtgttttggatttggagagaaatattttaatttttaaatgcagttacaaattataatgtattcatatttgtactttctgttaaaatgcacgattgcagaattgttgagattttgtgtttattcttgatgaaaagctttgttcttgtttttaagtttgcactcaaatcttaagaaataaattcacccatgttatca

SEQ ID NO: 20915 - DNA, 588 bp, Macaca Mulatta
cgtaacggacctgaaagtggcagcaagattatggttcagtttcctcgtaaccaatgtaaagaccttccaaaaagtgatgttttacaagataacaaatggagtcatcttcgtgggccattcaaagaagttcagtggaataaaatggaaggtcgaaactttgtttataaaatggagctgcttatgtctgcacttagcccttgtctactatgattttttccagatgtttcctaaagaagtttccagaaactttgacatgaaatgtttgcagatcaactataagtacaaagaagagataacttgcaaaggagtgctgtttttaaaaacaataattaggaaatgtttatttagcactttgaaacttttcgctttataaatgacaagtgctttgaaatgcagaagtttatgtacagttgtatatacagtatgacaagatgtaaaataatatgtttttcatgcagtttaaaatattactaacttaagcgtttctatttgctttttaatattccttctttgatgtggacatcacataaagtgtgtggtttaaaaaatctccaaatactttttcttcccccaaatacttcctaaact

SEQ ID NO: 20916 - DNA, 800 bp, Macaca Mulatta
  misc_feature (1)...(800): n = A,T,C or G
ggaagatatgtataatgctggccattttaaaggggttttctcaaaagttaaacttttgttagtatgtttttgcacataatccatatttgctgttcaaattaatctagaaatttattcaattctgtgtgaacacctggaagcaaaatcatagtgcaaaaatacatttaaggtgtggtcaaaaatatgtctttaattggtaaataataagcgttaattttttatagcctgtattcacaattttgcaatactttattgtacctaagggattctaaaggtgttgtcactgtataaaatagaaaggacgaggattcaaatgaaacttaattactaaaatgtaattcttgacactctttctataattagagtccctcacccccatccccacccccaccccccccttattttccttttatctcctgatgattaggccaaaggctgggagtaaggagaggattaggtacttaggagcaaagaagtagcttggaacttttgagatgatccctaacatactgtactacttgcttttacaatgtgttagcagaaaccagtgggttataatgtagaatgatgtgctttctgcccaagtggtaattcatcttggtttgctatgttaaaactgtaaatacaacagaacattaataaatatctctttgtgtagcaaaannnaannnannananaaaaaaaancccatgtcggccgccctcgggccctcgaaaagcttttcaagaccattccttttgggcccccgggcccgttaaggaaagtggaacaggggccaaaccggttttcctaggggaaa

SEQ ID NO: 20917 - DNA, 227 bp, Macaca Mulatta
tttggattatttacatcttcttgtcagcatagcaaacttttagaaaaccttattgaaaaattatgcttgatcatgttgtattttgattattctgtctgtgcggcttcgtcttggaatggttttgtgctacaaatgacatttactgaggactgcattttggaatctcctagaggtaactcatggcttataggatcttttgcaactttatgtatgtaaatgtaccctga

SEQ ID NO: 20918 - DNA, 160 bp, Macaca Mulatta
  misc_feature (1)...(160): n = A,T,C or G
ggtcctgagctgcacttacctgtgagagtcttcaaacttttaaaccttgccagtcaggacttttgctattgcaaatagaaaacccaactccacctgcttcagcagaaaataaatttattgannnnnnnnnnnnnnnnnnnnnnnnnnnnnnnnnnnnnnc

SEQ ID NO: 20919 - DNA, 2697 bp, Macaca Mulatta
  misc_feature (1)...(2697): n = A,T,C or G
ggtggtgcgaatcctggagcggcaaggccctcgggcagctcctgggggtgcagatgatctcagtgctgtgcgcaaccacacttaccagatgttgacactgctggcagaggatcgtgcagttccttcgacccccacaggccctggccccctgctggagtttgcgctgcacgaggatctgctgacccgtgtgttgacatggcagctgcaatgggatgagcttggggatggggtcgaggaacggcgggctgagcaactgaaactattcgagatgctagtgagcgaagctcgccagccactgttgcggcatggtccagttcgtgaggctctgctcactctgctggatgcctgtggccgccctgtgcccagtagtccagcactggatgaaggcttggtgctacttctcagccagctgtgtgtttgtgtggcccaggagccttcattgctcgagttcttcctgcagccacctcctgagcctggagctgctccccgtcttcttctcttttctcgccttgtcccttttgtacatcgagagggcaccttgggccagcaggcccgtgatgccctacttcttctcatggctttgtcagctgggagccccactgtgggccgctacatcgcggatcactcttacttctgcccggtnnnnnnnnnnnnnnnnnnnnnnnnnnnnnnnnnnnnnnnnnnnnnnnnnnnnnnnnnnnnnnnnnnnnnnnnnnnnnnnnnnnnnnnnnnnnnnnnnnnnnnnnnnnnnnnnnnnnnnnnnnnnnnnnnnnnnnnnnnnnnnnnnnnnnnnnnnnnnnnnnnnnnnnnnnnnnnnnnnnnnnnnnnnnnnnnnnnnnnnnnnnnnnnnnnnnnnnnnnnnnnnnnnnnnnnnnnnnnnnnnngacctctgtggaggagatgatcgccagtaccgcctatctggaacttttcctacggagtatctcagagcctgctttgctccgtaccttcctgcgattcctgttgttgcaccggcatgacacccacaccatcctcgacaccctcgttgcccgtattggcagcaactcccggctctgcatggtctctctgagtctcttcaggaccctcctgaacctcagctgtgaggatgtcctgctgcagctggttctcaggtatctnnnnnnnnnnnnnnnnnnnnnnnnnnnnnnnnnnnnnnnnnnnnnnnnnnnnnnnnnnnnnnnnnnnnnnnnnnnnnnnnnnnnnnnnnnnnnnnnnnnnnnnnnnnnnnnnnnnnnnnnnnnnnnnnnnnnnnnnnnnnnnnnnnnnnnnnnnnnnnnnnnnnnnnnnnnnnnnnnnnnnnnnnnnnnnnnnnnnnnnggtcctggaagcccaagtgtggactcctcttctgtggtgacagtaccccggccctccacaccatctcgtctggctctcttcctgcggcagcagagcctgggtggctctgagtctccaggcccagccccttgctcaccagggctttctgcatccccagcctccagccctggcagatggcctacccctgcagaggagnnnnnnnnnnnnnnnnnnnnnnnnnnnnnnnnnnnnnnnnnnnnnnnnnnnnnnnnnnnnnnnnnnnnnnnnnnnnnnnnnnnnnnnnnnnnnnnnnnnnnnnnnnnnnnnnnnnnnnnnnnnnnnnnnnnnnnnnnnnnnnnnnnnnnnnnnnnnnnnnnnnnnnnnnnnnnnnnnnnnnnnnnnnnnnnnnnnnnnnnnnnnnnnnnnnnnnnnnnnnnnnnnnnnnnnnnnnnnnnnnnnnnnnnnnnttgggcaggagctccgggagctagaggtggcattgagcaatgggggaactggctcagagtcccccttagaacctccactgccccttgaggaggaggaggcctatgagagcttcacctctccccctgagccccctggacccttcctcagcagccctttgcggactctcaaccaactgccaagccagcccttcactggnggccccttcatggctgtgctctttgccaaactcgagaacatgctgcagaactccgtctatgtcaacttcctgctgacggggctggtggcccagctggcctgtcacccccagcccctgctccgctctttcctgctcaacaccaacatggtcttccagcccagtgtcaagtccctgctgcaggtgnnnnggtgctgtgctctgtgaagaataagattgagaactttgcggcttcccaggaggacttcccagcactgctatccaaagccaagaagtacctcattgcccgtggcaagttggactgggctgagggccctgcagcaggacctgccccgcgccgttctgatcccctagnagtgaagagccggaggccatccttgggggagttactcctgcggcatgcacacagtccaaccagggcccggcagacggcacaattggtccttcagcctgggcgagacggagcaagacttggcctaagtgggggctcccctggggcttcaactccagttctacctgcccggagcggggcccctgaacgccaaggtgaggctcttcgagtcaagaatgctgtctactgtgcagtcattttccctgaatttctcaaggagttggctgccatctcccaggctcatgccgtcacctcacctttcttgttggagacttcagaggaaggatctggccctctcatctcaggctatgggcccctcaatccttaa

SEQ ID NO: 20920 - DNA, 648 bp, Macaca Mulatta
aagccaggcaggtgtgggcgtgcctgcacccagatgtggaggtttattttaaggctgtgccccgaggggacccggcttgcgggtggctgcacccaccctggtcctagcagagccccagcccagagcgctgctcgcactccctcggccctcggagctcggctgtgttcatcggcagggatctgtcacctgttcctccaggaaggctcctcatgcctttgctctcctgagaataaaacttactgtgactcctcctccaaacttcctgccccttgggtcccagctgttggcttttgcggcccctccttgtgacctcacgcagttgggtggcagcagcccccccgtgggcctgctggggacaggcttctgtgccatgtcctctcccaggctgggggtccactcgccataagagggtgtgtggctgagcccccgcttgccaaaagtcaggtacatttggtggcagcgtccaagccttctctcagggtggtcagccgtgccccatgcggcgtccacgtgtgccccggcattgagagggtctgttccagggatctgtatgggggtcacagggcacagccgctccagcctcctgggccaagcccctgggagcagaagtgggagctctgggccagccttggcgcgggcacctcccag

SEQ ID NO: 20921 - DNA, 603 bp, Macaca Mulatta
  misc_feature (1)...(603): n = A,T,C or G
agagtattagtaaattaatgaagttctgtggcacataaagccatttaaatgaaatagttaacaaatgtaatgaagaacaacataatgatgttgtttatatctacttagtttaatatacaactttttttcctattagtgagagagcagcagtagatgcatcttacattgatgagatagatgaactcttcaaagaagccaatactattgaaaactttctaatacaaaaaagagagttcctgcgacagaggtttacagtgattgcaaacacattacacagataaaatatatacttgaaataagctgataatttaaatctattattgttataatgaaagaatgacatttatgctttgaaagctctgaagttgttaaagaaaatgtatattttgaatagagaaggggaaactctgaatttctagatttaaaagggaactttaaaattccttaatgttaatattaatgttcgtgttaatgtcctanactggacattaacatgagctacgtcacttttcttttgagggtcaaatatttagtacattttatagaagtgtaaattatttaaatcttatgtggattcttttattttttccttaaacttcttag

SEQ ID NO: 20922 - DNA, 2694 bp, Macaca Mulatta
  misc_feature (1)...(2694): n = A,T,C or G
tgctttgctaaggaaggctggtgaaccaggaccaccgcgcacacaggcccatcaggggcaatgctcattccaagaccttaacttttaagagccctttgttccaacgttagtgtggacgatgctcttgcaggatgcctttccttttgggtcttagacagnnnnnnnnnnnnnnnnnnnnnnnnnnnnnnnnnnnnnnnnnnnnnnnnnnnnnnnnnnnnnnnnnnnnnnnnnnnnnnnnnnnnnnnnnnnnnnnnnnnnnngttctggctggtgtggaccatcatcatcatcctgagctgctgctgtgtctgccaccaccgccgagccaagcaccgccttcaggcccagcagcggcaacatgaaatcaacctgatcgcctaccgagaagcccacaattactcagcgctgccattttatttcagnnnnnnnnnnnnnnnnnnnnnnnnnnnnnnnnnnnnnnnnnnnnnnnnnnnnnnnnnnnnnnnnnnnnnnnnnnnnnnnnnnnnnnnnnnnnnnnnnnnnnnnnnnnnnnnnnnnnnnnnnnnnnnnnnnnnnnnnnnnnnnnnnnnnnnnnnnnnnnnnnnnnnnnnnnnnnnnnnnnnnnnnnnnnnnnnnnnnnnnnnnnnnnnnnnnnnnnnnnnnnnnnnnnnnnnnnnnnnnnnnnnnnnnnnnnnnnnnnnnnnnnnnnnnnnnnnnnnnnnnnnnnnnnnnnnnnnnnnnnnnnnnnnnnnnnnnnnnnnnnnnnnnnnnnnnnnnnnnnnnnnnnnnnnnnnnnnnnnnnnnnnnnnnnnnnnnnnnnnnnnnnnnnnnnnnnnnnnnnnnnnnnnnnnnnnnnnnnnnnnnnnnnnnnnnnnnnnnnnnnnnnnnnnnnnnnnnnnnnnnnnnnnnnnnnnnnnnnnnnnnnnnnnnnnnnnnnnnnnnnnnnnnnnnnnnnnnnnnnnnnnnnnnnnnnnnnnnnnnnnnnnnnnnnnnnnnnnnnnnnnnnnnnnnnnnnnnnnnnnnnnggtgatgaggaggaagacctctgccagccctctgaggagcaggctcaagagcctgagcacccgcatctgccacggccacccacatgcctgttgcagaacaccatcaacgagcagtnnnnnnnnnnnnnnnnnnnnnnnnnnnnnnnnnnnnnnnnnnnnnnnnnnnnnnnnnnnnnnnnnnnnnnnnnnnnnnnnnnnnnnnnnnnnnnnnnnnnnnnnnnnnnnnnnnnnnnnnnnnnnnnnnnnnnnnnnnnnnnnnnnnnnnnnnnnnnnnnnnnnnnnnnnnnnnnnnnnnnnnnnnnnnnnnnnnnnnnnnnnnnnnnnnnnnnnnnnnnnnnnnnnnnnnnnnnnnnnnnnnnnnnnnnnnnnnnnnnnnnnnnnnnnnnnnnnnnnnnnnnnnnnnnnnnnnnnnnnnnnnnnnnnnnnnnnnnnnnnnnnnnnnnnnnnnnnnnnnnnnnnnnnnnnnnnnnnnnnnnnnnnnnnnnnnnnnnnnnnnnnnnnnnnnnnnnnnnnnnnnnnnnnnnnnnnnnnnnnnnnnnnnnnnnnnnnnnnnnnnnnnnnnnnnnnnnnnnnnnnnnnnnnnnnnnnnnnnnnnnnnnnnnnnnnnnnnnnnnnnnnnnnnnnnnnnnnnnnnnnnnnnnnnnnnnnnnnnnnnnnnnnnnnnnnnnnnnnnnnnnnnnnnnnnnnnnnnnnnnnnnnnnnnnnnnnnnnnnnnnnnnnnnnnnnnnnnnnnnnnnnnnnnnnnnnnnnnnnnnnnnnnnnnnnnnnnnnnnnnnnnnnnnnnnnnnnnnnnnnnnnnnnnnnnnnnnnnnnnnnnnnnnnnnnnnnnnnnnnnnnnnnnnnnnnnnnnnnnnnnnnnnnnnnnnnnnnnnnnnnnnnnnnnnnnnnnnnnnnnnnnnnnnnnnnnnnnnnnnnnnnnnnnnnnnnnnnnnnnnnnnnnnnnnnnnnnnnnnnnnnnnnnnnnnnnnnnnnnnnnnnnnnnnnnnnnnnnnnnnnnnnnnnnnnnnnnnnnnnnnnnnnnnnnnnnnnnnnnnnnnnnnnnnnnnnnnnnnnnnnnnnnnnnnnnnnnnnnnnnnnnnnnnnnnnnnnnnnnnnnnnnnnnnnnnnnnnnnnnnnnnnnnnnnnnnnnnnnnnnnnnnnnnnnnnnnnnnnnnnnnnnnnnnnnnnnnnnnnnnnnnnnnnnnnnnnnnnnnnnnnnnnnnnnnnnnnnnnnnnnnnnnnnnnnnnnnnnnnnnnnnnnnnnnnnnnnnnnnnnnnnnnnnnnnnnnnnnnnnnnnnnnnnnnnnnnnnnnnnnnnnnnnnnnnnnnnnnnnnnnnnnnnnnnnnnnnnnnnnnnnngttgtttgttttaagctgaccacttggaagaaataccttggttgtctgtggttttcatgccttgtccctgcctctgcccccaccccttatgagtggggtgactcacttttctgtatagagactcaatgacccaggtaggaggtgaacgcagctgtcaggaaggcccataggatccttgtacctgttgcttggcttcagttcaccaactgatctttgataggaaactctgaatagaggcagcaaacagctgaaacaaacattccccacccggccctgttcatatgaagagtctggttcttccccctactcttgaatgatgatgatattcagacaaagcattgacgttatggaa

SEQ ID NO: 20923 - DNA, 138 bp, Macaca Mulatta
agtttaagcattccagaccaaagaagccacgaagtctaagaatttatgaatctcatgtgggaatttcttcccatgaaggaaaagtagcttcttataaacattttacgtgcaatgtactaccaagaatcaaagaccttg

SEQ ID NO: 20924 - DNA, 1334 bp, Macaca Mulatta
  misc_feature (1)...(1334): n = A,T,C or G
acgtgcagttcctgtgcctcggtgctgcccccagacacagaccctgcgttcttcttagcaccttcggtccctcgactgctccgaggtgacggtgcgagccctgcccgagggctccctcgccttcccnnnntgccgctcctgcaggtgtccgggccgctgctggtggtgcagctgctggagacaccgctgctctgcctggtcagctacgccagnnnnnnnnnnnnnnnnnnnnnnnnnnnnnnnnnnnnnnnnnnnnnnnnnnnnnnnnnnnnnnnnnnnnnnnnnnnnnnnnnnnnnnnnnnnatgggggcctgacagcctccacctacagctacctgggcggnggcttcgacagcagcagcaacgtgctagcgggccagctccgaggtgtgcccgtggcagggaccctggcccactccttcgtcacttccttttcgggcagtgaggtgccccctgacccgngatgttggcgccggcagctggtgagggccctggggtggacctggcagccaaagcccaggtgtggctggagcacgtgtgtgcccacctggggctgnnnnnnnnnnnnnnnnnnnnnnnnnnnnnnnnnnnnnnnnnnnnnnnnnnnnnnnnnnnnnnnnnnnnnnnnnnnnnnnnnnnnnnnnnnnnnnnnnnnnnnnnnnnnnnnnnnnnnnnnnnnnnnnnnnnnnnnnnnnnnnnnnnnnnnnnnnnnnnnnnnnnnnnnnnnnnnnnnnnnnnnnnnnnnnnnnnnnnnnnnnnnnnnnnnnnnnnnnnnnnnnnnnnnnnnnnnnnnnnnnnnnnttccaggtgccctggctggagtcagtccccattgcagtcagcaacaacattgatgaggaggcgctggcccgactggcccaggaggnnnnnnnnnnnnnnnnnnnnnnnnnnnnnnnnnnnnnnnnnnnnnnnnnnnnnnnnnnnnnnnnnnnnnnnnnnnnnnnnnnnnnnnnnnnnnnnnnnnnnnnnnnnnnnnnnnnnnnnnnnnnnnnnnnnnnnnnnnnnnnnnnnnnnnnnnnnnnnnnnnnnnnnnnnnnnnnnnnnnnnnnnnnnnnnnnnnnnnnnnnnnnnnnnnnnnnnnnnnnnnnnnnnnnnnnnnnnnnnnnnnnnnnnnnnnnnnnnnnnnnnnnnnnnnnnnnnnnnnnnnnnnnnnnnnnnnnnnnnnnnnnnnnnnnnnnnnnnnnnnnnnnnnnnnnnnnnncagctatgtgagccgctcccatccctggcagagtctagagccttggtccagctgtccctgagccaactcagccctgagcacaggcggctgcagagccctgcacagtaccagg

SEQ ID NO: 20925 - DNA, 1313 bp, Macaca Mulatta
  misc_feature (1)...(1313): n = A,T,C or G
gagaagccatcgcagtccctttcagaggagccatcgcagtccctctcagagaagacatcgcagtccctcagagagagcccatcgcagtccctctcagagaagccatcgcagtccctatgagagaagacatcacagtccctctgagagaagacatcacagtcccttggagaggagccgtcacagtctctctgagaggagccatcgcagtctctcagagaggagccatcgcagtccctctgagaggagatctcacaggtcctttgagaggagccatcgnnnnnnnnnnnnnnnnnnnnnnnnnnnnnnnnnnnnnnnnnnnnnnnnnnnnnnnnnnnnnnnnnnnnnnnnnnnnnnnnnnnnnnnnnnnnnnnnnnnnnnnnnnnnnnnnnnnnnnnnnnnnnngagagaagccatcgcagtccctttcagaggagccatcgcagtccctctcagagaagacatcgcagtccctcagagagagcccatcgcagtccctctcagagaagccatcgcagtccctatgagagaagacatcacagtccctctgagagaagacatcacagtcccttggagaggagccgtcacagtctctctgagaggagccatcgcagtctctcagagaggagccatcgcagtccctctgagaggagatctcacaggtcctttgagaggagccatcgtaggatttctgagagaagtcacagtccctcagagaagagccccctcagtcccttggaaagaagccgttgcagtccctctgagaggagaggacacagttcctctgggaaagcctgtcacagtccctctgagagaagccatcacagtccctctgggatgaggcaagggaggccctctgagaggaaccatcgccgttcctgtgagagaacccgtcacagtccctctgagatgaggccagggaggccctctgggaggaaccatcgcagtccctctgagaggagccgacgcagtccccttaaggagggactcaagtacagttcccctggggagaggcccagccatagtttgtctagagatttcaagaatcagacaagtctcctcggcaccacacataaaaatcccaaagcaggacaagtgtggaggcctgaagctactcgatgaggcggggcccgcccctattattcattgtcctaagtcttcatcgtgctgccctttccaggcttctttcctgctcagccactgcctccaattcctgcgcccccagcgtggaaaggcttccatgtctctctaccggggggaggcgtgtgagaatgggtctgtaatttctctaagatcaataaaggggcagtacatga

SEQ ID NO: 20926 - DNA, 776 bp, Macaca Mulatta
  misc_feature (1)...(776): n = A,T,C or G
gggaatgcaatgaatgtggaaaatcctttagccgaagctccagcctcattcaccaccggagacttcacacaggagaaagaccctatgagtgcagtaaatgtgggaaatcgtttaagcaaagctccagcttcagttcacatcggaaagtccacacaggggaaaggccttatgtgtgtggggaatgtgggaaatcctttagccatagctccaaccttaagaaccaccagagagttcacactggagaaaggcctgttgagtgcagtgaatgtagcaaatcctttagctgtaaatctaacctcattaaacacctgagagttcacactggagaaaggccttatgagtgcagtgaatgtgggaaatcctttagccaaagttctagcctcattcaacaccggagagttcacactggaaaaaggccttatcagtgcagtgaatgtgggaaatcctttggctgcaaatctgtcctcattcaacaccagagagttcacattggagaaaagccttaactgtactgagaatatgcaaagttccttttagtgtaattatactgaaggagtacaccgggtgaagagagaacaagtacctggaactgggaagcccccaacatctaaaggatatnatatacaggtggggcaagattccccctttaagttcccaggtatgtggttacacttttctaaacctggcaatttagaaaagtggttaaaattttcctcaccctggcccattatattgggcctcctgggcccaatttattggtcccctgggaaacggga

SEQ ID NO: 20927 - DNA, 2137 bp, Macaca Mulatta
  misc_feature (1)...(2137): n = A,T,C or G
agtcagtttttactgcttcaggccctccaaacatactctgatgacatcttgtcttctgaaacacataccaaaattgatcccacttctggcccaaggctcataacccgcaggaagaatctctcttatgcaccaggctatagaagagatgacctggagatggcggccctggatcctgacttagagaatgatgatttctttgtcagaaagactggggctttccatgcaaatccatatgttctccgagcttttgaagactttagaaagttctctgagcaagatgattctgtagaacgagatataattttacagtgtagagaaggtgaacttgtacttccggatttggaaaaagatgatatgattgttcgccgaattccagcacagaagaaagaagtaccgctgtccggggctccagatagataccacccagtccctttccccgaaccctggactcttcctccagaaattcaagcaaaatttctctgtgtacttgaaaggacatgcccatgcaaagaaaaaagtaatagctgtagaatattagttccttcatatcggcagaagaaagatgacatgctgannnnnnnnnnnnnnnnnnnnnnnnnnnnnnnnnnnnnnnnnnnnnnnnnnnnnnnnnnnnnnnnnnnnnnnnnnnnnnnnnnnnnnnnnnnnnnnnnnnnnnnnnnnnnnnnnnnnnnnnnnnnnnnnnnnnnnnnnnnnnnnnnnnnnnnnnnnnnnnnnnnnnnnnnnnnnnnnnnnnnnnnnnnnnnnnnnnnnnnnnnnnnnnnnnnnnnnnnnnnnnnnnnnnnnnnnnnnnnnnnnnnnnnnnnnnnnnnnnnnnnnnnnnnnnnnnnnnnnnnnnnnnnnnnnnnnnnnnnnnnnnnnnnnnnnnnnnnnnnnnnnnnnnnnnnnnnnnnnnnnnnnnnnnnnnnnnnnnnnnnnnnnnnnnnnnnnnnnnnnnnnnnnnnnnnnnnnnnnnnnnnnnnnnnnnnnnnnnnnnnnnnnnnnnnnnnnnnnnnnnnnnnnnnnnnnnnnnnnnnnnnnnnnnnnnnnnnnnnnnnnnnnnnnnnnnnnnnnnnnnnnnnnnnnnnnnnnnnnnnnnnnnnnnnnnnnnnnnnnnnnnnnnnnnnnnnnnnnnnnnnnnnnnnnnnnnnnnnnnnnnnnnnnnnnnnnnnnnnnnnnnnnnnnnnnnnnnnnnnnnnnnnnnnnnnnnnnnnnnnnnnnnnnnnnnnnnnnnnnnnnnnnnnnnnnnnnnnnnnnnnnnnnnnnnnnnnnnnnnnnnnnnnnnnnnnnnnnnnnnnnnnnnnnnnnnnnnnnnnnnnnnnnnnnnnnnnnnnnnnnnnnnnnnnnnnnnnnnnnnnnnnnnnnnnnnnnnnnnnnnnnnnnnnnnnnnnnnnnnnnnnnnnnnnnnnnnnnnnnnnnnnnnnnnnnnnnnnnnnnnnnnnnnnnnnnnnnnnnnnnnnnnnnnnnnnnnnnnnnnnnnnnnnnnnnnnnnnnnnnnnnnnnnnnnnnnnnnnnnnnnnnnnnnnnnnnnnnnnnnnnnnnnnnnnnnnnnnnnnnnnnnnnnnnnnnnnnnnnnnnnnnnnnnnnnnnnnnnnnnnnnnnnnnnnnnnnnnnnnnnnnnnnnnnnnnnnnnnnnnnnnnnnnnnnnnnnnnnnnnnnnnnnnnnnnnnnnnnnnnnnnnnnnnnnnnnnnnnnnnnnnnnnnnnnnnnnnnnnnnnnnnnnnnnnnnnnnnnnnnnnnnnnnnnnnnnnnnnnnnnnnnnnnnnnnnnnnnnnnnnnnnnnnnnnnnnnnnnnnnnnnnnnnnnnnnnnnnnnnnnnnnnnnnnnnnnnnnnnnnnnnnnnnnnnnnnnnnnnnnnnnnnnnnnnnnnnnnnnnnnnnnnnnnnnnnnnnnnnnnnnnnnnnnnnnnnnnnnnnnnnnnnnnnnnnnnnnnnnnnnnnnnnnnnnnnnnnnnnnnnnnnnnnnnnnnnnnnnnnnnnnnnnnnnnnnnnnnnnnnnnnnnnnnnnnnnnnnnnnnnnnnnnnnnnnnnnnnggttcacctgagacaaagtggattgatgcaacttctggaatttacaactcagaaaagtcttcaaatctatctataacaaccgatttctccgaaagccttcagagttc

SEQ ID NO: 20928 - DNA, 561 bp, Macaca Mulatta
aggtggtctatctgcactccaacaacatcaccaaagtgggtgtcaacgacttctgtcccgtgggcttcggggtgaagcgggcctactacaacggcatcagcctcttcaacaaccctgtgccctactgggaggtgcagccggccactttccgctgcgtcactgaccgcctggccatccagtttggcaactacaaaaagtagaggcagctgcagccaccacggggcctcggtgggggtctctggggaacacagccagccatcctgatggggaggcagagccaggaagctaagccaggacccagctgcgtccaacccagccccccacctcaggtccccgaccccagctcgccgccccatcacagcctctccctggctcccaagggtgcaggtgggcgcaaggtctggcccctatcacatgctccctccgcctcagagctgcccctgctctcccaccatagccacccagaggcaccccatgaagcttttttctcattcactcccaaactcaagtgtccaaggctccagtcctaggagaatagttcctgggtcagcagccaggagg

SEQ ID NO: 20929 - DNA, 1263 bp, Macaca Mulatta
  misc_feature (1)...(1263): n = A,T,C or G
atggggcccctctcagcccctcgctgcacactgcacatcacctggaaggagctcctgctcacanagcatcacttttaatcttctggaacccacccaccactgctcaagtcacaattgaagcccagccagccaaagtttctgaggggaaggatgttcttctacttgtccagaatttgccccagaatcttattgcctacatctggtacaaagggcaaaaaacggacttccaccattacattacatcatatgtaatagatgctgaaacaattatagttgggcctgcatacagtggacgagaaacagtatattccaatgcatccctgctgatccagaatgtcaccaagaatgacacaggatcctacaccattcaaatgataaagcaaggtgataagactaaaggagtaattggacatttcaccttnnnnnnnnnnnnnnnnnnnggagactcccaagccctacatctccagcagcaacttaaaccccagggagggcacggagactgtgatcttatcctgtgatcctgacactcaggatgtaagctacctgtggtggataaatggtcagagcctccctatcagtcgcaagttgcagctgtccgaaaacaacaggaccctcagtctatttggtgtcacaaaggatactgcaggaccctatgaatgtgaaatgaagaacccagggagttccagccacagtgacccagtcaccttgaatctcctcnnnnnnnnnnnnnnnnnnnnnnnnnnnnnnnnnnnnnnnnnnnnnnnnnnnnnnnnnnnnnnnnnnnnnnnnnnnnnnnnnnnnnnnnnnnnnnnnnnnnnnnnnnnnnnnnnnnnnnnnnnnnnnnnnnnnnnnnnnnnnnnnnnnnnnnnnnnnnnnnnnnnnnnnnnnnnnnnnnnnnnnnnnnnnnnnnnnnnnnnnnnnnnnnnnnnnnnnnnnnnnnnnnnnnnnnnnnnnnnnnnnnnnnnnnnnnnnnnnnnnnnnnnnnnnnnnnnnnnnnatggtccagaagttcccagcatttttccttcacgcaccgattaccattcaggagaaaacctctacttgtcctgcttcgcggactctaacccatcggcagagtatacttggtcgatgcatgggaagtttctgcaatcaggacaagagctctctatccccaaaattactacaaagcataccgggatctatggttgctctgctcgtaactcagccactggcagggaatgttccactttcaagatggtcatagtctctggtaagtggatc

SEQ ID NO: 20930 - DNA, 674 bp, Macaca Mulatta
  misc_feature (1)...(674): n = A,T,C or G
actgggcacctgggagggagctgccatccaggctccattacctgttgctgaaggcgggtgccaggctggctaggtgccaaggagcaggctccagatcaaggtcctggcccagccacagccatggcaagggcttagcctggcaggctttgtgggggatgctgccctctctgctgcaggctgggtgcacagccgggcaccgcagtgggactcaggcccgggaaggtcatgctctcagccagagctttgctcccagcccaggtgcctcattcggaggcctcttgactgggaccacagaggtgtttctctgctctgacttgtggctcaggactccttcctgggtcatgctcctgccccactgtgcctgggcccgtcaacagcaggagccttttgtttggggccccctggggtgagactgcccctgactcgcccatcccagcagacccacctccccgcctgctgccttccctggagggaaacgagccaggggccatcacctcccctccgcctcctgctttgctgttgccgagcgcgagtaaaggctttgttcttannnnnnnnnnnnnnnnnnnnnnnnnnnnnnnnnnnnnnnnnnnnnnnnnnnnnnnnnnnnnnnnnnnnnnnnnnnnnnnnnnnnnnnnnnnnnnnnnnnnnnnnnnnnnnnnnntggcgttacc

SEQ ID NO: 20931 - DNA, 245 bp, Macaca Mulatta
  misc_feature (1)...(245): n = A,T,C or G
aggcagcacccaaatcctatgctattcgtgattctcgacagatggtgtgggtcctgagtggaaattctttaatagcagctcctcttagcnnnnnnnnnnnnnnngtcactcttcatttaataacctgcagagacacagaattcagtgataagaaaaagggtaatctggtttacctgggaatcaggggaaaagatctctgtctcttctgtgaagaaattcagggcaaacctactttgcagcttaag

SEQ ID NO: 20932 - DNA, 2805 bp, Macaca Mulatta
gaagagcgaagcgtgtgagcagcactacggcctcctctcctcctaacctcgctctcgcggcctgcctttacccgcccgcctgctcggcgcccagaacaccttccaccatgaccacctcagcaagttcccacttaaataaaggcatcaagcaggtgtacatgtccctgcctcagggtgagaaagtccaggccatgtatatctggatcgatggtactggagaaggactgcgctgcaagacccggaccctggacagtgagcccaagtgtgtggaagagttgcctgagtggaatttcgatggctctagtactttacagtctgaaggttccaacagtgacatgtatctcgtgcctgctgccatgtttcgggaccccttccgtaaggacccgaacaagctggtgttgtgtgaagttttcaagtacaatcgaaggcctgcagagaccaatttgaggcacacctgtaaacggataatggacatggtgagcaaccagcacccctggtttggcatggagcaggaatataccctcatggggacagatgggcacccctttggttggccttccaacggcttcccggggccccagggtccatattactgtggtgtgggagcagacagagcctatggcagggacatcgtggaggcccattaccgggcctgcttgtatgctggagtcaagattgcgggaactaatgccgaggtcatgcctgcccagtgggaatttcaaattggaccttgtgaaggaatcagcatgggagatcatctctgggtggcccgtttcatcttgcatcgtgtgtgtgaagactttggagtgatagcaacctttgatcctaaacccattcctgggaactggaatggtgcaggctgccataccaacttcagcaccaaggccatgcgggaggagaatggtctgaagtacatcgaggaggccattgagaaactaagcaagcggcaccagtaccacatccgcgcctatgatcccaagggaggcctggacaatgcccgacgcctaactggattccatgaaacctccaacatcaacgacttttctgctggtgtagccaatcgtagcgccagcatacgcattccccggactgttggccaggagaagaagggttactttgaagaccgtcgcccctctgccaactgtgaccccttttcggtgacagaagccctcatccgcacgtgtcttctcaatgaaaccggcgatgagcccttccagtacaaaaactaagtggactagacttctagctgtcaagcccctcctagttcttcatcccactccaactcttccccctctcccagttgtcccaattgtaactcaaagggtggaatattaaggtcgtttttctcattccttgtgcccagttaatcttgctttctttgtgtggctgggatagagatgggtcaagttattaatttcttcacacctaccctcctttttttccctatcactgaagctttttagtgcattagtggggaagagggtggggaaacataaccactgcttccatttaatggggtgcacctgtccaataggcatacctatccggacagaacacgtttgcaggagggggacttttcttcgaggtagctgaaaggggaagacctgacttcctctggttaggttaggacttgcccttgtggtggaaacttttcttaagaagttataaccaacttttctattaaaagtgggaattaggagagaaggtaggggttgggaatcagagagaatggctttggtctcttgcttgtgggactagcctggcttgggactaaatgccctgctctgaacacaaagctcagtataaactgatggatatccctaccttgaaagaagaaaaggttcatgttgcttggtccttgatttatcacacaaagcagaatagtatttttatatttaaatgtaaagacaaaaaattatatgtatggttttgtggattatgtgtgttttgctaaaggaaaaaaccatccaggtcacggggcaccagatttgtgacgaatagtccggattagaaaccaagcatctccttttgagtagggagtgagggaggtggtgcttagaaagatggtgctctggggttaggtcctcatgaccacttctgggtttctgccctgcccaccctctggagaaggtgggcactggattagttaacacgtttctagcagtcacttgatctctgtggctttggtttaaaagacagacacttgtccacatgggtttacagataagagttggctggtcaatttgagcatgttactgacagagggggcattgtggcgttcttcctggctctgaccagcttgcaactacaccacgctctttcgatactacattttcttacgctcagacttatccagcccccagccccccttcaacctcatcggggccctctccggtaaactccttcgtgacttccgctccgcccgtcccttggcacgccccggttcctctctggatcccgtccaacgacgcatgcgcccacgccgacttgccaatcctcccacaccttggctataacctcctgctctccccctccgctctctattgcatcacccccttccggcccatcaccgcgctttgttactttccgcccgcgcggttcgcttacgggccatgtctccctattccgaccccttcttaccgttcgccatcccccattaccagttgttcaccccctccttccccgcttggaccatccccgtcccgccctccctcgctccccccttccgtttacccccacgacttccacgtggccgcccgcactttactcccgccccgtgattcgaatgcttgctccctcgccttc

SEQ ID NO: 20933 - DNA, 492 bp, Macaca Mulatta
tcctgggagctctctccacccttctcagagttccagtttcaaacagagttccaaccaatgggctccatcctctggattctggccaaatgaaatatctccctggcagggtcctcttcttttcctagagctccgcccccaccaggagctctagttaatggagagctcccagcacacccggatcgtgtggtttgtctccacgcaaagcaataaataaaagcaatggtggctttagctttgtgcgatagttattgagggaggaggtgcaattggccactgtctggcctcggagtggtttgtcctgtctcggcatgtactaaacatgtcttatcccgggtctaaaatgaggcaaagttaggtcacagaatccagtccaaaaattagaaggttctgtggggaatctgagagccggagagacactgagcccagtgtcactcacccaaagcatgggccctttccaactctggctttgaattagtcatgctcagatctcaa

SEQ ID NO: 20934 - DNA, 388 bp, Macaca Mulatta
caaatacattctgaaacaaaggcaaggataaagaccataaggcaaatgtacctgggaatgtgctgcaagtatagcacgtgtagaaagaactaccatttgggcagctccatcatttttcaagctctggtgagagagaggtcatcttaggcaggcagctatctgcagtggagatctgaggatggcaccagacagtgacaagcagcataaattggcagacaataagccacacccatatttaatatccagtgcatgcctgtagagagtctatgctgttctgacaatctccgcagtttcatctcttggaggatggaaagcttaatatttacattagcgaaagggtctgatgagtgatgaactcctcttttggcttgaatctcacctcttctgc

SEQ ID NO: 20935 - DNA, 394 bp, Macaca Mulatta
cttttagctgatattgtggcttctttttgttttgttatatgcttctgaaaaatgaatggaaacttaagtctcttctgtttgtgagtactcagtaattctaaatggaaaacagagtgaccagtgttctcaaactggcagggtttgttcctggtgtctgggaagtgaatgaaagtatggaaattaaagttaaaaaatatattttaaatgtgcaattctttattttcgtagtgtcaaggtattagaaaaacacatgaattatcaagctatttaaagcctttctcaatttttcgttgtttttcagagaacacataacaacaagtggtttacaggaccacagttggtttcccttcttgatttggtactttttcttccagagggtgcagaaacagattta

SEQ ID NO: 20936 - DNA, 486 bp, Macaca Mulatta
ggagttcctgtggggtccacgagcccatgctgaaaccaccaagatgaaagtcctgcgtgttttggccaagagcaataacaccagccctggtttatacccccatctgtatgaagacgctttgatggatgaggtagagagagcattgagactgagagcttaaggcagaactggcactattcccttggccagggcacctaatggggccacatcctacagatcctcccatttctagggaggtctgaattagaattttcgctttatgttagaagagagtaatgagccttctaagtactgcagtatagtagaggctggagggaacaagatatatctctttcttttgtcttgttatacatgagtaacttgtagatttatgttttatttctttgtcaatttttaagattgtttctgttaagtgaaggtttattttgcttcagattatacagttatcaaaaacatagctctcacattcatggctgtttaaccaat

SEQ ID NO: 20937 - DNA, 723 bp, Macaca Mulatta
gatgatcgctgcagaaggggaaaaggctgcttctgagtccctgaggatggcagctgagattctgtcaggcacccctgctgctgttcagcttcgatacctccacacccttcagtctctgtccacagagaagccttccactgtggttttacctttgccatttgacctcctgaattgcctgtcttctcccagcaacagaactcagggaagcctccctttcccaagtccttccaaacctgttgagccactaaatcctaaaaagaaagactctcccatgttataggaaagatggggcgtaatgtgactgtaaaggggcctgccatagaaaagccacatccctgagggaggcactctgtcctcactccctgcccttcctttggttgccatatggaatggccgtggaatacacaaagtcacaatgcactatccatgagaagacggtgaaatgatgtaatgacagagaaggcagacaacacgtctccatgactcatctagtcagagcaattaagggaaacagctttggtcaacattctactttggaaagaatgttgagcctagatgtggttaaattttgactctgggaacttggttcagatgtccttttcactgtatgtcctctggcccctttggcaaggttgtcacagctcccacagcccttcctacaagcacctatcattgggcttgtcacactctattgctcttctgccctaaagatgcagtcttctc

SEQ ID NO: 20938 - DNA, 1495 bp, Macaca Mulatta
  misc_feature (1)...(1495): n = A,T,C or G
atggcactcagagcaaaggcagaggtgtgcatggcagcgccctggctgtccctgcaaagggcacaggcactaagcaccagagccgcccgggcccctagtacggtgctgccctttgaagccataccccagcgtccaggcaacaggtggctgaggctgctgcagatctggagggagcagggttatgagcacctgcacctggaggtacatcagaccttccaggaactggggcccattttcaggtnnnnnnnnnnnnnnnnnnnnnnnnnnnnnnnnnnnnnnnnnnnnnnnnnnnnnnnnnnnnnnnnnnnnnnnnnnnnnnnnnnnnnnnnnnnnnnnnnnnnnnnnnnnnnnnnnnnnnnnnnnnnnnnnnnnnnnnnnnnnnnnnnnnnnnnnnnnnnnnnnnnnnnnnnnnnnnnnnnnnnnnnnnnnnnnnnnnnnnnnnnnnnnnnnnnnnnnnnnnnnnnnnnnnnnnnnnnnnnnnnnnnnnnnnnnnnnnnnnnnnnnnnnnnnnnnnnnnnnnnnnnnnnnnnnnnnnnnnnnnnnnnnnnnnnnnnnnnnnnnnnnnnnnnnnnnnnnnnnnnnnnnnnnnnnnnnnnnnnnnnnnnnnnnnnnnnnnnnnnnnnnnnnnnnnnnnnnnnnnnnnnnnnnnnnnnnnnnnnnnnnnnnnnnnnnnnnnnnnnnnnnnnnnnnnnnnnnnnnnnnnnnnnnnnnnnnnnnnnnnnnnnnnnnnnnnnnnnnnnnnnnnnnnnnnnnnnnnnnnnnnnnnnnnnnnnnnnnnnnnnnnnnnnnnnnnnnnnnnnnnnnnnnnnnnnnnnnnnnnnnnnnnnnnnnnnnnnnnnnnnnnnnnnnnnnnnnnnnnnnnnnnnnnnnnnnnnnnnnnnnnnnnnnnnnnnnnnnnnnnnnnnnnnnnnnnnnnnnnnnnnnnnnnnnnnnnnnnnnnnnnnnnnnnnnnnnnnnnnnnnnnnnnnnnnnnnnnnnnnnnnnnnnnnnnnnnnnnnnnnnnnnnnnnnnnnnnnnnnnnnnnnnnnnnnnnnnnnnnnnnnnnnnnnnnnnnnnnnnnnnnnnnnnnnnnnnnnnnnnnnnnnnnnnnnnnnnnnnnnnnnnnnnnnnnnnnnnnnnnnnnnnnnnnnnnnnnnnnnnnnnnnnnnnnnnnnnnnnnnnnnnnnnnnnnnnnnnnnnnnnnnnnnnnnnnnnnnnnacactggtgcaggttttcctctactcgctgggtcgcaaccccgccttgttcccgaggcctgagcgctacaatccccagcgctggctagacatcaggggctctggaaagaacttccacaacgtgccctttggctttggcatgcgccagtgcctggggcggcgcctggcagaaacggagatgctgctgctgctgcaccangtgctgaaacacttcctggtggagacactaaccaaagaggatataaagatggtctacagcttcatactgaggcccggcacgttccccctcctcactttc

SEQ ID NO: 20939 - DNA, 689 bp, Macaca Mulatta
acagtattagcagtgtatcctttgcatattccctaccatcgaacccattaagatctaaaatccttatcaagtatctggctttaaaagttgggagatggtagttaaaaaagaaaaaagctcttgcaaaaaccatccagtccctaagcatgggctatgctgcagcctcttccagaacagtttccactgcagtgatctttcagttctgcccacattatgttagcaggctgtggagagaggtgcctgtgtctacccttttcccaggacagtcctcatttccaaattctagttttgtcacaaaggctcatgctgttccctgtgtcctcttcaaatctggaccgacagcagagtcttctgactagagccatcgtgcttctcagctccgctgtgtgtgccgtgtggactctgagtggtgtcgtgcagagggcgagtgggcaggagggctcaggtcaactctaaggcacttttctctacatccaatggcaggttgtccccccggcacactccacagctggtgacccgacagttcctggctccttgttcagacagctcgtcagcgaagaagacaacacgtctgcaccttcattattcaaactgggctggctctctagtatgactaagtaacatggcaacacgtctgtctctccctaaataatactaccactatattctgtgtaaagatgcctctgctc

SEQ ID NO: 20940 - DNA, 917 bp, Macaca Mulatta
  misc_feature (1)...(917): n = A,T,C or G
gggctctaccggcgggatttgatggcgtgatgtctcacagaaagttctcggctcccagacatgggtcgctcggcttcctgcctcggaagcgcagcagcaggcatcgcgggaaggttaagagcttccctaaagatgatccgtctaagccggtccacctcacagccttcctgggatacaaggctggcatgacccacatcgtgcgggaagtcgacaggccaggatctaaggtgaacaagaaggaggtggtggaggctgtaaccattgtggagacgccacccatggtggttgtgggcattgtgggctacgtggaaacccctcgaggcctccggaccttcaagactgtcttcgctgagcacatcagtgatgaatgcaagaggcgtttctataagaactggcataaatctaagaagaaggctacaaaggggtcaccagtcgttggcacaccaagaagctgccccgcaagacccaccgaggcctgcgcaggtggctgtatgggcatgcatctgtctgtgcctctcgtgcactgctgcagaagctactccgcctgaatatagaatctataatgcagctctatagagagcgataaagcccgaatacgtaaaatacctgtgtgcctggagacaatgagcnnnnnnnnnnnnnnnnnnnnnnnnnnnnnnnnnnnnnnnnnnnnnnnnnnnnnnnnnnnnnnnnnnnnnnnnnnnnnnnnnnnnnnnnnnnnnnnnnnnnnnnnnnnnnnnnannnnnnnncccnnnnnnnnnnnnnnnnnnnnnnnccccccaaaccaaaagagcaggccaaccccccccggggaggggcccttttgggccccccaaaatgggcggtaatgtgcgcccccataagccttttttgccctagnnnnnnnnnnnnnnnnnnnnnnnnnnnnnnnccacac

SEQ ID NO: 20941 - DNA, 578 bp, Macaca Mulatta
cgcttcagtttttattagtgtaattttcaatgactatcaatgtgaattataaaaacttgttttgttctttttccatcagtgtcctgaatttctagaccttgaaaaatctaaacttaaatccaaagaatccctttcaagtggggtgcatctgaacacagcttcagaagacaacttgacttcacttttaaaacaagacagtgatctgtctttagagcttcacctgcggcaaagaaaaacttaccttcatccaattaggcatccttctttgccagattcatccctaagcactgtaggaatcttgggtcttcataggcatgtttctgatcctggtcttccagggaaataatcattttgtactatttactccacatacaatgtaagtgcttttaacggctgttttcctttttctatttaaatcctctctacttgactcaggggctaacaaggtaccattatatgcaaaagtactgtatattttcctaaattgaagcttgtaaggtaaaattgagcagttaggatgtaaatatatgtaagaacttttggttccaaatgttaaaactgccagcatctcacggcac

SEQ ID NO: 20942 - DNA, 656 bp, Macaca Mulatta
catgaaggcccggtaggaggccctgatcagggagcgcgagcggcagctggccaagcgccagcagctggaggagcagcggctgcagcaggagcggctgcgggagcaggagcaccggcgcgagcgcaagcgtaagatctcctgcctgtccttcgcgctcgacgacctcgatgaccaggcggacgcggccgaggccaggcgcgccggaaacctgggcaagaaccccgacgtggacaccagcttcctgcccgaccgcgaccgcgaggaggaggagaaccggctccgggaggagctgcgccaagagtgggaggcgcagcgcgagaaagtgaaggacgaggagatggaggtcaccttcagctactgggacggctcgggccaccggcgcacggtgcgtgtgcgcaagggcaacacggtgcagcagttcctgaagaaggcgctgcaggggctgcgcaaggacttcctggagctgcgctccgcgggcgtggagcagctcatgttcatcaaggaggacctcatcctgccgcactaccacaccttctatgacttcatcatcgccaaggcaaggggcaagagcgggccgctcttcaacttcgatgtgcacgacgacgtgcgcctgctcagcgacgccaccatggagaaggacgagtcgcacgcgggca

SEQ ID NO: 20943 - DNA, 159 bp, Macaca Mulatta
ttgatcatcttaatgtaccatactaaaactttcagtgtatggatggatgtcagcatgaagagatcatttaaagctagttcttcttgaattaatcaccgagcaccattctaactgaccaaggtttccttttttgttcctccaccataatgtggtcaccac

SEQ ID NO: 20944 - DNA, 589 bp, Macaca Mulatta
ggtggtgcactgcaatgcgggcgtgggccgcaccggctgcttcatcgtgattgatgccatgctggagcggatgaagcacgagaagacggtggacatctatggccacgtgacctgcatgcgatcacagaggaactacatggtgcagacggaggaccagtatgtgttcatccacgaggcactgctggaggctgccacgtgcggccacacagaggtgcctgcccgaaacctctatgcccacatccagaagctgggccaagtgcctccaggggagagtgtgaccgccatggagcttgagttcaagttgctggccagctccaaggcccacacgtcccgcttcatcagcgccaacctgccctgcaacaagttcaagaaccggctggtgaacatcatgccctatgaattgacgcgtgtgtgtctgcagcccatccgtggcgtggagggttctgactacatcaatgccagcttcctggatggttatagacagcagaaggcctacatagctacacaggggcctctggcagagagcaccgaggacttctggcgcatgctatgggagcacaattccaccatcatcgtcatgctgaccaag

SEQ ID NO: 20945 - DNA, 848 bp, Macaca Mulatta
  misc_feature (1)...(848): n = A,T,C or G
gggaggtctccttgactgcatatgttacagctgcattgctggagatgggaaaggacgtagatgacccaatggtgagccagggtctacagtgtctcaagaattcggccacctccaccaccagcctctacacacaggccctgttggcttacattttctccctggctggggaaatggacatcagaaacattctccttaaacagttagatcaacaggctatcatctcaggagaatccattcactggagccacaaacctactccatcatcgaatgccagcccttggtctgagcctatggctctagatgtggaacttacagcatatgcattgttggcccagcttaccaagcccagcctgactcaaaaggagatagccaaggccactagcatagtggcttggttggccaagcaacggaatgcatatgggggcttctcttctactcaggatactgtagttgctcttcaagctcttgccctaatatgccactaccgcctacacgccatctgaggagattaacctggttgttaaatcccctgagaaatttccggcatacctttccactataggtcagcccaacagatttggtattttttgcataaaaaattctgcccccaaagtccctgggaatggtacacccctggaaggcctcccgggccatggggctgtgtttctatgttacagaacgggtggtttaaaaataacaataattcctccctcctnnnnnnnnnnnnnnnnnnnccttttattttctttcacccgggcaaaaaggggaaaaaaacctatgaaggctgatccaacctgaaatatccacccttcgattcctcttggaatctccccctatttaacccccaa

SEQ ID NO: 20946 - DNA, 150 bp, Macaca Mulatta
  misc_feature (1)...(150): n = A,T,C or G
aattccttcacctagagctcccccgatgaacatcctctctgctgtaatcactgaagcttttggagtggcacttgtaggctatgtggcctcactggctcttgctcaaggatctgccaaaaaattcaaatattcaattgatgacaaccaggn

SEQ ID NO: 20947 - DNA, 807 bp, Macaca Mulatta
atattttatctatgcaagccatggaccaaaaaaatggcgctgaagggactgaattcattttcctgggattggctggtcaacacaagccttggcatatcctcttcatagcatttctagcaatctatgtggtaccccagtaggtaatattggaatgatcctacttatcaaaattgatgcttctcttcatacccccatgtaaattttctccaacacttggcatttgttgatctctgttacacctctgctatcactcccaagatgttgaaaaactttgtagaaacaaaaaaaatctatcccatgtataggatgtatggtgcaattactagtttatggtactttgcaacaagtgactgctacatcctggctgctatggcagtagactgttatgtggccttctgtaacccactccattatccaggggttatgtcccagagactctgcattaagctattagttagttcataagtcatgggtttcctaaatgcctctataatcacaagtttcactttctcattgaacttctgcaaatccaatacaattaatcactttttctgtgatgaacctccaattattgccctaccatgctccaatattgacctcaacatcatgttattaacagtatttgtgggattaaatttgatgtgcactgggatggtggtcatcatttcctgcatatatgtcctggttgccatcctgaggatatcttctgcagcagggaagaaaaaagtctctctacatgtgcctcccacctgacagcagtcaccattttctatggggttctgtcttacaagtatctatgccatcgta

SEQ ID NO: 20948 - DNA, 883 bp, Macaca Mulatta
  misc_feature (1)...(883): n = A,T,C or G
tgtatcagaacctctgcctacatgcaggccatgatcagagccatggacacactcaagatcccgtacaagtatgagcacaataaggctcatgcacaattagttcgagaagttgatgtggagaaggtgtctgcttttgagaatccatatgtagatgcaataaagagtttatggaatgatcctggaatccaggaatgctatgatagacgacgagaatatcaattatctgactctaccaaatactatcttaatgacttggaccgcgtagctgaccctgcctacctgcctacgcaacaagatgtgcttagagttcgagtccccaccacagggatcatcgaatacccctttgacttacaaagtgtcattttcagaatggtcgatgtagggggccaaaggtcagagagaagaaaatggatacactgctttgaaaatgtcacctctatcatgtttctagtagcgcttagtgaatatgatcaagttctcgtggagtcagacaatgagaaccgaatggaggaaagcaaggctctgtttagaacaattatcacatatccctggttccagaattcctcggttattctgttcctaaacaagaaagatcttctagaggagaaaatcatgtattcccatctagttgactacttcccagaatatgatggaccccagagagatgcccaggcagcccgagaattcattctgaagatgttcgtggacctgaacccagacagtgacaaaattatctactcccacttcacatgcgcgacagacaccgagaacatccgctttgtctttgctgccgtcaaggacancatcctccagttgaacctgaaggagtacaatctggtctacttgtgcctcctagacacccgtcctggccttccctggtggg

SEQ ID NO: 20949 - DNA, 123 bp, Macaca Mulatta
gacttgcaccttcgagatcccctgtgttttcccaactggagaaggatgaacagttgtgggtgcccagctgggtggatgtgactccagtcagcagagcagaagccaggagaggttttggtcttg

SEQ ID NO: 20950 - DNA, 681 bp, Macaca Mulatta
aggactccaccttttccctgaagacagctttggttttcaggactctgaagaagaagaactagccagtactccccccagctcagaagactcagcgtcaggatccgatgagtagaaatggaggaaggttctctttgcgcttgccttctcacacccccagactccccacattttggtaccagtttctcctcatgaaatgtagtccctggattctgtgccatctgaacatgctctcctgctggtgtgtatgtcactagggccgtggggagacttcttaactctgttgcttcccaaggatggctgtttataatttggggagagagagggtgggaggcagggcaatgcaggatcaaaatcctcatcttactttcccgaccttaattaaggatgtagctgctgctggtcctgttcaagttgctggagcaggggtcatgtgaggccaggcctgtagctcctacctggggcctatttctacttttattttgtatttctggtctgtgaaaatgatttaataaagggaactgactttggaaaccatgtctttatgctttctttgtagccctggtttgttgctcctacttttactggtggtggttactgccctggtcagactaggcagagcctggccagccgggaagcaagtctcgaggcacatcctgttctgttcccggctggagaagcatt

SEQ ID NO: 20951 - DNA, 593 bp, Macaca Mulatta
  misc_feature (1)...(593): n = A,T,C or G
gaacggaagcgcaaacgcacgtccatcgcggcgccggagaagcgttcactcgaggcctatttcgctatccagccacgtccttcatctgagaagattgcggccatcgctgagaaactggaccttaaaaagaacgtggtgagagtctggttctgcaaccagagacagaaacagaaacgaatgaagtattcggctgtccactgactgcggcagggcgcagcttcgggagctgggagagcctagtgctcatccctccggggttggggggatggttattgggaactccaaggcgtttcctaggcaggttaggttctctcctccgaagccacagactttctccctttgtcccgcttggttgcctccggccttctctttctctttcctttctattcccaccaaaaaaagttttggcgctgggaaaatattccagaagggcgggcctgagggtacttgtgctgtccgtggtgctganatttgccctcgcgcacggggccgcacgacctcggagcaggagcaccaaaacagaggacagtgaattggcccaaccgcccgaagctagggtgaaaacgccactttgttaagcgcgatcaggcaag

SEQ ID NO: 20952 - DNA, 279 bp, Macaca Mulatta
ctgcttcccgctgcgggcgaaggtggtggtcaccaaggggcgggtgaagctgatcatcttcgtcatctgggccgtggccttcagcagcgccgggcccatcttcgtgctagtcggggtggagcacgagaatggcaccgacccttgggacaccaacgagtgccgccccaccgagttcgcggtacgctctggactgctcacggtcatggtgtgggtgtccagcatcttcttcttccttcctgtcttctgcctcacagtcctctacagtctcatcggcaggaa

SEQ ID NO: 20953 - DNA, 637 bp, Macaca Mulatta
aatgtataaaaccttagaagttaataaatgaatccttactcaaccatcattatggctttaaaacccaaccaacagtaaacacttacttgaagccaaaacagtaaattttgaataaaatttgaattatgcttttggaagctgccatgtcttaattcttgctggattttgattttcaattttggaagtttttatcaaataaaactgttcagtcatgagtatatcaggtagcagcctttaaggatctaagtttcattcctataaagaacaggaggtgctggtatttcttgtcttagcaagtggtctgatacgggtcttaaatgggggttagcatctatactatggcttaaaagtttcctccttggtcaccatttgggaggtgatggcttctaagctaagctttgctctcatgtgatccttcttcatcttaatacccagtaaaatataaacctctcagagtctacccagtgtagactccagggtcttggcttcatcttcaagatctatctgatttatacaaagaatggtgctgtttttatatacatactaaaaaaatttaattctcaagccattttcttaatatttacgccagcaaagtcaggaaagactattttgtcctgtttatcttttagtagtgaac

SEQ ID NO: 20954 - DNA, 171 bp, Macaca Mulatta
agtcttcctttatggcaagattgtcatgagttatggagtaaaaagcgaagaagacagaagcagatgggcatgaccgatgatgtttccacaattaaagcccctaggaaggacttgtctctgggcttggatgacagcagaaccaacacaccccagggtgtgctgccatcttca

SEQ ID NO: 20955 - DNA, 827 bp, Macaca Mulatta
  misc_feature (1)...(827): n = A,T,C or G
tttcatcatttctccattgatttgctttgcagcttgcagttccccacaatgatgaatggacccgattgnccaggacccttgtggagattcgcgctaacagagctgatagcgaggaggaaggcactgttgagttatctgcctagtggaaatgagccacccccactgcagcccccaactttgtgtcctagagctcagcgtctgcagtcaagtctgttgtattcggtgtccattcagtatcagtattgctgtgacattttgggtgccatattgtgccagctttgctccaagcattctaaatgtgtcccaccatgctttccactgacccaaaattcaccagagcatttctatctttatatttctgtctcaaaaatgaagggaggggggttatgggttaagttgctgccttttaactacttagtagctgtatttaatagctggaaacctctggttaaatttgtgcttacatgcattcctggcatagtcctattaaatccatatgaagccagatatgattgggtgcagatgtggtgtgcctcatgttatggtacagggccaaagacttgagatgtggtgttttacatggtgactcacattatgaatggatttactagaagaacattgctgctccttatttattgtagtgtgctgcatggaacgtatttatttgaaagcattaaaataaacgatcggagagcatgtgcataatgagaggactgtattctctctgctgctgttgaggttacattaagttccaaattacaagtacagtatgccagttccactgaagacatgaaatctttaaaggtttgttgcagtgaacgaaatga

SEQ ID NO: 20956 - DNA, 167 bp, Macaca Mulatta
tggcaaaggcgcccagctgggcaggggtgggtgctctggcctataaagcccccgaggcgctgtggcctgcagaggcggttatggacggcaccatggaggactccgaagcggtgcagaaggcgacggcgctcatcgagcagcggctggcacaggaggaggagaatgag

SEQ ID NO: 20957 - DNA, 769 bp, Macaca Mulatta
ggcagccactcagtgatgagacatcccttgagtgtggcaaaatggcaccttgaagaaagaggcctaggagagcagccctgtaatgtatccagtcagctgcatggtgctgactgagctgaggagtcaaactattctttctatatgacatatacatatacttgtttataaaataatcatttgcccagggaaaaaaccacaatgctgtttcaagctttagtcttatgtgttgaaatgttttcgtaagccttggcatgaattagtgttctagactctgctttgcacagcttgcacttacagtgattgtacatattgtacatctttgtacagagacatcttggcacctcatcccaacaaatcacatttgtagaaatgtaatgcggttctgagtggcttgaaatgtacagaatgttttgaaagtgttttattaagaatcacacaaaaataaatgtattaaaattaaattcattctcttattggtgacttatggaaataaagcatcaatattggatgtatttaattcctagtttgttttccattctggaataaaaaggtatttgctgataaaaggcataatgagacatattgctgataccattgaataagtggtactttggaaagatgcatgccagtggatgccagaggaccaggctaatgacttgtgtgtgctgatatgtttccatttgtattttaatgtgtgtgtagaccctcctctgttcatcaatcaaaaagcatttcctaggcagctcctcctcctgtcagtgtgcatata

SEQ ID NO: 20958 - DNA, 275 bp, Macaca Mulatta
gcaattttccagattattcaaagtatcaggatgggcatgtgaagtgactgaccttaagatgtttccattctcctgtgaattttaacttgaactcattcctgatgtttgataccctggttgaaaacaattcagtaaagcatcctgcctcagaatgactttcctatcatgcttcatgtatcattccaaggtttcttcatgagtcattccaagttttctagtccataccacagtgccttgcaaaaaacaccacatgaataaagcaataaaatttgatt

SEQ ID NO: 20959 - DNA, 778 bp, Macaca Mulatta
accctaatgtaaggatttgtggttaatgccttggcattctaaatttaaggcatgtatgcagacttcaatgacttagcaaggagctcttttgaaagaaactgaacttaatcttaggtaaatgcggttaatgatttttgtgtttgtctttccagctatccagcaggagaaagagtgtgttcaaacatcgtaaaatggggatcgcctcccaacagcagatttcagcattacctgagagtcttggttttagacttgttttttgtaaacccatgtgtttgtagagattttaggcatcttctgatgtcttctcacctatgttccctggctaagaagtcagaggtagccagtgtttccttaaattcatttttaaacttaccattggtgcatatgttctggatggcagatgctgtcaataatctcaccatcgatgtcctttgtgtatgtagttcttgcatcctatactgcataagcgtgttttaaactgctatgatgggtgcttccattgcttcataatctccatgaagttgcgtgtttttgcagcttttcacagtttatttgcatttctaatgtagtaataaagtaaccaatataaccattatcttgagactcctgtggttgactcttggtggtcttctgtggaatgaaaagtacacacggatatacttttcagccaaacagaatggttgaaggaaaactgttttagcagattattcacgtgggaaatgttcacttctctccaggtctagtgggtcctgacttggggatgctaggtgctttttct

SEQ ID NO: 20960 - DNA, 192 bp, Macaca Mulatta
aatatggggcattaatattcttttgttatttaaaaaacacaaaaagttaaaaaatatatacagattcctgttgtgtaataacagaactcgtggcgtggggtggcagccccctctgagcccttgctcgtccacggtcttctgcatcactggtatacacactcgttagcgtccatttcttatttaattagaatg

SEQ ID NO: 20961 - DNA, 839 bp, Macaca Mulatta
  misc_feature (1)...(839): n = A,T,C or G
ggaagggactgctaggggcttcagcggagggagtggagcgaagcgtcgccgcgatggtgttgttggagagcgagcagttcctgacggagctgaccagacttttccagaagtgccggacgtcgggcagcgtctatatcaccttgaagaagtatgacggtcgaacgaaacccattccaaagaaaggtactgtggagggctttgagcccgcagacaacaagtgtctgttaagagctaccgatgggaaaaagaagatcagcactgtggtgagctccaaggaagtgaataaatttcagatggcttattcaaacctactgagagctaacatggatgggctgaagaagagagacaaaaagaacaaaactaagaagaccaaagcagcagcagcggcagcagcagcggcagtnnnnnnnnnnnnnnnnnntgccgcagcagcaacaacagcaacaccagcaacacnnnnnnnnnnnnnnnnnnnnnnnnnncagtaaagggcacaaatttcctgctttcaccaattaaccactgaattgctattttttccttttggccacatagctaggtttctggttcccccatagtaggtgttttcacataagattagggtcctgttggaaagaacagttgcagtgtttataggggtagttgtggtaagaatctagtttattttgcatttggcttaattggtctgtgttgcatggttataattctccttggaatatagattaagtctctgtaagacatctcttgttgaagaaccagcctatcattaaaactgtctgggttatccgcacttgggctcctttaattctttttcaccttccccattttaaaccggttcc

SEQ ID NO: 20962 - DNA, 848 bp, Macaca Mulatta
gggagaatttgaagaatatatcagagacaaatatatcacagccaaagctgacttcaggacgcttttgaaagagaccaaatttataacatatagatccaaaaaattaatccaagaatctgatcagcacctgaaagatgtagaaaaaattttacagaatgacaaacggtatttagtactggactgtgtgccagaggagaggcgtaaactgattgtggcatatgtgatgacctggatcgccggggtccacccccaccacctacagcatcagagcccacgagacgatcaacaaaataattctaaatactcttccacaggggtatctattcaaaatgcttgcatgagccaattttcaggtttttacatatatgtgcattagtcaacctattgcaaaaccatctgacaaacagaaggagaagcatttgtgaacagtttctgaacagaacactttggaaatatttatgcttttctttgtgtggcatgactgacatacatactcaaatataggctgtctctagtaaatcttaaaatcttgaagctaaaattcatccttttatgaggtgtggaagtcagtgacttggtgacgttcttcctagcagtgttaatacatgcaagaagtaagagcatttgtggcttgaacttgccagatgcaaatactacagactccaagaaaacctgagttggggtgcgtctcgtcttgatcctctcctctgaaacgcgggtacaagagaagacactgaaaatcgacatctgatcttccagaggctacgattattataatggacactactttaccttcgtctctaagatagattactgcatctgtcactacgtgcttgatatccctctga

SEQ ID NO: 20963 - DNA, 195 bp, Macaca Mulatta
  misc_feature (1)...(195): n = A,T,C or G
taggaaactccaagcagggcttgcgatgtaagacgtgcaaagtcagcgtccacctctggtgctctgaggagatctcccaccagcaatgcccagggaagacgngtccacctccttccgccgcaacttcagctcccctctcctggtacatgagccgccaccagcctgtgccacaagcaaagagtccccacccactgg

SEQ ID NO: 20964 - DNA, 772 bp, Macaca Mulatta
  misc_feature (1)...(772): n = A,T,C or G
gtacccaaagtgttgggattataggtgtgagccactgtgtccagcnnnnnnnnnnnnnnnnnnnnnnnntaaacttgtcctttggttttgcagaacaggcctgcttcctctctagcccatcctcatttcttggggcctgaaccccagtgctccaaagcattgcttgtgagatttaagaaatgtgaatatgatgtggggatgggcctcttctacattaccttggcccagggggatcagctggctgggaggattagtgagcacctctgtattttgaggtctcactgagtcttctggagctgtgtggttaatctttggtttctgataacccctgggtccatttggccatcagcctcagcagtgagcaaagcaatactgtactcaaaatttctatgttcctgttccttcctctgctcctcctttggagaagcaataattccatggggggatgatacagtagcactttacaaatggctccatgtcattcatcccaggggccacacataatctcttgcaccacctattcttcctgttcagctcctttacagcttttattcctaacttggtggggcctcctttaaggatgagccaatggtaaaaatgtggctgtagtcaacagagacccctctgaggggtatctgttctgcacccctagtgaaaatctgtgagacaaaaaacctaaacatgggtaaattgatttcaaaacctgtgcccagttctataaaccctctggcctcccccaaattcagagcctccaaggccaaaactccttcct

SEQ ID NO: 20965 - DNA, 760 bp, Macaca Mulatta
  misc_feature (1)...(760): n = A,T,C or G
ggagtggccccacaaatgaagatttatatatcagctgcaccatgccatctatagagataggaacggtgggcggtgggaccaacctgctacctcagcaagcctgtttgcagatgctaggtgttcaaggagcgtgcaaagataatcctggggaaaatgcccggcagcttgcccgaattgtgtgcgggaccgtaatggctggggaattgtcacttatggcagcattggcagcaggacatcttgtcaaaagtcatatgattcacaacaggtcgaagatcaatttacaagacctccaaggagcttgcactaagaagacagcttgaatagcttgacagttctgaactggaacacgggcattgggttcgaaaggactaacataaaatctgtgaattaaaaaagctcaatgcattggcttgttgaggatgaatagatgtgatcactgagacaaccacttggtttttgactctttcagagaggtctcaggttctttccatgcagattcctcagatctgaacacagtgtagtgctttacatgctgtgctctttggaaagatttcaacaagaatattgtacgttaaagcatcaaagatggtaatctacagctcacctctgaaagcaaatacaagctgggaaaaaagttttgatganattcttgaagttcatggtgatcagtgcaattgactttcttcctcacccctgccgattgaaaatggattttaaaattatactatagctgacgaaactcctgaattttgtagttaaa

SEQ ID NO: 20966 - DNA, 420 bp, Macaca Mulatta
ggatgttcttgatatcgtgatctcatgatccgcccgcttcggcctcccaatgtgctgggattactgtcatgagccactgtgcccggctatctcttagggatttaaacgagttgttgactttggagtttggtagctttttacttactattagacccgagtgacaaatttcaggcatgttatagccttgaaaggaacccagaaatctctaggaaatgactggagaatgtgaactccatagtagtttgaggatggagtcacgagtgaaatgggtgaaatgagcccatgggctttgggcaccgcaggcctgtccagcttatgacaccctggtgactcagtgcaaagtttacaacagtgacagcaaactagcatggcgtgaatacatgtggcatccagtctcagtggctgtcctcactcattcct

SEQ ID NO: 20967 - DNA, 653 bp, Macaca Mulatta
  misc_feature (1)...(653): n = A,T,C or G
gtgcagagctgaacaaggaggtgtctccctttactgccatgattcagaccagcaagacagagatcacccatttcaggcgcacgctccagggcctggagattgagttgcagtcccagctgagcatgngaaagccgggctggagaacacggtggcggagacggagtgccgctacgccctgcagctgcagcagatccaggggctcatcagcagcatcgaggcccagctgagcgagctccgcagcgagatggagtgccagaaccaggagtacaagatgctgctggacatcaagacgcggctggagcaggagatcgccacctaccgcagcctgctcgagggccaggacgccaagngaagcgtcagcccccgaagcacctctgttaccacaacttccagtgtctctgctaccaccacctctaatgcctctggccgccgcacttctgatgtccgtaggccttaaatctgcctggtgtcccctccctctgtcttcagcacccagaggaggagagagctggcagttccctgcaggagagaggaggggctgctggacccaagcctcaatccctctgctttcaggaccccacatcccgactgtctcctgaggatgggccctctgtgctcttctcttcccattggatctctctcctctgtgacct

SEQ ID NO: 20968 - DNA, 893 bp, Macaca Mulatta
  misc_feature (1)...(893): n = A,T,C or G
gggggcactgtaccttgtttaacatttcaccccactctgtacagctgctcttacccacccattttttcacctcacacccaaagcattttgctgacctgggtcagagagaggaatcctttttgtcgtgcccttaagttcagcagctgtttaacctgttttcagtcttatttacattgtcaaaaatgatttagtacttgttccctctgttgggatgcgagttttggcggggggcagggaacctgtccagtttgtacgatttgcttttaagtgtttctaatgtgttctctgatctgccctcactgccctgtgaggacagctcaggccaaggagtgaaaagactacttactaagggaagggatgcagaatgtttacctggtgctctcaacaggactcttaacacagannanaaataaatacnnnnnnnnnnnnnnnnnnnnnnnncatttggcagacaaaaaaaacccaacacccccactaaaataaataaaatataaatatttctcggcccaccccggcccctcaaaaaatcnnnnnnnnnnnnnnnnnntttggccccccgggccccccttaagaaaaggaaacagggtcaaaagcttttttccctaaaaaaaatcctgcgtacaaaaaaaagggtttggaannnnnnnnnnnnnnnnnnnnnnnnnnnnngggggaaaccaaaaaccttttccaaaaaaatatccccaaaaggagtgttcccaaaggcgcacatttccgggaaactcatatcaaaaaggaagatcctcataaggagaaacacctcaaatattaaaaatattacccgctccccgcccctgtgccaatttaatatcgagaaaaagaagttgttgtgaaaaattttctattaaaccatattttctttcgcgcaaaag

SEQ ID NO: 20969 - DNA, 800 bp, Macaca Mulatta
  misc_feature (1)...(800): n = A,T,C or G
ttgtgctgagttttcttttcatgtaccaagtctagaagagcttgctggagnagttatgcagaaggggttaaaagataactttgctgatgtccaggtctctgtagttgattgccctgatttgactaaggaaccctttacctttcctgtgaaaggnnaggcatctgtgggaaaactagaattgcagaagtaggaggtgtgccttacttattgcctcttgtaaacnnnnnnnngtttatgatctgaataaaattgcaaaagaaatcaagctgcctggagcttttattcttggagcaggagcaggtccatttcagactctcgggttcaattctgangtttatgccagttattcagacagaaagtgaacacaagcctcctgtgaatggtagttactttgcccatgtaaaccctgcagatggagggtgcctcctggagaaatacagtgagaaacatcatgattttgagtgtgcattactggctaatcttttcgccagtgagggccaacctggcaagnnnnnnnnnnnnnnnnnnnnnnnnnnnnnnnnnnnnnnnnnnnnnnnnnnnnnnnnnnnnnnnnnnnnnnnnnnnnnnnnnnnnnnnnnnnnnnnnnnnnnnnnnnnnnnnnnnnnnggtttgatttgcgactggagcacactcattttttcagtcatcatggagaaggtggacactaccattatgacactactccagatacagtggaatatcttgggtacttcttacctgcagagtttctctatcgcattgatcaaccaaaagagtctcattcaattggtcgagattaa

SEQ ID NO: 20970 - DNA, 613 bp, Macaca Mulatta
gataaagggctcgggggcctggtgtggcaggggcatgcggctgagctgacaacgcagatgaaaaagggaaggaagagggccaggccccgcctggagcaggacagctccctcaagagttacctgtcgggcgaggaggtggaagatgacccggacctcgttggtgccccggagtacgaatgctacgccctggacgcagaggagttggaggcagagaaaggaggtggcacaacggaggatggccgcggctgcaatgccagcagggagtagatggagaggcgtcagctctgcctgtcccacgttcgcagggaaaagcataggcacgtgacgcagcatgtggctttgttgaggcagttgatggagttaaaaccatctgctcttctgttacgtcgacgttttctagcttttccgtgtatctaaacacagtttgctacagaagtcactgttgtttttcccatacactgtgtgtaatgtaaaaaataaatggccatcttaccacagattctcacaaaaagaaaatggtaaaatagtgtctctgagatgctggcgtggccacctccacctgcagagccctgccaggtgccagtgagtgcttggcccgaggggtcaggcgaca

SEQ ID NO: 20971 - DNA, 3493 bp, Macaca Mulatta
  misc_feature (1)...(3493): n = A,T,C or G
gaattttttcacgattgtacgaccaatgaaagaaaacgtgagatanagaggagcttcttaataactttgcccagcaaataggagcctggagattctgcctgtactttctctccagcactaggaatgactatgtaatgatgtacagtttaacagtttttgagnnnnnnnnnnnnnnnnnnnnnnnnnnnnnnnnnnnnnnnnnnnnnnnnnnnnnnnnnnnnnnnnnnnnnnnnnnnnnnnnnnnnnnnnnnnnnnnnnnnnnnnnnnnnnnnnnnnnnnnnnnnnnnnnnnnnnnnnnnnnnnnnnnnnnnnnnnnnnnnnnnnnnnnnnnnnnnnnnnnnnnnnnnnnnnnnnnncagttgatccagtcccctgtgacaacccctcttgggctgatcatgttgaagacaacttcagaagagctggcttgtccccgtgaggacctcagtgtggctcggaaggaggagttgcggaagctgctactggaccaggtgcagacagtgcttgggctactgacaggnnnaggtatcttggagactgtctgggacaaacacagtgttactgctgccactccaccaccatccccgacctcaggagaaagtggnnnnnnnnnnnnnnnnnnnnnnnnnnnnnnnnnnnnnnnnnnnnnnnnnnnnnnnnnnnnnnnnnnnnnnnnnnnnnnnnnnnnnnnnnnnnnnnnnnnnnnnnnnnnnnnnnnnnnnnnnnnnnnnnnnnnnnnnnnnnnnnnnnnnnnnnnnnnnnnnnnnnnnnnnnnnnnnnnnnnnnnnnnnnnnnnnnnnnnnnnnnnnnnnnnnnnnnnnnnnnnnnnnnnnnnnnnnnnnnnnnnnnnnnnnnnnnnnnnnnnnnnnnnnnnnnnnnnnnnnnnntcctggccatgtcctgcatcaatgaactcatgtccaagaactgtgtgcctatggaatntgaggagtatntactgcgtatgttccagcagactttctacctcctgcagaaaatcaccaaggataacaatgcccacacagtgaagagcaggctagaagagctcgatgagannnnnnnnnnnnnnnnnnnnnnnnnnnnnnnnnnnnnnnnnnnnnnnnnnnnnnnnnnnnnnnnnnnnnnnnnnnnnnnnnnnnnnnnnnnnnnnnnnnnnnnnnnnnnnnnnnnnnnnnnnnnnnnnnnnnnnnnnnnnnnnnnnnnnnnnnnnnnnnnnnnnnnnnnnnnnnnnnnnnnnnnnnnnnnnnnnnnnnnnnnnnnnnnnnnnnnnnnnnnnnnnnnnnnnnnnnnnnnnnnnnnnnnnnnnnnnnnnnnnnnnnnnnnnnnnnnnnnnnnnnnnnnnnnnnnnnnnnnnnnnnnnnnnnnnnnnnnnnnnnnnnnnnnnnnnnnnnnnnnnnnnnnnnnnnnnnnnnnnnnnnnnnnnnnnnnnnnnnnnnnnnnnnnnnnnnnnnnnnnnnnnnnnnnnnnnnnnnnnnnnnnnnnnnnnnnnnnnnnnnnnnnnnnnnnnnnnnnnnnnnnnnnnnnnnnnnnnnnnnnnnnnnnnnnnnnnnnnnnnnnnnnnnnnnnnnnnnnnnnnnnnnnnnnnnnnnnnnnnnnnnnnnnnnnnnnnnnnnnnnnnnnnnnnnnnnnnnnnnnnnnnnnnnnnnnnnnnnnnnnnnnnnnnnnnnnnnnnnnnnnnnnnnnnnnnnnnnnnnnnnnnnnnnnnnnnnnnnnnnnnnnnnnnnnnnnnnnnnnnnnnnnnnnnnnnnnnnnnnnnnnnnnnnnnnnnnnnnnnnnnnnnnnnnnnnnnnnnnnnnnnnnnnnnnnnnnnnnnnnnncatgctcagtccctggctgcgctgcaggcttactctcactggttagcacagtattgcagtgaagttcaccggcagaacacgcagcagttcgtgacactcatctctactaccatggatgcaatcacaccgctaatcagcaccaaggtcnnnnnnnnnnnnnnnnnnnnnnnnnnnnnnnnnnnnnnnnnnnnnnnnnnnnnnnnnnnnnnnnnnnnnnnnnnnnnnnnnnnnnnnnnnnnnnnnnnnnnnnnnnnnnnnnnnnnnnnnnnnnnnnnnnnnnnnnnnnnnnnnnnnnnnnnnnnnnnnnnnnnnnnnnnnnnnnnnnnnnnnnnnnnnnnnnnnnnnnnnnnnnnnnnnnnnnnnnnnnnnnnnnnnnnnnnnnnnnnnnnnnnnnnnnnnnnnnnnnnnnnnnnnnnnnnnnnnnnnnnnnnnnnnnnnnnnnnnnnnnnnnnnnnnnnnnnnnnnnnnnnnnnnnnnnnnnnnnnnnnnnnnnnnnnnnnnnnnnnnnnnnnnnnnnnnnnnnnnnnnnnnnnnnnnnnnnnnnnnnnnnnnnnnnnnnnnnnnnnnnnnnnnnnnnnnnnnnnnnnnnnnnnnnnnnnnnnnnnnnnnnnnnnnnnnnnnnnnnnnnnnnnnnnnnnnnnnnnnnnnnnnnnnnnnnnnnnnnnnnnnnnnnnnnnnnnnnnnnnnnnnnnnnnnnnnnnnnnnnnnnnnnnnnnnnnnnnnnnnnnnnnnnnnnnnnnnnnnnnnnnnnnnnnnnnnnnnnnnnnnnnnnnnnnnnnnnnnnnnnnnnnnnnnnnnnnnnnnnnnnnnnnnnnnnnnnnnnnnnnnnnnnnnnnnnnnnnnnnnnnnnnnnnnnnnnnnnnnnnnnnnnnnnnnnnnnnnnnnnnnnnnnnnnnnnnnnnnnnnnnnnnnnnnnnnnnnnnnnnnnnnnnnnnnnnnnnnnnnnnnnnnnnnnnnnnnnnnnnnnnnnnnnnnnnnnnnnnnnnnnnnnnnnnnnnnnnnnnnnnnnnnnnnnnnnnnnnnnnnnnnnnnnnnnnnnnnnnnnnnnnnnnnnnnnnnnnnnnnnnnnnnnnnnnnnnnnnnnggctttcggacagtcctttctccagcctgacatccacnctttttaaacaaaatctcttctacttggagactcttaacaccaagcagaagctgtaccacaagnagaagatcttccgcaccaccatgctgttccagttcgtgaacgtgctgctccaggtcctggtccacaagtcccatgatcttctgcaggaggagatcggcatcgccatctacaacatggcctctgtcgactttgatggcttctttgccgccttcctcccagagttcctgaccagctgtgatggtgtggatgccaaccagaaaagtgtgctggggcggaatttcaagatggatcgggnggacctgccctcattcacccagaatgtgcacaggctggtcaacgacctgcgctactacagactctgcaacgatagcctgccccctggcactgtgaagctctaggcctgctactggctggggacacggacttctgctgctgccacctgcgccaaccctaccttccaccacagatgtctcccagacgggcctcggtcacactccttggcttctcccacgccaagcaacgctgcctgcctctgccgctcctccacatc

SEQ ID NO: 20972 - DNA, 556 bp, Macaca Mulatta
cctcccccgacctcagactctcctggttccggagcccccgccgaagaccccttggaactggtgtctgagatgggcgagttcagcaacgaggacatctgccgctacatcgaccgcagcttctccttctggaaggagaaggaggcagagctgtttgacatctgagcagcggaattcggaattcgcagttcaccctccagcgtcttaacgtgggtctggacgcctgtctgacgccctccagaggccggaagcagcaggaagaacccaggactgtggccttgagcagcccggagggcccaggaccaggctgcctcagcctctgaggtcccatcgtggcaggctgtggggcgttggtcgcataggcagggcacgcacagaacaaaccagctgtccccctctggccccgtggcattgctgggctctgtgtggagccaggcagcagaagcccctctgagtgaggggctgcggctcccccttgtggcagtgtggcctgctctccggttttccactggagttcacagctacctccttggctgaggtcaagggagcctcgtgtgca

SEQ ID NO: 20973 - DNA, 1090 bp, Macaca Mulatta
  misc_feature (1)...(1090): n = A,T,C or G
acagcaagagcatcgtcgcaccggtgagggtgctgccacccagactgggtcctttgccctcaagggggttttatgcacatctcccatttgctgcccttttctcctctctcgaactccctcctcaatatctaggactattcatgtactctattttaatcatatggtcaaggatactgataaagtactcactgtatgcacagcattttatgaaatatgatggtgagctcccggtggtcctcagataccatcnnnnnnnnnnnnnctactttgggctctgctcacaactccatggctttccttcctctctaccttgtgccctcataatggtttctacctcccacttctttcctcatctttaccctctgacccctggcccttcagctcccagtctaaaactaagccctctccccagcctgatgcccagcctttctgctgctggtagggacttaaagttggagaatctgttgctggacaagcgggagaatgtgaagatatcagactttggcttcgccaagatggtgccttctaaccagcctgtgggtcgtagctcttcttaccgccaagtgaactgcttttcccacctcagccagacttactgtggcagctttgcttatgcttgcccggagatcttactaggcttgccctacaaccctttcctgtctgacacctggagcatgggcgtcatcctttacacgctaatggtcgcccgtctgccctttgatgacacnnnnnnnnnnnnnnnnnnnnnnnnnnnnnnnnnnnnnnnnnnnnnnnnnnnnnnnnnnnnnnnnnnnnnnnnnnnnnnnnnnnnnnnnnnnnnnnnnnnnnnnnnnnnnnnnnnnnnnnnnnnnnnnnnnnnnnnnnnnnnnnnnnnnnnnnnnnnnnnnnnnnnnnnnnnnnnnnnnnnnnnnnnnnnnnnnnnnnnnnnnnnnnnnnnnnnnnnnnnnnnnnnnnnnnnnnnncaccaatccttggaaattacgacctgaaaatggctgaaggagggggctaagagaggagcaagcaggaggtctcttgggccaaaaatcttttataccaaaaataaatctaagtctgatttagttttatc

SEQ ID NO: 20974 - DNA, 136 bp, Macaca Mulatta
agccttacaccatatgtgatggtgagatactagtgtcagactcaggcaggaataggactagaaggcctaacatagcttgaagtttagaaatttcggaacagtatatgcttcaaaagttttgactactaaaaagagg

SEQ ID NO: 20975 - DNA, 796 bp, Macaca Mulatta
  misc_feature (1)...(796): n = A,T,C or G
gggttttctttagtaggctaactttttaaacattccacaagaggaagtgcctgcgggttccttttttagaagctttgtgggttgnnnnnnnnnnnnnnnnnnnnnntacatttttaattgcagtttaaaagtgaatcgtaagagaacctcagcattgtgcacgataagagaatgtgtcagtatttcagggttctacattttatctgtaaaatgtgactttttttttttatcacaacagaagtaaaatgttgctttgtacctggtgtcttttattaagaatttactccccccatttctcacagagaataacagtcgggagtcattgtcacaatataatagaaatgttagcaaccagattcatgtaaggactaagtggtcctcatgaattgcattaagactctgtactgctcatattacactccatcctctctgtagtttgctgggtagtggagggggtaagctaaattgtagtttctgacaataactgggaaggatttttcttaaataacgatggaattggtataattgggattgaaaaccaaaacttggaactaagatagagaagatggagtggatgtagaagggctgttaaaaatgtaaaaccttggttgcacttttttgggggaagctcaacctttgtgaaggttaaaataaccctaattttttcccttttgttccggcattttgaatcctgaaaaaaaaagctgggcgtttgccccattttcttattaaaaaaaacttggttggtaaaaacccgagtggtcctaatgggggatacttaattgaaaagttagca

SEQ ID NO: 20976 - DNA, 158 bp, Macaca Mulatta
gtttgcacaagaggactcttgtctgtcagcgcttctgagggtggagataaaaaccctccacctgggatggccaaagaaacagacagtgggcggggcctgctgcacctgttgtctacccaccagctccgagagaccccactgtgcattgtgtgaggccc

SEQ ID NO: 20977 - DNA, 205 bp, Macaca Mulatta
ggtttagaaatagtaaccggcaatgcgaaaaatgggacttacttccgaattcatattaacaagtataaaatggtggaaaccatcacatgcctttctagggagcccttccccacctccaactacatccgcttgtttggccagcacgagcaactcctcaacaacctgtgtgctcggtatgatgaaaacctgatcacagatctctata

SEQ ID NO: 20978 - DNA, 726 bp, Macaca Mulatta
  misc_feature (1)...(726): n = A,T,C or G
cacataaagaagccagactatgtgacgacaggcattgtaccagactggggagacagcatagaagttaaaaatgaagatcagatccaagggcttcatcaggcttgtcagctggcccgccacgtcctcctcttggctgggaagagtttaaaggnnnnnnnnnnnnnnnnnnnnnnnnnnnnnnnnnnnnnnnnnnnnnnnnnnnnnnnnnnnnnnnnnnnnnnnnnnnnnnnnnnnnnnnnnnnnnnnnnnnnnnnnnnnnnnnnnnnnnnnnnnnnnnnnnnnnnnnnnnnnnnnnnnnnnnnnnnnnnnnnnnnnnnnnnnnnnnnnnnnnnnnnnnnnnnnnnnnnnnnnnnnnnnnnnnnnnnnnnnnnnnnnnnnnnnnnnnnnnnnnnnnnnnnnnnnnnnnnnnnnnnnnnnnnnnnnnnnnnnnnnnnnnnnnnnnnnnnnnnnnnnnnnnnnnnnnnnnnnnnnnnnnnnnnnnnnnnnnnnnnnnnnnnnnnnnnnnnnnnnnnnnnnnnnnnnnnnnnnnnnnnnnnnnnnnnnnnnnnnnnnnnnnnnnnnnnnnnnnnnnnnnnnnnnnnnnnnnnnnnnnnnnnnnnnnnngaatctgatgaggtcactgcagtaaatatttttcctcttacagagccaatcatcacggagggatcccctgaatttaaagtcctggaggatgcatggactgtagtctccctagacaatcaaagg

SEQ ID NO: 20979 - DNA, 892 bp, Macaca Mulatta
  misc_feature (1)...(892): n = A,T,C or G
ggggtttgaagaccatcttgcagtgtgccctgaaccgccctgccttctttgctgagaggctctactatgctatgaaaggtgctggcacagatgactccaccctggtcaggattgtggtcactcgaagtgagattgaccttgtacaaataaaacagatgtttgctcagatgtatcagaagactctgggcacaatgattgcanngtgaacacgaaattggggagaattaccccgaaaaaacttcctttcctgggggttaattttnnnnnnnnnnnnnnnnnnnnnnnnnnnnnnnnnnnntttatattgtttttattttnctcttttttctnnnnnnnnnnnnnnnnnnnnnnnnnnnnnnanctttnnnnnnnnnnnnnnnnnnnnnnnnctacccccaccccctnnnnnnnnnnnnnnnnnnnnnnnnnnatcttattccccttgcgcctgtcgccacagactccaaaccacaataaataattaacaggttcataaataaccagatgaaagatactccccacctacacaacattatgttaattaataatactntcccccaaccgacnnnnnnnnnnnnnnnnnnnggtcttttatttttttcttattattttattttgnnaaatacaacgaaaccaagaagaaaaaccaaccccagaccgagtgaatgccaacannnnaaaaataaacagaagcaaatacctacaaaaaaataattatatcacccacacccactatataaaatacccttcccgcctctccaatggaanaaaacaacgcattatgataacgatatataataccaacagtcaaaaaatatcaaactattacaaaaatattttaannaattataaaatatctatctcccgcccaatacattaaaaataaactgta

SEQ ID NO: 20980 - DNA, 507 bp, Macaca Mulatta
aaaacattggccttgtgtttgaatcctcagggtgggcacagggccaaggggcccttccatgtgtaggcgtctgtgcttgatttcccaccttgcccaagcccgtctctgacctcgagccctgacctgatctggacccacctggaggttttgtaaaaccatttcttcaaatcacttggctactggctgagacttttgttgccttggagcaggctgtagacaacatctcctttgggagtcctcttccctctaacacctccattcagcctcttcctcctgggcagattgtctccagtccagccaggtaggtacaggggactaggggatgagaggaggccctcccaggagtacttggcatttcaataggtatctccgacatgaaagccgttcagcaagtggtttcatagacctggaatgtccacgtggggccagtggacttagaaatcaaaactagcccagccaccctccccaatctggggagctgatcaacaaggcttgactattaatccc

SEQ ID NO: 20981 - DNA, 944 bp, Macaca Mulatta
  misc_feature (1)...(944): n = A,T,C or G
gatatgaggcgggagggcttggggacagctgttgggacacggcccagatgannnnnnnnnnnnnnnnnnnnnnnnnnnnnnnnnnnnnnnnnnnnnnnnnnnnnnnnnnnnnnnnnnnnnnnnnnnnnnnnnnnnnnnnnnnnnnnnnnnnnnnnnnnnnnnnnnnnnnnnnnnnnnnnnnnnnnnnnnnnnnnnnnnnnnnnnnnnnnnnnnnnnnnnnnnnnnnnnnnccattacagcagcaggtcatcagactccaccaagagctcgggagacagaagtctctgtgggctgatgttcatgcaaaactccggagtcgtatacatgctttgaggaagcagaacgtggagctccaagaaaagctgcgatctctgcagctgcggcagtgggaagccaggcagaaatctgcagcgtccccacatgcggggcaagaatnnnnnnnnngcattggaacccgcttttggaaatatttcacctccgtcggctgatgaagagacaatacccaaatacgttggccgcaagaatcagagtgccactttcctgggacaaagatcgtcatctaacaattcagctcctccaaagnagccaatgagtttaaagataagaagaattaacttgtggaaaacaacaccacaggaaaacagagataaaagtctttctgggagacgtcaaggcagaagagcaacaccctctggaaggccgactccctgtgcagagagacggagggtgtctgaagatggaaaggtgccctcagacacctgtgccactctacactggctgaatggaaaattcagattcagagaaagttccacttaggtctaataaaagtactcaatttgttattcaaaatagaccaagtaatttattaaactaatatgtttctatagataaaaccttgaatttcttcagaaatgtctttaatgctataaaagcaaacaacttgg

SEQ ID NO: 20982 - DNA, 99 bp, Macaca Mulatta
cggcagccgctttcagaggagcccatttgaggggcagagggcggacagtatatggtgcagtccgagcggtacctccaacagccatccccgcctatccag

SEQ ID NO: 20983 - DNA, 947 bp, Macaca Mulatta
  misc_feature (1)...(947): n = A,T,C or G
gggccctttttcctgtcttaaacgcggggagcccacaacttgtgcgctctctttctgctgtttcccagctctcggatacagccgacaccatgggtttcggagacctgaaaagccccgccggcctccaagtgctcaacaattacctggcggacaagagctacatcgaggggtatgtgccgtcacaagcagatgtggcagtatttgaagccgtgtcggggccaacgcctgctgacttgtgtcatgccctacgttggtataatcacatcaagtcctaacataaggtaaaggcctgccagccaggagtgaaaaaagctttgggcaagtagggacgtgctgaagtggaaaacactacaggaagtggaagcacagatagtaagatatgatgatgaattttgatgtctttgaaatctgatgaaagaatgagaaaagctgaatatgcttataatacctagaccaggataaatcgcctttgcaccaatatagaatcatcagaatatgccatacacaccttaggcactttggttgacccaaagtccaatccgttcgttaactgtgaaggtgaaaaaacctagaggcgatagaaggaggagtatcaaaatagcgctataattttagagagggatttgcggttgcgtagaaagatttctgagtggcgaagggggactttatatattggtgggaggttatgacaagaacaatagcgtttctcattggcgggatgtgggcgatttaaagagacaatcttgaccacattccccggttttggtattttggtataaatatgaacaagactgttgggtaaccacgaaatcatgattntggtgagagacaattaattgacgacgaaattagtggaattgatgtagtgttacgtctcttctcacgcgtaaattatagccgcatatcctacaaccaacgcgatgaattctagcgatatgtcactatgc

SEQ ID NO: 20984 - DNA, 147 bp, Macaca Mulatta
gagctatttcagccacatgaaaagcatcggaattgagatcgcagctcagaggacaccgggcaccccttccaccttccaaggagctttatattcttgcatctggctgcctgggactttccttaggcagtaaacaaatacataaagcag

SEQ ID NO: 20985 - DNA, 394 bp, Macaca Mulatta
cctcagtgtgtgagtgccacagcctcagacatgttgaatgtggtaggagagggaccctactccagaatcatcattcacacttggccataaacatactcccaccacctgaagcaaagctacttggtgacacacaagagggttacacaaagaaaacctgcatccctcctcagcaaggcctaagctgagttggaagacaaagcatgtcagccttagtatcatttgggaggattttttttacattgtcaatatgctttcagttatgagcactagacagaggtctcattgttttgttgtagggttctccagtatgtggataacattagttgttttagaataggtaattgcaaattagtctgaagaaatctaacaggattcttttaagagcttagatttt

SEQ ID NO: 20986 - DNA, 636 bp, Macaca Mulatta
ttttcaacctcagtagccttgcacacatcattacttctacatccttctttgtgaccaagtgaatacctacctacctcttaggattcagcttcagtgattctgttttcataggctttttaaagcccttttcagtcaaattagatgctcctttgttcttgtcctttactcttcccctccagtgttatcacactgatcacactgctttgtaattattttctatattgttggtaagctccatattttaaaaatttacctgtatacatagtgcttaatgcatggtaggcccttagtaatgcttttgaattaatgaggcatgattctaaatgccaaagtttgcacaaaagggttgttgctattggattccaaactgccatgccctctataccagtggctgacaaggcatatagggatatatgtcatcctgagaggagtaaagtatttagattctgaacctgaggaaagagaactttctcttaagaagttgtaaacttccatattaccttcatgtctcttgtagaccattttgtctaactggttggtacaattatgagggtagtactgggtgcaatttatacaactttccatcccccacacagttggagaataatttgtagaccatagcagttaaaatgcttt

SEQ ID NO: 20987 - DNA, 388 bp, Macaca Mulatta
  misc_feature (1)...(388): n = A,T,C or G
cctctccctgggcctcagtttcctcattcttaaataataannnnnccctcatggggcatggctcctctctcactgccttcactccctgcaggcactggtggtatgcgcccaggtgtacctgccacttcccgccaggtccttgctttgtatttgcacctgccccccttttgtttgtagtctaagtgacacgggtctccctctctttcctccagctgcattgctcaatcctgcaatgtgtcactgtggtgtggagctggcattctggatgatgtggcatgacctcacactgatgccattcccctcccaccaagccaacctggcttcctcctccacccatggaataagccagaatgctgaaagtgggagggaattagagcaccaaggttaa

SEQ ID NO: 20988 - DNA, 762 bp, Macaca Mulatta
  misc_feature (1)...(762): n = A,T,C or G
catctctgtggcaggggtcacctccggcaacgtgggctaccttgcccatgccattcaccaggtcaccaagtaatgtccctggtgcaaggaaacagagacaacctttctgtcttcagcctctgctattgagagcttcacacagacgatgagagagggtggatggtggtgagtggatcatttctttcaaccacagtgtgtaacactcagcatttgaatgtttctccaaaaagaacatgtagtgacacagggcagaggcatccgtggctggtgtctggaacattaaaccaaactctctcccctgtccttttatctccaacttttctcaaagagtttacatgtgcaagaaagtcatcgcaccaaaaaacctgtcaattatgccattgcaatatttcagaagctttaactgaagtgtcaggttccttgtgagaaataacacacgttagaggctttgagagaagacctagttctgtcgtgagcagtcgaccttgtgtctgtcctcccatcttggagcaaccttatcaacaggccgcactgcagaaatgatgttttatgaaaaccaatgaggctgctgccactccagcaaggaaaataatgcaatttcctgtcttatgtaagaaaaagagaaggctctctttttctcccttgtcattgctgttctttttcttatgtacaaacatttttaactactgcagattttcatnccattctactgctttgactgacatcaactccatcctatcgagatttatttaagaatgaaga

SEQ ID NO: 20989 - DNA, 260 bp, Macaca Mulatta
acacccttctcaacaacttccttcacatctgcaggctgcacaccaggagaatgctcagttcctgtttctctccaatcccaagtccgactaccccctggccatactttgcagtccttataggttgtattagagccttttactttcatttgcccccatgataaggaagcaatttcaggggaagtcataaggaacttcactgaaatccaccgcactgcctcctcaaagttgcgttcccaaacggcgcagtgctctccccgcgt

SEQ ID NO: 20990 - DNA, 416 bp, Macaca Mulatta
  misc_feature (1)...(416): n = A,T,C or G
aggaattacccttgtgtgcctgactatccccgtggccttcggtgtctgtgtgaattacagatggccaaaacaatccaaaatcattctcaaggtgagcagctccctggccactgttggcacnnnncagcaaataactatggaatgagtaaacattttctgtggcctgaggtcatagcttctaattgttatggtgcatatgagaaaatgtgagaatagttcttattgctagtgcgttactcttgaaactttttccctttgctaggtgcaggacgatttccttagaaactggagctcagaatattcagatgtgcatcaccatgctccagttatctttcactactgagcacttggtccagatgttgagtttcccactggcctatggactcttccagctgatagatggatttcttattgtt

SEQ ID NO: 20991 - DNA, 802 bp, Macaca Mulatta
  misc_feature (1)...(802): n = A,T,C or G
gggagatctggnnnnnnnnnnnnnnnnnnnnnnnnnnnnnnnnnnnnnnnnnnnnnnnnnnnnnnnnnnnaatttccttcacccaccatccccctcacctcagcagggcttctgtcctgtggagttccctggacaccttggtctggctcttgtgccaagggctgaaggaggtaccctcctggcagacagggacatcactcgcttcctttgggaagctctaaggttgctgcagtcaccttcctcatcttgcaggtgctgaaccaacatcatcaatttctattctaatcggggccccttcccaatctccacttctctcccaagtccatttactcccacctcttgcatcccaaggctctactgggtccctggacctaaccctgctttcatcctggtggccttaactacagtggaggtggaacttcccaggaggggaagggacagaccagccccagctgctgggccaacttccaatcattccagctagaagagcttcccctgacaccctgtgactgagcctgtgtcttgtctgcctgcccaggcatgctccatgggctgtgagggcagcgcctggagaagccagagggttggagctgcaagggtccgtttggacccacagcctctactctagagatgcttgtataggctgttaattgtgatgaataaacgttcaacccctcggctgcagccagagtaacccaggccttgcaccccaaaaaanananaataaaaaaannnnaacatgtcggccgccccggcccttcggaagctttctaaaccatcgtttggcgcccgggccccatag

SEQ ID NO: 20992 - DNA, 214 bp, Macaca Mulatta
tgcccacatgctttgcccctgagacaaatggaggcctgtcctgacctgtctctccgtgtacacagcttgataaagggccaataaatatgatgttctggtgatcatcatggcagtgttgcggcagaggaaaagatgggaccaaacaaactccagagataaacttctacattagcaacccagtgaaaacaggcgggcaggtaacgtatataaactg

SEQ ID NO: 20993 - DNA, 1052 bp, Macaca Mulatta
  misc_feature (1)...(1052): n = A,T,C or G
atttcaagtttgacgtgcgcctctatgtgctgggtgacttcatatgatcctcttgtcatctatctgtatgaagaaggattggctaggtnnnnnnnnnnnnnnnnnnnnnnnnnnnnnnnnnnnnnnnnnnnnnnnnnnnnnnnnnnnnnnnnnnnnnnnnnnnnnnnnnnnnnnnnnnnnnnnnnnnnnnnnnnnnnnnnnnnnnnnnnnnnnnnnnnnnnnnnnnnnnnnnnnnnnnnnnnnnnnnnnnnnnnnnnnnnnnnnnnnnnnnnnnnnnnnnnnnnnnnnnnnnnnnnnnnnnnnnnnnnnnnnnnnnnnnnnnnnnnnnnnnnnnnnnnnnnnnnnnnnnnnnnnnnnnnnnnnnnnnnnnnnnnnnnnnnnnnnnnnnnnnnnnnnnnnnnnnnnnnnnnnnnnnnnnnnnnnnnnnnnnnnnnnnnnnnnnnnnnnnnnnnnnnnnnnnnnnnnnnnnnnnnnnnnnnnnnnnnnnnnnnnnnnnnnnnnnnnnnnnnnnnnnnnnnnnnnnnnnnnnnaggatttgtgtgccaagatcctgcccagcgggcatcaacccggccaatttatcccacctttgagtcttccaggcgaaaccctttccagaaacctcannnnnnnnnnnnnnnnnnnnnnnnnnnnnnnnnnnnnnnnnnnnnnnnnnnnnnnnnnnnnnnnnnnnnnnnnnnnnnnnnnnnnnnnnnnnnnnnnnnnnnnnnnnnnnnnnnnnnnnnnnnnnnnnnnnnnnnnnnnnnnnnnnnnnnnnnnnnnnnnnnnnnnnnnnnnnnnnnnnnnnnnnnnnnnnnnnnnnnnnnnnnnnnnnnnnnnnnnnnnnnnnnnnnnnnnnnnnnnnnnnnnnnnnnnnnnnnnnnnnnnnnnnnagaatgactgccgatggagcgccagaattgaagatagagagcctgaattcaaaggccaagctgcatgctgcactttacgagaggaagctcctgtctctggaggtgcgaaaacgtagacgacggagtagcagattgagggcaatgaggccaaaataccca

SEQ ID NO: 20994 - DNA, 186 bp, Macaca Mulatta
ggaccccaagtgagcttggtgctctccaaggggtgcaccgaggccaaggaccgggagccgcgcgtcactgagcaccggatgggccccggcctctccgagaaatcatacaccggggtgtgccgccacaaggacttctgcaacaacctagtgaccactgccccgctttggaccccgcagcccccagca

SEQ ID NO: 20995 - DNA, 592 bp, Macaca Mulatta
  misc_feature (1)...(592): n = A,T,C or G
nnnnnnnnnnnnnnnnnnnnnnnnnnnnnnnnnnnnngtgtgcattttgtataatggccagaactttgttgtgtgacagtattagcactgcctcagttaaaggtttaatttttgtttaaacctagaagtgcaacaacagttttaccacagtctgcacttgcagaagaaagaaaaaagttcaaaccacatgtttattttttttgcctacctcattgttcttaatgcattgagaggtgatttagtttatatgtttttggaagaaaccattaatgtttaatttaatcttaataccaaaacgaccagattgaagtttgacttttattgtcacaagtcagcaggcacaagaactgtccatgaagatgggaaatagccttaaggctgatgcaatttacttccaagtttagaaagcagaatgctttgttttcaccagattcagcattaaaggttggtggggcaactgcagcccgtgacacaagagatctcagtgttctcggtgtggggggtgggtggtagcagacaggtggtcacattagaatagtcacacaaactgttcagtgttgcaggaaccttttctcgtgggtgggggagtttc

SEQ ID NO: 20996 - DNA, 759 bp, Macaca Mulatta
ggataattacctctgtgattaccaggggcctcgggctgtgggcatgcacagcttcctggtggttgacccacaggcactggaccctgtagtcagggattctgtacctaaagaacacatcctcccctctctggcccatctcctgcctgcccttgactgcctagagggctccaccccagggctttgaggccggtgagggaagtggctgggccctaggccgtggagaaaaccctaaacaaaccttggagacagggagcctctttctccacagctctggactttccccctctgcctgcagcctttgtcacctattctgataataaagcagtgagtgctgagctctcagccttgccccactaaccagctcctagcctctgccttccctcattctcattcgcacccttttccactaggaggcctcttcacatccaacaggattcgcagaaggcccaactagcttcaaaaccaggcactttcaaacttggttttagcagcaggggccttttgtcatgggaggtctgaaaccccattatgcaaaactaaaaacaaactgaaaaactgctggagttgaagcagaggtcctaaggtctctctttcagcttctgaaacaccctccctctggaagcctggggtcagcgcttagtttgaaaagcaggatgctaagccgtcctgtagggacactgtccattagtaccacatagtatgaagagaatttaagcaaggaaccccatgacagtcatgagaagaaatcctgttgacatg

SEQ ID NO: 20997 - DNA, 561 bp, Macaca Mulatta
  misc_feature (1)...(561): n = A,T,C or G
gacccaagtcttggattgaggaacaggcaatgggatcattcctcagtgtggccaaaggatctgatgagcccccagtcttcttggaaattcactacaaaggcagccccaatgcaaacgaaccacccctggtgtttgttgggaaaggaattacctttgacagnagtggtggtatctccatcaaggcttctgcaaatatggacctcatgagggctgacatgggaggagctgcaactatatgctcagccatcgtgtctgctgcaaagctcaatttgcccattaatattataggtnnnnnnnnnnnnnnnnnnnnnnnnnnnnnnnnnnnnnnnnnnnnnnnnnnnnnnnnnnnnnnnnnnnnnnnnnnnnnnnnnnnnnnnnnnnnnnnnnnnnnnnnnnnnnnnnnnnnnnnnnnnnnnnnnnnnnnnnnnnnnnnnnnnnnnnnnnnnnnnnnnnnnnnnnnnnnnnnnnnnnnnnnnnacaggtgccatggatgtagctttggggtccggtgccactggggtctttaccaattcgtcctggctttggaacaaactcttcgag

SEQ ID NO: 20998 - DNA, 893 bp, Macaca Mulatta
  misc_feature (1)...(893): n = A,T,C or G
ggggattgaggggcggccggctttgttgggtgtgcttggtttggtttccctgcggctgaccgtgattggtgattcgcagcatcttcgtaaccgctaacaggtcaaaatgcagatcttcgtgaagaccctgaccggcaagaccatcacccttgaggtggagcccagnnnnnnnnnnnnnnnnnnnnnnnnnnnnnnnnnnnnnnnnnnnnnnnnnnnnnnnnnnnnnnnnnnnnnnnnnnnnnnnnnnnnnnnnnnnnnnnnnnnnnnnnnnnnnnnnnnnnnnnnnnnnnnnnnnnnnnnnnnnnnnnnnnnnnnnnnnnnnnnnnnnnnnnnnnnnnnnnnnnnnnnnnnnnnnnnnnnnnnnnnnnnnnnnnnnnnnnnnnnnnnnnnnnnnnnnnnnnnnnnnnnnnnnnnnnnnnnnnnnnnnnnnnnnnnnnnnnnnnnnnnnnnnnnnnccactgaagctcatctttgcaggcaagcatcttgaaatatggccgcactcttttctgaattacaaattcataagggattcgaccctgcacctggttcctgccccttaaaggtggtatcgcaaatcttcttgaaaacccttgaccggcaagaactcttcaccctttgaggttggaagccccaattgactcccttttaaaattgttggaagggcccaatatatcaggtataatagaacagggattttcccttcccgacctggcaaggagtagggctttatcttttttccacgggcaaaccacctgggtaaaaattgccctccccctctttttttggaacttccatcatttgtcattaatgtgtgttttacccttgtgctccctgggttctctggccacccttaagggtgtggtggttgttttatattctcttaatacctc

SEQ ID NO: 20999 - DNA, 204 bp, Macaca Mulatta
  misc_feature (1)...(204): n = A,T,C or G
nagtgcctcccctgcggccccgggggcaaaggccgttgctttgggcccaatatctgctgcgcggaagagctgggctgcttcgtgggcacggccgaggcgctgcgctgccaggaggagaactacctgccgtcgccctgccagtcgggccagaaggcgtgcgggagcggcggccgctgcgccgtcttcggcctctgctgtagcccg

SEQ ID NO: 21000 - DNA, 110 bp, Macaca Mulatta
gggtcggccgcgatccagcccaggcggagccggagctgcgagccacagcctagaggccgaggagctcacagctatgggctggagacccgggagagctcgggggtccccgt

SEQ ID NO: 21001 - DNA, 306 bp, Macaca Mulatta
ggacgaatttcctttcaagtatcagggtccagcagccctgagactgaaaaatcctcaggagggcttcgtgcccctgggcacgcctcaccagcacggctgcagggagaagatagaccctcgggctccccagccccctatgtacccgtgccccagccagtaataaatgccaccttggcaacattccactcttccccatcagtcagccagtcgagaggatgcttgggtgggtgggggctgggggaagggactgcacgggaaaggatgactccattgttgctgcgttgccatgaagagtatggagtcaag

SEQ ID NO: 21002 - DNA, 311 bp, Macaca Mulatta
  misc_feature (1)...(311): n = A,T,C or G
aatgaacaaatggatgaacgctgctcccttcccatccttttctgtctcccgagggcccccggcatagcctggaaaaatacttggtagggctccagttgctctggtttccagcggcccttgggccagtatggagccagctgggcctggccctgccaggcaggacaaagctgggattgtgagaccaaggaagggtgagctgagcctggcgcctgaccgacacccaagctgcccagaggccagaanagggcatgttgggggggctgccctccaggcctttcctggtccagtgattatcctaggccttgctatga

SEQ ID NO: 21003 - DNA, 615 bp, Macaca Mulatta
  misc_feature (1)...(615): n = A,T,C or G
ggggggcaccgtggctgctaccatctggtccccgcgcctgacccctcccaggactcgtgatgccaaggccgctgcgagcggctacgaagagtcggggttgagccccagctgagctgagggctcgcactcttctggtctcccaggcccaacccacgtgaagaaatgagtggtggattggctccaagtaagagcacagtgtatgtatccaacttgcccttttccctgacaaacaatgacttgtaccggatattttccaagtacggcaaagttgtaaaggttaccataatgaaagataaagataccaggaagagtaaggggttgcattttattttattttgggataagactctgcacaaaactgtaccagggcaataaccaacaacagttatttggcagattgataaagcaagcttgccttttgcaatgaaaaacaccttaatcttccaaaggcaaccacttgaaaatctaatgttataagtgggaaaatgaaccttatttccccttccaaaatcttggaaactggcnnnnnnnnnnnnnnnnnnnnnnnnnnnnnnnnccccaaaaaattggaattaaaattaataaagggggtctctttacctcttgggaaattcc

SEQ ID NO: 21004 - DNA, 682 bp, Macaca Mulatta
accagaaagtgttgcagcgtttatagcagtccttggcattctttccattattgcacagaccatagtcttgagtttacttatgaggtcaattggaaataagaacaccattttattgggtctaggatttcaaatattacagttggcatggtatggctttggttcagaaccttggatgatgtgggctgctggggcagtagcggccatgtctagcatcacctttcctgccgtcagtgcacttgtttcgcgaactgctgatgctgatcaacagggtgtcgttcaaggaatgataacaggaattcgaggattatgcaatggtctgggaccggccctctatggattcattttctacatattccatgtggaacttaaagaactgccaataacaggaacagacttgggaacaaacacaagccctcagcaccactttgaacagaattccatcatccctggccctcccttcctatttggagcctgttcagtactgctggctctgcttgttgccttgtttattccggaacataccaatttaagcttaaggtccagcagttggagaaagcactgtggcagtcacagccatcctcatagtacacaagcgccaggagaggccaaagaacctttactccaggacacaaatgtgtgacgactgaaatcaggaagatttttctatcagaacccaggtctt

SEQ ID NO: 21005 - DNA, 3039 bp, Macaca Mulatta
  misc_feature (1)...(3039): n = A,T,C or G
ccagcatccggaccatcactcagcgggatgtctgtggttggcattgacctcggctttctctactgctacatcgctgtagcgaggagtggcggcatcgagaccatcgccaatgagtacagcgacaggtgtaccccgnnnnnnnnnnnnnnnnnnnnnnnnnnnnnnnnnnnnnnnnnnnnnnnnnnnnnnnnnnnnnnnnnnnnnnnnnnnnnnnnnnnnnnnnnnnnnnnnnnnnnnnnnnnnnnnnnnnnnnnnnnnnnnnnnnnnnnnnnnnnnnnnnnnnnnnnnnnnnnnnnnnnnnnnnnnnnnnnnnnnnnnnnnnnnnnnnnnnnnnnnnnnnnnnnnnnnnnnnnnnnnnnnnnnnnnnnnnnnnnnnnnnnnnnnnnnnnnnnnnnnnnnnnnnnnnnnnnnnnnnnnnnnnnnnnnnnnnnnnnnnnnnnnnnnnnnnnnnnnnnnnnnnnnnnnnnnnnnnnnnnnnnnnnnnnnnnnnnnnnnnnnnnnnnnnnnnnnnnnnnnnnnnnnnnnnnnnnnnnnnnnnnnnnnnnnnnnnnnnnnnnnnnnnnnnnnnnnnnnnnnnnnnnnnnnnnnnnnnnnnnnnnnnnnnnnnnnnnnnnnnnnnnnnnnnnnnnnnnnnnnnnnnnnnnnnnnnnnnnnnnnnnnnnnnnnnnnnnnnnnnnnnnnnnnnnnnnnnnnnnnnnnnnnnnnnnnnnnnnnnnnnnnnnnnnnnnnnnnnnnnnnnnnnnnnnnnnnnnnnnnnnnnnnnnnnnnnnnnnnnnnnnnnnnnnnnnnnnnnnnnnnnnnnnnnnnnnnnnnnnnnnnnnnnnnnnnnnnnnnnnnnnnnnnnnnnnnnnnnnnnnnnnnnnnnnnnnnnnnnnnnnnnnnnnnnnnnnnnnnnnnnnnnnnnnnnnnnnnnnnnnnnnnnnnnnnnnnnnnnnnnnnnnnnnnnnnnnnnnnnnnnnnnnnnnnnnnnnnnnnnnnnnnnnnnnnnnnnnnnnnnnnnnnnnnnnnnnnnnnnnnnnnnnnnnnnnnnnnnnnnnnnnnnnnnnnnnnnnnnnnnnnnnnnnnnnnnnnnnnnnnnnnnnnnnnnnnnnnnnnnnnnnnnnnnnnnnnnnnnnnnnnnnnnnnnnnnnnnnnnnnnnnnnnnnnnnnnnnnnnnnnnnnnnnnnnnnnnnnnnnnnnnnnnnnnnnnnnnnnnnnnnnnnnnnnnnnnnnnnnnnnnnnnnnnnnnnnnnnnnnnnnnnnnnnnnnnnnnnnnnnnnnnnnnnnnnnnnnnnnnnnnnnnnnnnnnnnnnnnnnnnnnnnnnnnnnnnnnnnnnnnnnnnnnnnnnnnnnnnnnnnnnnnnnnnnnnnnnnnnnnnnnnnnnnnnnnnnnnnnnnnnnnnnnnnnnnnnnnnnnnnnnnnnnnnnnnnnnnnnnnnnnnnnnnnnnnnnnnnnnnnnnnnnnnnnnnnnnnnnnnnnnnnnnnnnnnnnnnnnnnnnnnnnnnnnnnnnnnnnnnnnnnnnnnnnnnnnnnnnnnnnnnnnnnnnnnnnnnnnnnnnnnnnnnnnnnnnnnnnnnnnnnnnnnnnnnnnnnnnnnnnnnnnnnnnnnnnnnnnnnnnnnnnnnnnnnnnnnnnnnnnnnnnnnnnnnnnnnnnnnnnnnnnnnnnnnnnnnnnnnnnnnnnnnnnnnnnnnnnnnnnnnnnnnnnnnnnnnnnnnnnnnnnnnnnnnnnnnnnnnnnnnnnnnnnnnnnnnnnnnnnnnnnnnnnnnnnnnnnnnnnnnnnnnnnnnnnnnnnnnnnnnnnnnnnnnnnnnnnnnnnnnnnnnnnnnnnnnnnnnnnnnnnnnnnnnnnnnnnnnaggggaagatgattatgcaagataagttagagaaagaaagaaatgatgctaagaatgccgttgaagaatatgtatatgattttagagacaggctgggcactgtctatgaaaaattcatcactccagaannnnnnnaaactgtctgtaatactggaagacacagaaaactggctttatgaagatggagaggaccaacctaaacaagtttatgtggataagcttcaannnnnnnnnnnnnnnnnnnnnnnnnnnnnnnnnnnnnnnnnnnnnnnnnnnnnnnnnnnnnnnnnnnnnnnnnnnnnnnnnnnnnnnnnnnnnnnnnnnnnnnnnnnnnnnnnnnnnnnnnnnnnnnnnnnnnnnnnnnnnnnnnnnnnnnnnnnnnnnnnnnnnnnnnnnnnnnnnnnnnnnnnnnnnnnnnnnnnnnnnnnnnnnnnnnnnnnnnnnnnnnnnnnnnnnnnnnnnnnnnnnnnnnnnnnnnnnnnnnnnnnnnnnnnnnnnnnnnnnnnnnnnnnnnnnnnnnnnnnnnnnnnnnnnnnnnnnnnnnnnnnnnnnnnnnnnnnnnnnnnnnnnnnnnnnnnnnnnnnnnnnnnnnnnnnnnnnnnnnnnnnnnnnnnnnnnnnnnnnnnnnnnnnnnnnnnnnnnnnnnnnnnnnnnnnnnnnnnnnnnnnnnnnnnnnnnnnnnnnnnnnnnnnnnnnnnnnnnnnnnnnnnnnnnnnnnnnnnnnnnnnnnnnnnnnnnnnnnnnnnnnnnnnnnnnnnnnnnnnnnnnnnnnnnnnnnnnnnnnnnnnnnnnnnnnnnnnnnnnnnnnnnnnnnnnnnnnnnnnnnnnnnnnnnnnnnnnnnnnnnnnnnnnnnnnnnnnnnnnnnnnnnnnnnnnnnnnnnnnnnnnnnnnnnnnnnnnnnnnnnnnnnnnnnnnnnnnnnnnnnnnnnnnnnnnnnnnnnnnnnnnnnnnnnnnnnnnnnnnnnnnnnnnnnnnnnnnnnnnnnnnnnncttatttaaagcttctactgggataaacctcaattcctttattcaggaaaggatactttattgcactattgttgcagatgcatagatttcattgcaactttattttgaaaaacaaatggaaattgatggggttgaaagctacggaggcactgacctttttctagttattgtattgttacaatttaaatattaaaacaaataagagctttct

SEQ ID NO: 21006 - DNA, 4122 bp, Macaca Mulatta
  misc_feature (1)...(4122): n = A,T,C or G
tccccagcaatggcacagcctgttaccttatacggccaacaggccaaagcctatggtggatccttcatgcatcacacccatccagctggctcctatgaagnnnnnnnnnnnnnnnnnnnnnnnnnnnnnnnnnnnnnnnnnnnnnnnnntgctagaggattttgacaacatctcggtgactcgttccaactccctaaggaaagaaagcccacccaccccagatcagggagcctccagccacggtccaggccacgcggaagaaaatggcttcatcaccttctcccagnnnnnnnnnnnnnnnnnnnnnnnnnnnnnnnnnnnnnnnnnnnnnnnnnnnnnnnnnnnnnnnnnnnnnnnnnnnnnnnnnnnnnnnnnnnnnnnnnnnnnnnnnnnnnnnnnnnnnnnnnnnnnnnnnnnnnnnnnnnnnnnnnnnnnnnnnnnnnnnnnnnnnnnnnnnnnnnnnnnnnnnnnnnnnnnnnnnnnnnnnnnnnnnnnnnnnnnnnnnnnnnnnnnnnnnnnnnnnnnnnnnnnnnnnnnnnnnnnnnnnnnnnnnnnnnnnnnnnnnnnnnnnnnnnnnnnnnnnnnnnnnnnnnnnnnnnnnnnnnnnnnnnnnnnnnnnnnnnnnnnnnnnnnnnnnnnnnnnnnnnnnnnnnnnnnnnnnnnnnnnnnnnnnnnnnnnnnnnnnnnnnnnnnnnnnnnnnnnnnnnnnnnnnnnnnnnnnnnnnnnnnnnnnnnnnnnnnnnnnnnnnnnnnnnnnnnnnnnnnnnnnnnnnnnnnnnnnnnnnnnnnnnnnnnnnnnnnnnnnnnnnnnnnnnnnnnnnnnnnnnnnnnnnnnnnnnnnnnnnnnnnnnnnnnnnnnnnnnnnnnnnnnnnnnnnnnnnnnnnnnnnnnnnnnnnnnnnnnnnnnnnnnnnnnnnnnnnnnnnnnnnnnnnnnnnnnnnnnnccccaggggccctgccaaaatacctcaaagtcaaagcaaagcgggctattcctcaagcagccaccagtatccgtctgggtaccacaaagccaccttgtaccaccacccctccctgcagagcagttcgcagtacatctccaccgcttcctacctgagctccctcagcctctcatccagcacctacccgccgcccagctggggctcctcctccgaccagcagccctccagggtgtcccatgaacagtttcgggcggccctgcagctggtggtcagcccaggagaccccagggaatacttggacaactttatcaaaatcggggaaggctcaaccggcatcgtgtgcatcgccaccgagaaacacacagggaaacaagttgcagtgaagaaaatggacctccggaagcaacagagacgggaactgcttttcaatgaggnnnnnnnnnnnnnnnnnnnnnnnnnnnnnnnnnnnnnnnnnnnnnnnnnnnnnnnnnnnnnnnnnnnnnnnnnnnnnnnnnnnnnnnnnnnnnnnnnnnnnnnnnnnnnnnnnnnnnnnnnnnnnnnnnnnnnnnnnnnnnnnnnnnnnnnnnnnnnnnnnnnnnnnnnnnnnnnnnnnnnnnnnnnnnnnnnnnnnnnnnnnnnnnnnnnnnnnnnnnnnnnnnnnnnnnnnnnnnnnnnnnnnnnnnnnnnnnnnnnnnnnnnnnnnnnnnnnnnnnnnnnnnnnnnnnnnnnnnnnnnnnnnnnnnnnnnnnnnnnnnnnnnnnnnnnnnnnnnnnnnnnnnnnnnnnnnnnnnnnnnnnnnnnnnnnnnnnnnnnnnnnnnnnnnnnnnnnnnnnnnnnnnnnnnnnnnnnnnnnnnnnnnnnnnnnnnnnnnnnnnnnnnnnnnnnnnnnnnnnnnnnnnnnnnnnnnnnnnnnnnnnnnnnnnnnnnnnnnnnnnnnnnnnnnnnnnnnnnnggtttcttcagtgctccggggattcctagacctgatgttggtgagggagccctctcagagagcaacagcccaggaactcctcggacatccattcttaaaactagcaggtccaccgtcttgcatcgtccccctcatgagacaatacaggcatcactgagcagaggattcgtgtaggtggcaaagctagatgaggacatgagaataattcaggagaacaaaaggaaacacagaacatgcaaaaggcctgtgcattctagaccagccaattggtgggacagtgtgatgaccggcagggttcgacagaccagggcatcttcttgtgtcttaaataggcatctctccactgacaggtggcgtggtcatttggagcacggctttaataagtcattaatatatttttcagcccttcatcccgcaaatccgaaggactcagtacaaactccgttatgatatatcctagccacatgcacggtaacatgtaggattttctatattgacagaatacttttctggcnnnnnnnnnnnnnnnnnnagaaaggaaaacaaaaagcacttnnnnnnnnnnnnnnnnnnnnnnnnnnnnnnnnnnnnnnnnnnnnnnnnnnnnnnnnnnnnnnnnnnnnnnnnnnnnnnnnnnnnnnnnnnnnnnnnnnnnnnnnnnnnnnnnnnnnnnnnnnnnnnnnnnnnnnnnnnnnnnnnnnnnnnnnnnnnnnnnnnnnnnnnnnnnnnnnnnnnnnnnnnnnnnnnnnnnnnnnnnnnnnnnnnnnnnnnnnnnnnnnnnnnnnnnnnnnnnnnnnnnnnnnnnnnnnnnnnnnnnnnnnnnnnnnnnnnnnnnnnnnnnnnnnnnnnnnnnnnnnnnnnnnnnnnnnnnnnnnnnnnnnnnnnnnnnnnnnnnnnnnnnnnnnnnnnnnnnnnnnnnnnnnnnnnnnnnnnnnnnnnnnnnnnnnnnnnnnnnnnnnnnnnnnnnnnnnnnnnnnnnnnnnnnnnnnnnnnnnnnnnnnnnnnnnnnnnnnnnnnnnnnnnnnnnnnnnnnnnnnnnnnnnnnnnnnnnnnnnnnnnnnnnnnnnnnnnnnnnnnnnnnnnnnnnnnnnnnnnnnnnnnnnnnnnnnnnnnnnnnnnnnnnnnnnnnnnnnnnnnnnnnnnnnnnnnnnnnnnnnnnnnnnnnnnnnnnnnnnnnnnnnnnnnnnnnnnnnnnnnnnnnnnnnnnnnnnnnnnnnnnnnnnnnnnnnnnnnnnnnnnnnnnnnnnnnnnnnnnnnnnnnnnnnnnnnnnnnnnnnnnnnnnnnnnnnnnnnnnnnnnnnnnnnnnnnnnnnnnnnnnnnnnnnnnnnnnnnnnnnnnnnnnnnnnnnnnnnnnnnnnnnnnnnnnnnnnnnnnnnnnnnnnnnnnnnnnnnnnnnnnnnnnnnnnnnnnnnnnnnnnnnnnnnnnnnnnnnnnnnnnnnnnnnnnnnnnnnnnnnnnnnnnnnnnnnnnnnnnnnnnnnnnnnnnnnnnnnnnnnnnnnnnnnnnnnnnnnnnnnnnnnnnnnnnnnnnnnnnnnnnnnnnnnnnnnnnnnnnnnnnnnnnnnnnnnnnnnnnnnnnnnnnnnnnnnnnnnnnnnnnnnnnnnnnnnnnnnnnnnnnnnnnnnnnnnnnnnnnnnnnnnnnnnnnnnnnnnnnnnnnnnnnnnnnnnnnnnnnnnnnaagcataattaagaacttttgtaattactaggttgctaattatttattactgctaaaaaggaaaaaaaggcataaaatgaccttctactgattagattttcagttttccttcaaactggaaatgcctccataaataggatctatgattttgcttcataaaacacagcaaatcaatgttttatgtaaaatattaaagtattaatataaatatgcgagaataaaaacaatctaaatccagaaaattgcagtcctaaatgttcatgagacagattgtattaatttaaccaggactatgtagaagtannnnnnnnnnnnnnnnnnnnnnnnnnnnnnnnnnnnnnnnnnnnnnnnnnnnnnnnnnnnnnnagtggattttggattccaaacattttcgacagtgtaatggaaatttttctgtaattttcttaccatcaggtattttttaaagttcattgagtttaccaaaagttactgtagcttaaaaggttttgtgagcactaactattggcagaaactgcatttgcaaataaaaataaatgtttgcctt

SEQ ID NO: 21007 - DNA, 717 bp, Macaca Mulatta
agttctgattcacccacgaaggttacattgtatgctgaatacatttgtaaatactcagttttataccgtatgtatatgattgctactctaaaggtttggatatatgtattgtaattagaattgttggcatgatgacatttcatttgtgccaaaaatattaaaaatgccttttttggaaggactaatagaaagcacctgatttgcacttgaaccagattatagatttaaaagtatatgacatgtattttgtatttaaaactagaatagccagtatttatgttttttataaaactgtgcaatacgaattatgcaatcacaataaatttgtagctcccgagtgtcctaaagggagtgcacatctttgaagctggtgtgttaatactatgtaataaatggttaattatcaaatgatgctgctgccaaaattatattaatagtgagtttcaggcccctgggcattttgtaccatgtaattatcctatggtgatgctgtttctcgttgttagtggcagtagtgcctccgtctcctagtgataatgctccaagtctatgaactgttaaatcagcattcattttaagaaaagcaactttagtttcaaagatacttttaagcttctaaattgatcatttaaactatttctttaaataagagagccaaattagaggctcatactttagcttgtgaagaagataatgaattttttaaagggaactttt

SEQ ID NO: 21008 - DNA, 2991 bp, Macaca Mulatta
  misc_feature (1)...(2991): n = A,T,C or G
atgaaggtggtcaacctgaagcaagccattttgcaagtctggaaggagcgttggagtgactaccagtgggcaatcaacatgaagaaattctttcctaaaggagccacctgggacattctcaacctggcagatgcattactagagcaggccatgattggaccatcccccaatcctctcatcttgtcctacctgaagtatgccattagttcccagatggtgtcctactcttctgtcctcacagccatcagtaagtttgatgacttttctcgggacctgtgtgtccaggcattgctagacatcatggacatgttttgtgaccgtctgagctgtcacggcaaagccgaggagtgcatcggactgtgccgagcccttcttagcgccctccactggctgctgcgctgcacggcagcctctgcagagcggctccgggaggggctggaggccggcactccagcagctggggagaagcagctggacatgtgccttcagcgcctnnnnnnnnnnnnnnnnnnnnnnnnnnnnnnnnnnnnnnnnnnnnnnnnnnnnnnnnnnnnnnnnnnnnnnnnnnnnnnnnnnnnnnnnnnnnnnnnnnnnnnnnnnnnnnnnnnnnnnnnnnnnnnnnnnnnnnnnnnnnnnnnnnnnnnnnnnnnnnnnnnnnnnnnnnnnnnnnnnnnnnnnnnnnnnnnnnnnnnnnnnnnnnnnnnnnnnnnnnnnnnnnnnnnnnnnnnnnnnnnnnnnnnnnnnnnnnnnnnnnnnnnnnnnnnnnnnnnnnnnnnnnnnnnnnnnnnnnnnnnnnnnnnnnnnnnnnnnnnnnnnnncagcatatccccaccccactttttgtcctggagatctggaaagcttgcttcgtggggctcattgagtctcccgagggtacggaggagctcaagtggacagctttcactttcctcaannnnnnnnnnnnnnnnnnnnnnnnnnnnnnnnnnnnnnnnnnnnnnnnnnnnnnnnnnnnnnnnnnnnnnnnnnnnnnnnnnnnnnnnnnnnnnnnnnnnnnnnnnnnnnnnnnnnnnnnnnnnnnnnnnnnnnnnnnnnnnnnnnnnnnnnnnnnnnnnnnnnnnnnnnnnnnnnnnnnnnnnnnnnnnnnnnnnnnnnnnnnnnnnnnnnnnnnnnnnnnnnnnnnnnnnnnnnnnnnnnnnnnnnnnnnnnnnnnnnnnnnnnnnnnnnnnnnnnnnnnnnnnnnnnnnnnnnnnnnnnnnnnnnnnnnnnnnnnnnnnnnnnnnnnnnnnnnnnnnnnnnnnnnnnnnnnnnnnnnnnnnnnnnnnnnnnnnnnnnnnnnnnnnnnnnnnnnnnnnnnnnnnnnnnnnnnnnnnnnnnnnnnnnnnnnnnnnnnnnnnnnnnnnnnnnnnnnnnnnnnnnnnnnnnnnnnnnnnnnnnnnnnnnnnnnnnnnnnnnnnnnnnnnnnnccaaaccggcctccgtccgggccctgctgtttgacatctccttcctcatgctgtgccatgtggcccagacctatggttcagaggtgnnnnnnnnnnnnnnnnnnnnnnnnnnnnnnnnnnnnnnnnnnnnnnnnnnnnnnnnnnnnnnnnnnnnnnnnnnnnnnnnnnnnnnnnnnnnnnnnnnnnnnnnnnnnnnnnnnnnnnnnnnnnnnnnnnnnnnnnnnnnnnnnnnnnnnnnnnnnnctcggagatgaagctggtgcagatgaagtggcacgaggcctgtctcagcatctcagccgccatcttggaaatcctcaatgcctgggagaatggggtcctggccttcgagtccatccagaaaaatcactgataacatcaaagggaaggtatgcagtctggcggtgtgtgctgtggcttggcttgtggcccacgtccggatgctggggctggatgagcgtgagaagtcgctgcagatgatccgccagctggcagggccgctgtttagtttgagaacaccctgcagttctacaatgagagggtggtgatcatgaactcgatcctggagcgcttgtgtgccgacgtgctgcagcagacagccacacagatcaagtttccctccaccagggtggacacgatgccctactggaacctgctgccccccaagcggcccatcaaggaggtgctgacagacatctttgccaaagtgctggagaagggctgggtggacagccgctccatccacatcttcgacactctgctgcacatgggcggcgtctactggttctgcaacaacctgatcaaggagctgctgaaggagacgcggaaggagcgcgctctgcgggcagtggnnnnnnnnnnnnnnnnnnnnnnnnnnnnnnnnnnnnnnnnnnnnnnnnnnnnnnnnnnnnnnnnnnnnnnnnnnnnnnnnnnnnnnnnnnnnnnnnnnnnnnnnnnnnnnnnnnnnnnnnnnnnnnnnnnnnnnnnnnnnnnnnnnnnnnnnnnnnnnnnnnnnnnnnnnnnnnnnnnnnnnnnnnnnnnnnnnnnnnnnnnnnnnnnnnnnnnnnnnnnnnnnnnnnnnnnnnnnnnnnnnnnnnnnnnnnnnnnnnnnnnnnnnnnnnnnnnnnnnnnnnnnnnnnnnnnnnnnnnnnnnnnnnnnnnnnnnnnnnnnnnnnnnnnnnnnnnnnnnnnnnnnnnnnnnnnnnnnnnnnnnnnnnnnnnnnnnnnnnnnnnnnnnnnnnnnnnnnnnnnnnnnnnccaacctcttcctgctcatctcctccatcctggggtcgcgcaccgctgggccccacacccagttcgtgcagtggttcatggaggagtgtgtggactgcctggagcagggtggccgcggcagtgtcctgcagttcatgcccttcaccaccgtgngtgtcggaactggtgaaggtgtcagccatgtccagccccaaggtggttctggccatcacggacctcagcctgcccctgggccgccaggtggctgctaaagccattgctgcactctgaggagcttggcatggccgca

SEQ ID NO: 21009 - DNA, 332 bp, Macaca Mulatta
  misc_feature (1)...(332): n = A,T,C or G
gggacttcgcggccttgctgcaggcggggctttccgtgcgccaagcgctggtgctgaacctggcctctgcgctcacggccttcgcgggtctctacgtggcactcgcggttggagtcggcgaggagagcgaggtctggatcctggcagtggccaccggcctgttcctctacgtggcactctgcgacatgngctcccggccatcttgaaagtacgggacccacggccctggctcctctttctgctgcacaacgtgggcctgctgggcggctggaccgtcctgctgctgctgtccttgtacgaggatgatatcaccctctgataccctgccctag

SEQ ID NO: 21010 - DNA, 273 bp, Macaca Mulatta
agcccagctcccccagcccagagccagggaagaggaaggtggagccggtcccaccagtggggtggccacgcccatggggtcacgtgctcaggggtcacccccctgcagggacctgatgccctcgggtgggagggaccgaggtccaccctcgggtcaaagatcaacatgcactttctccttgttgcctgacatacattttattttactaagactgctgtaccgaacaagcatatttatcatcaggagacttaggatgggtttaaagcaggatgg

SEQ ID NO: 21011 - DNA, 200 bp, Macaca Mulatta
acagtttgatggtgaaaggaggttgccgctttgacaaattggatactgctatccgtttgacattgagtgaagaaaagcaaaagctagaatctcagctagctggaattcccaaaatgcagcagagactcaatgaactatgtaaaattttgggagaagactcagtgctgaaaacaattaaaaatgaagatgagacttcttaa

SEQ ID NO: 21012 - DNA, 1043 bp, Macaca Mulatta
  misc_feature (1)...(1043): n = A,T,C or G
ctgagtgggggcgccgcgcctgcgcaaagcggacccgcggacggaggcgttgaggggacgcggaggtcctgggctccccgaccgaggtnnnnnnnnnnnnnnnnnnnnnnnnnnnnnnnnnnnnnnnnnnnnnnnnnnnnnnnnnnnnnnnnnnnnnnnnnnnnnnnnnnnnnnnnnnnnnnnnnnnnnnnnnnnnnnnnnnnnnnnnnnnnnnnnagccaagtaccacgccatgatctcagaaaatcggcgtgctgctgctcagttgtccctggaactcgaaaaggaacagaacagaacagctagttatcgagaagcccttctctctcaggggcgcaagttggtagaagagaagaagcttctggaacaggaacgggcccaggtgatgcaagaaaaaaggcaggtgcagcctttgagaaatgcgtatttgagctgcctgcaaaaggaagaaaactggcaaaggagagccaggcttttgctgaaagagtttgaagctgttctcacggaaagacagaacatctactgcagtctgtttcttcctcgcagcaagcggctggagctggagaagagcttactggtgcgagcgtccgtcgaccccgttgctgcggacctagagatggcagccggtctcaccgacatatttcagcacgatacatactgtggtgaagtctggaacaccaacaaacgccagaatggcagactcatgtggctctatctcagatactgggaactagttgtggaactaaagaagtttaagagagtagaggaagccatactagaaaagtaagacaaggatgaaataaaactgcttttagtgacgcgaggccggcagtcatgagccttctgggcctctggcgtcgtctgtcccttgctgcctgtgccatggccacaccgccacccttcagcagcgacctccactcccgccaccctcggagcagaagtgcccgaagcctcagagacggagggtttcctcctgacgctctgcagctgctggggatgtggtttctctgaagcatttgcaagctgcccgtattgtatcaagc

SEQ ID NO: 21013 - DNA, 1155 bp, Macaca Mulatta
ggacgaggcggacgaggtcgcgcggaggtttcctggtttcggacccagcggccggatggtgaaatcctccctgcagcggatcctcaatagccactgcttcgccagagagaaggaaagggataaacccagcgccaccatccacgccagccgcaccatgccgcttctaagcctgcacagccgcggaggcagcagcagtgagagttccagggtctccctccgctgctgtagtaacccgggtccggggcctcggtggtgctcctgatgcccctcacccacccctgaagatcccaggtgggcgagggaatagtcagagggatcacaatctttcagctaacttattctactccgatgatcggctgaatgtaacagaggaactaacgtccaacgacaagacgaggattctcaacgtccagtccaggctcacagacgccaaacgcattaattggcgaacagtgctgagtggaggcagcctctacatcgagatcccgggcggcgcgctgcctgaggggagcaaggacagctttgcagttctcctggaattcgctgaggagcagctgcgagccgaccatgtcttcatttgcttccacaagaaccgcgaggacagagccgccttgctccgaaccttcagctttttgggctttgagattgtgagaccggggcatccccttgtccccaagagacccgacgcttgcttcatggcctacacgttcgagagagagtcttcgggagaggaggaggagtagggccgcctgggggctgggcatccggcccctggggcaaccccttgtcagcgggttggctgaaaccgagaatcgtcattccccgggttgtcggatgtgtatgggcacaaatgctactccaataggatatactgaagtaaataggtcgtacagcacattgttatttcagtaattttttcacacaagaaaccaggtggcgcacagccaagtgaaccacgctggcgcaaggtggacctcaaaccaaaaagataattggaggacacccgcagcaacgccggtttcgcccaccgctccccccagcgccacagcaaagaacaaaactgagaccggcacagaagaacaagagcgcagcatcaatgacgcaaacaacacacagtaacacagcaggaacacaacagagacagacaggcagaca

SEQ ID NO: 21014 - DNA, 522 bp, Macaca Mulatta
gggagagtcagggttgttgcttttcttcgtgggaagtgaaaccatccacatgtaaatgggttttggtaaaaatttaaatcattaatattctccctcacctcccccaatcactttaaaacttattttggattaagaaaaaaatctgggcatggaagaagaaagaagcatgtcttcattgtattaccaaagttcatgcttatctccggaatgtgagcagaggtgaagctgcctccaagaagaagcatgagagtggaatggagccaggaaatctgatggttctagatatagtctggtatttaaagatgtgatacccggcactctcgtttaacaggtacaaggaaaacgtgcctagattcccagaaacattcgaaatcctttctttcttatctcattagctctggactgtgattagcaaggtccttcttccagcatccagcccagctaagcccccaggtgccccatcccaaccctgttccttctgtccacctgccatcccctatgcaaacagtgagaataacccca

SEQ ID NO: 21015 - DNA, 1621 bp, Macaca Mulatta
  misc_feature (1)...(1621): n = A,T,C or G
tttcctaggttttataataatcaagaagcacatgaaagacgcctcttcatcaagcattcttgactaagttatgaagatggaattgaagttgattttcccccttcatctggtnnnnnnnnnnnnnnnnnnnnnnnnnnnnnnnnnnnnnnnnnnnnnnnnnnnnnnnnnnnnnnnnnnnnnnnnnnnnnnnnnnnnnnnnnnnnnnnnnnnnnnnnnnnnnnnnnnnnnnnnnnnnnnnnnnnnnnnnnnnnnnnnnnnnnnnnnnnnnnnnnnnnnnnnnnnnnnnnnnnnnnnnnnnnnnnnnnnnnnnnnnnnnnnnnnnnnnnnnnnnnnnnnnnnnnnnnnnnnnnnnnnnnnnnnnnnnnnnnnnnnnnnnnnnnnnnnnnnnnnnnnnnnnnnnnnnnnnnnnnnnnnnnnnnnnnnnnnnnnnnnnnnnnnnnnnnnnnnnnnnnnnnnnnnnnnnnnnnnnnnnnnnnnnnnnnnnnnnnnnnnnnnnnnnnnnnnnnnnnnnnnnnnnnnnnnnnnnnnnnnnnnnnnnnnnnnnnnnnnnnnnnnnnnnnnnnnnnnnnnnnnnnnnnnnnnnnnnnnnnnnnnnnnnnnnnnnnnnnnnnnnnnnnnnnnnnnnnnnnnnnnnnnnnnnnnnnnnnnnnggcccataaagagaggggatattttgcccccagaaaaaggccgagaggtagcgaaggaacttggcataccatactatgaaacaagcgtgtttgaccagtttgggatcaaggatgtgtttgacaatgcaatccgagcagcgctgatttcccgcaggcacctgcaattctggaaatcccacttaaagaaagtccagaaacctttacttcaggcacccttcctacctccaaaagcccctccaccggtcatcaaaattccagaatgtccttccatggggacaagtgaagctgcctgtttactggacaatcctctgtgtgccgatgttctgttcatccttcaggaccaggaacacatctttgcacatcgaatttaccttgctacctcttcttccaattttatgatctgtttttannnnnnnnnnnnnnnnnnnnnnnnnnnnnnnnnnnnnnnnnnnnnnnnnnnnnnnnnnnnnnnnnnnnnnnnnnnnnnnnnnnnnnnnnnnnnnnnnnnnnnaaagggaggagggcccgcctaggacacctcaggccgagcagtggaagtcctcaaacaagagcctagtggaggctctggggctggaagccgagggtgcagtccctgagacacagacgttggccgactggagtaaggggttcattggcatgcacagggaaatgcaagtcaaccccatttcaaagcgggtgggccctgtgactgtagtcaggatggacgcctcagtccagccaggcccttttcggaccctgctccagtttctttatacaggacaactggatgaaaaggaaaaggatttggtgggcctggctcagatcgcagaggtcctagagatgttcgatttgaggatgatggtggaaaacatcatgaacaaggaagccttcatgaaccaggagattacgaaagcctttcacgtcaggaaagccaatcggataaaagagtgtctcagcaaggggacgttctc

SEQ ID NO: 21016 - DNA, 343 bp, Macaca Mulatta
gagatgaaagcatggaaataaaaaagcaaattacagggatgagaagattgctgaacgacagcactgggcggatctatcagcgagttggcaaagaaggagagaaactaaaagaagagccccaggacctggatttagtctggcctccgcgtttgaactcctctgctgaggccccacagagcctccacctgtcttcacgtggtgtgtggaatgagctaccgccccagagtggacagttctcagggcagtatggcacccgttctagaaccttccaaagccagccccaccctgctgcaagctccaatggtatggttgtcaacaaacattcagaaggctctcatggggg

SEQ ID NO: 21017 - DNA, 794 bp, Macaca Mulatta
  misc_feature (1)...(794): n = A,T,C or G
gggagccgccagttgagaaagactctgatccggctcagctttccaatcagctgcggaaggagccacgctttctggtttgcaacatggcggccaccagtggaactgatgaacaggtttccggggagttggtgtctgtggcacatgcgctttctctcccagcagagtcgtatggcaacgatcctgatattgagatggcttgggccatgagagcaatgcaacatgctgaagtctattacaagctgatttcatcagttgacccacagttcctgaaactcaccaaagtagatgaccaaatttactctgagttccggaaaaattttgagacccttaggatagatgtattggacccagaagaactcaagtcagaatcagccaaagagaagtggaggccattctgcttgaagtttaatgggattgttgaagacttcaactatggtactttgctgcgactagattgttctcanggctatactgaggaaaacaccatctttgcccccaggatacaattctttgccattgaaattgctcggaaaccgggaggctataacaaagctgtttatatcagtgttcaggacaaagaaggagagaaaggagtcaacaatggagggagaaaaggagctgacantggnngaagaagagaacccccngaattagaggagagaaaagagctgatagnnnnnnnnnnnnnnnnnnnnnggaatcaccggaaaagacaaaactgaccaaaggagggagaaaaagagaaagaagctgaccaaaaaaatccaccaaaagtgggggaaaaaagctatgta

SEQ ID NO: 21018 - DNA, 160 bp, Macaca Mulatta
gaaatatccgtgtgctgtgtcgactgaggccagggacatcctccagcctctttagcgtggagcctggcccagggggcaccgtcaccacctgctaccgggggcgccatcgtcgattccgcctagactgggtcttccctccagacgccagccaggaggaggt

SEQ ID NO: 21019 - DNA, 753 bp, Macaca Mulatta
  misc_feature (1)...(753): n = A,T,C or G
gggcccccgcccttcctccccttatttgttaaatgaagcaacgtagtgagacgtcgtctcnnnnnnnnnnnnnnnnnnnnnnnnnnnnnnnnccaggcatgcgaaacgctgaggtgggaggatcacttgagcttgggaggtcgaggctgcagtgagccttgatcatgccattactgcatnnnnnnnnnnnnnnnnnnctgagaccttgtccccccgccccgcaaaaaaaaagaccccaaaattgtggaattacttttagctatattttatggtaaaaagtgattgtttctcaaaatcccattttaaagccgttttatggtacttgttggaattgggacttaggagttttgattttgataagaaactgggataattttctgaactttttttcctctgtatcacatttatttactatttttaaaaactttatttgacctttaacacttgggataatatttattataaatgataagaaaaatcttagaggtttttctacccgcagtgtcatggaattttctctgaaaactaatgcttaaagtttcctagagaaattggtcagaatgatctgtcagaactgtttgaaaacttcttcaagagcagtcgcatatatagtaggattttacattttcctgctgtgtactactatatgcttaaaaaacctggaggaatacttaccaaagaggagtagccatctctgagggtgggattctggggggagttttggttttttctgttttctgtcatgtaaaaatt

SEQ ID NO: 21020 - DNA, 1597 bp, Macaca Mulatta
  misc_feature (1)...(1597): n = A,T,C or G
aggacactctgattgtgtggtctgaagcagaaaattatgacttggcccttagctttcaagaaaaagctggatgtgatgaaatttgggagaaaatatgtcaggtnnnnnnnnnnnnnnnnnnnnnnnnnnnnnnnnnnnnnnnnnnnnnnnnnnnnnnnnnnnnnnnnnnnnnnnnnnnnnnnnnnnnnnnnnnnnnnnnnnnnnnnnnnnnnnnnnnnnnnnnnnnnnnnnnnnnnnnnnnnnnnnnnnnnnnnnnnnnnnnnnnnnnnnnnnnnnnnnnnnnnnnnnnnnnnnnnnnnnnnnnnnnnnnnnnnnnnnnnnnnnnnnnnnnnnnnnnnnnnnnnnnnnnnnnnnnnnnnnnnnnnnnnnnnnnnnnnnnnnnnnnnnnnnnnnnnnnnnnnnnnnnnnnnnnnnnnnnnnnnnnnnnnnnnnnnnnnnnnnnnnnnnnnnnnnnnnnnnnnnnnnnnnnnnnnnnnnnnnnnnnnnnnnnnnnnnnnnnnnnnnnnnnnnnnnnnnnnnnnnnnnnnnnnnnnnnnnnnnnnnnnnnnnnnnnnnnnnnnnnnnnnnnnnnnnnnnnnnnnnnnnnnnnnnnnnnnnnnnnnnnnnnnnnnnnnnnnnnnnnnnnnnnnnnnnnnnnnnnnnnnnnnnnnnnnnnnnnnnnnnnnnnnnnnnnnnnnnnnnnnnnnnnnnnnnnnnnnnnnnnnnnnnnnnnnnnnnnnnnnnnnnnnnnnnnnnnnnnnnnnnnnnnnnnnnnnnnnnnnnnnnnnnnnnnnnnnnnnnnnnnnnnnnnnnnnnnnnnnnnnnnnnnnnnnnnnnnnnnnnnnnnnnnnnnnnnnnnnnnnnnnnnnnnnnnnnnnnnnnnnnnnnnnnnnnnnnnnnnnnnnnnnnnnnnnnnnnnnnnnnnnnnnnnnnnnnnnnnnnnnnnnnnnnnnnnnnnnnnnnnnnnnnnnnnnnnnnnnnnnnnnnnnnnnnnnnnnnnnnnnnnnnnnnnnnnnnnnnnnnnnnnnnnnnnnnnnnnnnnnnnnnnnnnngatattttgctcatcaacctcattatagaacatatgatttgtgatacagatcctgaacttggaggagcagtccaacttatgggcctgcttcgaactttagttgacccggaaaacatgctagccactgccaatnaaaacagaaaagactgaatttctgggtttcttctacaagcactgtatgcatgttctcactgctcctttactagcgaatacaacagaagacaaacctagtaaagnnnnnnnnnnnnnnnnnnnnnnnnnnnnnnnnnnnnnnnnnnnnnnnnnnnnnnnnnnnnnnnnnnnnnnnnnnnnnnnnnnnnnnnnnnnnnnnnnnnnnnnnnnnnnnnnnnnnnnnnnnnnnnnnnnnnnnnnnnnnnnnnnnnnnnnnnnnnnnngtgcccttcgttttaagagaaagattattggattaaaagatgagttttacaaccgctatataatgaaaagttttttgtttgaaccagtagtcaaagcatttctcaacaatggatcccgctacaatctgatgaactctgccataatagagatgtttgaatttattagagtgg

SEQ ID NO: 21021 - DNA, 770 bp, Macaca Mulatta
gggggacaatctgaaagctgcaggccttgaggataaaatcgaattacttaaagtctctgttatagaattgccattgccttcagaaagtgttgatattattatttctgacattccatttgggaaaaagtttaagttaggaaaagacatcaaaagcattctacaagaaatggaaagagtgcttcatgttggcggaaccattgtattgttgcttagtgaagatcaccacaggcgccttacagattgtaaagagagcagcatccctttgaattccaaggacagtcacacagatgaacctggaattaaaaagtgcttgagtcctgaagaaaaaactggtgcatccaagatagtgtcaacttcattcgaagccaggaaccacgagttcttagacagaatgtcaccatttggctccttggtaccagtggaatgctacaaagttagccttggaaagacagatgcgttcatatgtaaatatgagaagtcgcactcttctggactatagcaggcttgctgccatcagccgggttcaggcccttgtaagttagctgtacagcagaagtttgctgtctctaggattcatatagtacccacagagctccaggtaaccaaattcccccaaagacgggaggtgtggctgttggggtacacgtgcttggtaagagtttctgcttttatattctaaagtgccctaatgttttttgaccaaaaaagtttaccgaatatttttttagactttaagttttataattctgtcagaaatgttgaaaagttct

SEQ ID NO: 21022 - DNA, 1271 bp, Macaca Mulatta
  misc_feature (1)...(1271): n = A,T,C or G
cagattctgtagctgattctgtaaatgttgatggagtggcaggtctacctatcacactgccctgccgctacaacggagctatcacatccatgtgctggaatagaggcacatgttctgctttctcatgcccagatggcattgtctggaccaatggaacccacgtcacctatcggaaggagacacgctataagctattggggaacctttcacgcagggatgtctctttgactatagcaaatacagttgtgtctgacagtggcatatattgttgccgtgttcagcacagtgggtggttcaatgacatgaaaatcaccatatcattgaagattgggccacnnnnnnnnnnnnnnnnnnnnnnnnnnnnnnnnnnnnnnnnnnnnnnnnnnnnnnnnnnnnnnnnnnnnnnnnnnnnnnnnnnnnnnnnnnnnnnnnnnnnnnnnnnnnnnnnnnnnnnnnnnnnnnnnnnnnnnnnnnnnnnnnnnnnnnnnnnnnnnnnnnnnnnnnnnnnnnnnnnnnnnnnnnnnnnnnnnnnnnnnnnnnnnnnnnnnnnnnnnnnnnnnnnnnnnnnnnnnnnnnnnnnnnnnnnnnnnnnnnnnnnnnnnnnnnnnnnnnnnnnnnnnnnnnnncagtagccacttcaccatcttcacctcagccagcagaaacccaccctatgacactgctgggagcaacaaggacacaacccaccagctcaccattgtactcttatacaacagnagatgggagtgacaccgtgacagagtcttcagatggcctttggaataacaatcaaactnnnnnnnnnnnnnnnnnnnnnnnnnnnnnnnnnnnnnnnnnnnnnnnnnnnnnnnnnnnnnnnnnnnnnnnnnnnnnnnnnnnnnnnnnnnnnnnnnnnnnnnnnnnnnnnnnnnagtatttcttcaaaaaggagattcaacaactaanagtgtttcatttagcagccatcaaattaaaactntgcaaaatgcagttaaaaaggaagtccacgcagaagacaatatctacattgagaataatctttatgccatgaaccaagacccagtggtgctctttgagagtttacgcccatgactgcagaagactgaacnnnnnnnnnnnatcagacgtcttttagactccaagacaatttttctgtttcagtttcatctggcattccaacacgtcagtgacactgggtagagtaactctctcgttccaaactgtgtatagtcagccttatcattaatgtagtcctaattttttgtgctaaa

SEQ ID NO: 21023 - DNA, 139 bp, Macaca Mulatta
aggctacgggaagaatctctggcagaaaagaagtacacctctcaagggcagggggacttagacagtgtgctctcgcagttgaattttacccatactagtgaggaacttctgcaggcagaggtgactcgtcttgaaggca

SEQ ID NO: 21024 - DNA, 487 bp, Macaca Mulatta
cagaatacgctgccatcaactccatgctggaccagatcaactcctgtctggaccacctggaggagaagaacgaccacctccacgcccgcctccaggagctgctggagtccaaccggcagacacgcctggagttccagcagcagctcggggaggcccccagtgatgccagcccctaggctccgagagcccccaaccgggacccaaccctgcctccctgggctaggctctggcctgggtactcacctcctggcttagacaccttctcaagggctggtcttcagggtcccctggtgggtctgcctacctggaccacccttcctgcctgggcctccccttggcctacctgggccagcccccactgcctggcatcccctcctggggccaagagtggggcctgcaacccatccacatgcctgcccacccaactcctgggcactccccactctgcccaggccttgagtgtccacattaaatgggtctcccacac

SEQ ID NO: 21025 - DNA, 198 bp, Macaca Mulatta
ttcaggtggctgcttctctatcatgctctgtgcttctccctgtcaaaggcttcagcccacaccgtggagctgaacgatatgtttggccagatccagtcgcctggttatccagactcctatcccagtgattcggaggtgacttggaatatcactgtcccagacgggtttcggatcaagctttacttcatgcatttcaac

SEQ ID NO: 21026 - DNA, 1219 bp, Macaca Mulatta
  misc_feature (1)...(1219): n = A,T,C or G
gggggattccagcggcggacagcacccgggccgagatgtctcgctcagtggccttagccgtgctggcgctactctctctttctggcctggaggctatccagcgtactccaaagattcaggtttactcacgccatccaccagagaatggaaagccaaatttcctgaattgctatgtgtctggatttcatccatctgatattgaagttgacttactgaagaatggagagaaaatgggaaaagtggagcattcagacttgtctttcagcaaagactggtctttctatctcttgtactacactgaattcacccccaatgaaaaagatgagtatgcctgccgtgtgaaccatgtgactttgtcagggcccaggacagttaagtgggatcgagacatgtaagcagcatcatggaggtttgaagatgccgcatttggattggatgaattccaaattctgcttccttgctttttaatattgatatgcttatacagtttatgcaaaaaatgcagagttataataatgttaacacaggcatgatcttctttataattctactttgagtgctatctccacgtttgaggtatctgggcagctagctttaggagggctggcaacttagaggtggggagcagagaattctcatatccaacatcaacatcttgggtcagatctgagctcttcaatctcttgcactcgaagcttggataagatagttatgccgtatattaagttaaacttcccaatttacatactggtgccttaaaattttggagggaaaaaatttagaaatataatttgatggggctatgccacattgtcataatgagtcaacatttgtcctatagatcaattcctcttatcacttgaacaatggcgtcactggccattggtccgactgagtaactgacatgtacgacacaacaaccggggcggccacncctagatatacgggtaccgagacgacatcctccgctgcccggtctctgccgctccctccagaccacagcaaagcgcagcaacaaaaagcaaaaagagacaagcaagaagcagaagaaacgaaagnnnnnnnnnnnnnnnnnnnnnnaaagagaggaacnnnnnnnnnnnnnnnnnnnnnnnnnnnnngaccaaaaagaagaaaaagcgaaaaacaagnnnnnnnnnnnnnnnnnnnnnnnnnnnnnnnnnnnnnnnnnnnnnnnnnnnnnnnnnnncacaaaaaa

SEQ ID NO: 21027 - DNA, 913 bp, Macaca Mulatta
tccttgactccagatcctttccttgcttctaccctttcctgatccagctcctagcctccttcacctaccattttgactttccctttttccttttggttgttacccttcaaaccctgtgcccctctggttccttggccacctgagatcctcagatccctaatattggaaggctgacctcacttgactatgaactttaacctcttacctctaccctgcaggagctatttctcaatttgatcccctctcagtgcctgggaggcctgtggggtcacagagaccggccaggacattctcacctctgcccatctgtccgagctactgtcacacagttcaacaaggtggcaggggcagtggttagttctgtcctgggggctacctccaccggagagggacctggggaggtgaccatacggccactccgtcccccccagagggcccgcctcctggagaagtggatccgcgtggcggaggtgagaaagaagattgccccacggtgggtggccatggcatggagagggctctcatagccttagctctctttgacccccacaggagtgccggctgctccgaaacttctcttcagtttatgctgtggtgtcagccctgcagtccagccccatccacaggcttcgggcagcctggggggaagcaaccaggtggggaggctgaggcattggactggggtgggggttcctcagaaggcagggaagagggggtgacagagccaggcctgtcctcagggccacttttctccctcccccagggacagcctcagagtcttttctagcctctgccagattttctccgaggaggataattattcccagagtcgggagctgctcgtgcaggtgagagcctggtttgtggcattcccccctctccctgctccctactgctcccccatgtctcttta

SEQ ID NO: 21028 - DNA, 908 bp, Macaca Mulatta
gggattaggaggtcctcgtgctcgtagatcaaacatgcactttactagcagttctactggtggactttcttcttctcaaagttcatattctccaagcaatagggaagccatggatcctatagctgagcttttatctcagttatcaggagtgagacgttctgcaggaggacagcttaattcctctggcccttccgcttctcagttacaacaactgcagatgcagctgcagctagaacggcagcatgcccaggcagcacggcaacaactggagaccgcacgcaacgcaacccggcgtactaacacaagcagtgtcaccactacaatcacacaatccacagcaacaaccaacatagctaatacagaaagcagtcagcagactctccagaattcccagtttcttttaacaaggttgaatgatcctaaaatgtctgaaacggagcgccagtccatggaaagcgagcgtgcagaccgcagcctgtttgtccaagggctccttctgtccactttagtgcgtgaagagagctcatcctcagacgaggatgatcggggggagatggcagattttggtgctatgggctgtgtagatattatgcctttagatgttgctttagaaaacctaaatttaaaagagagtaataaagggaaatgagccttcccaccacctcctcttttgatgacatccccaattcgcagacaatgtcctctgtgctgtatttgccaatgaaagtggacaacaactatcttgggtttgtttggtgattgtaatttcaggtctgtcactcttgttacattgcgtacattcaaaaggaagagagaaaatatatatgataatcatttccacttaactaatttttacttctagcaggtaaatgtaggtagcagtgcagggggtgatctctgcttcctgt

SEQ ID NO: 21029 - DNA, 960 bp, Macaca Mulatta
  misc_feature (1)...(960): n = A,T,C or G
aggaggacagggcccagataccccacgaggatggaggaccccagccccacaggggtggcagaccaaacaagaagaaaaagttcaaaggcaggctcaagtcaatttcccgagagcccagcccagcactgggcccgaacctggacggctctggcctcctccccagacccatcttttcctgcagtttccccacgcggatgcctggggacaagcggtccccccggatcactggactgtgtcccttcggcccccgggagatcctggtggcggatgagcagaatcgggcgctgaaatgcttctccctcaacggcgactacaagggcaccgtgccggtccctgagggctgctccccttgcagcgtggctgccctgcagagcgccgtggccttctccgctggtgcacggctctatctcatcagccccgatggcgaggtgcagtggcgccgggccctgagcctctcccaggccagccacgcggtggcggcactgccaagcggggaccgtgtggctgtcagcgtggcgggccacgtggaggtgtacaatatggaaggcagcctggccacccggttcattcctggaggcaaggccagccggggcctgcgggcactggtgtttctgaccaccagcccccaggggcatttcgtggggtcggattggcagcagaatagtgtggtaatctgtgatgggctgggccaggtggttggggagtacaaggggccaggcctgcatggctgccagccgggctctgtgtctgtggataagaagggctacatcttcctgacccttcgagaagtcaacannnnnnnnnnnnnnnnnnnnnnnnnnnnnnnnnnnnnnnnnnnnnnnnagcctaccacggcctggaaaagccccgggttaccaccatggtggatggcaggtacctggttgtgtccctcagtaacgggaccatccatgtctttcgggtccgttctccggacagtta

SEQ ID NO: 21030 - DNA, 184 bp, Macaca Mulatta
ctctgatgccattgatgagtgcaggaagcttttccaggcctcaacacagaaagaacccttaggtcctcagagctggaggcgtgcagagaggtctctgcctgggctcaacctctgtgatttctggcaagttactgaaattctctgtgactcaggtttctcttatgaaaattataacagttttatc

SEQ ID NO: 21031 - DNA, 598 bp, Macaca Mulatta
  misc_feature (1)...(598): n = A,T,C or G
gatacaaaacttatttccttgcgtctgaatcttcattgtttcaaatggtgcttgctgcatgttttcaattacaataaatgcactgtaataaaaggttttgtttatagattatgtgtattggtgccatgtctgctgaaatcaaccttaagtgattcagatgtcccctgctagtgctggcttatcctgttatggtcttgtgggccaattcagttgtggccccatgcccaccaatatgcagacttgactcttaacattttccaaaacaaaggcagttacattcagcagtttgtgattcctgtaaactcaactgaagattcgaaggactccaagagcaacaattttccactgtgtgtagtgtttcactccacaactctaaagcttctcagagctgagcatggtctttttcttgaatttttgttcacgcaagtgccatgtgtcccttgattccttccaagccatcccctctccaaatagagctcgtaaaggactagctttttctttcttttgcacttacaatggaaacagttggtataagagtttgaaaaccttggcatgnagagagaggtaaatacaaagttagtgactcatcactcatcat

SEQ ID NO: 21032 - DNA, 630 bp, Macaca Mulatta
  misc_feature (1)...(630): n = A,T,C or G
acagcctttcctgcctcagggaagaagagagagacagactacngtgatggagacccactggatgtgcacaagaggctgtcgtccagtgctggagaggaccgagccgtgctgctggggtttgccatgatgggcttctcagnnnnnnnnnnnnnnnnnnnnnnnnnnnnnnnnnnnnnnnnnnnnnnnnnnnnnnnnnnnnnnnnnnnnnnnnnnnnnnnnnnnnnnnnnnnnnnnnnnnnnnnnnnnnnnnnnnnnnnnnnnnnnnnnnnnnnnnnnnnnnnnnnnnnnnnnnnnnnnnnnnnnnnnnnnnnnnnnnnnnnnnnnnnnnnnnnnnnnnnnnnnnnnnnnnnnnnnnnnnnnnnnnnnnnnnnnnnnnnnnnnnnnnnnnagtgcttttacacacctaagtgccaccaagatagaaatgatttgctcaacagtgctctggacataaaggaattcttcgatcacaaaaatggaacccccttttcatgcttctacagtccagacagccaatctgaagatgtcattcttataaaaaagtatgaccaaatggctatcttccactgtttattttggccttcactgactctgctaggtggtgccctgattgttggcatggtgagatta

SEQ ID NO: 21033 - DNA, 97 bp, Macaca Mulatta
agacagtctccatcctggagcagcggttgacactgacagaagacaagctgaagcagtgtctggagaaccagcagctaatcatgcagagagcaacacc

SEQ ID NO: 21034 - DNA, 816 bp, Macaca Mulatta
ggggaagatttttctatcagcacccaggtcttagttttcacctctagttctggatatacattccatttccatccacagtgtactttaagattgtcttaagaactgtatctgcatgaactccgtgggaactaaaggaagtgggaacttaaaagaaccggacagttttccaaagatgttacaatttcttttgaaaaaccttttgtttattagcaccaatttcttgccactaagctgtttgttttattaaaaactatatatgtaacttcttacatattagcaaatgtctctgctaccatttccttaaggtgttgagctttaactctatgctgactcagtgagacacagtaagtagtatgggtgtggacctatttgttttaacattgtgaaattgtgagtcaaattttaatattgtaaaatcttgggttaaataattcaaagccttaatgcagatgcactaaaacaaagaaatggttaatgaattgtttgcatttaaaaaaacaaactcttttagaagactgtactaaatcggaatcatggtttccagcttgtttgcacttacttttaaacccgttattcactaccggttttttgaagtgagaaaatgttcagcccattgttgaattttaaatttgggggggttttaagagcccggtaaattctgaaatgccccggcaccacaatttgttacacccacccgaattccttaaaaccaactaatttctttttcatggttttgccataaatgcgtaaagtctcccttccagcacctttgaaactcctttaaatcttaaaaaattttaacaagggtaaaggctt

SEQ ID NO: 21035 - DNA, 1591 bp, Macaca Mulatta
  misc_feature (1)...(1591): n = A,T,C or G
ggacgcagcggttccctctccggaaggcaagcgcatctcccaagccgttgctaccgacagccgcaggcgctgccttctgaggaagagccagccccgctgcggcctctccagccccgggttcgcgctctcgcctctcctgcctgcccagctgcgcggcggagcggagcgaggcaccgcctgcgagtctccggcagcccccggacccctccctcggcgctgcgtgtaggccgcgccctcaggcccagtccgcggcggccccggcgggtgatgccaaatacagccatgaagaaaaaggtgctgctgatggggaagagcgggtcggggaagaccagcatgaggtcgattatcttcgccaattatattgctcgcgacacccggcgcctgggggccaccattgacgtggagcactcccacgtccgattcctggggaacctggtgctgaacctgtgggactgtggcggtcaggacaccttcatggaaaattacttcaccagccagcgagacaatattttccgtaacgtggaagttttgatttacgtgtttgacgtggagagccgcgaactggaaaaggacatgcattattaccagtcgtgctggggaggccatcctccagaactctcccgacgccaaaatcttctgcctggtgcacaaaatggatctggttcnnnnnnnnnnnnnnnnnnnnnnnnnnnnnnnnnnnnnnnnnnnnnnnnnnnnnnnnnnnnnnnnnnnnnnnnnnnnnnnnnnnnnnnnnnnnnnnnnnnnnnnnnnnnnnnnnnnnnnnnnnnnnnnnnnnnnnnnnnnnnnnnnnnnnnnnnnnnnnnnnnnnnnnnnnnnnnnnnnnnnnnnnnnnnnnnnnnnnnnnnnnnnnnnnnnnnnnnnnnnnnnnnnnnnnnnnnnnnnnnnnnnnnnnnnnnnnnnnnnnnnnnnnnnnnnnnnnnnnnnnnnnnnnnnnnnnnnnnnnnnnnnnnnnnnnnnnnnnnnnnnnnnnnnnnnnnnnnnnnnnnnnnnnnnnnnnnnnnnnnnnnnnnnnnnnnnnnnnnnnnnnnnnnnnnnnnnnnnnnnnnnnnnnnnnnnnnnnnnnnnnnnnnnnnnnnnnnnnnnnnnnnnnnnnnnnnnnnnnnnnnnnnnnnnnnnnnnnnnnnnnnnnnnnnnnnnnnnnnnnnnnnnnnnnnnnnnnnnnnnnnnnnnnnnnnnnnnnnnnnnnnnnnnnnnnnnnnnnnnnnnnnnnnnnnnnnnnnnnnnnnnnnnnnnnnnnnnnnnnnnnnnnnnnnnnnnnnnnnnnnnnnnnnnnnnnnnnnnnnnnnnnnnnnnnnnnnnnnnnnnnnnnnnnnnnnnnnnnnnnnnnnnnnnnnnnnnnnnnnnnnnnnnnnnnnnnnnnnnnnnnnnnnagtagagctttgaagctggcctttctgagaagttggtatgatgtaacactaaagtaggtggttcgtgtgtgttctcattacctggttataatagatatgcacatcaaagcctttaccagtatctcctgtattccgtatcagattgcaaagatggaatgttactattttatcagtaaggtattaaaatgcatttataaatt

SEQ ID NO: 21036 - DNA, 112 bp, Macaca Mulatta
ggatttcaatgatgaattctcagatctggatggagtggttcaacaaaggaggcaagacatggaaggatacagcagttctggttctcaaactcctgaatctgagaactctcga

SEQ ID NO: 21037 - DNA, 394 bp, Macaca Mulatta
ggccaggtttggccaaggtctccccagactggccctgacttcggttcctggaaggcagtcatccttcccccattctcacctttctcacctcctcagacccatccaagaagcagggaccatggatggaggaagaagaagcagcctatggatggatggactttggccgccgcagtgccgaggatgagaaccaacaaccctagaaccaagcttcagagcccagccacctcccactccatcccagccctatcccctgaaaaactaatcaaaaataaactagtttccagtggatcaatggactgtgtcagtggtgtagggcagaggagggggactcaccggggggtgaaattgtggcagggaggagagctgagtgcctcttaggggcagggaccctggc

SEQ ID NO: 21038 - DNA, 675 bp, Macaca Mulatta
  misc_feature (1)...(675): n = A,T,C or G
gggctctctggtctcggctgcagaagcgagatgacgaagggaacgtcatcgtttggaaagcgtcgcaataagacgcacacattgtgccgccgctgtggctctaaggcctaccaccttcagaagtcgacctgtggcaaatgtggctaccctgccaagcgcaagagaaagtataactggagtgctaaggctaaaagacgaaataccaccggaactggtcgaatgaggcacctaaaaattgtataccgcagattcaggcatggattccgtgaaggaacaacacctaaacccaagagggcagctgttgcagcatctagttcatcttaagaatgtcaaccgattagtcatggccataaatgctccgggtttttaaaaattcccccaccaaaacacacaaaacttctccttcccccccccttttgcaccactttatttccttacctttttatattttcttncctcgatgattcaacgggaaataagatnttttttcccttgtggggggggcgcgcccctggggnnnnnnnnnnnnnnnnnnnnncttcnnnnnnnnnnnnnnnnnnnnnnnggggacgccccccgggttccccctgattcggggttaaactggtgcacctcagggggcaacataataccggttttttttcccccccagggagaaaatttctcccggggtga

SEQ ID NO: 21039 - DNA, 1181 bp, Macaca Mulatta
  misc_feature (1)...(1181): n = A,T,C or G
gaagcctggctacagataagggaccgaaatgactgactcaaaatatttcaccacgaccaaaaaagnnnnnnnnnnnnnnnnnnnnnnnnnnnnnnnnnnnnnnnnnnnnnnnnnnnnnnnnnnnnnnnnnnnnnnnnnnnnnnnnnnnnnnnnnnnnnnnnnnnnnnnnnnnnnnnnnnnnnnnnnnnnnnnnnnnnnnnnnnnnnnnnnnnnnnnnnnnnnnnnnnnnnnnnnnnnnnnnnnnnnnnnnnnnnnnnnnnnnnnnnnnnnnnnnnnnnnnnnnnnnnnnnnnnnnnnnnnnnnnnnnnnnnnnnnnnnnnnnnnnnnnnnnnnnnnnnnnnnnnnnnnnnnnnnnnnnnnnnnnnnnnnnnnnnnnnnnnnnnnnnnnnnnnnnnnnnnnnnnnnnnnnnnnnnnnnnnnnnnnnnnnnnnnnnnnnnnnnnnnnnnnnnnnnnnnnnnnnnnnnnnnnnnnnnnnnnnnnnnnnnnnnnnnnnnnnnnnnnnnnnnnnnnnnnnnnnnnnnnnnnnnnnnnnnnnnnnnnnnnnnnnnnnnnnnnnnnnnnnnnnnnnnnnnnnnnnnnnnnnnnnnnnnnnnnnnnnnnnnnnnnnnnnnnnnnnnnnnnnnnnnnnnnnnnnnnnnnnnnnnnnnnnnnnnnnnnnnnnnnnnnnnnnnnnnnnnnnnnnnnnnnnnnnnnnnnnnnnnnnnnnnnnnnnnnnnnnnnnnnnnnnnnnnnnnnnnnnnnnnnnnnnnnnnnnnnnnnnnnnnnnnnnnnnnnnnnnnnnnnnnnnnnnnnnnnnnnnnnnnnnnnnnnnnnnnnnnnnnnnnnnnnnnnnnnnnnnnnnnnnnnnnnnnnnnnnnnnnnnnnnnnnnnnnnnnnnnnnnnnnnnnnnnnnnnnnnnnnnnnnnnnnnnnnnnnnnnnnnnnnnnnnnnnnnnnnnnnnnnnnnnnnnnnnnnnnnnnnnnnnnnnnnnnnnnnnnnnnnnnnnnnnnnnnnnnnnnnnnnnnnnnnnnnnnnnnnnnnnnnnnnnnnnnnnnnnnnnnnnnnnnnnnnnnnnnnnnnnnnnnnnnnnnnnnnnnnnnnnncaggtgttggcggaactgaaagagtacgcaacagaagtggatgtggactttgtacggaaggctgtgcgtgccattggacgctgtgccatcaaggtgga

SEQ ID NO: 21040 - DNA, 686 bp, Macaca Mulatta
  misc_feature (1)...(686): n = A,T,C or G
cagctcagcttctgaagtgggaaacgaagaattgctccattggttctactaatgcagacgatataactcaaagtctcacaggaaaaggaaatgacagtgaagcggaaacgagatttcaagaagtctttatggaacacatgagcaacatggagaagagaatccagcacatttcagacatggaagccaatctcatagatgcagagcatttccaaaacttcagcatgacaactgatcaaagatttaatgacattcttctccagctaagtaccttgttttcctcagtccagggacatgggaatacaatagatgaaatctccaagtccttaataagtttgaataccacactgcttgatttgcagctcaacatagaaaagctgaatggcaaaatccaagagaaaaccttcaaacaacaagaggnnnnnnnnnnnnnnnnnnnnnnnnnnnnnnnnnnnnnnnnnnnnnnnnnnnnnnnnnnnnnnnnnnnnnnnnnnnnnnnnnnnnnnnnnnnnnnnnnnnnnnnnnnnnnnnnnnnnnnnnnnnnnnnnnnnnnnnnnnnnnnnnnnnnnnnnnnnnnnnnnnnnnnnnnnnnnnnnnnnnnnnaaggtcctcctggacctccaggtgaaaaaggagatcgaggtccaactggagaaagtggtccacgaggatttccaggtccagtaggt

SEQ ID NO: 21041 - DNA, 695 bp, Macaca Mulatta
  misc_feature (1)...(695): n = A,T,C or G
cacggtgggagccctgcttctcctcttggggaccctgctgccggctgctgaagggaaaaagaaagggtcncaaggtgccatccccccgccagacaaggctcagcacaatgattcagagcagactcagtcgccccagcagcctggctccaggaaccgggggcggggccaagggcggggcactgccatgccgggggaggaggtgctggagtccagccaagaggccctgcatgtgaccgagcgcaaatacctgaagcgagactggtgcaaaacccagccgcttaagcagaccatccacgaggaaggctgcaacagtcgtaccatcatcaaccgcttctgttacggccagtgcaactccttctacatccccaggcacatccggaaggaggaaggttcctttcagtcctgctccttctgcaagcccaagaaattcactaccatgatggtcacactcaactgccctgaactacagccacctaccaagaagaagagagtcacgcgtgtgaagcagtgtcgttgcatatccatcgatttggattaagccaaatccaggtgcacccagcctgtcctaggaatgcagccccaggaagtcccagacctaaaacaatcagattcttatttggcttaaacctagaggccagaagaacccccagctgcctcctggcaggagcctgcttgtgagtagtttgtgtgcatga

SEQ ID NO: 21042 - DNA, 127 bp, Macaca Mulatta
agaataatttaatctgtggttaccaagcatgtatctgatccagttgggtgaaagccatcggtgccaggaggggtgtctgatctggtctctgtccctgggtcccgtctgccctgcggcacctgggact

SEQ ID NO: 21043 - DNA, 432 bp, Macaca Mulatta
gcggtgctggagtacctgaccgcagagatcctggagctggcgggcaacgcagcccgcgacaacaaaaagactcgcatcatcccgcgtcacttgcagctggccatccgcaacgacgaggagctcaacaagctgcttggtaaagttaccatcgctcagggcggtgttctgcctaacatccaggccgtgttgctccccaagaagactgagagccaccacaaagctaagggcaagtaaggactggactttaaaagtgtaaacttataagacaaaaggctcttttcagagccacccaccgtttctacggaagaactgagcactgttctccaaacctatcagaaatttgtggccgagttcaagcactgaggtcattagtttcctattgggtaaaatgcaggtattgaatcaggcctagtgaatactatccaattgctt

SEQ ID NO: 21044 - DNA, 385 bp, Macaca Mulatta
tcatcccctctgtgtggctggagccctggcctggcctctgcgtccccagtgggacccctgaccctctccctctcctttcccacagagttcctgaagatgatggagggcgtgcagtaaggagtggtcagtcgcctccaccaagatcacgtgtccctagggtgtgggagactccgccctgccgggtccccaccagggaggcacggccccttgtgggtctttgtctgcaaggaataaaagcaaatgttccaaaactcgtggcctgaatggggggaaagctgggaacagtgggtctcaaaggttgcggtccagggcgccatcccagctggcaccacctggagcaccctcagggatcccgggagaggctgtcggagctgcgggatgtggg

SEQ ID NO: 21045 - DNA, 2919 bp, Macaca Mulatta
  misc_feature (1)...(2919): n = A,T,C or G
agaggaaagagaagagccttggggacgaggaagaaccacccgcctttgagtccaccaaaaattcagtttggcagcccccggcccatccgatgctgctcgaacctttcccttgaagtccaccaggtcaccagcagaccggagtaatcaagtgcctccctgggagggacccacgggcttccagccaaggactcccaagccagggtccagttcagaatcagggaaggagaggagaacaacgtccaaagaaatttctgtcatccagcacaccagctcctttgagaaatctgactctctcgagcagccgagtggcttggaaggggaagacaaacctctgacccagttcccatcgcccccacctgccccacacggacgctcggctcactccctgcagcccaagttggtccgccagcccaacattcaggttcctgagatcctggtaaccgaggagcctgaccggccggacacagaaccagagccgccccctaaggaacctgagaagactgaggagttccagtggccccagcgcagccagacacttgcccagctcccggccgagaagctgccacccaaaaaaaagaggctgcgcctggcagagatggcccaatcatcaggggagtccagctttgagtcctctgtgcctctgtctcgcagcccgagccaggaaagcagtatctctctgagtgggtccagccgctcagcctcatttgagagggatgacgataaaaagccgaggcccccggtccctnnnnnnnnnnnnnnnnnnnnnnnnnnnnnnnnnnnnnnnnnnnnnnnnnnnnnnnnnnnnnnnnnnnnnnnnnnnnnnnnnnnnnnnnnnnnnnnnnnnnnnnnnnnnnnnnnnnnnnnnnnnnnnnnnnnnnnnnnnnnnnnnnnnnnnnnnnnnnnnnnnnnnnnnnnnnnnnnnnnnnnnnnnnnnnnnnnnnnnnnnnnnnnnnnnnnnnnnnnnnnnnnnnnnnnnnnnnnnnnnnnnnnnnnnnnnnnnnnnnnnnnnnnnnnnnnnnnnnnnnnnnnnnnnnnnnnnnnnnnnnnnnnnnnnnnnnnnnnnnnnnnnnnnnnnnnnnnnnnnnnnnnnnnnnnnnnnnnnnnnnnnnnnnnnnnnnnnnnnnnnnnnnnnnnnnnnnnnnnnnnnnnnnnnnnnnnnnnnnnnnnnnnnnnnnnnnnnnnnnnnnnnnnnnnnnnnnnnnnnnnnnnnnnnnnnnnnnnnnnnnnnnnnnnnnnnnnnnnnnnnnnnnnnnnnnnnnnnnnnnnnnnnnnnnnnnnnnnnnnnnnnnnnnnnnnnnnnnnnnnnnnnnnnnnnnnnnnnnnnnnnnnnnnnnnnnnnnnnnnnnnnnnnnnnnnnnnnnnnnnnnnnnnnnnnnnnnnnnnnnnnnnnnnnnnnnnnnnnnnnnnnnnnnnnnnnnnnnnnnnnnnnnnnnnnnnnnnnnnnnnnnnnnnnnnnnnnnnnnnnnnnnnnnnnnnnnnnnnnnnnnnnnnnnnnnnnnnnnnnnnnnnnnnnnnnnnnnnnnnnnnnnnnnnnnnnnnnnnnnnnnnnnnnnnnnnnnnnnnnnnnnnnnnnnnnnnnnnnnnnnnnnnnnnnnnnnnnnnnnnnnnnnnnnnnnnnnnnnnnnnnnnnnnnnnnnnnnnnnnnnnnnnnnnnnnnnnnnnnnnnnnnnnnnnnnnnnnnnnnnnnnnnnnnnnnnnnnnnnnnnnnnnnnnnnnnnnnnnnnnnnnnnnnnnnnnnnnnnnnnnnnnnnnnnnnnnnnnnnnnnnnnnnnnnnnnnnnnnnnnnnnnnnnnnnnnnnnnnnnnnnnnnnnnnnnnnnnnnnnnnnnnnnnnnnnnnnnnnnnnnnnnnnnnnnnnnnnnnnnnnnnnnnnnnnnnnnnnnnnnnnnnnnnnnnnnnnnnnnnnnnnnnnnnnnnnnnnnnnnnnnnnnnnnnnnnnnnnnnnnnnnnnnnnnnnnnnnnnnnnnnnnnnnnnnnnnnnnnnnnnnnnnnnnnnnnnnnnnnnnnnnnnnnnnnnnnnnnnnnnnnnnnnnnnnnnnnnnnnnnnnnnnnnnnnnnnnnnnnnnnnnnnnnnnnnnnnnnnnnnnnnnnnnnnnnnnnnnnnnnnnnnnnnnnnnnnnnnnnnnnnnnnnnnnnnnnnnnnnnnnnnnnnnnnnnnnnnnnnnnnnnnnnnnnnnnnnnnnnnnnnnnnnnnnnnnnnnnnnnnnnnnnnnnnnnnnnnnnnnnnnnnnnnnnnnnnnnnnnnnnnnnnnnnnnnnnnnnnnnnnnnnnnnnnnnnnnnnnnnnnnnngaaaaggtcagagaaatcccacttaggcaaccaggtccagggcaggagggagctagaaatgctgtccagcctgtcctcagatccatctgacacaaaggaaattcctcccctccctcaccccgcattgccccatgggacagccccaggctcagaagctttgaaggaatatccccagccatctggcaaacctcaccaaagagggttgcccccactgagtgtgaagaaagaagattccaaggaacaacctgatctcccctccttggcacctcccagctctctgcctctgtcagaaacgtcctccagaccagccaagtcacaagaaggtacggactcaaagaaggtactgcagttccccagcctccacacaaccactaatgtcagttggtgctatttaaactacattaagccaaatcacatccagcatgcagataggaggtcctctgtttacgctggttggtgcataagtttgtacaaccccaaccttccgggggtttccactaaagctgctttgtccctcctgaggtctaagcagaaagtgagcaaagagacatacaccatggccacagctccgcatcctgaggcaggaaggcttgtgccatccagctcccgcaagccccgcatgacagaggt

SEQ ID NO: 21046 - DNA, 837 bp, Macaca Mulatta
tttgtctaatagttcattttaggacaaaattggggagtcaaattctccaactctaaggtgaaatacaccgtcttcatgaccaaacatgatgaaccatgttgccctttttcattgttcacatctctcctgtcttaacatcctttccacttccagctgtgcttggttcttgtgtatttttgtaataggatgaatgtttccattttctttctcagaggtacaaaatgcaggagcagagagcgtggattctcagccaggtccttggcacgcctcctcaggaaaagatgtgcctgagtgcaaaactcagtagactcctcttcgtcacttctctggaggtccagcattccttgtttggaaatgactttgtttatgtgtctgtccctggtaatgatgtcgtagtgcagcttaatttcaattcaggctttactttgccactagagttgaaatataagggaacaggaaatgaatgcattgtggtaatttagaatggtgatagcaataccttcttcttcttgcatatggtaatacttttaaaagttgaattgttttatttatttgtatattttgtaaagaataaagttattgaaaggaatgtaaagttacctacatgacttagcatattccaaagcataacacatacattaatataaaacattttattaacaaaattgtaaacatttttaataccttacacattcaataaatgtttagtagttctgaatcaccacttttctatgcaatgttaatggtttcttggtgaggtagtctctcttgttgactcaatattttgctatgaaaatacacacaagctttctggatttaaattcttaaaggatagcg

SEQ ID NO: 21047 - DNA, 152 bp, Macaca Mulatta
tcttaccggcactttgctccatcacttctttctgacacatgtcttgaacgttcaccgtgcaattcacgatgaactcaggggaggagcagtcgttgttcagctggaattcttcacactggtagcactggatttgcagcgcaaagcctgcgaga

SEQ ID NO: 21048 - DNA, 1159 bp, Macaca Mulatta
  misc_feature (1)...(1159): n = A,T,C or G
gtgctgcctccttctagtacaaaatctccaactttgagtgattcagncagtgtcgacttctcccactacaaaatctccaacgtccagtgcctcaggnnnnnnnnnnnnnnnnnnnnnnnnnnnnnnnnnnnnnnnnnnnnnnnnnnnnnnnnnnnnnnnnnnnnnnnnnnnnnnnnnnnnnnnnnnnnnnnnnnnnnnnnnnnnnnnnnnnnnnnnnnnnnnnnnnnnnnnnnnnnnnnnnnnnnnnnnnnnnnnnnnnnnnnnnnnnnnnnnnnnnnnnnnnnnnnnnnnnnnnnnnnnnnnnnnnnnnnnnnnnnnnnnnnnnnnnnnnnnnnnnnnnnnnnnnnnnnnnnnnnnnnnnnnnagttgttattctctagtttcactctcatgaatgcaactgtggcttaactaacattccaatgtggcttgaatgtaggtagcatgctttgatgcttctttgaaacttgtatgaatttgggtatgaacagattgcctgtttttccttaaataacacttagatttatcggacaagtcagcacagcatgcctggttttattaaagcagggatgtgctgtattttataaaattggcaaaattaaagaaatatagttcaaaatgaaattatattttctttgtaaagagagtggctttgaaatcttttttgttcaaagattaatgccaactcttaagattcattctttcaccaactatagaatgtattttacatatcgttcgttgtgaaaagcccttacgaatatgtgtatactactttggctcttgtgcattaaaaacaagaacactgaaaattgggactatgcacaagcttgacttccttaaccaagaatattattggaaaattctctaaaagttaatagggtaaattatctgttttttgtaatgtgtttggtgatttcagaaagctagaaagtgtatgtgtggcatttgttttcactttttaaaacatccctaactgatcgcatatatcagtaatttcagagtcagatgcatcctttcataagaagtgagaggactctgacagccgtaacaggagtgccacttcatggtgtgaagtgaacactgtagccttgtggttttcccaaagagaactccatatgttctcttaggttgaatagcccactctgaattctggttacat

SEQ ID NO: 21049 - DNA, 1025 bp, Macaca Mulatta
  misc_feature (1)...(1025): n = A,T,C or G
tggcttcttcaaagctccgagaacccgtggatgaggtttttgnnnnnnnnnnnnnnnnnnnnnnnnnnnnnnnnnnnnnnnnnnnnnnnnnnnnnnnnnnnnnnnnnnnnnnnnnnnnnnnnnnnnnnnnnnnnnnnnnnnnnnnnnnnnnnnnnnnnnnnnnnnnnnnnnnnnnnnnnnnnnnnnnnnnnnnnnnnnnnnnnnnnnnnnnnnnnnnnnnnnnnnnnnnnnnnnnnnnnnnnnnnnnnnnnnnnnnnnnnnnnnnnnnnnnnnnnnnnnnnnnnnnnnnnnnnnnnnnnnnnnnnnnnnnnnnnnnnnnnnnnnnnnnnnnnnnnnnnnnnnnnnnnnnnnnnnnnnnnnnnnnnnnnnnnnnnnnnnnnnnnnnnnnnnnnnnnnnnnnnnnnnnnnnnnnnnnnnnnnnnnnnnnnnnnnnnnnnnnnnnnnnnnnnnnnnnnnnnnnnnnnnnnnnnnnnnnnnnnnnnnnnnnnnnnnnnnnnnnnnnnnnnnnnnnnnnnnnnnnnnnnnnnnnnnnnnnnnnnnnnnnnnnnnnnnnnnnnnnnnnnnnnnnnnnnnnnnnnnnnnnnnnnnnnnnnnnnnnnnnnnnnnnnnnnnnnnnnnnnnnnnnnnnnnnnnnnnnnnnnnnnnnnnnnnnnnnnnnnnnnnnnnnnnnnnnnnnnnnnnnnnnnnnnnnnnnnnnnnnnnnnnnnnnnnnnnnnnnnnnnnnnnnnnnnnnnnnnnnnnnnnnnnnnnnnnnnnnnnnnnnnnnnnnnnnnnnnnnnnnnnnnnnnnnnnnnnnnnnnnnnnnnnnnnnnnnnnnnnnnnnnnnnnnnnnnnnnnnnnnnnnnnnnnnnnnnnnnnnnnnnnnnnnnnnnnnnnnnnnnnnnnnnnnnnnnnnnnnnnnnnnnggaatccaccctgagtgatgactccacgccccccagcagcagccccaagattcccagtgggccccggcaggaggtcaaatgttcttacccctaccacacgctgtctcagtcttcagatga

SEQ ID NO: 21050 - DNA, 575 bp, Macaca Mulatta
  misc_feature (1)...(575): n = A,T,C or G
natggaggacgaaggccagaccaaaatcaagcagaggcgaagtcggaccaatttcaccctggaacaactcaatgagctggagaggctttttgacgagacccactatcccgacgccttcatgcgagaggaactgagccagcgactgggcctgtcggaggcccgagtgcaggnnnnnnnnnnnnnnnnnnnnnnnnnnnnnnnnnnnnnnnnnnnnnnnnnnnnnnnnnnnnnnnnnnnnnnnnnnnnnnnnnnnnnnnnnnnnnnnnnnnnnnnnnnnnnnnnnnnnnnnnnnnnnnnnnnnnnnnnnnnnnnnnnnnnnnnnnnnnnnnnnnnnnnnnnnnnnnnnnnnnnnnnnnnnnnnnnnnnnnnnnnnnnnnnnnnnnnnnnnnnnnnnnnnnnnnnnnnnnnnnnnnnnnnnnnnnnnnnnnnnnnnnnnnnnnnnnnnnnnnnnnnnnnnnnnnnnnnnnngcctcggtagtcgcggcggcagcagccgccaagaccaccagcaagaactccagcatcgccgatctcagactgaaagccaaaaagcacgccgcagccttgggtctgtg

SEQ ID NO: 21051 - DNA, 1091 bp, Macaca Mulatta
  misc_feature (1)...(1091): n = A,T,C or G
ggataactggttgtttctcaatattgttctcttttttttcaccctttaggaaaagttggcagctaagaaaaaacttaaaaaagaaagagaggctcttggtgataaggctccaccaaagcctgtacccaagaccattgacaaccagcgagtgtatgatgaaaccacggtagaccctaatgatgaagaggttgcttatgatgaatctacagatgaatttgcttcttacttcaacaaacagacttctcccaagattctcatcacaacatcagatagacctcatgggagaacagtacgactctgtgaacagctctccacagttataccaaactcacatgtttattacagaagaggactggctctgaaaaaaattattcctcagtgcatcgcaagagagttcacagacctgattgttattaatgaagatcgcaaaaccccaaatggacttattttgagtcacttgccaaatggcccaactgctcatttcaaaatgagcagtgttcgtcttcgtaaagaaattaagagaagaggcaaggaccccacagaacacatacctgaaataattctgaataattttacaacacggctggggtcattcaattggacgtatgtttgcatctctcttccctcataatccctcaatttatttggaaggcaggttgccacatttccacaatcaacgggattatatatttcttcagatttcacagatacatattcaggagtgaaaagaaagtgggaattcaggaacttggaccacgttttaccttaaaattaaggtctcttcagaaaggaacctttgattctaaatatggagagtatgaatgggtccataagccccgggaatggatacaagtagaaaaaaatccatttataaagtactgagagataatatccgatttgctgaacagcctatctggaattgggaatttttttttgaagaaactccctccaaatggcttgttgatttcaaacccccccgtttggaaaattccaaagccataattgccccggnnnnnnnnnnnnnnnnnnnnnnnnnnnnnnnnnnnnnnnnnnnnnnnnnnnnnnnnnnnnnnnccctcccccaaaaattt

SEQ ID NO: 21052 - DNA, 227 bp, Macaca Mulatta
tcagatccaagctgcaggaagacctgaagtttaatcatgcaacaccggggaagtctttctgccaccaaagggtcaaatagaatcgacaagcatacgttttcacagattgtttgacaatgattatgctttatctattaataataatcggggactgcagatggcttaaatcgaaatgcaagcctcttctggaactttcatctctgcagtccatccaagaatgcgttagg

SEQ ID NO: 21053 - DNA, 594 bp, Macaca Mulatta
gaagcagccatataatctagtaataggtcgtatgtatgactaccaggtgctggatgtgattgaattaggtattgagaattttgtctctctaaaatacattaagaacggtaaatgtcctgagggaacaaaacccatgctaatatttactggtgatgatttcaatgtaacagaagattatagaagactaaaaagtcttcttgttgatttgaggccccacggtatcaaatatctgcctggctggattagagtatgttctgcacttcactgcactgaatgggaagattactttcgaagctataagttgctgttgaagaaatctggttgcagaacaccacagattgaattggaagaaatgggaccctcattagatctggctctgaggaggacacacctggcatcagatgacttttataaattatctatgaaaatgccaaaacctcccaaaccaaagaagaagaaaactatctccaatgatacttttggtacaacttgtggaaggattcatacgtagaagcaagacctaagcaaactacaaaccaggaaaatgaaggggttgaagaagcgacctgcagaaaggataacagaagaccagga

SEQ ID NO: 21054 - DNA, 3973 bp, Macaca Mulatta
  misc_feature (1)...(3973): n = A,T,C or G
ggctgtggtggaggctgtgcatcgacttgacctcttcctttgcaacaaaactgcttaccaagaagtattcaaaccagaaaacattagcctgaggaacaagnnnnnnnnnnnnnnnnnnnnnnnnnnnnnnnnnnnnnnnnnnnnnnnnnnnnnnnnnnnnnnnnnnnnnnnnnnnnnnnnnnnnnnnnnnnnnnnnnnnnnnnnnnnnnnnnnnnnnnnnnnnnnnnnnnnnnnnnnnnnnnnnnnnnnnnnnnnnnnnnnnnnnnnnnnnnnnnnnnnnnnnnnnnnnnnnnnnnnnnnnnnnnnnnnnnnnnnnnnnnnnnnnnnnnnnnnnnnnnnnnnnnnnnnnnnnnnnnnnnnnnnnnnnnnnnnnnnnnnnnnnnnnnnnnnnnnnnnnnnnnnnnnnnnnnnnnnnnnnnnnnnnnnnnnnnnnnnnnnnnnnnnnnnnnnnnnnnnnnnnnnnnnnnnnnnnnnnnnnnnnnnnnnnnnnnnnnnnnnnnnnnnnnnnnnnnnnnnnnnnnnnnnnnnnnnnnnnnnnnnnnnnnnnnnnnnnnnnnnnnnnnnnnnnnnnnnnnnnnnnnnnnnnnnnnnnnnnnnnnnnnnnnnnnnnnnnnnnnnnnnnnnnnnnnnnnnnnnnnnnnnnnnnnnnnnnnnnnnnnnnnnnnnnnnnnnnnnnnnnnnnnnnnnnnnnnnnnnnnnnnnnnnnnnnnnnnnnnnnnnnnnnnnnnnnnnnnnnnnnnnnnnnnnnnnnnnnnnnnnnnnnnnnnnnnnnnnnnnnnnnnnnnnnnnnnnnnnnnnnnnnnnnnnnnnnnnnnnnnnnnnnnnnnnnnnnnnnnnnnnnnnnnnnnnnnnnnnnnnnnnnnnnnnnnnnnnnnnnnnnnnnnnnnnnnnnnnnnnnnnnnnnnnnnnnnnnnnnnnnnnnnnnnnnnnnnnnnnnnnnnnnnnnnnnnnnnnnnnnnnnnnnnnnnnnnnnnnnnnnnnnnnnnnnnnnnnnnnnnnnnnnnnnnnnnnnnnnnnnnnnnnnnnnnnnnnnnnnnnnnnnnnnnnnnnnnnnnnnnnnnnnnnnnnnnnnnnnnnnnnnnnnnnnnnnnnnnnnnnnnnnnnnnnnnnnnnnnnnnnnnnnnnnnnnnnnnnnnnnnnnnnnnnnnnnnnnnnnnnnnnnnnnnnnnnnnnnnnnnnnnnnnnnnnnnnnnnnnnnnnnnnnnnnnnnnnnnnnnnnnnnnnnnnnnnnnnnnnnnnnnnnnnnnnnnnnnnnnnnnnnnnnnnnnnnnnnnnnnnnnnnnnnnnnnnnnnnnnnnnnnnnnnnnnnnnnnnnnnnnnnnnnnnnnnnnnnnnnnnnnnnnnnnnnnnnnnnnnnnnnnnnnnnnnnnnnnnnnnnnnnnnnnnnnnnnnnnnnnnnnnnnnnnnnnnnnnnnnnnnnnnnnnnnnnnnnnnnnnnnnnnnnnnnnnnnnnnnnnnnnnnnnnnnnnnnnnnnnnnnnnnnnnnnnnnnnnnnnnnnnnnnnnnnnnnnnnnnnnnnnnnnnnnnnnnnnnnnnnnnnnnnnnnnnnnnnnnnnnnnnnnnnnnnnnnnnnnnnnnnnnnnnnnnnnnnnnnnnnnnnnnnnnnnnnnnnnnnnnnnnnnnnnnnnnnnnnnnnnnnnnnnnnnnnnnnnnnnnnnnnnnnnnnnnnnnnnnnnnnnnnnnnnnnnnnnnnnnnnnnnnnnnnnnnnnnnnnnnnnnnnnnnnnnnnnnnnnnnnnnnnnnnnnnnnnnnnnnnnnnnnnnnnnnnnnnnnnnnnnnnnnnnnnnnnnnnnnnnnnnnnnnnnnnnnnnnnnnnnnnnnnnnnnnnnnnnnnnnnnnnnnnnnnnnnnnnnnnnnnnnnnnnnnnnnnnnnnnnnnnnnnnnnnnnnnnnnnnnnnnnnnnnnnnnnnnnnnnnnnnnnnnnnnnnnnnnnnnnnnnnnnnnnnnnnnnnnnnnnnnnnnnnnnnnnnnnnnnnnnnnnnnnnnnnnnnnnnnnnnnnnnnnnnnnnnnnnnnnnnnnnnnnnnnnnnnnnnnnnnnnnnnnnnnnnnnnnnnnnnnnnnnnnnnnnnnnnnnnnnnnnnnnnnnnnnnnnnnnnnnnnnnnnnnnnnnnnnnnnnnnnnnnnnnnnnnnnnnnnnnnnnnnnnnnnnnnnnnnnnnnnnnnnnnnnnnnnnnnnnnnnnnnnnnnnnnnnnnnnnnnnnnnnnnnnnnnnnnnnnnnnnnnnnnnnnnnnnnnnnnnnnnnnnnnnnnnnnnnnnnnnnnnnnnnnnnnnnnnnnnnnnnnnnnnnnnnnnnnnnnnnnnnnnnnnnnnnnnnnnnnnnnnnnnnnnnnnnnnnnnnnnnnnnnnnnnnnnnnnnnnnnnnnnnnnnnnnnnnnnnnnnnnnnnnnnnnnnnnnnnnnnnnnnnnnnnnnnnnnnnnnnnnnnnnnnnnnnnnnnnnnnnnnnnnnnnnnnnnnnnnnnnnnnnnnnnnnnnnnnnnnnnnnnnnnnnnnnnnnnnnnnnnnnnnnnnnnnnnnnnnnnnnnnnnnnnnnnnnnnnnnnnnnnnnnnnnnnnnnnnnnnnnnnnnnnnnnnnnnnnnnnnnnnnnnnnnnnnnnnnnnnnnnnnnnnnnnnnnnnnnnnnnnnnnnnnnnnnnnnnnnnnnnnnnnnnnnnnnnnnnnnnnnnnnnnnnnnnnnnnnnnnnnnnnnnnnnnnnnnnnnnnnnnnnnnnnnnnnnnnnnnnnnnnnnnnnnnnnnnnnnnnnnnnnnnnnnnnnnnnnnnnnnnnnnnnnnnnnnnnnnnnnnnnnnnnnnnnnnnnnnnnnnnnnnnnnnnnnnnnnnnnnnnnnnnnnnnnnnnnnnnnnnnnnnnnnnnnnnnnnnnnnnnnnnnnnnnnnnnnnnnnnnnnnnnnnnnnnnnnnnnnnnnnnnnnnnnnnnnnnnnnnnnnnnnnnnnnnnnnnnnnnnnnnnnnnnnnnnnnnnnnnnnnnnnnnnnnnnnnnnnnnnnnnnnnnnnnnnnnnnnnnnnnnnnnnnnnnnnnnnnnnnnnnnnnnnnnnnnnnnnnnnnnnnnnnnnnnnnnnnnnnnnnnnnnnnnnnnnnnnnnnnnnnnnnnnnnnnnnnnnnnnnnnnnnnnnnnnnnnnnnnnnnnnnnnnnnnnnnnnnnnnnnnnnnnnnnnnnnnnnnnnnnnnnnnnnnnnnnnnnnnnnnnnnnnnnnnnnnnnnnnnnnnnnnnnnnnnnnnnnnnnnnnnnnnnnnnnnnnnnnnnnnnnnnnnnnnnnnnnnnnnnnnnnnnnnnnnnnnnnnnnnnnnnnnnnnnnnnnnnnnnnnnnnnnnnnnnnnnnnnnnnnnnnnnnnnnnnnnnnnnnnnnnnnnnnccaagatgcagagtggttggggccaggagtttggaccctccagttcttgggggaagagccgggtaatacctggtgtctgagtgattctctgcagacccttcccctcctcaaggatcacccatcctcctttcagccccctttatggggaccaggcagctctggagccagccacaggggctcttagagaagcaaggcctggtgtggcctgcaccgaatagcagggtcagggttcgtgtgctcctcctcctgccacaggggctgcacatcccattgccccacttctgctttctgtctccctctgtctagcttccagggcagggagcaggccccacctagggctgcgggcaatctggcctgtgccagcatgggctcctgtgcccaccagccctacaggtgctgtgctttgtgctcttggctgctgtgctgggagagaatgggatgtcaggaagagaagaaagggggtgcagtctgaggccaccaccccgcttcctatctaagggagggctgaagacaaggggccggcattcagtgggcggccgaaaggagaggccccttgaagctgctcagtcagagccctctgtccctccttttgccctccccaggactaaagacctgaagg

SEQ ID NO: 21055 - DNA, 134 bp, Macaca Mulatta
  misc_feature (1)...(134): n = A,T,C or G
acatcccaggaatttgtggagaaactaaccaagcgactganaagacaccctgaggagacaggaggtttccaggaggcaccgctggcctatgatgccatctgggccttggcattggccctgaacagacatctgga

SEQ ID NO: 21056 - DNA, 951 bp, Macaca Mulatta
  misc_feature (1)...(951): n = A,T,C or G
ttttatctctctccacgaagaatatatannnnnnnnnnnnnnnnnnnnnnnnngtnnnnnnnnnnnnnnnnngcgcccnnnnnnnnnnnnnnnnnnnnnnnnnagggggtacccccccccgccccnggggaagaggggaaagcgaaccccannnnnnnnnnnnnnnnnnnnnnnnnnnnnnnnnnnnnnnnnnnnnnnnnnnnnnnnnnngacccccacccccctggggcgcgccttcttccctcccccccccntaaaaaacacccccacagaannnnnnnnnnnnnnnnnnnnnnnnnnnnnnnnnncaaccacacaggggggggggcnnnnnnnnnnnnnnnnnnnnnnnnnnnnnnnnnnnnnnnnagatttttaacttttagaggggggaaannnnnnnnnnnnnnnnnnnnnnnnnnnnnnnnnnnnnnnnnnnnnnnaaaagggtgggtaaacggggtttaaaaaccccgcgcctaaaaagggaccagggggttttttttaggggggggactttccccctttgcccagcnnnnnnnnnnnnnnnnnnnccggggcaaaacagcnnnnnnnnnnnnnnnnnnnnnnntttgggtttcgggtcggtaactggtgggcccgctttaagccaggttgagttagcttgttttgggcgggtcncagggcctggnngtgaactggttaatagcaggaggcactttcagccgcttatagaggatggctctctgccgctgcaacctgatatagcgaggccatttcacaaagcgggtgaggtctcttttgggctggatgtcctgtccaatgccaaaattcttaggtcttttctcaaacaggggattcaccactttcttggcctcctgctttttcacgacagcaggggccggagccaccttctttcccttggccttctttcctttcggcatcttgggcggcgggaggagagagccc

SEQ ID NO: 21057 - DNA, 647 bp, Macaca Mulatta
caggggttccagcacaaagtttacttctgggcgattttgtatccaaggaaataatgtgaacacaaggaaatgtctttagagcacagagacagagggaggaataagaggaggagaaagctctctataccaaagactgaaaaaaaatcctgtctgtttttgtatttattatgtgtatttatgtgggtgatttgataacaagtttaatataaagtagcctgggagtttggtcagtggggttggtttgtgatccaggaataaaccttgtggctgtggctgtttataaagtggacagtatctgtttctgcttccagactgttattctgtctcctaagatgctggtaaccacagtcagagcccagtggggctcagggtcgcagggccgtgcagccgtgatgaccacagcaccgtggagtcctgactctgatgcggggtgaggatgtcggaggaggacggggctgatctccatttgtaagatgcttgaaaatgctaggagctgcatcccggctcgaactcagaggcagggcagaagggaaggggcttccttggaaaaagatagttgccagaagtcacaaaataaggacaatgtcattttcttcctgtgagcaataggtccccactggtaagaaaacaagagtcagaaggaaacg

SEQ ID NO: 21058 - DNA, 126 bp, Macaca Mulatta
gccaccagctacatcgcctacctcatggacctgctggccaaggacgaccagaatggcgaggcggaggccttcaaggcagagatcaagaagaccgacgtgaaagaggagaagaggaagaaggagctg

SEQ ID NO: 21059 - DNA, 1361 bp, Macaca Mulatta
  misc_feature (1)...(1361): n = A,T,C or G
aggaggaagagctggtggagctgctggcccggcactgctacgtacagctaagcgcctcagtggagagcaaggctgtccaggagctgctnnnnnnnnnnnnnnnnnnnnnnnnnnnnnnnnnnnnnnnnnnnnnnnnnnnnnnnnnnnnnnnnnnnnnnnnnnnnnnnnnnnnnnnnnnnnnnnnnnnnnnnnnnnnnnnnnnnnnnnnnnnnnnnnnnnnnnnnnnnnnnnnnnnnnnnnnnnnnnnnnnnnnnnnnnnnnnnnnnnnnnnnnnnnnnnnnnnnnnnnnnnnnnnnnnnnnnnnnnnnnnnnnnnnnnnnnnnnnnnnnnnnnnnnnnnnnnnnnnnnnnnnnnnnnnnnnnnnnnnnnnnnnnnnnnnnnnnnnnnnnnnnnnnnnnnnnnnnnnnnnnnnnnnnnnnnnnnnnnnnnnnnnnnnnnnnnnnnnnnnnnnnnnnnnnnnnnnnnnnnnnnnnnnnnnnnnnnnnnnnnnnnnnnnnnnnnnnnnnnnnnnnnnnnnnnnnnnnnnnnnnnnnnnnnnnnnnnnnnnnnnnnnnnnnnnnnnnnnnnnnnnnnnacagatgacgccaccctcctggccttcaagaagggggacctgttggtcctgacaaagaagcagaggctgctggcctctgagaactggaccctcggccagaacgacaggacgggcaagacggggctggtgcccacggcctgcctctacaccatccccacggtcactaagccctcggcacagctgctnnnnnnnnnnnnnnnnnnnnnnnnnnnnnnnnnnnnnnnnnnnnnnnnnnnnnnnnnnnnnnnnnnnnnnnnnnnnnnnnnnnnnnnnnnnnnnnnnnnnnnnnnnnnnnnnnnnnnnnnnnnnnnnnnnnnnnnnnnnnnnnnnnnnnnnnnnnnnnnnnnnnnnnnnnnnnnnnnnnnnnnnnnnnnnnnnnnnnnnnnnnnnnnnnnnnnnnnnnnnnnnnnnnnnnnnnnnnnnnnnnnnnnnnnnnnnnnnnnnnnnnnnnnnnnnnnnnnnnnnnnnnnnnnnnnnnnnnnnnnnnnnnnnnnnnnnnnnnnnnnnnnnnnnnnnnnnnnnnnnnnnnnnnnnnnnnnnnnnnnnnnnnnnnnnnnnnnnnnnnnnnnnnnnnnnnnnnnnnnnnnnnnnnnnnnnnnnnnnnnnnnnnnnnnnnnnnnnnnnnnnnnnntcaggcacagtgaggagcggggctggcagctgctgtggctctgcactggtctcttcccgcccagcaaggggctcctgccccatgcccaaaagttcatcgacacccggagggggaagctgctggcccccgactgtggccgccgcatccagagggtcc

SEQ ID NO: 21060 - DNA, 572 bp, Macaca Mulatta
ttttttttttttttgacgacattaatagcatttaatactgtacagatgcaaccttcgatgatacatatatttgataaaaatgagaaaacagatgtgttgtagagtacctgtccactttgctagcatgagaacagtacaatcaactatttattttgcagttactcgtgtcagtgattgagaatttctgtgatgtgcagagagacggcctgtaattggtctcatcatctactcgatctctgcccaaagttccatttcttgggctttgatacttacaatggcgcctgctcttcatcttgtcttacgctttctgagcaagttcaaaccagaaagaaaaggtgaggctaaaagccccaagtgagagagtgtgaggaccacaaggaagcccaccgctccacagtagatgaccaaaaccacgtcctcacgtgggaggtagcacttggagagggcgtagtctgtgggcgtgatgctgccctggaaaggaaaagggagagttaaggtgacagcaccaggcacaggttgaacaccagagtcttagaaacagcagagagaaacttgccttctcggggtcccct

SEQ ID NO: 21061 - DNA, 2794 bp, Macaca Mulatta
  misc_feature (1)...(2794): n = A,T,C or G
gatctactgacttcacaatgtctgaaatcagattcaccaatctcacttgggatcaagttataacactggatcaagtgttagatgaagtaattccaattcatggaaaggggaatttccccacaatggaggtaaaaccaaaagacatcattcatgttgtgaaagatcaactcatagggcaaggaattattgttaaagatgccagattgaatggttccatagcaagttacatacttgcaagccataatggaatcagctataaggatctggacattatttttggtgttgagcttccaagtaacgaagaatttcaggttgttaaggatgcagttctaggttgtctacttgactttttaccaaaaggtgtaaagaaggaaaagatctccccagatatcatgaaagaggcttacgtacagaaattcgtcaaggtttgcaatggacatgattgttggagtcttatctccctttcaaataacactggaaagaatttaaaactaaaatttgtgagttcactcagacggcagtttgaatttagtgtagattcctttcaaattgttttggatcccatgttagacttctacagtgacaaaaatgccaagctaaccaaagagtcctatcctgttgtggtanctgaaagcatgtatggagacttccaggaagcaatgacgcatttgcaacacaagctcatatctaccaggnnnnnnnnnnnnnnnnnnnnnnnnnnnnnnnnnnnnnnnnnnnnnnnnnnnnnnnnnnnnnnnnnnnnnnnnnnnnnnnnnnnnnnnnnnnnnnnnnnnnnnnnnnnnnnnnnnnnnnnnnnnnnnnnnnnnnnnnnnnnnnnnnnnnnnnnnnnnnnnnnnnnnnnnnnnnnnnnnnnnnnnnnnnnnnnnnnnnnnnnnnnnnnnnnnnnnnnnnnnnnnnnnnnnnnnnnnnnnnnnnnnnnnnnnnnnnnnnnnnnnnnnnnnnnnnnnnnnnnnnnnnnnnnncacctgatcaccatgatggctttgaaagtacttggagaactgaatattctacctaatacagataaggtaacttgcttttatcagcctgctccgtactttgtggctgaggcagggtaccctacttatgtaacatctgagccaccccccattatcttccagccatactacccactgcactttcatgggtcaaatggtatgggttaaaaaatacacatgcaacaatagaaactttgctttaattaaacaccacttaaaagcaagtttccaaatataaaattcaagatctattcttatttttgtaaagttaccaattattttcaattacagttgatggaatagcagttaccaataattttttatcaattaagccatcatattaaatacaatatctataaaccaaccactttaaatgtttttcaaatgttgactagctataataactttcaaatgttgtattcctcttgaaatgattttcaaatcttttgactacttgtgactttcaaatttactgtgacaagcatatcagagatgcctgcatctttgactaaaatataaaaggacagattcatgttttaaaattacgatgtacagtgacgtaccaaattttttatattcagtcagttcctttgttacatttagttattttttagattgaataatatcatcaatacattttcagtacttaacagaaatgcctaatttcaaaagcaacagattcaaaaggcattaaaaccctggacttttcaagcaatttttgacaattgaattgggtcggatacaaaaannnnnnnnnnnnnnnnnnnnnnnnnnnnnnnnatggttctggaaagccctggacattagtaatttgtcatctacataataaaacatttagttaatttgtggatttgaataacaataccatgcagctgtgcaactactactgagatcagataccgggttttttgcccctcaaaataagttaaaacaaatgaaaatgaccagctctgaatgtgaaagctttctatcatcatttactactacaaagagactgtaaatggcaaacaggaaaaaacaggcagaggtttatagccatagcatttaccattttgtggcctatttgaaaaacatcttttatgttgagaaacattccatttcagtaagttaatatattttcattgtaactaaatgaaacaggtttttcattttgcctttaccaaagatcattttctaacatgccactcaagtgcctccttgtgtgaatttttgcataacactataatttattcaacaactgtgtatatttacaatatatctaaatatatacttactacatcaagtatgctgctagaaaaatctaccagtgggattaaaaatgtattttcttcccataatgaaaataatccatgaccaatattatctgaagtgtcagaaggggagctgtcttgaattaatatggatcaggccattggaaaacttcaatatttccacttggttatgattttttctgagtttccatttcagtttttattgaccatcacatattttttatcacaacgtgacctgacagttgtatcctgataatttgccagttatagactgtgcttaacctgtcttcactgtactacaatattggacagaagtacaccaaatatggcattttcaaataaccaatatttttgagatgtgttataccacagcacgagtggccatcagtatatttttaaagaattatatatcacagaaccctgaagctttaaaacactatggacttaccactttcttgacaaataaataatttataaatacaataaaatatttagaaatgaaag

SEQ ID NO: 21062 - DNA, 957 bp, Macaca Mulatta
  misc_feature (1)...(957): n = A,T,C or G
agggcctttaccttctaatgcaaaagccaccatcaaccttcagaatgaccccatcattcaaaagtatggctgtaagaaagtgggcttgaccagatgccttctgacaaaggaggaaatgagaacgtttcactttccattacaaggtnnnnnnnnnnnnnnnnnnnnnnnnnnnnnnnnnnnnnnnnnnnnnnnnnnnnnnnnnnnnnnnnnnnnnnnnnnnnnnnnnnnnnnnnnnnnnnnnnnnnnnnnnnnnnnnnnnnnnnnnnnnnnnnnnnnnnnnnnnnnnnnnnnnnnnnnnnnnnnnnnnnnnnnnnnnnnnnnnnnnnnnnnnnnnnnnnnnnnnnnnnnnnnnnnnnnnnnnnnnnnnnnnnnnnnnnnnnnnnnnnnnnnnnnnnnnnnnnnnnnnnnnnnnnnnnnnnnnnnnnnnnnnnnnnnnnnnnnnnnnnnnnnnnnnnnnnnnnnnnnnnnnnnnnnnnnnnnnnnnnnnnnnnnnnnnnnnnnnnnnnnnnnnnnnnnnnnnnnnnnnnnnnnnnnnnnnnnnnnnnnnnnnnnnnnnnnnnnnnnnnnnnnnnnnnnnnnnnnnnnnnnnnnnnnnnnnnnnnnnnnnnnnnnnnnnnnnnnnnnnnnnnnnnnnnnnnnnnnnnnnnnnnnnnnnnnnnnnnnnnnnnnnnnnnnnnnnnnnnnnnnnnnnnnnnnnnnnnnnnnnnnnnnnnnnnnnnnnnnnnnnaagattgcagaactaaatctagaagcactagctaatcaccaagaaatacaagcagcaggccaagagcctagaaacacaacagaaatacttcagcatccaaacacaagnnnnnnnnnnnnnnnnnnnnnnnnnnnnnnnnnnnnnnnnnnnnngacccgggagacgatgctggtgaacttgcgtcttccagaaactgtcaaactataaagtgtctttcaaataaagaggtg

SEQ ID NO: 21063 - DNA, 404 bp, Macaca Mulatta
gagttctagtttttattcacactacaacattctctgtaacaatgttgcaggtagtttcaatttccttttaagaaaaatgaaatttgaggagaattttgattgtaatagatgacaatacacatgatctgcaggtttgggcgtatgctataaacattaaattatcttataaagttacaaatcacaaaggagaatgagaacttaatgattctattggatttaatatattaagcaagaaaacatactatttacatatgtgtagcttagtaaggcattatcataagtacaaaaactatgaaacagatgcatttttcctcaacatactgtgtcaggtatatactgttttataatttggttgttttagccttgttgcacaccaactcccaaaatataggttactcttgttc

SEQ ID NO: 21064 - DNA, 834 bp, Macaca Mulatta
ggaagcagtggtatcaattcagagtgcccctccggccccgccatgaggctcttcctgtcgctcccggtcctggtggtggttctgtcgatggtcttggaaggcccagccccaacccagggggccccggatgtctccagcgccttggataagctgaaggagtttggaaacaccctggaggacaaggcttgggaagtgatcaaccgcatcaaacagagtgaatttcctgccaagacacgggattggttttcagagacatttcggaaagtgaaggaaaaactcaagattaactcatgagcacctgaagggtgacttcccaggagggggctcagaaatttcacgcacctcaacacctgtgtctgaggacacgtccccgcgtgggctctctggtgccaacgcaaataaaaaaagccctattactaatatttccgctaatttttttcctaacacttaataatctattgttacccccgaaaaaatagccgtaataatcaaagaaaaagatatgaatacaaagaaactaccaaaaataagagcgcggaagtgttaacaatatgtatacgaggccgggacattaatgacacaaattttggacaagcgatggtggaataggaaaagtaaacgagagaaagagaacgagggcgctgcatatccacgcggcaacgagtaaattgtccacgcaaattgaaaaggagaatattaataaaaaaactagccacaaaccgtcccttaatcttctgaagcccacagcggttgaatattaattttgagcgcggcacgtgagccgatgtttgtagccgaagtattgtctttcccgtaactattctcgccgtttgt

SEQ ID NO: 21065 - DNA, 838 bp, Macaca Mulatta
  misc_feature (1)...(838): n = A,T,C or G
ggtgacctcacattcgtgccccttaacagcactctgcacaaatgcctcctcgactgcaaagcggcctgaacctctcggccaaannnnnnnnnnnnnnnnnnnnnnnnnnnnnnnnnnnnnnnnnnnnnnnnnnnnnnnnnnnnnnnnnnnnnnnnnnnnnnnnnnnnnnnnnnnnnnnnnnnnnnnnnnnnnnnnnnnnnnnnnnnnnnnnnnnnnnnnnnnnnnnnnnnnnnnnnnnnnnnnnnnnnnnnnnnnnnnnnnnnnnnnnnnnnnnnnnnnnnnnnnnnnnnnnnnnnnnnnnnnnnnnnnnnnnnnnnnnnnnnnnnnnnnnnnnnnnnnnnnnnnnnnnnnnnnnnnnnnnnnnnnnnnnnnnnnnnnnnnnnnnnnnnnnnnnnnnnnnnnnnnnnnnnnnnnnnnnnnnnnnnnnnnnnnnnnnnnnnnnnnnnnnnnnnnnnnnnnnnnnnnnnnnnnnnnnnnnnnnnnnnnnnnnnnnnnnnnnnnnnnnnnnnnnnnnnnnnnnnnnnnnnnnnnnnnnnnnnnnnnnnnnntgcggatcatgacgcggatgggcacgcccgtcctgcatcactgggagatggggagtttgtcaaatgcctccattctgtgggatgccctctgcctttacaaanagcctttggtcaacaactggccctgcaacccggagctgacgctcatcgcccacctgcctgaccgcagagagatcatctcctttggcagtgggtacggcgggaactcgctgctggggaagaagtgctttgctctcaggatagccagtcggctggccaaggaggaagggtggctggcagagcacatgctg

SEQ ID NO: 21066 - DNA, 2373 bp, Macaca Mulatta
  misc_feature (1)...(2373): n = A,T,C or G
gcgcgggggagccattaggaggcgaggagagaggagggcgcagctcccgcccagcccagccctgcccagccctgcccggaggcagacgcgccggaaccgggacgcgataaatatgcagagcggaggcttagcgcagcagagcccgcgcgccgcccgctccgggtgctgaatccaggcgcggggacacgagccaggcgccgccgccggagcccgcggagccggggccagagccggagcgcgtccgcgtccacgcagccgccggccggccagcacccagggccctgcatgccaggtcgttggaggtggcagccagacatgcacccggcccggaagctcctcagcctcctcttcctcatcctgatgggcactgaactcactcaagtnnnnnnnnnnnnnnnnnnnnnnnnnnnnnnnnnnnnnnnnnnnnnnnnnnnnnnnnnnnnnnnnnnnnnnnnnnnnnnnnnnnnnnnnnnnnnnnnnnnnnnnnnnnnnnnnnnnnnnnnnnnnnnnnnnnnnnnnnnnnnnnnnnnnnnnnnnnnnnnnnnnnnnnnnnnnnnnnnnnnnnnnnnnnnnnnnnnnnnnnnnnnnnnnnnnnnnnnnnnnnnnnnnnnnnnnnnnnnnnnnnnnnnnnnnnnnnnnnnnnnnnnnnnnnnnnnnnnnnnnnnnnnnnnnnnnnnnnnnnnnnggcgataaaagcgaaaatggatgaacttaggcctttgatacctgtgttggaagagtacaaggccgatgccaaattggtattgcagtttaaagaggaggcccagaatctgacgtcagtccttaacgagctgcaagaggaaattggcgcctatgactacgatgaacttcagagcagagtgtccaatcttgaagaaaggctccgtgcatgcatgcaaaaactagngcttgcgggaagttgacgggcatcagtgaccccgtgactgtcaagacctccggctcgaggtttggatcctggatgacagaccctctcgcccccgaaggtgataaccgggtgnnnnnnnnnnnnnnnnnnnnnnnnnnnnnnnnnnnnnnnagtacaagtccatggttgacttcatgaacacggacaatttcggctcccaccgtctccctcacccctggtcgggcacggggcaggtggtctacaacgggtccatctacttcaacaagttccagagccacatcatcatcaggttcgacctgaagacagagaccatcctcaagacccgcagcctggactatnnnnnnnnnnnnnnnnnnnnnnnnnnnnnnnnnnnnnnnnnnnnnnnnnnnnnnnnnnnnnnnnnnnnnnnnnnnnnnnnnnnnnnnnnnnnnnnnnnnnnnnnnnnnnnnnnnnnnnnnnnnnnnnnnnnnnnnnnnnnnnnnnnnnnnnnnnnnnnnnnnnnnnnnnnnnnnnnnnnnnnnnnnnnnnnnnnnnnnnnnnnnnnnnnnnnnnnnnnnnnnnnnnnnnnnnnnnnnnnnnnnnnnnnnnnnnnnnnnnnnnnnnnnnnnnnnnnnnnnnnnnnnnnnnnnnnnnnnnnnnnnnnnnnnnnnnnnnnnnnnnnnnnnnnnnnnnnnnnnnnnactacaaccccaaggaccgggccctgtacgcctggaacaatggccaccagatcctctacaacgtgaccctcttccacgtcatccgctccgacgagttgtagctccctcctcctggaagccaagggcccacgtcctcaccagaggaaactcctgtgaaaccgctgccaaaaagataccaatgatactaacaataccaattttgaaaaatcatcagcagtgcggattctgacgtcgagggatggcattacctccgtgtttgtccctttccagccggcgggccacagacatcggaagaaactcccgtatttgcagctggaactgcagcccacggcgccccggttttccttcccgcctcgtccctctctggtcacacaacatactaaagaggcaaggcaatgactgttggccaactctcaccggggaacaacccactgttaggatggcatgaacatttccttagatcgtggtcagctccgagggatgtggcatctgggctcttggggagccccaggccgcacccggccgtaggctagtgtaactcgcatcccatcgcagtgccgtttcttgactgtgttgctgtctcttagattaactgtgctgagactccacgtagctcctggacccgtgtctagtacatactgaagcgatggtcagagtgtgtagagtgaagttgctgtgcccacgttgtttgaactcgcgtaccccgtagatatattgtgcagcgttcttctgttattcccttgaggtggtaactttgtatgttcagtttatgcaatgattgttgta

SEQ ID NO: 21067 - DNA, 286 bp, Macaca Mulatta
cccggaccaggacgactggaaaagcgggttgcatgccatggagtgtgctcttcttttgaaaaggattgtgaaccagtcgttgctgaaattgccactttagcttctgacaaaggtgaccccccattgtgcgacttcctggaaacctactacctgaatgagcaggtgaagtttatcaaagactagggtgaccacgtgcacacttagtgaagctgggggccccggatgctggcctggcggagtacctttttgacatacattcccttggaaatgaaaacaagcagaacta

SEQ ID NO: 21068 - DNA, 741 bp, Macaca Mulatta
  misc_feature (1)...(741): n = A,T,C or G
ggtacttacagaaatctcaccttactgagtgggttccactttttcatttgttatctacattttgaagggcttatgtgcaaagtgaaaacaaattttgaaaaataagacaaatccattctctttttcaattcagtctaatatgcattgtagtgtcgtttaatcagtcttatcctctaagtcaactttattttcctctttgattagtgagtacccataccaatatgtaagattttattgaagtttcctgcgataacctaggaacactttgctatgcctcactgcccaatagggtgggtcatcaattacgagaaatcccaaattataaaagccaacatatgccgtgacctacataggaaaagaggtatttgtgcatcttctttctgggtagttaaaaattactccctcttttctctagcattttgacatttcagactcaatggtctgatctctagggagcgtgattattcaaactaatgagagaggacaagacagttttagaatccactgctgctaaagcacattaaaaacaaatcctggttttcaatgtatgcacattttcatatttaattaatatgcgttcattaaatagggaggtaaatttgaaaaaactgttacaaagaaatgtgcctttttggggaatgccatacttttgttcatgtcctagccccagggggaaatttttcagtttttcaccctttataactggannnnnnnnnnnnnnnnnnttgtaaaaaaatattt

SEQ ID NO: 21069 - DNA, 743 bp, Macaca Mulatta
  misc_feature (1)...(743): n = A,T,C or G
ggagcgtcacatgcaaacttttagtgcatccagcgttccgccctttcttcgttgggcccccttccgacccggcccagtgcgcaggcgcgggaaagttgaactaataaagtttgtacaagttgagtggaggcggccgcaggttgagtggaggaggcggcggtgaggccccggaccaggtnnnnnnnnnnnnnnnnnnnnnnnnnnnnnnnnnnnnnnnnnnnnnnnnnnnnnnnnnnnnnnnnnnnnnnnnnnnnnnnnnnnnnnnnnnnnnnnnnnnnnnnnnnnnnnnnnnnnnnnnnnnnnnnnnnnnnnnnnnnnnnnnnnnnnnnnnnnnnnnnnnnnnnnnnnnnnnnnnnnnnnnnnnnnnnnnnnnnnnnnnnnnnnnnnnnnnnnnnnnnnnnnnnnnnnnnnnnnnnnnnnnnnnnnnnnnnnnnnnnnnnnnnnnnnnnnnnnnnnnnnnnnnnnnnngctggcctcggaccccgtcctgcgcagcaagctggtgcgcctgtcctccggctctttcgcccgcctggtggagctgttttgtagccgggaggacaactctcacccaagccgagcatgccccgggccgccgcctccttccccggagcccctggcccgcctggccctggccatggagctgagccggcgcgtggccgggctggggggcaccctggccggactcagcgtggagcacgtgcacagcttcacgccctggatccaggcccacgggggctggg

SEQ ID NO: 21070 - DNA, 115 bp, Macaca Mulatta
catcccggaaccacttcctttggaatgtcttcattcaacctaagtaatgccatcatgggcagtgggatcctgggcttgtcctatgccatggccaacacagggatcatacttttta

SEQ ID NO: 21071 - DNA, 175 bp, Macaca Mulatta
aggatctgattgagaaagttgtcatcctgagaaaagctgtgcaactcactcaagccatggacactagtactgtaggagttctcttggctgcgaagatgagtcagtatgccaatttgttggcagctcagggcagtattgctgcagccttggcttttcttcctgacaacaccaacca

SEQ ID NO: 21072 - DNA, 1255 bp, Macaca Mulatta
  misc_feature (1)...(1255): n = A,T,C or G
agtgtccccggagctggagcctcgacgggagcgttgggagcagcggcagcagtggcagcggccacggctaaggcgtctacaccagcggtcggtcagcaaagagaagtgggtggagaccctggtggtagctgatgccaagatggtggagtaccacggacagccgcaggttgagagctatgtgctgaccatcatgaacatggtgnnnnnnnnnnnnnnnnnnnnnnnnnnnnnnnnnnnnnnnnnnnnnnnnnnnnnnnnnnnnnnnnnnnnnnnnnnnnnnnnnnnnnnnnnnnnnnnnnnnnnnnnnnnnnnnnnnnnnnnnnnnnnnnnnnnnnnnnnnnnnnnnnnnnnnnnnnnnnnnnnnnnnnnnnnnnnnnnnnnnnnnnnnnnnnnnnnnnnnnnnnnnnnnaaggacctgtgtgcagccatgaaccggccctgtgagaccctgggcctgtcccacgtggcgggcatatgcctgccgcactgcagctgcagcatcaacaaggacacaggcctgccactgggcttcactgtagcccacgagctcgggcacannnnnnnnnnnnnnnnnnnnnnnnnnnnnnnnnnnnnnnnnnnnnnnnnnnnnnnnnnnnnnnnnnnnnnnnnnnnnnnnnnnnnnnnnnnnnnnnnnnnnnnnnnnnnnnnnnnnnnnnnnnnnnnnnnnnnnnnnnnnnnnnnnnnnnnnnnnnnnnnnnnnnnnnnnnnnnnnnnnnnnnnnnnnnnnnnnnnnnnnnnnnnnnnnnnnnnnnnnnnnnnnnnnnnnnnnnnnnnnnnnnnnnnnnnnnnnnnnnnnnnnnnnnnnnnnnnnnnnnnnnnnnnnnnnnnnnnnnnnnnnnnnnnnnnnnnnnnnnnnnnnnnnnnnnnnnnnnnnnnnnnnnnnnnnnnnnnnnnnnnnnnnnnnnnnnnnnnnnnnagtggtgtctcaatgaggagtgcatgtctgtgggcttccggcccgaggccgtggatggtggctggtccggctggagcgcctggtccatctgctcacggagctgtggtgtgggcgtacagagcgccgagcggcagtgcacgcagcctacngcccaaatacaaaggcagatactgtgtgggtgagcggaagcgcttccgcctctgcaacctgcaggcctgccccgctggccgcccctccttccaccacatccagtgcagccactttgacgctacgctttacgagggccagctgcacacatgggtgcccgtggtcaatgac

SEQ ID NO: 21073 - DNA, 1837 bp, Macaca Mulatta
agggtcccatctaggagcagctcctcagatggggccacttccacaccccagaacctcctgcaggttggggccaaggtgaaggagatatgaggatgcatgagaaaggggtgctgggagggaacaatccagatcccaaagagaaaccagtgtttccgttgctaagagaggcaattaacagagtgggaccccagggtggaggtccttgtgtgtagggaagcagggctggggaggttggcaaccatgtatgagctgtgagccaggacacctaggccaaggaggggcagggaggtcaaggaaaggagccagggcgggggacacccagcttcctctgggacactcattcaagtggcacctgttgccacagaccgcattaggaatgagggtggaatgtggaggtttattgtctccacaaccactagcccagcctgtttctgccgtcccccaccccactaccaggataaagggctggctgtcttggggctgagggagattcgggtgctgagcaggatgcggggccgcgtggcagggagctgtgctcccctgggcctgcttctggtctgtcttcgtctcccaggtacggaggccgtgatgcccttgggcaggagacactggaggtcccccaggaaacaggaattaaggaaaggggtaaaggcaggagggtacacatttaggtccctgagggaaaaggaagaataggcacaggggaagcaaagggaaccggaatcggggaagggaaaccattggctgctttatcttccctttctctcaggcctctttgcccggagcattggtgctgtggaggagaaagtttcccaaaacctggggaccaacttgcctcagcttggacaaccttccctgactggcccccctaactctgaacatcctcagcccgctctggacctgaggtctaacgatttggcaagggctcctctgaagctcagcgtgcccccatcagacggcttcccacctgcaggaggctctgcagtgcagaggtggcctctgtccgggaggctgcctgccatgtactcctggccccctgaggatccttggctgatgatggctgctgcggctgcggaccgcctgggggaagcgctgcctgaagaactctcttacctctccagtgctgcggccctcgctccaggcagtggccctttgcctggggagtcttctcctgacgccacagacctctcacccgaggcttcacacctccaccaggactcggagtccagacgactgccccgttctaatccactggggcccgggggaaaaatcctttcccagcgccctccctggtctctcatctacagggttctgcccgatcacccctgggggaccctgaatcccagtgtgtcctggggaggtggaggccctgggactggttggggaacgaggcccatgccacaccctgggggaatctggggtatcaataatcaacccccaggtaccagctggggaaatattaatcggtatccgggaggcagctgggggaatattaatcggtatccaggaggcagctgggggaatattcatctatacccaggtatcaataacccatttcctcccggagttctccgccctcctggctcttcttggaacaccccagctggcttccctaatcctccaagccctgggttgcagtggggctaaagcacatagagggaaacccaacattgggagttagagtcctgctcccgccccttgctgtgtgggctcaatccaggccctgtcagcatgtttccagccctatccccacttttcaatgcctcccttgctcatctccaataaaataaaagcacttatggaatttgcttcttcttggtgtctttgtttctgggca

SEQ ID NO: 21074 - DNA, 4594 bp, Macaca Mulatta
  misc_feature (1)...(4594): n = A,T,C or G
ccgggctaagctgcgaccggcagcggctgctcgccaaggaatattataacccgcagccttacccgagctatgagggtggcgctggcacgccctctggcacagcggccgcagtggccgccgacaagtaccaccgaggcagcaaggccctgcccacgcagcaggccctgcagggaaggccggctttccctggctatggcgtccaggacagcagcccctacccgggccgctatgctggtgaggagagcctgcaggcttggggtgccccacagccaccacccccacagccgcagcccctaccagcgggggtgaccaagtatgatgagaacttgatgaaaaagacagcagtgccctccagcaggcagtatgcagagcagggcgcccaggtgccctttcggactcactccctgcacgtccagcagccaccgccgccccagcagcccctggcatatcccaagctccaaaggcagaagctgcagaacgacattgcctcccctctgcccttcccccagnnnnnnnnnnnnnnncactcctataagagttgcacagcaaagactgcccagccccatgacaggtcactgaccgccagctccagcctggccccagggcagcgggtccagaatcttcacgcctatcagtcgagccgcctcagctatgaccannnnnnnnnnnnnnnnnnnnnnnnnnnnnnnnnnnnnnnngcccttcagagccggcaccatgcccaggaaaccctccattaccaaaaccttgccaagtatcagcactacgggcagcaaggccagggctactgccagccggacgcagctgtccggaccccggagcagtactaccagaccttcagccccagctccagccacnnnnnnnnnnnnnnnnnnnnnnnnnnnnnnnnnnnnnnnnnnnnnnnnnnnnnnnnnnnnnnnnnnnnnnnnnnnnnnnnnnnnnnnnnnnnnnnnnnnnnnnnnnnnnnnnnnnnnnnnnnnnnnnnnnnnnnnnnnnnnnnnnnnnnnnnnnnnnnnnnnnnnnnnnnnnnnnnnnnnnnnnnnnnnnnnnnnnnnnnnnnnnnnnnnnnnnnnnnnnnnnnnnnnnnnnnnnnnnnnnnnnnnnnnnnnnnnnnnnnnnnnnnnnnnnnnnnnnnnnnnnnnnnnnnnnnnnnnnnnnnnnnnnnnnnnnnnnnnnnnnnnnnnnnnnnnnnnnnnnnnnnnnnnnnnnnnnnnnnnnnnnnnnnnnnnnnnnnnnnnnnnnnnnnnnnnnnnnnnnnnnnnnnnnnnnnnnnnnnnnnnnnnnnnnnnnnnnnnnnnnnnnnnnnnnnnnnnnnnnnnnnnnnnnnnnnnnnnnnnnnnnnnnnnnnnnnnnnnnnnnnnnnnnnnnnnnnnnnnnnnnnnnnnnnnnnnnnnnnnnnnnnnnnnnnnnnnnnnnnnnnnnnnnnnnnnnnnnnnnnnnnnnnnnnnnnnnnnnnnnnnnnnnnnnnnnnnnnnnnnnnnnnnnnnnnnnnnnnnnnnnnnnnnnnnnnnnnnnnnnnnnnnnnnnnnnnnnnnnnnnnnnnnnnnnnnnnnnnnnnnnnnnnnnnnnnnnnnnnnnnnnnnnnnnnnnnnnnnnnnnnnnnnnnnnnnnnnnnnnnnnnnnnnnnnnnnnnnnnnnnnnnnnnnnnnnnnnnnnnnnnnnnnnnnnnnnnnnnnnnnnnnnnnnnnnnnnnnnnnnnnnnnnnnnnnnnnnnnnnnnnnnnnnnnnnnnnnnnnnnnnnnnnnnnnnnnnnnnnnnnnnnnnnnnnnnnnnnnnnnnnnnnnnnnnnnnnnnnnnnnnnnnnnnnnnnnnnnnnnnnnnnnnnnnnnnnnnnnnnnnnnnnnnnnnnnnnnnnnnnnnnnnnnnnnnnnnnnnnnnnnnnnnnnnnnnnnnnnnnnnnnnnnnnnnnnnnnnnnnnnnnnnnnnnnnnnnnnnnnnnnnnnnnnnnnnnnnnnnnnnnnnnnnnnnnnnnnnnnnnnnnnnnnnnnnnnnnnnnnnnnnnnnnnnnnnnnnnnnnnnnnnnnnnnnnnnnnnnnnnnnnnnnnnnnnnnnnnnnnnnnnnnnnnnnnnnnnnnnnnnnnnnnnnnnnnnnnnnnnnnnnnnnnnnnnnnnnnnnnnnnnnnnnnnnnnnnnnnnnnnnnnnnnnnnnnnnnnnnnnnnnnnnnnnnnnnnnnnnnnnnnnnnnnnnnnnnnnnnnnnnnnnnnnnnnnnnnnnnnnnnnnnnnnnnnnnnnnnnnnnnnnnnnnnnnnnnnnnnnnnnnnnnnnnnnnnnnnnnnnnnnnnnnnnnnnnnnnnnnnnnnnnnnnnnnnnnnnnnnnnnnnnnnnnnnnnnnnnnnnnnnnnnnnnnnnnnnnnnnnnnnnnnnnnnnnnnnnnnnnnnnnnnnnnnnnnnnnnnnnnnnnnnnnnnnnnnnnnnnnnnnnnnnnnnnnnnnnnnnnnnnnnnnnnnnnnnnnnnnnnnnnnnnnnnnnnnnnnnnnnnnnnnnnnnnnnnnnnnnnnnnnnnnnnnnnnnnnnnnnnnnnnnnnnnnnnnnnnnnnnnnnnnnnnnnnnnnnnnnnnnnnnnnnnnnnnnnnnnnnnnnnnnnnnnnnnnnnnnnnnnnnnnnnnnnnnnnnnnnnnnnnnnnnnnnnnnnnnnnnnnnnnnnnnnnnnnnnnnnnnnnnnnnnnnnnnnnnnnnnnnnnnnnnnnnnnnnnnnnnnnnnnnnnnnnnnnnnnnnnnnnnnnnnnnnnnnnnnnnnnnnnnnnnnnnnnnnnnnnnnnnnnnnnnnnnnnnnnnnnnnnnnnnnnnnnnnnnnnnnnnnnnnnnnnnnnnnnnnnnnnnnnnnnnnnnnnnnnnnnnnnnnnnnnnnnnnnnnnnnnnnnnnnnnnnnnnnnnnnnnnnnnnnnnnnnnnnnnnnnnnnnnnnnnnnnnnnnnnnnnnnnnnnnnnnnnnnnnnnnnnnnnnnnnnnnnnnnnnnnnnnnnnnnnnnnnnnnnnnnnnnnnnnnnnnnnnnnnnnnnnnnnnnnnnnnnnnnnnnnnnnnnnnnnnnnnnnnnnnnnnnnnnnnnnnnnnnnnnnnnnnnnnnnnnnnnnnnnnnnnnnnnnnnnnnnnnnnnnnnnnnnnnnnnnnnnnnnnnnnnnnnnnnnnnnnnnnnnnnnnnnnnnnnnnnnnnnnnnnnnnnnnnnnnnnnnnnnnnnnnnnnnnnnnnnnnnnnnnnnnnnnnnnnnnnnnnnnnnnnnnnnnnnnnnnnnnnnnnnnnnnnnnnnnnnnnnnnnnnnnnnnnnnnnnnnnnnnnnnnnnnnnnnnnnnnnnnnnnnnnnnnnnnnnnnnnnnnnnnnnnnnnnnnnnnnnnnnnnnnnnnnnnnnnnnnnnnnnnnnnnnnnnnnnnnnnnnnnnnnnnnnnnnnnnnnnnnnnnnnnnnnnnnnnnnnnnnnnnnnnnnnnnnnnnnnnnnnnnnnnnnnnnnnnnnnnnnnnnnnnnnnnnnnnnnnnnnnnnnnnnnnnnnnnnnnnnnnnnnnnnnnnnnnnnnnnnnnnnnnnnnnnnnnnnnnnnnnnnnnnnnnnnnnnnnnnnnnnnnnnnnnnnnnnnnnnnnnnnnnnnnnnnnnnnnnnnnnnnnnnnnnnnnnnnnnnnnnnnnnnnnnnnnnnnnnnnnnnnnnnnnnnnnnnnnnnnnnnnnnnnnnnnnnnnnnnnnnnnnnnnnnnnnnnnnnnnnnnnnnnnnnnnnnnnnnnnnnnnnnnnnnnnnnnnnnnnnnnnnnnnnnnnnnnnnnnnnnnnnnnnnnnnnnnnnnnnnnnnnnnnnnnnnnnnnnnnnnnnnnnnnnnnnnnnnnnnnnnnnnnnnnnnnnnnnnnnnnnnnnnnnnnnnnnnnnnnnnnnnnnnnnnnnnnnnnnnnnnnnnnnnnnnnnnnnnnnnnnnnnnnnnnnnnnnnnnnnnnnnnnnnnnnnnnnnnnnnnnnnnnnnnnnnnnnnnnnnnnnnnnnnnnnnnnnnnnnnnnnnnnnnnnnnnnnnnnnnnnnnnnnnnnnnnnnnnnnnnnnnnnnnnnnnnnnnnnnnnnnnnnnnnnnnnnnnnnnnnnnnnnnnnnnnnnncagggccagtggcacacaaggggccatcgttgacaactctggtggaggaggctagaagccaaagatggaggagctgggcctgacctcccagtcccctgagggccggccctgccatccccagacaagggcacagaatcagccaggccacaccaactacagcagctattccaagcggaagcgcctcactcggggccgggccaagaacacctcgtcttcaccctgtaaggggcgtgccaagcgacgacggcagcatttttttctgcccctggatcccgcatatcctgagatccgcctcaagtacatttcctcttgcaagcggctgaggtcagacagccggacccccgccttctcacccttcgtgcgggtggagaaacgagacgccttcaccaccgtatgcactgttgtcaactcccctggagatgcgcccaagccccacaggaatccttcctcttctgcctcctcttcctcatcctcatcctccttctccttggatgcagctggggcctccctggccacgctcactgga

SEQ ID NO: 21075 - DNA, 4770 bp, Macaca Mulatta
  misc_feature (1)...(4770): n = A,T,C or G
naggttcatggtaaagctggcagaggagacagatggcatcattgttaccaatgagcagattcacatcctgatgaataattccaagaagctgctggtcaaagatcnnnnnnnnnnnnnnnnnnnnnnnnnnnnnnnnnnnnnnnnnnnnnnnnnnnnnnnnnnnnnnnnnnnnnnnnnnnnnnnnnnnnnnnnnnnnnnnnnnnnnnnnnnnnnnnnnnnnnnnnnnnnnnnnnnnnnnnnnnnnnnnnnnnnnnnnnnnnnnnnnnnnnnnnnnnnnnnnnnnnnnnnnnnnnnnnnnnnnnnnnnnnnnnnnnnnnnnnnnnnnnnnnnnnnnnnnnnnnnnnnnnnnnnnnnnnnnnnnnnnnnnnnnnnnnnnnnnnnnnnnnnnnnnnnnnnnnnnnnnnnnnnnnnnnnnnnnnnnnnnnnnnnnnnnnnnnnnnnnnnnnnnnnnnnnnnnnnnnnnnnnnnnnnnnnnnnnnnnnnnnnnnnnnnnnnnnnnnnnnnnnnnnnnnnnnnnnnnnnnnnnnnnnnnnnnnnnnnnnnnnnnnnnnnnnnnnnnnnnnnnnnnnnnnnnnnnnnnnnnnnnnnnnnnnnnnnnnnnnnnnnnnnnnnnnnnnnnnnnnnnnnnnnnnnnnnnnnnnnnnnnnnnnnnnnnnnnnnnnnnnnnnnnnnnnnnnnnnnnnnnnnnnnnnnnnnnnnnnnnnnnnnnnnnnnnnnnnnnnnnnnnnnnnnnnnnnnnnnnnnnnnnnnnnnnnnnnnnnnnnnnnnnnnnnnnnnnnnnnnnnnnnnnnnnnnnnnnnnnnnnnnnnnnnnnnnnnnnnnnnnnnnnnnnnnnnnnnnnnnnnnnnnnnnnnnnnnnnnnnnnnnnnnnnnnnnnnnnnnnnnnnnnnnnnnnnnnnnnnnnnnnnnnnnnnnnnnnnnnnnnnnnnnnnnnnnnnnnnnnnnnnnnnnnnnnnnnnnnnnnnnnnnnnnnnnnnnnnnnnnnnnnnnnnnnnnnnnnnnnnnnnnnnnnnnnnnnnnnnnnnnnnnnnnnnnnnnnnnnnnnnnnggacctttcctatgcctcccggaccatggtggaccctgaagtgcgggagggccgcaggttttccaaagcttggttgatccgatggtccctcttggttcaggacaaaggcaagagggccctggaattggctctcctccagggcctgctgggggagaaccgcctgctgacccctgcggcctccatgcctcgcttcttccaggttctgccgcctttctctgatctgtccacctttgtctgcatccacatgtcgggctactgcttctaccgggaggatgagtggtgtgctggctttggtctctatgttctatcacccaccagtccccctgtctccctttccttctcctgctccccttacacaccaacctatgcccacctggcagccgtggcctgtggcctggagcgctttggccagtccccactcccagtagttttcctcactcactgcaactggatcttcagccttctgtgggagctcctgcccctttggagggctcggggcttcctgtcctccgatggggctccactccctcacccaagcctgctctcctacattatatccctcacctctggcctctcatcccttccgtttatctaccgaacctcctaccggggctctctgtttgctgtgacagtggacaccctggccaagcagggtgcccaggggggtgggcagtggtggagtttgccaaaggatgtgccagcccctacagtgactccccgtgccatnnnnnnnnnnnnnnnnnnnnnnnnnnnnnnnnnnnnnnnnnnnnnnnnnnnnnnnnnnnnnnnnnnnnnnnnnnnnnnnnnnnnnnnnnnnnnnnnnnnnnnnnnnnnnnnnnnnnnnnnnnnnnnnnnnnnnnnnnnnnnnnnnnnnnnnnnnnnnnnnnnnnnnnnnnnnnnnnnnnnnnnnnnnnnnnnnnnnnnnnnnnnnnnnnnnnnnnnnnnnnnnnnnnnnnnnnnnnnnnnnnnnnnnnnnnnnnnnnnnnnnnnnnnnnnnnnnnnnnnnnnnnnnnnnnnnnnnnnnnnnnnnnnnnnnnnnnnnnnnnnnnnnnnnnnnnnnnnnnnnnnnnnnnnnnnnnnnnnnnnnnnnnnnnnnnnnnnnnnnnnnnnnnnnnnnnnnnnnnnnnnnnnnnnnnnnnnnnnnnnnnnnnnnnnnnnnnnnnnnnnnnnnnnnnnnnnnnnnnnnnnnnnnnnnnnnnnnnnnnnnnnnnnnnnnnnnnnnnnnnnnnnnnnnnnnnnnnnnnnnnnnnnnnnnnnnnnnnnnnnnnnnnnnnnnnnnnnnnnnnnnnnnnnnnnnnnnnnnnnnnnnnnnnnnnnnnnnnnnnnnnnnnnnnnnnnnnnnnnnnnnnnnnnnnnnnnnnnnnnnnnnnnnnnnnnnnnnnnnnnnnnnnnnnnnnnnnnnnnnnnnnnnnnnnnnnnnnnnnnnnnnnnnnnnnnnnnnnnnnnnnnnnnnnnnnnnnnnnnnnnnnnnnnnnnnnnnnnnnnnnnnnnnnnnnnnnnnnnnnnnnnnnnnnnnnnnnnnnnnnnnnnnnnnnnnnnnnnnnnnnnnnnnnnnngggcctcctccacggacgccacaccattcaaggtcctgactgggggtgagtcaaggctcacagagcccctgtggtgggagatgagctctgcaaacattgaagggctcaagatggacgtcttcctgctacagctgataggggagctgctggagctccattggagggtggctgacaaggcaagtgaaaaggccgagaacaggcgtttcaagagggagagccaggagaaggagtggaatgtgggtgaccaggtgcttttgctgtccctccccaggaatggcagcagtgccaaatgggtgggtcccttctatattggggaccgtctaagcctgtcactctataggatatggggcttcccaaccccagagaagctggggtgcatctatcccagcagtctgatgaaggcctttgccaagagtggcacccccctgtccttcaaggtcttggagcagtgagtgggaacagtgggggtgcccctgccccagggccctgggtttctgctgctaggcctcccccatcccagcagttctctcagtccactgggagccctcagttgtgccttttgtagagaagttgcttcgtaaagctttgctgaattgccttgaactagggaccaacatccccatggaaacgtccctagtttggggtacttggagaatatgccaaaggctgtcannnnnnnnnnnnnnnnnnnnnnnnnnnnnnnnnnnnnnnnnnnnnnnnnnnnnnnnnnnnnnnnnnnnnnnnnnnnnnnnnnnnnnnnnnnnnnnnnnnnnnnnnnnnnnnnnnnnnnnnnnnnnnnnnnnnnnnnnnnnnnnnnnnnnnnnnnnnnnnnnnnnnnnnnnnnnnnnnnnnnnnnnnnnnnnnnnnnnnnnnnnnnnnnnnnnnnnnnnnnnnnnnnnnnnnnnnnnnnnnnnnnnnnnnnnnnnnnnnnnnnnnnnnnnnnnnnnnnnnnnnnnnnnnnnnnnnnnnnnnnnnnnnnnnnnnnnnnnnnnnnnnnnnnnnnnnnnnnnnnnnnnnnnnnnnnnnnnnnnnnnnnnnnnnnnnnnnnnnnnnnnnnnnnnnnnnnnnnnnnnnnnnnnnnnnnnnnnnnnnnnnnnnnnnnnnnnnnnnnnnnnnnnnnnnnnnnnnnnnnnnnnnnnnnnnnnnnnnnnnnnnnnnnnnnnnnnnnnnnnnnnnnnnnnnnnnnnnnnnnnnnnnnnnnnnnnnnnnnnnnnnnnnnnnnnnnnnnnnnnnnnnnnnnnnnnnnnnnnnnnnnnnnnnnnnnnnnnnnnnnnnnnnnnnnnnnnnnnnnnnnnnnnnnnnnnnnnnnnnnnnnnnnnnnnnnnnnnnnnnnnnnnnnnnnnnnnnnnnnnnnnnnnnnnnnnnnnnnnnnnnnnnnnnnnnnnnnnnnnnnnnnnnnnnnnnnnnnnnnnnnnnnnnnnnnnnnnnnnnnnnnnnnnnnnnnnnnnnnnnnnnnnnnnnnnnnnnnnnnnnnnnnnnnnnnnnnnnnnnnnnnnnnnnnnnnnnnnnnnnnnnnnnnnnnnnnnnnnnnnnnnnnnnnnnnnnnnnnnnnnnnnnnnnnnnnnnnnnnnnnnnnnnnnnnnnnnnnnnnnnnnnnnnnnnnnnnnnnnnnnnnnnnnnnnnnnnnnnnnnnnnnnnnnnnnnnnnnnnnnnnnnnnnnnnnnnnnnnnnnnnnnnnnagtagtttcatttctctggaagctgagccagtctcctggtctagcccaggttgccagaaggcttggcgttgcagagtgctagagccagtacggaacttgccgacttgattgttttacagcagaggagagaggatcacagagggaaagtgattcacccaaagtcacacagcgagttcatggctgagctgagaccaggactaagcttcctgacccccagttcaccatgaaaaggataaaacaataggttcaagctggagaatccttcaaaatcctacacccacattccctgcaactcctcatctccctgatcttccagacaaactacctggatgttgcccttaaaccatttctagctgttaaccctgtccagaaaaatgattgagtgatagctgagaagtggaaagtgtgggatttttggcaggtgctctctttcctctgctccccgtgccattctttctcttcctcctctctgtgatggtatgtccag

SEQ ID NO: 21076 - DNA, 835 bp, Macaca Mulatta
  misc_feature (1)...(835): n = A,T,C or G
gcccagttgcagaggttacacatcgatattgagaatctccgggaggagaaggacagtgaaatcacaagtactagagatgaattgcttagtgcccgagatgaaattttgctccttcatcaagcagcagaaaaggctgcctctgagcgggacactgacattgcttctttacaacaagagcttaagaaggtgagagctgagcttgagcggtggcggaaagcagcgtctgaatatgagaaagaaatcaccagtctgcaaaacagtttnnnnnnnnnnnnnnnnnnnnnnnnnnnnnnnnnnnnnnnnnnnnnnnnnnnnnnnnnnnnnnnnnnnnnnnnnnnnnnnnnnnnnnnnnnnnnnnnnnnnnnnnnnnnnnnnnnnnnnnnnnnnnnnnnnnnnnnnnnnnnnnnnnnnnnnnnnnnnnnnnnnnnnnnnnnnnnnnnnnnnnnnnnnnnnnnnnnnnnnnnnnnnnnnnnnnnnnnnnnnnnnnnnnnnnnnnnnnnnnnnnnnnnnnnnnnnnnnnnnnnnnnnnnnnnnnnnnnnnnnnnnnnnnnnnnnnnnnnnnnnnnnnnnnnnnnnnnnnnnnnnnnnnnnnnnnnnnnnnnnnnnnnnnagtatgaaaagacacagactgtactctcagaactgaagttgaagtttgaaatgactgagcaggaaaagcagtcaatcacagatgagctcaaacagtgtaaaaacaacctgaagctgctccgagagaaaggaaataacttccatattacaacccgtcccagccgtattcatcggcctattcctggctttcctgttttggtgtttcggtccattgtggtagagaaag

SEQ ID NO: 21077 - DNA, 784 bp, Macaca Mulatta
tcagtgtcaatcacattaaaagacctcacagtgttccctcttctgtccagctaccttcgaccttaagtacacaaagtgcttgtcagaattcagtacatccagcaaataagcctattgctcccaatttcagtgcccccttaccatttgggccctttagcacattgtttgaaaacagccctacttctgctcatgccttctggggaggatctgttgtttcatctcagtcaacaccagaatctatgctatcaggaaaatcctcatatttgccaaattcagatcctttacatcagtctgatacttccaaagctccaggttttagaccaccattacagagacctgctccaagtccctcaggtattgtcaatatggacccgccatatggttctgtaacaccttcttcaacacatttgggaaactttgcttcaaacctttcaggaggtcagatgtacggacctggggcaccccttggaggagcacccgcagctgctaaactttaacagacaacatttttccccgcttagtttgttgactccgtgttcatcagcatcaaatgattcttctgcacagtcagtatcctcgggagttcgtgcaccatctcctgccccatcgtcagtaccgttagggtcagaaaagcccagcaatgtgtctcaggacaggaaagttccagtccctattgggactgaacgttctgcacgtatcaggcaaactggaacgtcagctccatctgttattgggagcaatttgtctacatcagtagggcatagtggcatctggtcctttgaag

SEQ ID NO: 21078 - DNA, 619 bp, Macaca Mulatta
  misc_feature (1)...(619): n = A,T,C or G
aggattcggtgaggaggccgaagaggaggcctaaggcagagcccccatcacctcaggcttctcagttcccttagccgtcttactcaactagccctttcctctccctcagaatttgtgtttgctgcctctatcttgttttttgttttttcttctggggggggtctagaacagtgcctagcacatagtaggcactcaataaatacttgtttgttgaatgtctcctctctctttccactctgggaaacctaggtttctgccattctggtgaccctgtatttccttctggtgcccattccttccatctgtccagttaatatttccctcttaaaaatctccaagacgctgggtctcatccagatcccatttagaaccaaccaggtgctgaaaacccatgtagatnatggccaccatcctaagcccaaagtagaaagtggtagaaggtagtgggtagaagtcactatataagggaggggatgggattttccattctaagttttggagagggaaatccaggctattaaagtcactaatttccaagtatgtccatttaccatctcagcttcaagggaggtgtcagcagtattatctccactttcaatctccctccaagctctactct

SEQ ID NO: 21079 - DNA, 380 bp, Macaca Mulatta
  misc_feature (1)...(380): n = A,T,C or G
agcatctgcaggaagccctgggactgcctgctgggaggggggatgagaatcctgccggaactgttgagggcaaagaggactgggagannnnnnnnnnnnnnnnnnnnnnnnnnnnnnnnnnnnnnnnnnnnnnnnnnnnnnnnnnnnnnnnnnnnnnnnnnnnnnnnnnnnnnnnnnnnnnnnnnnnntgggacgcctggctggcctggacgcaggcctgcaccagttgcacgtccgtctgcacgctttggacacccgtgtggtttagctgacccaggggctgcggcagctgcggaacgcggcgggcgacacccgcgatgccgtgcaagccctgcaggaggcgcagggtcgcgccgagcgcgagcacggccgcttggagg

SEQ ID NO: 21080 - DNA, 307 bp, Macaca Mulatta
attacagtttcttagtctttctttttagagctggcagtaagtccagataatatcagatacaaaggagagtggaaaatctagaaatcaggattcttaagtttttggccaaagaacattgattcattcctttcattcctattggcaattgaccccatttttcaatgatgatgttgtaaaggttaatgttggtaagggaatggggtaaggatgggatttggattatttcctaatcaattttaggaattgtgttagtaattaaagatggctgatgtgtggaaactgatatttttcatcatttatgggggtc

SEQ ID NO: 21081 - DNA, 184 bp, Macaca Mulatta
aggctgctgacttgagtaaaccaatagataaaaggatatacaaaggaacacagcctacttgtcatgacttcaaccacctaacagccacagcagaaagtgtctctctcctagtgggcttttccgcaggccaagtccagcttatagacccaatcaaaaaagaaactagcaaactttttaatgagga

SEQ ID NO: 21082 - DNA, 7496 bp, Macaca Mulatta
  misc_feature (1)...(7496): n = A,T,C or G
agtacagtgctgtggataccaatccactttctctgtatgtcatgcatccattttggaacactatagtaaaggtnnnnnnnnnnnnnnnnnnnnnnnnnnnnnnnnnnnnnnnnnnnnnnnnnnnnnnnnnnnnnnnnnnnnnnnnnnnnnnnnnnnnnnnnnnnnnnnnnnnnnnnnnnnnnnnnnnnnnnnnnnnnnnnnnnnnnnnnnnnnnnnnnnnnnnnnnnnnnnnnnnnnnnnnnnnnnnnnnnnnnnnnnnnnnnnnnnnnnnnnnnnnnnnnnnnnnnnnnnnnnnnnnnnnnnnnnnnnnnnnnnnnnnnnnnnnnnnnnnnnnnnnnnnnnnnnnnnnnnnnnnnnnnnnnnnnnnnnnnnnnnnnnnnnnnnnnnnnnnnnnnnnnnnnnnnnnnnnnnnnnnnnnnnnnnnnnnnnnnnnnnnnnnnnnnnnnnnnnnnnnnnnnnnnnnnnnnnnnnnnnnnnnnnnnnnnnnnnnnnnnnnnnnnnnnnnnnnnnnnnnnnnnnnnnnnnnnnnnnnnnnnnnnnnnnnnnnnnnnnnnnnnnnnnnnnnnnnnnnnnnnnnnnnnnnnnnnnnnnnnnnnnnnnnnnnnnnnnnnnnnnnnnnnnnnnnnnnnnnnnnnnnnnnnnnnnnnnnnnnnnnnnnnnnnnnnnnnnnnnagaagctataaaaataacaccttgaaacacaattcagtctatgaagctgtggttcccttattttctccatgcttgctgttcattttgtctacagcgtggatcctttggtcaccttcagatattttagagctacatcctagagtattctactttatggttggaacagcctttgccaacagnnnntgtcagctgattgtttgccaaatgagtagtacccggtgtccaactttgaattggttgctggttcctctcttcttggtggtcttagtggtaaacctaggagtagcctcttacgttgagagcattctcctgtatacattaacaacggcttttactctggcccacatccattatggagtacgagtggnnnnnnnnnnnnnnnnnnnnnnnnnnnnnnnnnnnnnnnnnnnnnnnnnnnnnnnnnnnnnnnnnnnnnnnnnnnnnnnnnnnnnnnnnnnnnnnnnnnnnnnnnnnnnnnnnnnnnnnnnnnnnnnnnnnnnnnnnnnnnnnnnnnnnnnnnnnnnnnnnnnnnnnnnnnnnnnnnnnnnnnnnnnnnnnnnnnnnnnnnnnnnnnnnnnnnnnnnnnnnnnnnnnnnnnnnnnnnnnnnnnnnnnnnnnnnnnnnnnnnnnnnnnnnnnnnnnnnnnnnnnnnnnnnnnnnnnnnnnnnnnnnnnnnnnnnnnnnnnnnnnnnnnnnnnnnnnnnnnnnnnnnnnnnnnnnnnnnnnnnnnnnnnnnnnnnnnnnnnnnnnnnnnnnnnnnnnnnnnnnnnnnnnnnnnnnnnnnnnnnnnnnnnnnnnnnnnnnnnnnnnnnnnnnnnnnnnnnnnnnnnnnnnnnnnnnnnnnnnnnnnnnnnnnnnnnnnnnnnnnnnnnnnnnnnnnnnnnnnnnnnnnnnnnnnnnnnnnnnnnnnnnnnnnnnnnnnnnnnnnnnnnnnnnnnnnnnnnnnnnnnnnnnnnnnnnnnnnnnnnnnnnnnnnnnnnnnnnnnnnnnnnnnnnnnnnnnnnnnnnnnnnnnnnnnnnnnnnnnnnnnnnnnnnnnnnnnnnnnnnnnnnnnnnnnnnnnnnnnnnnnnnnnnnnnnnnnnnnnnnnnnnnnnnnnnnnnnnnnnnnnnnnnnnnnnnnnnnnnnnnnnnnnnnnnnnnnnnnnnnnnnnnnnnnnnnnnnnnnnnnnnnnnnnnnnnnnnnnnnnnnnnnnnnnnnnnnnnnnnnnnnnnnnnnnnnnnnnnnnnnnnnnnnnnnnnnnnnnnnnnnnnnnnnnnnnnnnnnnnnnnnnnnnnnnnnnnnnnnnnnnnnnnnnnnnnnnnnnnnnnnnnnnnnnnnnnnnnnnnnnnnnnnnnnnnnnnnnnnnnnnnnnnnnnnnnnnnnnnnnnnnnnnnnnnnnnnnnnnnnnnnnnnnnnnnnnnnnnnnnnnnnnnnnnnnnnnnnnnnnnnnnnnnnnnnnnnnnnnnnnnnnnnnnnnnnnnnnnnnnnnnnnnnnnnnnnnnnnnnnnnnnnnnnnnnnnnnnnnnnnnnnnnnnnnnnnnnnnnnnnnnnnnnnnnnnnnnnnnnnnnnnnnnnnnnnnnnnnnnnnnnnnnnnnnnnnnnnnnnnnnnnnnnnnnnnnnnnnnnnnnnnnnnnnnnnnnnnnnnnnnnnnnnnnnnnnnnnnnnnnnnnnnnnnnnnnnnnnnnnnnnnnnnnnnnnnnnnnnnnnnnnnnnnnnnnnnnnnnnnnnnnnnnnnnnnnnnnnnnnnnnnnnnnnnnnnnnnnnnnnnnnnnnnnnnnnnnnnnnnnnnnnnnnnnnnnnnnnnnnnnnnnnnnnnnnnnnnnnnnnnnnnnnnnnnnnnnnnnnnnnnnnnnnnnnnnnnnnnnnnnnnnnnnnnnnnnnnnnnnnnnnnnnnnnnnnnnnnnnnnnnnnnnnnnnnnnnnnnnnnnnnnnnnnnnnnnnnnnnnnnnnnnnnnnnnnnnnnnnnnnnnnnnnnnnnnnnnnnnnnnnnnnnnnnnnnnnnnnnnnnnnnnnnnnnnnnnnnnnnnnnnnnnnnnnnnnnnnnnnnnnnnnnnnnnnnnnnnnnnnnnnnnnnnnnnnnnnnnnnnnnnnnnnnnnnnnnnnnnnnnnnnnnnnnnnnnnnnnnnnnnnnnnnnnnnnnnnnnnnnnnnnnnnnnnnnnnnnnnnnnnnnnnnnnnnnnnnnnnnnnnnnnnnnnnnnnnnnnnnnnnnnnnnnnnnnnnnnnnnnnnnnnnnnnnnnnnnnnnnnnnnnnnnnnnnnnnnnnnnnnnnnnnnnnnnnnnnnnnnnnnnnnnnnnnnnnnnnnnnnnnnnnnnnnnnnnnnnnnnnnnnnnnnnnnnnnnnnnnnnnnnnnnnnnnnnnnnnnnnnnnnnnnnnnnnnnnnnnnnnnnnnnnnnnnnnnnnnnnnnnnnnnnnnnnnnnnnnnnnnnnnnnnnnnnnnnnnnnnnnnnnnnnnnnnnnnnnnnnnnnnnnnnnnnnnnnnnnnnnnnnnnnnnnnnnnnnnnnnnnnnnnnnnnnnnnnnnnnnnnnnnnnnnnnnnnnnnnnnnnnnnnnnnnnnnnnnnnnnnnnnnnnnnnnnnnnnnnnnnnnnnnnnnnnnnnnnnnnnnnnnnnnnnnnnnnnnnnnnnnnnnnnnnnnnnnnnnnnnnnnnnnnnnnnnnnnnnnnnnnnnnnnnnnnnnnnnnnnnnnnnnnnnnnnnnnnnnnnnnnnnnnnnnnnnnnnnnnnnnnnnnnnnnnnnnnnnnnnnnnnnnnnnnnnnnnnnnnnnnnnnnnnnnnnnnnnnnnnnnnnnnnnnnnnnnnnnnnnnnnnnnnnnnnnnnnnnnnnnnnnnnnnnnnnnnnnnnnnnnnnnnnnnnnnnnnnnnnnnnnnnnnnnnnnnnnnnnnnnnnnnnnnnnnnnnnnnnnnnnnnnnnnnnnnnnnnnnnnnnnnnnnnnnnnnnnnnnnnnnnnnnnnnnnnnnnnnnnnnnnnnnnnnnnnnnnnnnnnnnnnnnnnnnnnnnnnnnnnnnnnnnnnnnnnnnnnnnnnnnnnnnnnnnnnnnnnnnnnnnnnnnnnnnnnnnnnnnnnnnnnnnnnnnnnnnnnnnnnnnnnnnnnnnnnnnnnnnnnnnnnnnnnnnnnnnnnnnnnnnnnnnnnnnnnnnnnnnnnnnnnnnnnnnnnnnnnnnnnnnnnnnnnnnnnnnnnnnnnnnnnnnnnnnnnnnnnnnnnnnnnnnnnnnnnnnnnnnnnnnnnnnnnnnnnnnnnnnnnnnnnnnnnnnnnnnnnnnnnnnnnnnnnnnnnnnnnnnnnnnnnnnnnnnnnnnnnnnnnnnnnnnnnnnnnnnnnnnnnnnnnnnnnnnnnnnnnnnnnnnnnnnnnnnnnnnnnnnnnnnnnnnnnnnnnnnnnnnnnnnnnnnnnnnnnnnnnnnnnnnnnnnnnnnnnnnnnnnnnnnnnnnnnnnnnnnnnnnnnnnnnnnnnnnnnnnnnnnnnnnnnnnnnnnnnnnnnnnnnnnnnnnnnnnnnnnnnnnnnnnnnnnnnnnnnnnnnnnnnnnnnnnnnnnnnnnnnnnnnnnnnnnnnnnnnnnnnnnnnnnnnnnnnnnnnnnnnnnnnnnnnnnnnnnnnnnnnnnnnnnnnnnnnnnnnnnnnnnnnnnnnnnnnnnnnnnnnnnnnnnnnnnnnnnnnnnnnnnnnnnnnnnnnnnnnnnnnnnnnnnnnnnnnnnnnnnnnnnnnnnnnnnnnnnnnnnnnnnnnnnnnnnnnnnnnnnnnnnnnnnnnnnnnnnnnnnnnnnnnnnnnnnnnnnnnnnnnnnnnnnnnnnnnnnnnnnnnnnnnnnnnnnnnnnnnnnnnnnnnnnnnnnnnnnnnnnnnnnnnnnnnnnnnnnnnnnnnnnnnnnnnnnnnnnnnnnnnnnnnnnnnnnnnnnnnnnnnnnnnnnnnnnnnnnnnnnnnnnnnnnnnnnnnnnnnnnnnnnnnnnnnnnnnnnnnnnnnnnnnnnnnnnnnnnnnnnnnnnnnnnnnnnnnnnnnnnnnnnnnnnnnnnnnnnnnnnnnnnnnnnnnnnnnnnnnnnnnnnnnnnnnnnnnnnnnnnnnnnnnnnnnnnnnnnnnnnnnnnnnnnnnnnnnnnnnnnnnnnnnnnnnnnnnnnnnnnnnnnnnnnnnnnnnnnnnnnnnnnnnnnnnnnnnnnnnnnnnnnnnnnnnnnnnnnnnnnnnnnnnnnnnnnnnnnnnnnnnnnnnnnnnnnnnnnnnnnnnnnnnnnnnnnnnnnnnnnnnnnnnnnnnnnnnnnnnnnnnnnnnnnnnnnnnnnnnnnnnnnnnnnnnnnnnnnnnnnnnnnnnnnnnnnnnnnnnnnnnnnnnnnnnnnnnnnnnnnnnnnnnnnnnnnnnnnnnnnnnnnnnnnnnnnnnnnnnnnnnnnnnnnnnnnnnnnnnnnnnnnnnnnnnnnnnnnnnnnnnnnnnnnnnnnnnnnnnnnnnnnnnnnnnnnnnnnnnnnnnnnnnnnnnnnnnnnnnnnnnnnnnnnnnnnnnnnnnnnnnnnnnnnnnnnnnnnnnnnnnnnnnnnnnnnnnnnnnnnnnnnnnnnnnnnnnnnnnnnnnnnnnnnnnnnnnnnnnnnnnnnnnnnnnnnnnnnnnnnnnnnnnnnnnnnnnnnnnnnnnnnnnnnnnnnnnnnnnnnnnnnnnnnnnnnnnnnnnnnnnnnnnnnnnnnnnnnnnnnnnnnnnnnnnnnnnnnnnnnnnnnnnnnnnnnnnnnnnnnnnnnnnnnnnnnnnnnnnnnnnnnnnnnnnnnnnnnnnnnnnnnnnnnnnnnnnnnnnnnnnnnnnnnnnnnnnnnnnnnnnnnnnnnnnnnnnnnnnnnnnnnnnnnnnnnnnnnnnnnnnnnnnnnnnnnnnnnnnnnnnnnnnnnnnnnnnnnnnnnnnnnnnnnnnnnnnnnnnnnnnnnnnnnnnnnnnnnnnnnnnnnnnnnnnnnnnnnnnnnnnnnnnnnnnnnnnnnnnnnnnnnnnnnnnnnnnnnnnnnnnnnnnnnnnnnnnnnnnnnnnnnnnnnnnnnnnnnnnnnnnnnnnnnnnnnnnnnnnnnnnnnnnnnnnnnnnnnnnnnnnnnnnnnnnnnnnnnnnnnnnnnnnnnnnnnnnnnnnnnnnnnnnnnnnnnnnnnnnnnnnnnnnnnnnnnnnnnnnnnnnnnnnnnnnnnnnnnnnnnnnnnnnnnnnnnnnnnnnnnnnnnnnnnnnnnnnnnnnnnnnnnnnnnnnnnnnnnnnnnnnnnnnnnnnnnnnnnnnnnnnnnnnnnnnnnnnnnnnnnnnnnnnnnnnnnnnnnnnnnnnnnnnnnnnnnnnnnnnnnnnnnnnnnnnnnnnnnnnnnnnnnnnnnnnnnnnnnnnnnnnnnnnnnnnnnnnnnnnnnnnnnnnnnnnnnnnnnnnnnnnnnnnnnnnnnnnnnnnnnnnnnnnnnnnnnnnnnnnnnnnnnnnnnnnnnnnnnnnnnnnnnnnnnnnnnnnnnnnnnnnnnnnnnnnnnnnnnnnnnnnnnnnnnnnnnnnnnnnnnnnnnnnnnncctgtaatcccagcactttgggannnnnnnnnnnnnnnnnnnnnnnnnnnnnnnnnnnnnnnnnnnnnnnnnnnnnnnnnnnnnnnnnnnnnnnnnnnnnnnnnnnnnnnnnnnnnnnnnnnnnnnnnnnnnnnnnnnnnnnnnnnnnnnnnnnnnnnnnnnnnnnnnnnnnnnnnnnnnnnnnnnnnnnnnnnnnnnnnnnnnnnnnnnnnnnnnnnnnnnnnnnnnnnnnnnnnnnnnnnnnnnnnnnnnnnnnnnnnnnnnnnnnnnnnnnnnnnnnnnnnnnnnnnnnnnnnnnnnnnnnnnnnnnnnnnnnnnnnnnnnnnnnnnnnnnnnnnnnnnnnnnnnnnnnnnnnnnnnnnnnnnnnnnnnnnnnnnnnnnnnnnnnngtttagataactttcctccctagaggagcattcaggagataaagacctatccacatgtaatgatagaatcttttcacaaatgtgccaagaaagcaaaattcattattgaactctaaatttctgggnnnnnnnnnnnnnnnnnagcattttctctgggtaaagggaaaggcaatgaataactgccaacatgtaaactccctgctgcnnnnnnnnnnnnnnnnnnnccatctaacataatacggtacatttgtagctagttgtagaaaaagaaattggtgtctttctcagtaaggttccatgccctgtcactaagaataggtggcaggaatcatggccaaatcaaatatatgagttgtttagcttggtcctgttgcagttggctttctgtagtgttctgaaacaagaggacgattccattccttctcaggaacctagaaacaacaccgcttgagcaactggagtatgtttgctgcaagcagaatcttttggggagagggagagtagtttaattcaagtagtttaattgaacatattagtcattcgtctgggacttgctgtgttcatagtagcaatgtatgtaccatttattttatctggttaggtgtgatgtgtgtatatgcctatttaatatgtacgcatatattctctacataggtatgtatgatatattcatatatacctgcagtccacttgattatcagcaaaatggtcagcctttattagattgtttcttaatgtggacttaatctgcatgtggcccttactctgaagcctctttctgatctggagccgcagtctgtctgccagttcatctcagtcctcgagaaaggccctttaaatatgtcacttccccattttcctttaaccatgggttttgggagccagaaagagctttgagaaagatgactgcttccaccagggtggaggcttccaggtctgcatgatg

SEQ ID NO: 21083 - DNA, 1353 bp, Macaca Mulatta
  misc_feature (1)...(1353): n = A,T,C or G
atgaggcagtctctcctattcctgaccagcgtggttcctttcgtgctggcgccgcgacctccggacgacccgagcttcggcccccaccagagactcnnnnnnnnnnnnnnnnnnnnnnnnnnnnnnnnnnnnnnnnnnnnnnnnnnnnnnnnnnnnnnnnnnnnnnnnnnnnnnnnnnnnnnnnnnnnnnnnnnnnnnnnnnnnnnnnnnnnnnnnnnnnnnnnnnnggcattttaaattatacctgacatcaagtactgaacgtttttcacaaaatttcaaggtcgtggtggtggatggtaaaaatgaaagcgagtacactgtgaaatggcaggacttcttcactggacacgtggttggtnnnnnnnnnnnnnnnnnnnnnnnnnnnnnnnnnnnnnnnnnnnnnnnnnnnnnnnnnnnnnnnnnnnnnnnnnnnnnnnnnnnnnnnnnnnnnnnnnnnnnnnnnnnnnnnnnnnnnnnnnnnnnnnnnnnnnnnnnnnnnnnnnnnnnnnnnnnnnnnnnnnnnnnnnnnnnnnnnnnnnnnnnnnnnnnnnnnnnnnnnnnnnnnnnnnnnnnnnnnnnnnnnnnnnnnnnnnnnnnnnnnnnnnnnnnnnnnnnnnnnnnnnnnnnnnnnnnnnnnnnnnnnnnnnnnnnnnnnnnnnnnnnnnnnnnnnnnnnnnnnnnnnnnnnnnnnnnnnnnnnnnnnnnnnnnnnnnnnnnnnnnnnnnnnnnnnnnnnnnnnnnnnnnnnnnnnnnnnnnnnnnnnnnnnnnnnnnnnnnnnnnnnnnnnnnnnnnnnnnnnnnnnnnnnnnnnnnnnnnnnnnnnnnnnnnnnnnnnngattcgcattctcaagtctccacaagaggtaaaacctggtgaaaagcattacaatatggcaaaaagttacccaaatgaagaaaaggatgcttgggatgtgaagatgttgctagagnagcaatttagctttgatatagctgaggaagcatctaaagtttgcttggcacaccttttcacataccaagattttgatatgggaactcttggattagcttatgttggctctcccagagcaaacagccatggaggcgtttgtccaaaggngcttattatagcccagttgggaagaaaaatatctatttgaatagtggtttgacgagcacaaagaattatggtaaaaccatccttacaaaggnnnnaaggaagctgacctggttacaactcatgaattgggacacaattttggagcagaacatgatccggatggtctagcagaatgtgccccgaatgaggaccagggaggaaaatatgtcatgtatcccatagctgtgagtggcgatcacgagaacaataa

SEQ ID NO: 21084 - DNA, 838 bp, Macaca Mulatta
cccgggaggctctgagtgtggccctggaggaggcccacgcctggagggtgaggcctgctgcctgtgtgttggtgctggggacccactctctgggtgggatccctgaaataggagggaggaagaggggcagggggaggccccctggctggggagaagtgctctaccttcctgaggtgctgggtaatgcccgcaagcacaccccgactctcccatatctcccactgctccacagaagaagacaaaccaccgcctcagcctgcctacgccggcctccggcacgagcctcagtgcaggtgtgtgatggccctgagtcctggggcaggggctgcctcgacttctctttgcattctcagtggggagcagatggtataggggtcccctccccaaagtgactgcccatgtccttccccaccgcagccatccaccgcacccaactctggttccacgggcgcatttcccgtgaggagagccagcggcttattggacagcagggcttggtagacgggtaaggggcagggccgggcaacagacccagggataagagagactggggtccaggtggcagccatgggtcctcgggtaatgctgccctatctcctgtcttctggcagcctgttcctggtccgggagagtcagcggaacccccagggctttgtcctctctttgtgccacctgcagaaagtgaagcattatctcatcctgccggtgagcttctctgcgtccccggagtcctgcaatgagacacaggactcccagcaacctgtcctcctcaccaggcccctccagaggctccctggcccctagtgcgtctcccttttccctgcccaagaagtgggag

SEQ ID NO: 21085 - DNA, 2557 bp, Macaca Mulatta
  misc_feature (1)...(2557): n = A,T,C or G
atggtgatggagttatgtgcagcaggttcggtcactgatgtagtgagaatgaccagaaatcagagtttaaaagaagattggattgcttatatctgccgagaaatccttcaggnnnagggcttagctcaccttcacgcacaccgagtaattcaccgggacatcaaaggtcagaatgtgctgctgactcataatgctgaagtaaaactggnnnnnnnnnnnnnnnnnnnnnnnnnnnnnnnnnnnnnnnnnnnnnnnnnnnnnnnnnnnnnnnnnnnnnnnnnnnnnnnnnnnnnnnnnnnnnnnnnnnnnnnnnnnnnnnnnnnnnnnnnnnnnnnnnnnnnnnnnnnnnnnnnnnnnnnnnnnnnnnnnnnnnnnnnnnnnnnnnnnnnnnnnnnnnnnnnnnnnnnnnnnnnnnnnnnnnnnnnnnnnnnnnnnnnnnnnnnnnnnnnnnnnnnnnnnnnnnnnnnnnnnnggtcccgtaagttccacaatttcatggaaaagtgtacgataaaaaatttcctgtttcgtcctacttctgcaaacatgcttcatcgcccatttaataaagaaataaaaaatgaacgacatgttgttgagtcattaacgaggcatcttactggaatcatnnnnnnnnnnnnnnnnnnnnnnnnnnnnnnnnnnnnnnnnnnnnnnnnnnnnnnnnnnnnnnnnnnnnnnnnnggtccaggcacttcatcagctacagggagcagccagggtattcatgccactgcaggccctggacagtgcacctgggcctctaaaggggcaggctcaggcacctcaacgactacaaggggcagctcgggtgttcatgccactacaggctcaggtgaaggctaaggcctctaaacctctacaaatgcagattaaggcacctccacgactacggagggcagccagggtgctcatgccactacaggcacaggttagggcacctaggcttttgcaggtacaggcccaggtatccaaaaagcagcaggcccagacccagacatcagaaccacaagatctggaccaagtaccagaggaatttcagggtcaagatcaggtacctgaacaacaaaggcagggccagacccctgaacaacagcagaggcacgaccaggtgcctgaacaagagctggagcagaaccaggaacctgaacagccagaggtacgggaacaggctgctgagcctgcacaggcagagactgaggcagaggaacctgagtcattacgagtaaatgcccagatattcctgcccctgctatcacaggatcaccatgtgctgttgccactacatttggatactcaggtgctcattccagtagagggtcaaactgaaagatcacctcaggcacaggnnnnnnnnnnnnnnnnnnnnnnnnnnnnnnnnnnnnnnnnnnnnnnnnnnnnnnnnnnnnnnnnnnnnnnnnnnnnnnnnnnnnnnnnnnnnnnnnnnnnnnnnnnnnnnnnnnnnnnnnnnnnnnnnnnnnnnnnnnnnnnnnnnnnnnnnnnnnnnnnnnnnnnnnnnnnnnnnnnnnnnnnnnnnnnnnnnnnnnnnnnnnnnnnnnnnnnnnnnnnnnnnnnnnnnnnnnnnnnnnnnnnnnnnnnnnnnnnnnnnnnnnnnnnnnnnnnnnnnnnnnnnnnnnnnnnnnnnnnnnnnnnnnnnnnnnnnnnnnnnnnnnnnnnnnnnnnnnnnnnnnnnnnnnnnnnnnnnnnnnnnnnnnnnnnnnnnnnnnnnnnnnnnnnnnnnnnnnnnnnnnnnnnnnnnnnnnnnnnnnnnnnnnnnnnnnnnnnnnnnnnnnnnnnnnnnnnnnnnnnnnnnnnnnnnnnnnnnnnnnnnnnnnnnnnnnnnnnnnnnnnnnnnnnnnnnnnnnnnnnnnnnnnnnnnnnnnnnnnnnnnnnnnnnnnnnnnnnnnnnnnnnnnnnnnnnnnnnnnnnnnnnnnnnnnnnnnnnnnnnnnnnnnnnnnnnnnnnnnnnnnnnnnnnnnnnnnnnnnnnngagtcaatttgctgttgggaacccgatctaatctatatctgatggacagaagtggaaaggctgacattactaaacttataaggcgaagaccattccgccagattcaagtcttagagccactcaatttgctgattaccatctcaggtnnnnnnnnnnnnnnnnnnnnnnnnnnnnnnnnnnnnnnnnnnnnnnnnnnnnnnnnnnnnnnnnnnnnnnnnnnnnnnnnnnnnnnnnnnnnnnnnnnnnnnnnnnnnnnnnnnnnnnnnnnnnnnnnnnnnnnnnnnnnnnnnnnnnnnnnnnnnnnnnnnnnnnnnnnnnnnnnnnnnnnnnnnnnnnnnnnnnnnnnnnnnnnnnnnnnnnnnnnnnnnnnnnnnnnnnnnnnnnnnnnnnnnnnnnnnnnnnnngtatttccaacacttgatcataagccagtgacagttgacctggctattggttctgaaaaaagactaaagattttcttcagctcagcagatggatatcacatcattgatgcagaatctgaggttatgtctgatgtgaccctgccaa

SEQ ID NO: 21086 - DNA, 343 bp, Macaca Mulatta
tgcaacattaacgattttactcagacatttttaaacacattcagatgtaccaagggcctttgctaagaatggaaaaaatcctgtgttcatctgtgaccaatttcatattcgtctatcgcatttaaatgtgtcatcattttagagattgtatcctggcggtgtgatgggcaagtggactatcaattctggtgctagtttttcctttttcactcaggcaggttcctaggatttttctaggacaaatttctcttcctagagaaattcctaggggatttctaaaggatttttctaagggaaaatgggtgacatctttcagaggtgttatttatttccttgaaaggta

SEQ ID NO: 21087 - DNA, 139 bp, Macaca Mulatta
agtctgccccgaagactgggaattttatcaagaaagatgttttctcttacctacttctgaatcatcttggaatgaaagcagggacttttgcaaaagaaaaggatccacattggcaattgtcaacacaccagagaaactg

SEQ ID NO: 21088 - DNA, 1894 bp, Macaca Mulatta
  misc_feature (1)...(1894): n = A,T,C or G
atggcctcctgcccagactctgataatagctgggtgcttgctggctccgannnnnnnnnnnnnnnnnnnnnnnnnnnnnnnnnnnnnnnnnnnnnnnnnnnnnnnnnnnnnnnnnnnnnnnnnnnnnnnnnnnnnnnnnnnnnnnnnnnnnnnnnnnnnnnnnnnnnnnnnnnnnnnnnnnnnnnnnnnnnnnnnnnnnnnnnnnnnnnnnnnnnnnnnnnnnnnnnnnnnnnnnnnnnnnnnnnnnnnnnnnnnnnnnnnnnnnnnnnnnnnnnnnnnnnnnnnnnnnnnnnnnnnnnnnnnnnnnnnnnnnnnnnnnnnnnnnnnnnnnnnnnnnnnnnnnnnnnnnnnnnnnnnnnnnnnnnnnnnnnnnnnnnnnnnnnnnnnnnnnnnnnnnnnnnnnnnnagcttggatcagagaggagggccgctgctccagcagtgaggatgacaccgacgtggacgtggagggtctgcggagacggcggggccgggaggccggcgcacctcagcccgtggcgcccctggctgtggagacccaggccgggggggagggtgcaggcggggagctgggcatctccctcaacatgtgccgccacggggccttggttctnnnnnnnnnnnnnnnnnnnnnnnnnnnnnnnnnnnnnnnnnnnnnnnnnnnnnnnnnnnnnnnnnnnnnnnnnnnnnnnnnnnnnnnnnnnnnnnnnnnnnnnnnnnnnnnnnnnnnnnnnnnnnnnnnnnnnnnnnnnnnnnnnnnnnnnnnnnnnnnnnnnnnnnnnnnnnnnnnnnnnnnnnnnnnnnnnnnnnnnnnnnnnnnnnnnnnnnnnnnnnnnnnnnnnnnnnnnnnnnnnnnnnnnnnnnnnnnnnnnnnnnnnnnnnnnnnnnnnnnnnnnnnnnnnnnnnnnnnnnnnnnnnnnnnnnnnnnnnnnnnnnnnnnnnnnnnnnnnnnnnnnnnnnnnnnnnnnnnnnnnnnnnnnnnnnnnnnnnnnnnnnnnnnnnnnnnnnnnnnnnnnnnnnnnnnnnnnnnnnnnnnnnnnnnnnnnnnnnnnnnnnnnnnnnnnnnnnnnnnnnnnnnnnnnnnnnnnnnnnnnnnnnnnnnnnnnnnnnnnnnnnnnnnnnnnnnnnnnnnnnnnnnnnnnnnnnnnnnnnnnnnnnnnnnnnnnnnnnnnnnnnnnnnnnnnnnnnnnnnnnnnnnnnnnnnnnnnnnnnnnnnnnnnnnnnnnnnnnnnnnnnnnnnnnnnnnnnnnnnnnnnnnnnnnnnnnnnnnnnnnnnnnnnnnnnnnnnnnnnnnnnnnnnnnnnnnnnnnnnnnnnnnnnnnnnnnnnnnnnnnnnnnnnnnnnnnnnnnnnnnnnnnnnnnnnnnnnnnnnnnnnnnnnnnnnnnnnnnnnnnnnnnnnnnnnnnnnnnnnnnnnnnnnnnnnnnnnnnnnnnnnnnnnnnnnnnnnnnnnnnnnnnnnnnnnnnnnnnnnnnnnnnnnnnnnnnnnnnnnnnnnnnnnnnnnnnnnnnnnnnnnnnnnnnnnnnnnnnnnnnnnnnnnnnnnnnnnnnnnnnnnnnnnnnnnnnnnnnnnnnnnnnnnnnnnnnnnnnnnnnnnnnnnnnnnnnnnnnnnnnnnnnnnnnnnnnnnnnnnnnnnnnnnnnnnnnnnnnnnnnnnnnnnnnnnnnnnnnnnnnnnnnnnnnnnnnnnnnaaggagctacccctctcgcctgctttctttggtgaggacggcatcttccgtcatgaccgcctccgcttccgggattttgtggatgccctggaggacagcttggaggaggtggctgtgcaacagacaggtgatgatgatgaagtagatgactttgaggacttcatcttcagccacttctttggagacaaagcactgaagaagagg

SEQ ID NO: 21089 - DNA, 286 bp, Macaca Mulatta
atgctggcagtgctggcctgtgcccctcacgtgtggtcgggttgggtgagggcagctgggaggactccaggcctgggctcagttcttctctaaatgaataccttctggacaaagtcatgggaaatgggccctgctgtcccatggcttcccagtgtgaaactcgtgggtcctgagcccaccgagcctgcctgcctgaccctgctccccgtgttgcccttggccgaggcacttgtgtctccccgagtgcagcagcagcactccctcccagcctgtgtgcgtgccgagt

SEQ ID NO: 21090 - DNA, 267 bp, Macaca Mulatta
  misc_feature (1)...(267): n = A,T,C or G
gcactataagaccgacttcgacaagaataagatctggtatgagcaccggctcattgatgacatggtggctcaggtcctcaagtcttcgggcggctttgtgtgggcctgcaagaactatgacggagatgtgcagtcagacatcctggcccaggngctttggctctcttggcctgatgacgtctgttctggtctgccctgatgggaagacgattgaggctgaggctgctcatgggaccgtcacccgccactatcgggagcaccagaagg

SEQ ID NO: 21091 - DNA, 464 bp, Macaca Mulatta
  misc_feature (1)...(464): n = A,T,C or G
aggctccgcaggcagcagcagaacgctcccctcttcgggaagatccgcagtgctcgctttggcaccgaggaggccggggatggagccagcgacctggacgaggacgaggacctgcaaatccaggtggcctagagcttcctgtggctggcaggatgggccaccccacacctgcccagggtccaggctaaccagccactcaaactgatgcagcgcctaggctcactctgggaccagtccctgccacagccgactttcttctctcccagggatggtgtcaacagtcccacttacaaacgccctgtggaaaggaagcctatgtnnnnnnnnnnnnnnnnnnnnnnnnnnnnnnnnnnnnnnnnnnncaggagtctttggacccatttggttttataaatacaggacagctccaaggcccagtccaggtgacctcacctacccaggacttcatgcagggctggccatgt

SEQ ID NO: 21092 - DNA, 790 bp, Macaca Mulatta
  misc_feature (1)...(790): n = A,T,C or G
gatgatgggaagctctcatttgaggaattccagaattactttgctgatggggttctcagcccgggggagctgcaggaactgttcagcggcattgatgggcatnnnnnnnnnnnnnnnnnnnnnnnnnnnnnnnngactacttcgcagagcacctgggtgtctaccggccggtgctggctgcattggaatcgctgaaccgtgcagtgctcgctgccatggatgccaccaagctgnnnnnnnnnnnnnnnnnnnnnnnnnnnnnnnnnnnnnnnnnnnnnnnnnnnnnnnnnnnnnnnnnnnnnnnnnnnnnnnnnnnnnnnnnnnnnnnnnnnnnnnnnnnnnnnnnnnnnnnnnnnnnnnnnnnnnnnnnnnnnnnnnnnnnnnnnnnnnnnnnnnnnnnnnnnnnnnnnnnnnnnnnnnnnnnnnnnnnnnnnnnnnnnnnnnnnnnnnnnnnnnnnnnnnnnnnnnnnnnnnnnnnnnnnnnnnnnnnnnnnnnnnnnnnnnnnnnnnnnnnnnnnnnnnnnnnnnnnnnnnnnnnnnnnnnnnnnnnnnnnnnnnnnnnnnnnnnnnnnnnnnnnnnnnnnnnnnnnnnnnnnnnnnnnnnnnnnnnnnnnnnnnnnncacatcctcgtggcccagaggcaggtccaggtggcagaggaaggcctgcaggacttccaccgagccctgcgctgctacgtggacttcacaggggcccagagccattgtctgcantgtgtctgcccagaacatgccggacggtgcctccttcaccctgtatgagttctgg

SEQ ID NO: 21093 - DNA, 2578 bp, Macaca Mulatta
  misc_feature (1)...(2578): n = A,T,C or G
aaaagataaacgctttcgatctgaacaaatagaaatcgtgagcactggaatattaatgagtttgtctaatattcttaaaatgacttctcctcaccaagtggttaaagatcctttctatgtaatagaatctttatcagacacaatactggctaataaagtgccagggaacaaaaccacctcaatgagaacccccaatttcaacatgtatgtcaagaaagttgaaaagtggggtgttacccaggtcttcagaaatgagaaacactgcagaaattgtttttatccaacactcaatgtgagcagtgttcctggtctctctgtgaatgctcccatttccacaatgttttgtgatttcacaaatgacccctttccttggttaaatgatcaggaaaacacttcggtacaggtgtttggattcagaatgacaggagttgcagataatggtagtgtgctagagatcacacctgatgtagcggaagtgtacctcgtcaggaaaaacttgacctttgcagcttttaatctcacagtgggacccaacggagatgttgatgggtcctcaaagacgacgacaggtgggtttagctttcaagtggacagcagagtgcttagggaggtgctggtccacatagtgacagaagtgatggtgctgttcatggtgttggtgtacacaggcagtcagatcactcccacagcactggtcnnnnnnnnnnnnnnnnnnnnnnnnnnnnnnnnnnnnnnnnnnnnnnnnnnnnnnnnnnnnnnnnnnnnnnnnnnnnnnnnnnnnnnnnnnnnnnnnnnnnnnnnnnnnnnnnnnnnnnnnnnnnnnnnnnnnnnnnnnnnnnnnnnnnnnnnnnnnnnnnnnnnnnnnnnnnnnnnnnnnnnnnnnnnnnnnnnnnnnnnnnnnnnnnnnnnnnnnnnnnnnnnnnnnnnnnnnnnnnnnnnnnnnnnnnnnnnnnnnnnnnnnnnnnnnnnnnnnnnnnnnnnnnnnnnnnnnnnnnnnnnnnnnnnnnnnnnnnnnnnnnnnnnnnnnnnnnnnnnnnnnnnnnnnnnnnnnnnnnnnnnnnnnnnnnnnnnnnnnnnnnnnnnnnnnnnnnnnnnnnnnnnnnnnnnnnnnnnnnnnnnnnnnnnnnnnnnnnnnnnnnnnnnnnnnnnnnnnnnnnnnnnnnnnnnnnnnnnnnnnnnnnnnnnnnnnnnnnnnnnnnnnnnnnnnnnnnnnnnnnnnnnnnnnnnnnnnnnnnnnnnnnnnnnnnnnnnnnnnnnnnnnnnnnnnnnnnnnnnnnnnnnnnnnnnnnnnnnnnnnnnnnnnnnnnnnnnnnnnnnnnnnnnnnnnnnnnnnnnnnnnnnnnnnnnnnnnnnnnnnnnnnnnnnnnnnnnnnnnnnnnnnnnnnnnnnnnnnnnnnnnnnnnnnnnnnnnnnnnnnnnnnnnnnnnnnnnnnnnnnnnnnnnnnnnnnnnnnnnnnnnnnnnnnnnnnnnnnnnnnnnnnnnnnnnnnnnnnnnnnnnnnnnnnnnnnnnnnnnnnnnnnnnnnnnnnnnnnnnnnnnnnnnnnnnnnnnnnnnnnnnnnnnnnnnnnnnnnnnnnnnnnnnnnnnnnnnnnnnnnnnnnnnnnnnnnnnnnnnnnnnnnnnnnnnnnnnnnnnnnnnnnnnnnnnnnnnnnnnnnnnnnnnnnnnnnnnnnnnnnnnnnnnnnnnnnnnnnnnnnnnnnnnnnnnnnnnnnnnnnnnnnnnnnnnnnnnnnnnnnnnnnnnnnnnnnnnnnnnnnnnnnnnnnnnnnnnnnnnnnnnnnnnnnnnnnnnnnnnnnnnnnnnnnnnnnnnnnnnnnnnnnnnnnnnnnnnnnnnnnnnnnnnnnnnnnnnnnnnnnnnnnnnnnnnnnnnnnnnnnnnnnnnnnnnnnnnnnnnnnnnnnnnnnnnnnnnnnnnnnnnnnnnnnnnnnnnnnnnnnnnnnnnnnnnnnnnnnnnnnnnnnnnnnnnnnnnnnnnnnnnnnnnnnnnnnnnnnnnnnnnnnnnnnnnnnnnnnnnnnnnnnnnnnnnnnnnnnnnnnnnnnnnnnnnnnnnnnnnnnnnnnnnnnnnnnnnnnnnnnnnnnnnnnnnnnnnnnnnnnnnnnnnnnnnnnagttgcaaaaccggcatttaaaggaaagcccaggtttccaaaggccttctcttaaggcaaccttcaaaacccaagcacaggcatagaaaagcacaaatcaagaccgcagagacccccaggccaaatacaaattccaataacaacatagaagacaatcaggatgtccactccgaagagcatccttcccaacaggttctccagcagcttaagaaaaaaccccagaatcgtcctgccttggtggtgtgtttatgttgcatggtttttggtttttgctacttctagcatatcctcattcttcatcgtattttatggactgacttacggctatgacaagtcaatggaatggctctttgcatctttttgttcattctgtcagtcagtttttctggtgcagccatctaaaattatactcttgtcaggcttcagaacaaataaactcaagtattgcaaaaacctttcgtggtcaacc

SEQ ID NO: 21094 - DNA, 707 bp, Macaca Mulatta
gtacttccgagaagtggcacagagtttgttgtggcccagcacaggatactgatcttctgtcagctgaaaagcatgcttgatatagtagagcatgatctcctcaaacctcacttgccctctgtcacttacttgagattagatggcagcatacctcctggtcagaggcattccattgtttcccggtttaataatgacccatctatagacgttctgttacttaccactcacgttggtggcctgggacttaatttgacaggcgccgacacggtagtctttgtggagcatgactggaatcctatgcgagatctacaagccatggaccgggcccatcgcattgggcagaaacgtgtggttaacgtataccgattgataaccagaggaacattggaagaaaaaataatggggttgcagaaattcaagatgaacatagcgaataccgttattagccaagagaattctagtttgcagagcatggggactgatcagcttcttgatctgtttactcttgataaggatggcaaagcagaaaaagctgacacctctacttctgggaaagcaagtatgaaatcaattcttgaaaacctgagtgatctttgggatcaagagcagtatgattcagagtacagcctggaaaattttatgcattctctcaagtaactatcacatattgtaaatgccattgctgctagttcagttactttctgctg

SEQ ID NO: 21095 - DNA, 787 bp, Macaca Mulatta
  misc_feature (1)...(787): n = A,T,C or G
tgaaacccttttaaatcagaagaggcctcagtacattaaagccaaagaaaacacttctcaccaccttaagaaattagatgtggctaagaaaacaataaaggacagcgaaaaacaatgttctaaacaggaggatgatataaaagccctggagacagagctggctgatttagatggtgcatggagaagtttcgaaaaacagattgaggaagaaattttacgtaaagggcgagacattgaactggaagccagtcagnnnnnnnnnnnnnnnnnnnnnnnnnnnnnnnnnnnnnnnnnnnnnnnnnnnnnnnnnnnnnnnnnnnnnnnnnnnnnnnnnnnnnnnnnnnnnnnnnnnnnnnnnnnnnnnnnnnnnnnnnnnnnnnnnnnnnnnnnnnnnnnnnnnnnnnnnnnnnnnnnnnnnnnnnnnnnnnnnnnnnnnnnnnnnnnnnnnnnnnnnnnnnnnnnnnnnnnnnnnnnnnnnnnnnnnnnnnnnnnnnnnnnnnnnnnnnnnnnnnnnnnnnnnnnnnnnnnnnnnnnnnnnnnnnnnnnnnnnnnnnnnnnnnnnnnnnnnnnnnnnnnnnnnnnnnnnnnnnnnnnnnnnnnnnnnnnnnnnnnnnnnnnnnnnnnnnnnnnnnnnnnnnnnnnnnnnnnnnnnnnnnnnnnnnnnnnnnnnnnnnnnnnnnnnnntttggaagactacttgacctgtgtcatcctattcataagaaataccagctggctgttactaagctttttggccggtacattattgccattgttgtagcctctg

SEQ ID NO: 21096 - DNA, 1314 bp, Macaca Mulatta
  misc_feature (1)...(1314): n = A,T,C or G
tagacgatggctgtgggcctggaatcgcaagcccaggcgtctctgcagccagagcctgaagaactcctgattgtgaaactggaagaggactcatggggatcagaatccaaactccggggagaaggaccgcgactctgtctcggccccagaggctccccgccagcgcttcagcaaattccaatacagggatgcagctggaccccatgaggccttcagccagctctgggctctttgctgtcattggctgaggccggagatccgtctcaaagagcagatcctggagctgctggtgctggagcagttcctgactatcttgcctagggaggtccagacctgggtgcagtcacgccaccctgagagtggtgaggaggctgtggccctggtggaggattggcaccgagagaccaggactgcaggacagnnnnnnnnnnnnnnnnnnnnnnnnnnnnnnnnnnnnnnnnnnnnnnnnnnnnnnnnnnnnnnnnnnnnnnnnnnnnnnnnnnnnnnnnnnnnnnnnnnnnnnnnnnnnnnnnnnnnnnnnnnnnnnnnnnnnnnnnnnnnnnnnnnnnnnnnnnnnnnnnnnnnnnnnnnnnnnnnnnnnnnnnnnnnnggagttccagtttcaaaaccaagtatcacctctgagaaagagcaaggaccagagttttggggtctaagtcttacaaattctgggaaaaggagcactgcagcttacagcctggataatgagccagctcaggcattgacctggagggattcaagagcctgggaggaacaataccagtgggatgtggaggacatgaaggtatcaggtgttcactggggctatgaggagaccaagactttcctggcaattttgagcgagtctcctttctctgaaaagctccggacttgtcaccagaatcgccaggtatatcgggccatagcagagcggctaagggcaaggggcttcctgcggacactggagcaatgtcgctacagggtcaaaaacctcctacggaattaccggaaagccaagagcagccacccaccaggtacctgccccttctatgaggagctggaggccctggtcagggctcggacagccatcagagccacagatggcccaggagaggccgtggcactccccaggctcggggatagtgatgcagagatggatgagcaggaggaagggggctgggagcctgaagaaatggcagaagactgtaacggtgctggcctggtcactgatgagtctacccaggggcccaggattgcaggggccccagccctcttccagagccgtattgtaagaacatcggggtttagtcagat

SEQ ID NO: 21097 - DNA, 831 bp, Macaca Mulatta
  misc_feature (1)...(831): n = A,T,C or G
agtttccacctggatgtttgaggttgtgtagatgtggccggcacccttgagagtggaactggggggtgcagactgaacactgaacggaaggagccttggacagggctgggccagtctcccnnnnnnnnnnnnnnnnnnnnnnnnnnnnnnnnnnnnnnnnnnnnnnnnnnnnnnnnnnnnnnnnnnnnnnnnnnnnnnnnnnnnnnnnnnnnnnnnnnnnnnnnnnnnnnnnnnnnnnnnnnnnnnnnnnnnnnnnnnnnnnnnnnnnnnnnnnnnnnnnnnnnnnnnnnnnnnnnnnnnnnnnnnnnnnnnnnnnnnnnnnnnnnnnnnnnnnnnnnnnnnnnnnnnnnnnnnnnnnnnnnnnnnnnnnnnnnnnnnnnnnnnnnnnnnnnnnnnnnnnnnnnnnnnnnnnnnnnnnnnnnnnnnnnnnnnnnnnnnnnnnnnnnnnnnnnnnnnnnnnnnnnnnnnnnnnnnnnnnnnnnnnnnnnnnnnnnnnnnnnnnnnnnnnnnnnnnnnnnnnnnnnnnnnnnnnnnnnnnnnnnnnnnnnnnnnnnnnnnnnnnnnnnnnnnnnnnnnnnnnnnnnnnnnnnnnnnnnnnnnnnnnnnnnnnnnnnnnnnnnnnnnnnnnnnnnnnnnnnnnnnnnnnnnnnnnnnnnnnnnnnnnnnnnnnnnnnnnnnnnnnnnnnnnnnnnnnnnnnnnnnnnnnnnnnnnnctcactctccctctcccctttccacacagattcgagaacaaaaccgacaagatgtgaagtctgcgggacctcagtcccagctcctggcgagtgtcattgccgagaagagccgaagccc

SEQ ID NO: 21098 - DNA, 802 bp, Macaca Mulatta
  misc_feature (1)...(802): n = A,T,C or G
ggaccttagagcatttaaaaaaatataatcaaactaattgccagccaagtcagtcatcctcctgggagtatatagagtcccaaggttagcgctcctgtattagactatttcaattttaggaaaatcatgaccgtgtggggaaacaatgactttaaaatgctgaaattaaaatttatgctttaactggaatatttttgcttaactactcaattagaatattgtacacctgatcagtgtgtgttcagcacagatggccatgaattgtcatttatagtccaattttttatcttaatcataaaatgtttaggaatctatgaaatttaactttaggaacaaaaagtttcgcagggttgattgatattatttttacattgttctggcaatccacagaaagagaagagccttaatttttaaaacccattttagtcattttatgacaattaaagttgtttaataaacatcttttttcaaagannannnnnnnnnnnnnnnnnnnnnnnnnnnnnnnnnnnnnnnnnnnnnnnnnnnnnnnnnnnnnnnnnnnnnnnnnnnnnnnnnnggcccggcccggccccccannnnnnnnnnnnnnnnnnnntttccttttggggcgcgcgggcgcccctttagggaaaagggaaacagggggccaaaaaccggttttcccaaaagaaaaaacccggggtcaaatagacaaagaggggcttggggattcccnnnnnnnnnnnnnnnnnnnnnngccccggggggtgagaaaacacaaagaaggtgtcnnnnnnnnnnnnnnnnnnncaggaagggg

SEQ ID NO: 21099 - DNA, 297 bp, Macaca Mulatta
aggtagctgtgatacaaaccccaggacacccacccacccaaagagccaaagaatagttcctgtgacattccgacttccttccatgtagtccctcttggtaatctaccaccaagtttgtggacttcaccccaacaaaattgtaagcgttgttaggtttttgtgtaagactcttgctgtagcgtggatagctgtgattggtgagtctaccatctgtggctaccagttacactgagattgtaagcagcatttttactttctgtacaacaaaaaagcttttaaagaaatcttaacattttg

SEQ ID NO: 21100 - DNA, 708 bp, Macaca Mulatta
ccttggctcagagatccgtgactctgtggtgtgagagccgacttctagaggacgctgccctggcttcaggggctgtgaatgctcggagagggtcaactggacctctcctccgctctgccgttcgtggaacacaaccgtggtgcccagcccttgggagccttggagccagcgggcctgctgctctccagtcaagtagcgaggctcctactacccagacacccaaacagtcatggccccagaggtcctggccaaatatgggggcctgcctaggttggtgaaacagtgctccttatgtaaactgagccctttgtttaaaaaacaaaatgtgaaactagagaggaaagagacagcatagaatgcagcgcacacggccgttccagttcccaggggcactggggatgcttccaaagtggttgagacagagttggaaaccctcaccaactggcctcttcaccttccgccttatcctgctgccactggctgccctgtctcactgcagattcagaaccagcttgggctccgtgcgttctgccttgccagccggccgaggatgtagttgttgctgccatcatcctaccacctcagggaccagagggctaggttggcactgcggccctcaccaggtcctgggctcggacccaactcctggacctatccagcctgtatcaggctgtggccacacgagaggacagcgtgagctcaggagag

SEQ ID NO: 21101 - DNA, 5803 bp, Macaca Mulatta
  misc_feature (1)...(5803): n = A,T,C or G
cacaggaaataagcaatggaggtggggtcctttgctcgcgccgaaattcaaaggaataaatagttccggcgcgggtgagagcggtgcggcaggtgttgtatccgctatggtgaagttctcttcgtagcagccgcggctagagagttggcctgctccccgcctttgtgacccggaggagcttttggggtgcgtcaagccctggcctgaggcagcggtgaggcgtnnnnnnnnnnnnnnnnnnnnnnnnnnnnnnnnnnnnnnnnnnnnnnnnnnnnnnnnnnnnnnnnnnnnnnnnnnnnnnnnnnnnnnnnnnnnnnnnnnnnnnnnnnnnnnnnnnnnnnnnnnnnnnnnnnnnnnnnnnnnnnnnnnnnnnnnnnnnnnnnnnnnnnnnnnnnnnnnnnnnnnnnnnnnnnnnnnnnnnnnnnnnnnnnnnnnnnnnnnnnnnnnnnnnnnnnnnnnnnnnnnnnnnnnnnnnnnnnnnnnnnnnnnnnnnnnnnnnnnnnnnnnnnnnnnnnnnnnnnnnnnnnnnnnnnnnnnnnnnnnnnnnnnnnnnnnnnnnnnnnnnnnnnnnnnnnnnnnnnnnnnnnnnnnnnnnnnnnnnnnnnnnnnnnnnnnnnnnnnnnnnnnnnnnnnnnnnnnnnnnnnnnnnnnnnnnnnnnnnnnnnnnnnnnnnnnnnnnnnnnnnnnnnnnnnnnnnnnnnnnnnnnnnnnnnnnnnnnnnnnnnnnnnnnnnnnnnnnnnnnnnnnnnnnnnnnnnnnnnnnnnnnnnnnnnnnnnnnnnnnnnnnnnnnnnnnnnnnnnnnnnnnnnnnnnnnnnnnnnnnnnnnnnnnnnnnnnnnnnnnnnnnnnnnnnnnnnnnnnnnnnnnnnnnnnnnnnnnnnnnnnnnnnnnnnnnnnnnnnnnnnnnnnnnnnnnnnnnnnnnnnnnnnnnnnnnnnnnnnnnnnnnnnnnnnnnnnnnnnnnnnnnnnnnnnnnnnnnnnnnnnnnnnnnnnnnnnnnnnnnnnnnnnnnnnnnnnnnnnnnnnnnnnnnnnnnnnnnnnnnnnnnnnnnnnnnnnnnnnnnnnnnnnnnnnnnnnnnnnnnnnnnnnnnnnnnnnnnnnnnnnnnnnnnnnnnnnnnnnnnnnnnnnnnnnnnnnnnnnnnnnnnnnnnnnnnnnnnnnnnnnnnnnnnnnnnnnnnnnnnnnnnnnnnnnnnnnnnnnnnnnnnnnnnnnnnnnnnnnnnnnnnnnnnnnnnnnnnnnnnnnnnnnnnnnnnnnnnnnnnnnnnnnnnnnnnnnnnnnnnnnnnnnnnnnnnnnnnnnnnnnnnnnnnnnnnnnnnnnnnnnnnnnnnnnnnnnnnnnnnnnnnnnnnnnnnnnnnnnnnnnnnnnnnnnnnnnnnnnnnnnnnnnnnnnnnnnnnnnnnnnnnnnnnnnnnnnnnnnnnnnnnnnnnnnnnnnnnnnnnnnnnnnnnnnnnnnnnnnnnnnnnnnnnnnnnnnnnnnnnnnnnnnnnnnnnnnnnnnnnnnnnnnnnnnnnnnnnnnnnnnnnnnnnnnncaggctcagatgaagctgaagcatgctcaacaggaattaaagaataaacaannnnnnnnnnnnnnnnnnnnnnnnnnnnnnnnnnnnnnnnnnnnnnnnnnnnnnnnnnnnnnnnnnnnnnnnnnnnnnnnnnnnnnnnnnnnnnnnnnnnnnnnnnnnnnnnnnnnnnnnnnnnnnnnnnnnnnnnnnnnnnnnnnnnnnnnnnnnnnnnnnnnnnnnnnnnnnnnnnnnnnnnnnnnnnnnnnnnnnnnnnnnnnnnnnnnnnnnnnnnnnnnnnnnnnnnnnnnnnnnnnnnnnnnnnnnnnnnnnnnnnnnnnnnnnnnnnnnnnnnnnnnnnnnnnnnnnnnnnnnnnnnnnnnnnnnnnnnnnnnnnnnnnnnnnnnnnnnnnnnnnnnnnnnnnnnnnnnnnnnnnnnnnnnnnnnnnnnnnnnnnnnnnnnnnnnnnnnnnnnnnnnnnnnnnnnnnnnnnnnnnnnnnnnnnnnnnnnnnnnnnnnnnnnnnnnnnnnnnnnnnnnnnnnnnnnnnnnnnnnnnnnnnnnngttggccctgacagcgttcgtgtggctctttccctggttgaatataaaccagaacttcagaaagcaatggagtttgtctttggaacaacatttgtttgtgacaatatggataatgccaaaaaagtggcctttgataagaggataatgactagaactgtaactctcggaggcgatgtgtttgatccgcatgggacattgagtggaggnnnnnnnnnnnnnnnnnnnnnnnnnnnnnnnnnnnnnnnnnnnnnnnnnnnnnnnnnnnnnnnnnnnnnnnnnnnnnnnnnnnnnnnnnnnnnnnnnnnnnnnnnnnnnnnnnnnnnnnnnnnnnnnnnnnnnnnnnnnnnnnnnnnnnnnnnnnnnnnnnnnnnnnnnnnnnnnnnnnnnnnnnnnnnnnnnnnnnnnnnnnnnnnnnnnnnnnnnnnnnnnnnnnnnnnnnnnnnnnnnnnnnnnnnnnnnnnnnnnnnnnnnnnnnnnnnnnnnnnnnnnnnnnnnnnnnnnnnnnnnnnnnnnnnnnnnnnnnnnnnnnnnnnnnnnnnnnnnnnnnnnnnnnnnnnnnnnnnnnnnnnnnnnnnnnnnnnnnnnnnnnnnnnnnnnnnnnnnnnnnnnnnnnnnnnnnnnnnnnnnnnnnnnnnnnnnnnnnnnnnnnnnnnnnnnnnnnnnnnnnnnnnnnnnnnnnnnnnnnnnnnnnnnnnnnnnnnnnnnnnnnnnnnnnnnnnnnnnnnnnnnnnnnnnnnnnnnnnnnnnnnnnnnnnnnnnnnnnnnnnnnnnnnnnnnnnnnnnnnnnnnnnnnnnnnnnnnnnnnnnnnnnnnnnnnnnnnnnnnnnnnnnnnnnnnnnnnnnnnnnnnnnnnnnnnnnnnnnnnnnnnnnnnnnnnnnnnnnnnnnnnnnnnnnnnnnnnnnnnnnnnnnnnnnnnnnnnnnnnnnnnnnnnnnnnnnnnnnnnnnnnnnnnnnnnnnnnnnnnnnnnnnnnnnnnnnnnnnnnnnnnnnnnnnnaggtatccaaaatgttgaaagattatgactggattaatgcagagagacacctctttggcaaacccaatagtgcctatgatttcaaaactaacaaccctaaagaagctggtcagagacttcagaagttgcaagaaatgaaggagaaactaggaagaaatgtcaatatgagagctatgaatgtattgacagaagctgaagagcnnnnnnnnnnnnnnnnnnnnnnnnnnnnnnnnnnnnnnnnnnnnnnnnnnnnnnnnnnnnnnnnnnnnnnnnnnnnnnnnnnnnnnnnnnnnnnnnnnnnnnnnnnnnnnnnnnnnnnnnnnnnnnnnnnnnnnnnnnnnnnnnnnnnnnnnnnnnnnnnnnnnnnnnnnnnnnnnnnnnnnnnnnnnnnnnnnnnnnnnnnnnnnnnnnnnnnnnnnnnnnnnnnnnnnnnnnnnnnnnnnnnnnnnnnnnnnnnnnnnnnnnnnnnnnnnnnnnnnnnnnnnnnnnnnnnnnnnnnnnnnnnnnnnnnnnnnnnnnnnnnnnnnnnnnnnnnnnnnnnnnnnnnnnnnnnnnnnnnnnnnnnnnnnnnnnnnnnnnnnnnnnnnnnnnnnnnnnnnnnnnnnnnnnnnnnnnnnnnnnnnnnnnnnnnnnnnnnnnnnnnnnnnnnnnnnnnnnnnnnnnnnnnnnnnnnnnnnnnnnnnnnnnnnnnnnnnnnnnnnnnnnnnnnnnnnnnnnnnnnnnnnnnnnnnnnnnnnnnnnnnnnnnnnnnnnnnnnnnnnnnnnnnnnnnnnnnnnnnnnnnnnnnnnnnnnnnnnnnnnnnnnnnnnnnnnnnnnnnnnnnnnnnnnnnnnnnnnnnnnnnnnnnnnnnnnnnnnnnnnnnnnnnnnnnnnnnnnnnnnnnnnnnnnnnnnnnnnnnnnnnnnnnnnnnnnnnnnnnnnnnnnnnnnnnnnnnnnnnnnnnnnnnnnnnnnnnnnnnnnnnnnnnnnnnnnnnnnnnnnnnnnnnnnnnnnnnnnnnnnnnnnnnnnnnnnnnnnnnnnnnnnnnnnnnnnnnnnnnnnnnnnnnnnnnnnnnnnnnnnnnnnnnnnnnnnnnnnnnnnnnnnnnnnnnnnnnnnnnnnnnnnnnnnnnnnnnnnnnnnnnnnnnnnnnnnnnnnnnnnnnnnnnnnnnnnnnnnnnnnnnnnnnnnnnnnnnnnnnnnnnnnnnnnnnnnnnnnnnnnnnnnnnnnnnnnnnnnnnnnnnnnnnnnnnnnnnnnnnnnnnnnnnnnnnnnnnnnnnnnnnnnnnnnnnnnnnnnnnnnnnnnnnnnnnnnnnnnnnnnnnnnnnnnnnnnnnnnnnnnnnnnnnnnnnnnnnnnnnnnnnnnnnnnnnnnnnnnnnnnnnnnnnnnnnnnnnnnnnnnnnnnnnnnnnnnnnnnnnnnnnnnnnnnnnnnnnnnnnnnnnnnnnnnnnnnnnnnnnnnnnnnnnnnnnnnnnnnnnnnnnnnnnnnnnnnnnnnnnnnnnnnnnnnnnnnnnnnnnnnnnnnnnnnnnnnnnnnnnnnnnnnnnnnnnnnnnnnnnnnnnnnnnnnnnnnnnnnnnnnnnnnnnnnnnnnnnnnnnnnnnnnnnnnnnnnnnnnnnnnnnnnnnnnnnnnnnnnnnnnnnnnnnnnnnnnnnnnnnnnnnnnnnnnnnnnnnnnnnnnnnnnnnnnnnnnnnnnnnnnnnnnnnnnnnnnnnnnnnnnnnnnnnnnnnnnnnnnnnnnnnnnnnnnnnnnnnnnnnnnnnnnnnnnnnnnnnnnnnnnnnnnnnnnnnnnnnnnnnnnnnnnnnnnnnnnnnnnnnnnnnnnnnnnnnnnnnnnnnnnnnnnnnnnnnnnnnnnnnnnnnnnnnnnnnnnnnnnnnnnnnnnnnnnnnnnnagaacagtgactccaaactgaatcataaaagctctgcctttgatgtaatctgatcttccatgtgttattttggccccacatctcttcttgatttttttagtcttatttccttagtattattatcatattttccctgatatatggctgaacttcctggccctgggcttgacatttctcacccttcattctacatacatatgagatgtcggaaaacatgcagtaattgatattatgggacacattggaaaggattgaatctggaattagttctgtccactgtggaggggagaggaaataatgctgtaaatgttgagttacaaaaagtctaatgtcaaatagtttttttgttttcctttcagatgtatcacaaactgtgccaaaacagttaccaattcacacagtcaacattaaagtataccatagtatataaattagtcagtacttgctgttaatatttctgatttaatagttattaagtggtacttcattgctgttttagccagtgtttaaaaaataatttgggaggttgactatcttggcttatgtactcatttccttttctctgctaaaaattttctgcttgtatgctttcttgatttttgtcttgtataatcttgatctttgacaatcctcaaacatgtattaaatttttgtaattttttttcattagagggaagtcattaaggggattagggacatttgtttcacacatctgcagtaatatgagttaactgatatttaccaagctctttctttacattnnnnnnnnnnnnnnnngtatatattgtcatatttaatcctcanaggaacctggtgaggtaaatactgttgtcagcatggtgtaactgaagaattgagt

SEQ ID NO: 21102 - DNA, 550 bp, Macaca Mulatta
  misc_feature (1)...(550): n = A,T,C or G
tactgttcaactgtgagccagaaaaagatacaaaacttttgtttaaattcaattttcattaaaatgaaggctcttgctagagttcttttaattttgtttacatagtttctaacttttagaaggaggagaatttatttatattttgccagttctgcagctatatctaggaaagtaaatgcttttatatgttttatacttttttctgctataactatttgaatgtaatatttgtataagattgctgttttacatgtgcattcccataggcatttagaagtttttttctgccctgtaaaagttctcaaatgggtggactagtttatatcttgatggccattagtatccacagagttctctgtcatggttctgatgcncagggcaggtactggcatttangaaccaattgtttgcaagaattttagaagtctaactgcagcccttttctggaggctggacttgacttgnggagnggaaaagtacttgctcttttctaagatttgcctccaatcgctactgaagcacatacctgtcntactatgaataattgtaa

SEQ ID NO: 21103 - DNA, 753 bp, Macaca Mulatta
  misc_feature (1)...(753): n = A,T,C or G
gttccacggnatgtcttagctatttttcattccctctctcacccccacaaaccaaactatgaataatgaaataattctccttaattctttcatttagagaggtacacaaacagaacacactctctcttaagaagctttaatttcagcaagatttccctccacaagagacatactacctttaaaatcatgttctaatttttaaaaattatctgaataaaagttacatctagatttatgcagcataatatcctataatattctaagattgcaaatgcaaatctgacattattatttttcccaggaagcctcaaacgagctattaccaatgaagtacttttggctgtgatttgtcataaatcttaaccaaactatgaataatgaaataattctcattaatactttcattaaggaagaattttgacaatctaaaattgtcaatacatttttcctgtggagggaaagtaaaaccataggaaccaaggcatgccatggtaggagcctttaataaatcttttaaataaggagaaacaagtgcctttaataacttcaatcccagggttaagaatttgaaaaattgagaatgctaaacaaagaagaactgatattatttcagaatacttcaatatattatccaattataaacattttaatgataccttactaaagtagataggatattgtctccattttataaatatggaaaccaaagactagaagtttaatgacttatccaaaattgttagctacttctat

SEQ ID NO: 21104 - DNA, 781 bp, Macaca Mulatta
  misc_feature (1)...(781): n = A,T,C or G
ggattctagaggccgaggcgggcggatcatgaggtcaggagattgagacaatcctggctaacacagtgaaaccctgtctgtactaaaaagtacaaaaaattagctgagtgtggtggtgggtgccggtggtcccagctactannnnnnnnnnnnnnnnnnnnnngcgtgaaccctggaggtggagcttgagnnnnnnnnnnnnnannnnnnnnnnnnnnnnnnnnnnnnnnnnnnnnnnnnnntgtctcnnnnnnnnnnnnnnnnnnnnnnnnngatctgaataacttcaatgtaaagggtcagccagcctcaccaaattcttttatttatctgagccttgaattttagggtccaactattaggtagggttttaatggtaattgccataagtgatagtctcaggacacctgtgtccatcatgctgcagactgatttgacctgtattattctgtggagacaaagctccaaccttggtcactactacctttacaggaatccaaacgtctataaatacctggaagctcatttcctgtgtggtagacctcctataatgctttcagggatcatgatgcaacttgggcaagatactctgaaaacatgttttcatctactctngtttaagtatttttgcagtgtanagattcctactgccaaaacccatctgtcagtttgtaaatttgtggtcacacacttaaacattngtctttctgggctttattcctcaccctcctctgccagtctgggtataagggtctccgcattactgcacaactttcctctg

SEQ ID NO: 21105 - DNA, 137 bp, Macaca Mulatta
agtggcactggagtttgggtccgaggagcctagacaccctgaggcagcagactcaccgagatccagcaccgtccacatactgtcccagttgctgagactgcgccagtgttgctgtcatctttctttactgaagtcgg

SEQ ID NO: 21106 - DNA, 373 bp, Macaca Mulatta
  misc_feature (1)...(373): n = A,T,C or G
tccattggtatattggccctctaaagtataagccatacctttgactctttctgttgtaaatcccttctattaagatccagaatctttctgtttattcaccagcatgactagaggcatagtactaggctaaggtttatgaaaagcttgatatttaataaatccttaaaatatctgattcttttcattaatccaaaaatccttcattttgcaatttttttccagatccatttacattatgttcagatataataaataaagaagtagtcagttttctagcaactcccagttgttccaaaatgttgacgtataggtgctcaggtaagtatttttttaattgcagttgtttcacagtanaagccttttatgatattat

SEQ ID NO: 21107 - DNA, 415 bp, Macaca Mulatta
ggccgggccagactcagccaccgcagagcccgccgaggcggggctgccgattgctgtagccccgggagtcctgggcctccacgcctcgggtagactccgaccgggcggggccgccctttactctgggagcggctgcagagggaagtgtctgggaacccttttagagcagtcggggcctggtctccgtgggggaagggtccgctggcatcttggttctttaaggtcccagaaggatggggcgaaacgtgcaaatgatttggactgaggggccaggttctcttaagtttccctgagggacgcggccgcaaatgtaaatggcttggactgggggcgggtccaggttctttagagacgtccccctcaggggcggggcacacatgtatcaccaggaaaggggcggggcaccacatgtaaa

SEQ ID NO: 21108 - DNA, 219 bp, Macaca Mulatta
ctttgaggaaatggttgcgaaggtgctgatcaagctgcaggcggtgcaggccatgtaccagataagccaggaggaacacagccagctgcaagagcagatggaaaagttactggccaagcagaaagacctgaaggaagagctggatgcctgtgaaagggagttcaaggagtgcatggaatgccttgaaaagcccgtggccccccagaacgacaagaatga

SEQ ID NO: 21109 - DNA, 390 bp, Macaca Mulatta
ggaaaggccgattgtacaggaccagctcttctttagaaagacagattgtggtggctttatgtaatctcttttccagtgctagttttctgatcactctgtgtacctgtgactctgctattgtacctctctttgactttctggcatttcaggcatctatagtagaatcttacactatctggaaaaatccaagtgttagaaagcagtttggtataagaagcctagcaggaatttaataaaatgccaaaggaaatttacaaatggcctcccttacatctccaataaccttttttctgtttttggtgtgggttagctcctttccaagaaacaaataggaggaggaagaaaaggaattcatgtgttggtactaatcagctttccaaatcatgaagg

SEQ ID NO: 21110 - DNA, 420 bp, Macaca Mulatta
gtataattctgggatggatctgttactggcatagtcatgacaacctctggtaatcttatcttctctttcttatgaagggaagagcaatggtttggacttgcatcttaattaagcctattttaggcagattgttttgcagtagattaagaatcgggtcccaaagtgggttatttcaaggcatttttgaagactggaggagccataggagggagtagtgagggaacctagaacttcttgctccttgtgactatgacaggtgtctgatacccccagcacactggagtctggggcttggtgcaggtggtgccccatcagtgtggacagacactacttgcctttgtggtttagtgttggaaactttaattactctgcagttccatagattcacgattttatagccagacagtttgtatccaccta

SEQ ID NO: 21111 - DNA, 349 bp, Macaca Mulatta
atttttagttctcttttcattgttctaactgcctcgtgcccctcactagttcatgccaagaacatgactggaaaagcatggcaccgataccttgattaatttccattattggaattggtttgtcctgagtcatctacattccaagtcagactgtcactcctgctaccaatggccactgtaagccacagaaggaagatgtgtacatactgttctactttatgtgatgtgagaagcccacatcagtgtcccttggcagcagtctaaaggcgtaccttgttttattttgcttaattttattatgcttctcaaatattgcactttttacaaaattgaaagtttgtggcaatgc

SEQ ID NO: 21112 - DNA, 185 bp, Macaca Mulatta
ggttgatctctaggctgtggaactgcgacatcacgagcgatggctgctgcagtctcgcaaagctcctccaagaaaaatcaagcctgtcgtgtttggatcttggactgaatcacataggagttaccggagtgaaggtcctgtgcgaggctttgagcaaaccactgtgcaacttgagatgtctgtgg

SEQ ID NO: 21113 - DNA, 1200 bp, Macaca Mulatta
  misc_feature (1)...(1200): n = A,T,C or G
agccatcccagctgcagtcccagttccgcctcacgtacactatgatcctcaacttgctgcgggtggatgccctcagggtggaggacatgatgaagaggagcttctctgagtttccctcccgcaaggacagcaaggncaaggcccatgaacaagccctggccgaactgaccaagaggctgggggctttggaggagcctgacgtgactggccaactggtcgacctgcctgaatattacggctggggggaggaactgacagagacccagcacatgatnnnnnnnnnnnnnnnnnnnnnnnnnnnnnnnnnnnnnnnnnnnnnnnnnnnnnnnnnnnnnnnnnnnnnnnnnnnnnnnnnnnnnnnnnnnnnnnnnnnnnnnnnnnnnnnnnnnnnnnnnnnnnnnnnnnnnnnnnnnnnnnnnnnnnnnnnnnnnnnnnnnnnnnnnnnnnnnnnnnnnnnnnnnnnnnnnnnnnnnnnnnnnnnnnnnnnnnnnnnnnnnnnnnnnnnnnnnnnnnnnnnnnnnnnnnnnnnnnnnnnnnnnnnnnnnnnnnnnnnnnnnnnnnnnnnnnnnnnnnnnnnnnnnnnnnnnnnnnnnnnnnnnnnnnnnnnnnnnnnnnnnnnnnnnnnnnnnnnnnnnnnnnnnnnnnnnnnnnnnnnnnnnnnnnnnnnnnnnnnnnnnnnnnnnnnnnnnnnnnnnnnnnnnnnnnnnnnnnnnnnnnnnnnnnnnnnnnnnnnnnnnnnnnnnnnnnnnnnnnnnnnnnnnnnnnnnnnnnnnnnnnnnnnnnnnnnnnnnnnnnnnnnnnnnnnnnnnnnnnnnnnnnnnnnnnnnnnnnnnnnnnnnnnnnnnnnnnnnnnnnnnnnnnnnnnnnnnnnnnnnnnnnnnnnnnnnnnnnnnnnnnnnnnnnnnnnnnnnnnnnnnnnnnnnnnnnnnnnnnnnnnnnnnnnnnnnnnnnnnnnnnnnnnnnnnnnnnnnnnnnnnnnnnnnnnnnnnnnnnnnnnnnnnngtggacgaggcaggcaccgtgaagctggcagggcgggtggcttgtgccatgagcagccatgagttgctcctcactgagctcatgtttgacaatgcactcagcaccctgcggcctgaggagattgctgccttgctctctggcctggtctgccagagccctggggacgctggagatcagcttccaaacaccctcaagcag

SEQ ID NO: 21114 - DNA, 5978 bp, Macaca Mulatta
  misc_feature (1)...(5978): n = A,T,C or G
cacctccacacgctgatatttaatgctgcacgggaccttctcatcaatgaacaccgnnnnnnnnnnnnnnnnnnnnnnnnnnnnnnnnnnnnnnnnnnnnnnnnnnnnnnnnnnnnnnnnnnnnnnnnnnnnnnnnnnnnnnnnnnnnnnnnnnnnnnnnnnnnnnnnnnnnnnnnnnnnnnnnnnnnnnnnnnnnnnnnnnnnnnnnnnnnnnnnnnnnnnnnnnnnnnnnnnnnnnnnnnnnnnnnnnnnnnnnnnnnnnnnnnnnnnnnnnnnnnnnnnnnnnnnnnnnnnnnnnnnnnnnnnnnnnnnnnnnnnnnnnnnnnnnnnnnnnnnnnnnnnnnnnnnnnnnnnnnnnnnnnnnnnnnnnnnnnnnnnnnnnnnnnnnnnnnnnnnnnnnnnnnnnnnnnnnnnnnnnnnnnnnnnnnnnnnnnnnnnnnnnnnnnnnnnnnnnnnnnnnnnnnnnnnnnnnnnnnnnnnnnnnnnnnnnnnnnnnnnnnnnnnnnnnnnnnnnnnnnnnnnnnnnnnnnnnnnnnnnnnnnnnnnnnnnnnnnnnnnnnnnnnnnnnnnnnnnnnnnnnnnnnnnnnnnnnnnnnnnnnnnnnnnnnnnnnnnnnnnnnnnnnnnnnnnnnnnnnnnnnnnnnnnnnnnnnnnnnnnnnnnnnnnnnnnnnnnnnnnnnnnnnnnnnnnnnnnnnnnnnnnnnnnnnnnnnnnnnnnnnnnnnnnnnnnnnnnnnnnnnnnnnnnnnnnnnnnnnnnnnnnnnnnnnnnnnnnnnnnnnnnnnnnnnnnnnnnnnnnnnnnnnnnnnnnnnnnnnnnnnnnnnnnnnnnnnnnnnnnnnnnnnnnnnnnnnnnnnnnnnnnnnnnnnnnnnnnnnnnnnnnnnnnnnnnnnnnnnnnnnnnnnnnnnnnnnnnnnnnnnnnnnnnnnnnnnnnnnnnnnnnnnnnnnnnnnnnnnnnnnnnnnnnnnnnnnnnnnnnnnnnnnnnnnnnnnnnnnnnnnnnnnnnnnnnnnnnnnnnnnnnnnnnnnnnnnnnnnnnnnnnnnnnnnnnnnnnnnnnnnnnnnnnnnnnnnnnnnnnnnnnnnnnnnnnnnnnnnnnnnnnnnnnnnnnnnnnnnnnnnnnnnnnnnnnnnnnnnnnnnnnnnnnnnnnnnnnnnnnnnnnnnnnnnnnnnnnnnnnnnnnnnnnnnnnnnnnnnnnnnnnnnnnnnnnnnnnnnnnnnnnnnnnnnnnnnnnnnnnnnnnnnnnnnnnnnnnnnnnnnnnnnnnnnnnnnnnnnnnnnnnnnnnnnnnnnnnnnnnnnnnnnnnnnnnnnnnnnnnnnnnnnnnnnnnnnnnnnnnnnnnnnnnnnnnnnnnnnnnnnnnnnnnnnnnnnnnnnnnnnnnnnnnnnnnnnnnnnnnnnnnnnnnnnnnnnnnnnnnnnnnnnnnnnnnnnnnnnnnnnnnnnnnnnnnnnnnnnnnnnnnnnnnnnnnnnnnnnnnnnnnnnnnnnnnnnnnnnnnnnnnnnnnnnnnnnnnnnnnnnnnnnnnnnnnnnnnnnnnnnnnnnnnnnnnnnnnnnnnnnnnnnnnnnnnnnnnnnnnnnnnnnnnnnnnnnnnnnnnnnnnnnnnnnnnnnnnnnnnnnnnnnnnnnnnnnnnnnnnnnnnnnnnnnnnnnnnnnnnnnnnnnnnnnnnnnnnnnnnnnnnnnnnnnnnnnnnnnnnnnnnnnnnnnnnnnnnnnnnnnnnnnnnnnnnnnnnnnnnnnnnnnnnnnnnnnnnnnnnnnnnnnnnnnnnnnnnnnnnnnnnnnnnnnnnnnnnnnnnnnnnnnnnnnnnnnnnnnnnnnnnnnnnnnnnnnnnnnnnnnnnnnnnnnnnnnnnnnnnnnnnnnnnnnnnnnnnnnnnnnnnnnnnnnnnnnnnnnnnnnnnnnnnnnnnnnnnnnnnnnnnnnnnnnnnnnnnnnnnnnnnnnnnnnnnnnnnnnnnnnnnnnnnnnnnnnnnnnnnnnnnnnnnnnnnnnnnnnnnnnnnnnnnnnnnnnnnnnnnnnnnnnnnnnnnnnnnnnnnnnnnnnnnnnnnnnnnnnnnnnnnnnnnnnnnnnnnnnnnnnnnnnnnnnnnnnnnnnnnnnnnnnnnnnnnnnnnnnnnnnnnnnnnnnnnnnnnnnnnnnnnnnnnnnnnnnnnnnnnnnnnnnnnnnnnnnnnnnnnnnnnnnnnnnnnnnnnnnnnnnnnnnnnnnnnnnnnnnnnnnnnnnnnnnnnnnnnnnnnnnnnnnnnnnnnnnnnnnnnnnnnnnnnnnnnnnnnnnnnnnnnnnnnnnnnnnnnnnnnnnnnnnnnnnnnnnnnnnnnnnnnnnnnnnnnnnnnnnnnnnnnnnnnnnnnnnnnnnnnnnnnnnnnnnnnnnnnnnnnnnnnnnnnnnnnnnnnnnnnnnnnnnnnnnnnnnnnnnnnnnnnnnnnnnnnnnnnnnnnnnnnnnnnnnnnnnnnnnnnnnnnnnnnnnnnnnnnnnnnnnnnnnnnnnnnnnnnnnnnnnnnnnnnnnnnnnnnnnnnnnnnnnnnnnnnnnnnnnnnnnnnnnnnnnnnnnnnnnnnnnnnnnnnnnnnnnnnnnnnnnnnnnnnnnnnnnnnnnnnnnnnnnnnnnnnnnnnnnnnnnnnnnnnnnnnnnnnnnnnnnnnnnnnnnnnnnnnnnnnnnnnnnnnnnnnnnnnnnnnnnnnnnnnnnnnnnnnnnnnnnnnnnnnnnnnnnnnnnnnnnnnnnnnnnnnnnnnnnnnnnnnnnnnnnnnnnnnnnnnnnnnnnnnnnnnnnnnnnnnnnnnnnnnnnnnnnnnnnnnnnnnnnnnnnnnnnnnnnnnnnnnnnnnnnnnnnnnnnnnnnnnnnnnnnnnnnnnnnnnnnnnnnnnnnnnnnnnnnnnnnnnnnnnnnnnnnnnnnnnnnnnnnnnnnnnnnnnnnnnnnnnnnnnnnnnnnnnnnnnnnnnnnnnnnnnnnnnnnnnnnnnnnnnnnnnnnnnnnnnnnnnnnnnnnnnnnnnnnnnnnnnnnnnnnnnnnnnnnnnnnnnnnnnnnnnnnnnnnnnnnnnnnnnnnnnnnnnnnnnnnnnnnnnnnnnnnnnnnnnnnnnnnnnnnnnnnnnnnnnnnnnnnnnnnnnnnnnnnnnnnnnnnnnnnnnnnnnnnnnnnnnnnnnnnnnnnnnnnnnnnnnnnnnnnnnnnnnnnnnnnnnnnnnnnnnnnnnnnnnnnnnnnnnnnnnnnnnnnnnnnnnnnnnnnnnnnnnnnnnnnnnnnnnnnnnnnnnnnnnnnnnnnnnnnnnnnnnnnnnnnnnnnnnnnnnnnnnnnnnnnnnnnnnnnnnnnnnnnnnnnnnnnnnnnnnnnnnnnnnnnnnnnnnnnnnnnnnnnnnnnnnnnnnnnnnnnnnnnnnnnnnnnnnnnnnnnnnnnnnnnnnnnnnnnnnnnnnnnnnnnnnnnnnnnnnnnnnnnnnnnnnnnnnnnnnnnnnnnnnnnnnnnnnnnnnnnnnnnnnnnnnnnnnnnnnnnnnnnnnnnnnnnnnnnnnnnnnnnnnnnnnnnnnnnnnnnnnnnnnnnnnnnnnnnnnnnnnnnnnnnnnnnnnnnnnnnnnnnnnnnnnnnnnnnnnnnnnnnnnnnnnnnnnnnnnnnnnnnnnnnnnnnnnnnnnnnnnnnnnnnnnnnnnnnnnnnnnnnnnnnnnnnnnnnnnnnnnnnnnnnnnnnnnnnnnnnnnnnnnnnnnnnnnnnnnnnnnnnnnnnnnnnnnnnnnnnnnnnnnnnnnnnnnnnnnnnnnnnnnnnnnnnnnnnnnnnnnnnnnnnnnnnnnnnnnnnnnnnnnnnnnnnnnnnnnnnnnnnnnnnnnnnnnnnnnnnnnnnnnnnnnnnnnnnnnnnnnnnnnnnnnnnnnnnnnnnnnnnnnnnnnnnnnnnnnnnnnnnnnnnnnnnnnnnnnnnnnnnnnnnnnnnnnnnnnnnnnnnnnnnnnnnnnnnnnnnnnnnnnnnnnnnnnnnnnnnnnnnnnnnnnnnnnnnnnnnnnnnnnnnnnnnnnnnnnnnnnnnnnnnnnnnnnnnnnnnnnnnnnnnnnnnnnnnnnnnnnnnnnnnnnnnnnnnnnnnnnnnnnnnnnnnnnnnnnnnnnnnnnnnnnnnnnnnnnnnnnnnnnnnnnnnnnnnnnnnnnnnnnnnnnnnnnnnnnnnnnnnnnnnnnnnnnnnnnnnnnnnnnnnnnnnnnnnnnnnnnnnnnnnnnnnnnnnnnnnnnnnnnnnnnnnnnnnnnnnnnnnnnnnnnnnnnnnnnnnnnnnnnnnnnnnnnnnnnnnnnnnnnnnnnnnnnnnnnnnnnnnnnnnnnnnnnnnnnnnnnnnnnnnnnnnnnnnnnnnnnnnnnnnnnnnnnnnnnnnnnnnnnnnnnnnnnnnnnnnnnnnnnnnnnnnnnnnnnnnnnnnnnnnnnnnnnnnnnnnnnnnnnnnnnnnnnnnnnnnnnnnnnnnnnnnnnnnnnnnnnnnnnnnnnnnnnnnnnnnnnnnnnnnnnnnnnnnnnnnnnnnnnnnnnnnnnnnnnnnnnnnnnnnnnnnnnnnnnnnnnnnnnnnnnnnnnnnnnnnnnnnnnnnnnnnnnnnnnnnnnnnnnnnnnnnnnnnnnnnnnnnnnnnnnnnnnnnnnnnnnnnnnnnnnnnnnnnnnnnnnnnnnnnnnnnnnnnnnnnnnnnnnnnnnnnnnnnnnnnnnnnnnnnnnnnnnnnnnnnnnnnnnnnnnnnnnnnnnnnnnnnnnnnnnnnnnnnnnnnnnnnnnnnnnnnnnnnnnnnnnnnnnnnnnnnnnnnnnnnnnnnnnnnnnnnnnnnnnnnnnnnnnnnnnnnnnnnnnnnnnnnnnnnnnnnnnnnnnnnnnnnnnnnnnnnnnnnnnnnnnnnnnnnnnnnnnnnnnnnnnnnnnnnnnnnnnnnnnnnnnnnnnnnnnnnnnnnnnnnnnnnnnnnnnnnnnnnnnnnnnnnnnnnnnnnnnnnnnnnnnnnnnnnnnnnnnnnnnnnnnnnnnnnnnnnnnnnnnnnnnnnnnnnnnnnnnnnnnnnnnnnnnnnnnnnnnnnnnnnnnnnnnnnnnnnnnnnnnnnnnnnnnnnnnnnnnnnnnnnnnnnnnnnnnnnnnnnnnnnnnnnnnnnnnnnnnnnnnnnnnnnnnnnnnnnnnnnnnnnnnnnnnnnnnnnnnnnnnnnnnnnnnnnnnnnnnnnnnnnnnnnnnnnnnnnnnnnnnnnnnnnnnnnnnnnnnnnnnnnnnnnnnnnnnnnnnnnnnnnnnnnnnnnnnnnnnnnnnnnnnnnnnnnnnnnnnnnnnnnnnnnnnnnnnnnnnnnnnnnnnnnnnnnnnnnnnnnnnnnnnnnnnnnnnnnnnnnnnnnnnnnnnnnnnnnnnnnnnnnnnnnnnnnnnnnnnnnnnnnnnnnnnnnnnnnnnnnnnnnnnnnnnnnnnnnnnnnnnnnnnnnnnnnnnnnnnnnnnnnnnnnnnnnnnnnnnnnnnnnnnnnnnnnnnnnnnnnnnnnnnnnnnnnnnnnnnnnnnnnnnnnnnnnnnnnnnnnnnnnnnnnnnnnnnnnnnnnnnnnnnnnnnnnnnnnnnnnnnnnnnnnnnnnnnnnnnnnnnnnnnnnnnnnnnnnnnnnnnnnnnnnnnnnnnnnnnnnnnnnnnnnnnnnnnnnnnnnnnnnnnnnnnnnnnnnnnnnnnnnnnnnnnnnnnnnnnnnnnnnnnnnnnnnncatttaggagcttagctcaaagttcagctaacctttgatactactagtgggttaaagaaagggaagggaatgaagtacccttaatgcagggtcagtaaacttttcctgtaaaggccagataggaagtatttttggctttttgggctgtttgcttttgctgctactgctgtaggaatgaccatggtcatggctgtgttccagtacaacttgatttaccaagacaagctgtgggctggatttggccctcaggctgtggcttgttagctcctgctctaatggattgtgttggtggcaatg

SEQ ID NO: 21115 - DNA, 418 bp, Macaca Mulatta
gataggagctggtgagtgagctgactcctcctgagtaaatgggtaagcactgggggtccacgcagatagaggattgatttaaatctgtcctttttcaaggaggaagattgaagatgccttgcagaaatacgtaatacattataatgaaaagtaaatcaggaaataggaacacagggaaagtgagagtgagaaataataagatgaacatgacataaatatgcaaaatgcatgccctaaccttctacagaattgagagaaggaaagcaccaatttggcacttaccctcagcaccaagagggatgtgtgattacattgtgtttcagaaaacacttgtctgggagatgaattagcagttctgtggtggctggggagcaggtacatggattaacttgttcagcgcttgcctttcttactggac

SEQ ID NO: 21116 - DNA, 908 bp, Macaca Mulatta
atgttgtattttcatgagtttgttaatcttggctttttgtttttgtttaacattcttgcgttttaaatcaggtgcagctattgctggagtttaccgagcagcagggaaggaaatgataccatttgaagccctcactctgggcactggacagacgttttgcgtcgtggtggtctcctttttacggattttagctactctttagcatacatccttatgctgagatgttgaacctaaactttatggaatcctccagaagaatacattatggagtgtagtgttttcttagttcttcaaagggaagcaacttggatgaacaggaacgtgaagaacaacatctcagccttttcttcattttgaagctcctggaattgaagacttatgtggactcctatcgttctcaaccaaaacaagtcttttggctttcttttttgtagatatttaatttaagcagttttcacatgtacctttacccaagccaagtcaacagtgtctctggggtggcatcctttgcactgaaatttacagtattctgtgagatgtcgtatattttaaagaaactatggaagatactggtttatttcaaatgagcagagtatgttgtattaaaatcttacctaatcttgattaaaatttggcaaactcttttctttactaaatcttagtgacagtaaatgccaaatagttaagtatagttttaaaaacaaatttggtgaaataaaacaggaaaaaaaatttaagtataactcaagtagaggctttggttccactgtttaaagaaaaagtagataacaatgaataatgtgacattttctggacaactgtcttgacctctgattaagatattttaagagatgtgaatttgttattttgtatgttttatcaaaataagctagctaatttagactttt

SEQ ID NO: 21117 - DNA, 1143 bp, Macaca Mulatta
  misc_feature (1)...(1143): n = A,T,C or G
ctccgcagctccagcctccttatcccgcctctagagacggccctggccaacttctccagcggtcccgaaggaggggtcatgcagcccgtgcgcaccgtggtgccggtgaccaagcacaggggngctacctgggggtcatgcccgcctacagtgctgcagaggatgccctgaccaccaagttggtcaccttctacgaggaccgcggcatcacctcggtcgtcccctcccaccaggctactgtgctactctttgagcccagcaatggcaccctgctggcggtnnnnnnnnnnnnnnnnnnnnnnnnnnnnnnnnnnnnnnnnnnnnnnnnnnnnnnnnnnnnnnnnnnnnnnnnnnnnnnnnnnnnnnnnnnnnnnnnnnnnnnnnnnnnnnnnnnnnnnnnnnnnnnnnnnnnnnnnnnnnnnnnnnnnnnnnnnnnnnnnnnnnnnnnnnnnnnnnnnnnnnnnnnnnnnnnnnnnnnnnnnnnnnnnnnnnnnnnnnnnnnnnnnnnnnnnnnnnnnnnnnnnnnnnnnnnnnnnnnngcaggtgcagatgtgatcatcacagtcaccctggcaacagagcccattttgtttggtgaatgggtgaagccaggggctcacatcaatgngctgtcggagccagccgacctgactggagagaactggatgatgagctcatgaaggaagctgtgctgttctgtggattcccaggaggctgccctgaaggagtctggagatgtcctgttgtcaggggnnnnnnnnnnnnnnnnnnnnnnnnnnnnnnnnnnnnnnnnnnnnnnnnnnnnnnnnnnnnnnnnnnnnnnnnnnnnnnnnnnnnnnnnnnnnnnnnnnnnnnnnnnnnnnnnnnnnnnnnnnnnnnnnnnnnnnnnnnnnnnnnnnnnnnnnnnnnnnnnnnnnnnnnnnnnnnnnnnnnnnnnnnnnnnnnnnnnnnnnnnnnnnnnnnnnnnnnnnnnnnnnnnnnnnnnnnnnnnnnnnnnnnnnnnnnnnnnnnnnnnnnnnnnnnnaccttaagtgctgagatcctcatttatgtttgtagttggaaagcaaaactagccatttcttctgctataccaagttataatagcattcatttccctttatatttccctgaaataaagca

SEQ ID NO: 21118 - DNA, 787 bp, Macaca Mulatta
cccttaggccacatgggagcagttcatgcatgacagcctctatcctacaacgcctatgagtatggattggggggccagaaggaaaaagctccacgtgcctctgtgtctgcgtgcgtcagaagagttgtgcacgcagactagcaggccaaggtctgagccacagcagcatttttatttcagattttgataactgtttatatgtgttgaaaaccaaaatgacatctttttaaagcttatccataaaaaaacatagatgtcttttatagtggaaaaacacatggggaaaaaaatcatctattttgatgcagcatttgataatgataaaacacctcacacctcactctttatagtgcacaaaatgaatgaggtctgggctaggtagaaaaaaggtcaatgctatttttgtttttagaatcattaccttttaccagcttttaaccatctggtatctattgtagacacactatcatagttaacatagttaagttcagcacttgtctcattttaatgtaaagattcgcttccattttcctacaggcagtctctctcttcctcacagtcccactgtgcaggtgctattggtactcttacgaatattttcagtaatgttattttcttctaagtgaaatttctagcctgcactttgatgtcatgtgttccctttgtctttcaaactccaaggttcccctgtggccctctctcttaccctgggaaggcctcttggagaccttacccctggctgtttggactttgtatactttaaataatttaactacccttaattact

SEQ ID NO: 21119 - DNA, 623 bp, Macaca Mulatta
  misc_feature (1)...(623): n = A,T,C or G
ggggggcatttgactctgcagtagcaaaagcattagaacatcacagaagtgaaatacaggctgaacaggacagaaagatagaggaagtcagagatgccatggagaatgaaatgagaacccagcttcgccgacaggcagctgcccacactgatcacttgcgagatgtccttagggtacaagaacaggaactgaagtctgaatttgagcagaacctgtctgagaaactctctgaacaagaattacagtttcgtcgtctcagtcaagagcaagttgacagctttactctggatataaacactgcctatgccagactcagaggaatcgaacaggctgttcagagtcatgcagttgccgaagaggaagctagaaaagcccaccaactctggctttcagtggaggcattaaagtacagcatgaagacctcatctgcagaaacacctactatcccgctgggtagtgcagttgaggccatcaaagccaactgttctgataacgaatttacccaagctttaaccgcagctatccctccagagtccctgacccgtggggtgtacagtgaagagacccttagagcccgtttctatgctgttncaaaactggcccgaagggtagnncatgatgan

SEQ ID NO: 21120 - DNA, 2914 bp, Macaca Mulatta
  misc_feature (1)...(2914): n = A,T,C or G
cagattttatcatgtgggcaacctgttgcaactggttctgcctggatggacagcctgaagaggtcccaccaccccagggagccaggatgcaggcctattccaatcctgggtacagctccttcccttccccaacaggcctggaaccaagctgcaagtcctgtggggctcactttgcaagcacagccaggaannnnnnnnnnnnnnnnnnnnnnnnnnnnnnnnnnnnnnnnnnnnnnnnnnnnnnnnnnnnnnnnnnnnnnnnnnnnnnnnnnnnnnnnnnnnnnnnnnnnnnnnnnnnnnnnnnnnnnnnnnnnnnnnnnnnnnnnnnnnnnnnnnnnnnnnnnnnnnnnnnnnnnnnnnnnnnnnnnnnnnnnnnnnnnnnnnnnnnnnnnnnnnnnnnnnnnnnnnnnnnnnnnnnnnnnnnnnnnnnnnnnnnnnnnnnnnnnnnnnnnnnnnnnnnnnnnnnnnnnnnnnnnnnnnnnnnnnnnnnnnnnnnnnnnnnnnnnnnnnnnnnnnnnnnnnnnnnnnnnnnnnnnnnnnnnnnnnnnnnnnnnnnnnnnnnnnnnnnnnnnnnnnnnnnnnnnnnnnnnnnnnnnnnnnnnnnnnnnnnnnnnnnnnnnnnnnnnnnnnnnnnnnnnnnnnnnnnnnnnnnnnnnnnnnnnnnnnnnnnnnnnnnnnnnnnnnnnnnnnnnnnnnnnnnnnnnnnnnnnnnnnnnnnnnnnnnnnnnnnnnnnnnnnnnnnnnnnnnnnnnnnnnnnnnnnnnnnnnnnnnnnnnnnnnnnnnnnnnnnnnnnnnnnnnnnnnnnnnnnnnggggagcagtaccatcaggcttggaggagaacctgtgtaagatctgcatggactcacccattgactgtgttctgctggagtgtggccacatggtaacctgtaccaagtgtggcaagcgcatgaatgaatgtcccatctgccggcagtatgtaatccgagctgtgcatgtcttccggtcctgagnnnnnnnnnnnnnnnnnnnnnnnnnnnnnnnnnnnnnnnnnnnnnnnnnnnnnnnnnnnnnnnnnnnnnnnnnnnnnnnnnnnnnnnnnnnnnnnnnnnnnnnnnnnnnnnnnnnnnnnnnnnnnnnnnnnnnnnnnnnnnnnnnnnnnnnnnnnnnnnnnnnnnnnnnnnnnnnnnnnnnnnnnnnnnnnnnnnnnnnnnnnnnnnnnnnnnnnnnnnnnnnnnnnnnnnnnnnnnnnnnnnnnnnnnnnnnnnnnnnnnnnnnnnnnnnnnnnnnnnnnnnnnnnnnnnnnnnnnnnnnnnnnnnnnnnnnnnnnnnnnnnnnnnnnnnnnnnnnnnnnnnnnnnnnnnnnnnnnnnnnnnnnnnnnnnnnnnnnnnnnnnnnnnnnnnnnnnnnnnnnnnnnnnnnnnnnnnnnnnnnnnnnnnnnnnnnnnnnnnnnnnnnnnnnnnnnnnnnnnnnnnnnnnnnnnnnnnnnnnnnnnnnnnnnnnnnnnnnnnnnnnnnnnnnnnnnnnnnnnnnnnnnnnnnnnnnnnnnnnnnnnnnnnnnnnnnnnnnnnnnnnnnnnnnnnnnnnnnnnnnnnnnnnnnnnnnnnnnnnnnnnnnnnnnnnnnnnnnnnnnnnnnnnnnnnnnnnnnnnnnnnnnnnnnnnnnnnnnnnnnnnnnnnnnnnnnnnnnnnnnnnnnnnnnnnnnnnnnnnnnnnnnnnnnnnnnnnnnnnnnnnnnnnnnnnnnnnnnnnnnnnnnnnnnnnnnnnnnnnnnnnnnnnnnnnnnnnnnnnnnnnnnnnnnnnnnnnnnnnnnnnnnnnnnnnnnnnnnnnnnnnnnnnnnnnnnnnnnnnnnnnnnnnnnnnnnnnnnnnnnnnnnnnnnnnnnnnnnnnnnnnnnnnnnnnnnnnnnnnnnnnnnnnnnnnnnnnnnnnnnnnnnnnnnnnnnnnnnnnnnnnnnnnnnnnnnnnnnnnnnnnnnnnnnnnnnnnnnnnnnnnnnnnnnnnnnnnnnnnnnnnnnnnnnnnnnnnnnnnnnnnnnngagagcaaacgttaagacagcacttaagagctttcaggaggtactgaatgagactggattctgttgtgagccgacagttcaagtctttatttcccaggttggtggggagtaaggagaccctactttcatttcctttcctagcctactgatttttgggggcaggtcagggagaaagcatttnnnnnnnnnnnnnnnnnnnnnnnnnnnnnnnnnnnnnnnnnnnnnnnnnnnnnnnnnnnnnnnnnnnnnnnnnnnnnnnnnnnnnnnnnnnnnnnnnnnnnnnnnnnnnnnnnnnnnnnnnnnnnnnnnnnnnnnnnnnnnnnnnnnnnnnnnnnnnnnnnnnnnnnnnnnnnnnnnnnnnnnnnnnnnnnnnnnnnnnnnnnnnnnnnnnnnnnnnnnnnnnnctcttttgcccaggctggagtgcagtggcgcgatcttggctcactgcaacctctgcctcgcgggttcaagcgatacttctccctcagcctccctagtagctgggaccacaggtgctggctaccacaccactaatttttgtgtttttagtagagacggggtttcaccatgttgtctaggctggtcttgaactcctgacctcacgtgatccgcctgccttggcttcccagagtgctgggattgtaggagtgagccaccacacccaggaggagaaagcatttattctaggctctttaggaaggaccatacaatgagtaagtgatttttttgagccctcacagtctttacacccctagaggagctggagggcttaagagtttgctggagaagcgtggccaagcacaaaacacattatcaggagaacagtgttttcccattaccaatggataaactatgcaaaccctaaatgccttggcagacaactcccaccc

SEQ ID NO: 21121 - DNA, 223 bp, Macaca Mulatta
  misc_feature (1)...(223): n = A,T,C or G
atcacctacaaatatcgagtgcacttgtctgcacatctcatggtagctggctgggaccaacatgaagggggtcaggtncaggtatatggaaccctgggaggaatgctgactcgacaaccttttgccatcggtggctccggcagcacctatatctatggttatgtggatgcagcatataagccaggcatgtctccagaggagtgcaggcgcttcaccacagacg

SEQ ID NO: 21122 - DNA, 499 bp, Macaca Mulatta
tttattgcgggaggaacgggttgtctgctggctccaggagtccggatggacttggagggctggggggagggtcctttgaggaagaggaggcctggaggtgggggtcatcacaggtcaaagggtggtccttgggacccccacagtcagaggtgctgcggcggcagagtgcacaacgacagctgagagccacgggaacggagaccacggggtccacgccaggcgggcagccagggagccggatggactcgaagcgcacctcgcggtagttgcgcaccacctggggcactggcggcaggaccgcctgcagcacccgcatcatggtggggcagtagccggcacagatggtggtgttgacggtgatgcacacggggcaggcctccttctcggcagccagggtggcattgatggggcggcacagtggccgcagcggctccctggatgcccgtgccccgcccatgctcagcagcagccacagcagcagcccctggagcatctccat

SEQ ID NO: 21123 - DNA, 285 bp, Macaca Mulatta
tcggcggcctagacccgaggcgcccttccctggagcggatgtgcgcgcgtggggtccggagtggcaggggctaaggttcagccactagcgcgttcccagttcccccgctagccccatagtccagcggcagctgatactttgaagtctgactttaatagaaagcgtcaagaccaatttccctaggacgcgacgaagtgtcccccggcccctggcgtccccgctctcctaagggctcctctcagctcaccaggtagatctccggttcggtgccaatcgctaacaccc

SEQ ID NO: 21124 - DNA, 2986 bp, Macaca Mulatta
  misc_feature (1)...(2986): n = A,T,C or G
attagtcccagagagcagactggggaaaccacagtcagcaacagattatagtgaccctgacaatgtagatgatggtcttttgattgtagatgttcctaaaacaaataatgacaaagacccggaagtaaacacagaccatcacattaaaggaaaagggaggggagttcaggaatccaagaggggcctggtacaagatgagacagaattagaggatgaaaagcaagaaggcatgactgtgcacagttctgctcacagcaataacctcaactctatgccagctgctgaaaagggtaaagactcattaaaatcagcttatgatgataaagcaaatgacctaaaaggagcagctattcatatctcaaaaggaatgctccgtgaagaaaagcctggagagcagattttggaaggtggctcagagagtgaatctgcacagaaagctgcagggaatcaaatgaagacaaaaagatcaacaggaatccnnnnnnnnnnnnnnnnnnnnnnnnnnnnnnnnnnnnnnnnnnnnnnnnnnnnnnnnnnnnnnnnnnnnnnnnnnnnnnnnnnnnnnnnnnnnnnnnnnnnnnnnnnnnnnnnnnnnnnnnnnnnnnnnnnnnnnnnnnnnnnnnnnnnnnnnnnnnnnnnnnnnnntctcctctcagatgagattgatttgcccagagaactgaaagatgaggttccctattctgggaggaaatctttcctggcaacaagaaagagatgtggctgccacagtcaataagcaaatgagtgagaagataaggctgtctgagggagaagccgaagaggactccttggatgaagagttttttcatcacaaggcaatgcagggcacacagagagtaggacagacagaccaaactgacagcacaggaggaccagctttcctttctgaagcagaagaggacgattatccctctgaagaactactagaggatgaaaacgctgtaagtgcaaaacggtctaaagaagaaaaccctgggaatcagggcaggcagtttgatgttaatctgcaagtccctgacagagcggttttagggaccattcatccagatccagaaattgaagaaagcaagcaagaaactagcatgattttagatagtgacaaaagtgacactgctgccaaaggggtcaacacaggaggcagggaaccaaatacagtggtgggaaaagaacgccctctggcagatgagaaagcacagaggcaatctgaaggaagtgacttttctgacagcataaaaactcagactccagaattaggtgaaatgtttcagaataaagattctgattatctgaagaacaacaaccctgaggaacatctgaagacctcagggcttgcagggaagcttgagggagaactctcaaaagaggaccatgagaacacagagaaatacgtgggcacagaaagccagggttctgctgctacacaccctgaagatgacttgttcctctggactccacatacaagtgtagagccagagtatagttacaagagggaggacttgcttatcataagcagcttctttaaagagcaacagtctttgcagcggttcaagaggtacnnnnnnnnnnnnnnnnnnnnnnnnnnnnnnnnnnnnnnnnnnnnnnnnnnnnnnnnnnnnnnnnnnnnnnnnnnnnnnnnnnnnnnnnnnnnnnnnnnnnnnnnnnnnnnnnnnnnnnnnnnnnnnnnnnnnnnnnnnnnnnnnnnnnnnnnnnnnnnnnnnnnnnnnnnnnnnnnnnnnnnnnnnnnnnnnnnnnnnnnnnnnnnnnnnnnnnnnnnnnnnnnnnnnnnnnnnnnnnnnnnnnnnnnnnnnnnnnnnnnnnnnnnnnnnnnnnnnnnnnnnnnnnnnnnnnnnnnnnnnnnnnnnnnnnnnnnnnnnnnnnnnnnnnnnnnnnnnnnnnnnnnnnnnnnnnnnnnnnnnnnnnnnnnnnnnnnnnnnnnnnnnnnnnnnnnnnnnnnnnnnnnnnnnnnnnnnnnnnnnnnnnnnnnnnnnnnnnnnnnnnnnnnnnnnnnnnnnnnnnnnnnnnnnnnnnnnnnnnnnnnnnnnnnnnnnnnnnnnnnnnnnnnnnnnnnnnnnnnnnnnnnnnnnnnnnnnnnnnnnnnnnnnnnnnnnnnnnnnnnnnnnnnnnnnnnnnnnnnnnnnnnnnnnnnnnnnnnnnnnnnnnnnnnnnnnnnnnnnnnnnnnnnnnnnnnnnnnnnnnnnnnnnnnnngctagttgctacattgcctgatgatgttcagcctgggcctgatttttatggattgccgtggaaacctgtgcttatcactgccttcttgggaattgtttcgtttgccgttttcttctggagaactgtccttgttgtgantcacggaacagcaaatttctgagaagttgaagattatcatgaaagaaaatacagaacttgtacaaaaattgtcaaattatgaacagaagnagatcaaggaatcaaagaaacatgttcaggaaaccaggaaacaaatatgattctctctgatgaagcaattaaatnnnnnnnnnnnnnnnnnnnnnnnnnnnnnnnnnnnnnnnnnnnnnnnnnnnnnnnnnnnnnnnnnnnnnnnnnnnnnnnnnnnnnnnnnnnnnnnnnnnnnnnnnnnnnnnnnnngttgcagcaggaaatcgaagactggagtaaattacatgctgagctcagtgagcaaatcaaatcatttgagaagtctcagaaagatttggaagtagctcttactcacaaggatgataatattaatgngctttgactaattgcattacacagttgaatcggttagagtgtgaatctgaatctgagggtcaaaataaaggtggaaatgattcagatgaattagcaaatggagaagtgggaggtnngacacagactgcaatatcggtagttgaagaggatctaaaacttttacaacttaaactaagagcctctgtgtccactaaatgtaacctggaaggtaggttg

SEQ ID NO: 21125 - DNA, 219 bp, Macaca Mulatta
gtgagatccaggaacctgctgatctatgaggaacattctccccaagaagagctgtccagcccaggctcagctggggagctggggggctgggacagaggttcctccctgctcagggtgtcaacgctggagtccaggccggatgtggatcttccccatttcattatctcgaatgagaccagcctggagaagtcagtgctcttggagctgcagcagcacctg

SEQ ID NO: 21126 - DNA, 589 bp, Macaca Mulatta
atttaaagaagactgttactttttcattgatttctagacatgcccttcatgtgattcttatgagaaaaaaccacccaaagaattcctagaaagattcaaatcacttctccaaaaggtatctaccttaagtttcatttgattttcagctttatctttacctatccagatttgcctcttagttactcatggtatactatttccacagatgattcatcagcatctgtcctctagaacacatggaagtgaagattcctgaggatctaacttgcagctggacactatgttacatactctaatatagtagtgaaactcatttctttgtattccaagtggaggagtacaatatattagggatgggaaaaaaaactcataagtgtgcaaagtcaggattatttccccataatcaccatacaatagtctgatttcctatgttattgatttctatgacttctgaagtttttactttatttcactgctcaactttgacatttcttggttgaaggagaaggttaaaatttttaaccaaaaaatatagttttgacatttattgattttatattaaccttgagcttgattaccaccagaatga

SEQ ID NO: 21127 - DNA, 191 bp, Macaca Mulatta
gatgcaagatgtcgcccccaacccggatgaccctgaagacttccctgcgttgtcttgaaagcgcccgtatcgcggcaccgcggagctgcacccgtggagacttttccagctgggccgagagagtcagagtctgagaacaatagatgttgcttttccccatgttgtgtgaatttgtcgcactttttcgggct

SEQ ID NO: 21128 - DNA, 541 bp, Macaca Mulatta
gggatgacttgtcaagctcgaacatcatatactgaagatgaagttctttggggtcaccgtttttttcctgtaatttccttagaagagggattctttaaagttgattactcccagttccatgcaacatttgaagtccccaccccaccttacagtgtgaaagagcaggaggaaatgcttctcatgtcatcccctttaatagcaccagccataactaacagcaaagaaagacataattctgtggaatgcttagatggactagatgatattactacaaaactaccatctaagctacagaaaattactggaagagaagactttcccaaaaaactcttgaggatgagttctacaacttcagaaaaagcctacagcttgggagacttgcccatgaaacttcaacgaataagttcagttccgggcaactcagaagaaaaactggtatctaaaaccaccaagatgttatctgatcccatgagccagtctgtggctgatttgccaccgaaagcttcaaaagatggctggaggagcagctaggaggaaggga

SEQ ID NO: 21129 - DNA, 181 bp, Macaca Mulatta
ctccccacagaacaggaggtgaggttccgccctgcacactggcccctgcctcggcccacagccatccaccacatcgtggaagacttcttaacagactggaccgccccgatcgggcacatcctacctctgaggcgcttcctggagaactgtttggacaccgatttgcgaagcttctatgcag

SEQ ID NO: 21130 - DNA, 406 bp, Macaca Mulatta
taagaagctactggacttgaaataaggatagggggtctttgagcctgccttctctcattattccttcactaaccccttaccaggaatctctgtaaaaactaatttggaaatcactgattcatccaaccacccatgacacttgagtctcctaaatcacattcccacaaatgtgcaacacctctactgatggcatatccaccaccaccgaaggcttccctttccacttctgggttagggcattgcctgttaagttgcaaatgctcctggagcagagtgacacattattctgccagggctttacatctaatgaatgaatcagtcaatctaatcccattgctcccagctattcaactaagcccagagtccaagatgagggagatgcttgaagggaatctggatcattttg

SEQ ID NO: 21131 - DNA, 615 bp, Macaca Mulatta
cctcccgggctggggctgggctggagtcgggaatctgagctgcgctggagggagcaggagggtttgcgtcccagtgaaagcacaggccctgccgggttgggagacagccctgtactgaagcctgaagggcagtgaggagttccccgacttggggtgggctgtggggagtcagatcccacagtagagctgcgagcacacaggcagggaggggtttggtgtctgccttgaagttgagggagttgctgcggaagacctttccttgctagaggcaggctgggggcgggacaggatgggggtcagtgccaagtaagagggtccagccgtggccctgggcttccacgcctgcctaggcaccgtcccccaggctcagggtaagtgagaacatctcaaactccccatgccaaaagggagagctcaggtgtctcctgccactgctgctgccaacccggcacccccctggcatctgacctcagggacatagctcctgacccagcagcccacggaaggagaggaagaagggggaagaagttgaagctccaggagctgactcagccccagacacctgaccggagtggcactgcatgtggctgtgtgctgggctggccctgcctctgt

SEQ ID NO: 21132 - DNA, 111 bp, Macaca Mulatta
ataattcagccccctatggagcccggtacgtgggctccatggtggccgatgttcaccgcactctggtctacggagggatatttctgtaccctgctaacaagaagagcccca

SEQ ID NO: 21133 - DNA, 687 bp, Macaca Mulatta
  misc_feature (1)...(687): n = A,T,C or G
gccggcaatggcctggtcctggccacccacctagcagcccggcgtgcagcgcgctcgcccacctccgcccacctgctccagctggccctggccgacctcttgctggccctgactctgcccttcgcggcagcaggggctcttcagggctggagtctgggaagtgccacctgccgcaccatctctggcctctactcggcctccttccacgccggcttcctcttcctggcctgtatcagcgccgaccgctacgtggccatagcgcgagcgctcccagcagggccgcggccctccactcccggccgcgcacacttggtctctgtcattgtgtggctgctgtcgctgctcctggcgctgcctgcgctcctcttcagccgggacgggcagcgggaaggccaacgacgctgtcgtctcattttccccgagggcctcacgcagacggtgaagggggcgagcgccgtggcgcangtggccctgggcttcgcgctgccgctgggcgtcatggtagcctgctacgcgctcctgggccgcacgctgctggccgccagggggcccgagcgccggcgtgcgctgcgcgtcgtggtggctctggtggcggccttcgtggtgctgcagctgccctacagcctcgccctgctgctggatacggccgatctactggctgcgcgcgagcggagctgccctgccagc

SEQ ID NO: 21134 - DNA, 249 bp, Macaca Mulatta
gccacccagaccaagctccactccattttctataagctcctctttgatgtactctcttccccatccctcatcaaagctggacactgtgggactcctgagcccatcgtcaacggacacatcaatggggagaactacagctaccggggcagtgtggtgtaccagtgcaatgctggcttccgcctgaagggcatgtctgtgcgcatctgccagcaggatcatcactgatggggcaagacccctttctgtgtg

SEQ ID NO: 21135 - DNA, 202 bp, Macaca Mulatta
aggctggctttggaacggagcagctctgcccaggaggccttgcatgtgatcacaggcttactggagcgctatgggcaggggggcagctgcctggaggaccctgcgccattctcctaccacaacaccttcctgctggctgaccgcacagaggcatgggtgctggagacagctggtaggctctgggccgcacagaggatccagg

SEQ ID NO: 21136 - DNA, 585 bp, Macaca Mulatta
cccctccattattatataataaggatttttattggatttttttgttatattacattatgaggaaattactaattttgaaagtatctgtgaaaatacaaaggataaaggtaaaatgttaaaagttttgaattgtggattaaatccttaggaaaagtattttaaatacaaattaaaacagcaaaaaattagacactagtgttgaaagtacaaagtacattggaattttttatgtaaaatactttggggaacatacatactatataacattcttacaaatgttattaaagtgaatggcatttgacatattatttatcatatctaaagtaagatttatttttcaaaatcaccctaatgatactcagatttttaaagtgaagttaataaaaaggcaggcccaatttagcagggaatatagtatttaaatcttgcctgacttagtgccgtacttaaacagatgcagttgatctacagttgtttgagaagtaaacaaagcaaagataaaaaattgtggaaaggaagaacattataaggatctataattagtcgcagtttctgctcttataccagaacaacaagatttcaatc

SEQ ID NO: 21137 - DNA, 777 bp, Macaca Mulatta
  misc_feature (1)...(777): n = A,T,C or G
ccacatagctaaggagttatcccaataaaaattgtgtgatggtaggtagaggaaanggaaactgccttttaaatgggaaaagaaaaaaaagtagaccaaaaaatttaccatangccccaagtggcagccctcattnttattcctccatacttcagtggatgcagacagccctgaattttggatcacgacgtgtgatagaaattaagtggatcaaatttcattgtatttttttctcttgcaggatgaaatctttgacatggtaaaaccaaaggatcctttgaaaatctctcttcaggatttaatcaacagtaatcaaggagacacagtaaccaccattctaatcgatntgaatggcttctggacttatgagaacagagaagctcttgttgcaaatgacagtgaaaactctacagaccttgatgatacatgatctctgaaagactagactgtcttatattaagagatacttgaatgctgcatgtaaagcctttaaagcaaaatcctcagaatggtctaaataaaacacttgatatgcctagagaacacagcaaatgttttggttactggaattctggttgcaatagtttagaagcaataggaccaaatattgcttgttaggaggtagggtaagttctggttccttttagttcaaagatgggaagtgtgatttgctgtagatagatgatgttcagtttaaacatgtataatcttcagagatgaagtttccatggaatatttctgacagtcatttagaatgtgaatatttgactgacagtg

SEQ ID NO: 21138 - DNA, 1395 bp, Macaca Mulatta
  misc_feature (1)...(1395): n = A,T,C or G
gatcaaatctaaatcgctgtggtttccgaggctcttcatacctgggtattccattcaatccatcaaagnnnnnnnnnnnnnnnnnnnnnnnnnnnnnnnnnnnnnnnnnnnnnnnnnnnnnnnnnnnnnnnnnnnnnnnnnnnnnnnnnnnnnnnnnnnnnnnnnnnnnnnnnnnnnnnnnnnnnnnnnnnnnnnnnnnnnnnnnnnnnnnnnnnnnnnnnnnnnnnnnnnnnnnnnnnnnnnnnnnnnnnnnnnnnnnnnnnnnnnnnnnnnnnnnnnnnnnnnnnnnnnnnnnnnnnnnnnnnnnnnnnnnnnnnnnnnnnnnnnnnnnnnnnnnnnnnnnnnnnnnnnnnnnnnnnnnnnnnnnnnnnnnnnnnnnnnnnnnnnnnnnnnnnnnnnnnnnnnnnnnnnnnnnnnnnnnnnnnnnnnnnnnnnnnnnnnnnnnnnnnnnnnnnnnnnnnnnnnnnnnnnnnnnnnnnnnnnnnnnnnnnnnnnnnnnnnnnnnnnnnnnnnnnnnnnnnnnnnnnnnnnnnnnnnnnnnnnnnnnnnnnnnnnnnnnnnnnnnnnnnnnnnnnnnnnnnnnnnnnnnnnnnnnnnnnnnnnnnnnnnnnnnnnnnnnnnnnnnnnnnnnnnnnnnnnnnnnnnnnnnnnnnnnnnnnnnnnnnnnnnnnnnnnnnnnnnnnnnnnnnnnnnnnnnnnnnnnnnnnnnnnnnnnnnnnnnnnnctgtcactaatggaggaaagtggaatttgtaaagttcatcctgctctgaatgtaagcacacggacttctgaacgccttctagatctccatcaaagctggaaaaccaaggactctaaacaatgctcagagaatgtacatatctccacatgactgactttagattgggaggatggggggatttgtagcataactgtagctcaagtttaaaagccatgtataaccaagtgtgctctttttttaaaaggtagagtcttacaatcaaatctcctgctgatgtcactttgggatatggtcttgagccagtaatctttttactgggtttcgagaaaatctttgttgaagtttgaaccacaactttgtcgtggttcttaaatgtttatactgtatttctaagaagttgtttgaggcaaattaactgtatgtgtgtaggttatctttttcaaaactcttcagtgcaaattgtatcttataaaattgacacgaattttcaaaacaagtttgcacttcatatagcattgataatcttcaggtgaacacttagtgatcatttaaaaagctcactgctgatggtggaaaatttgctttaatgaattaagtatctgggattattctttgaaaatagattaccataattttttttaaaaaaggagtgacttattttgtcttattct

SEQ ID NO: 21139 - DNA, 688 bp, Macaca Mulatta
ctacattgcagctcaaaactgaaggaatttgacaagatccacagcctgctctctggaaaacctgttcaatctggtgggcgctctgtgtctgtcacacttaacccacaggggctggactttgttcaatacaaactggcagagaaatttgtgaaacaaggcgaggaggaagtggcctctcaccatgaagcagcattccccatcgcagttgtggcatctgggatctgggagctccaccccagagtgggggacctcattcttgctcatctacataagaagtgtccttactctgttcctttctatcccactttcaaggagggaatggctttggaagactatcagaggatgcttggctaccaagtaaaggattccaaagtggagcagcaagacaactttctaaaacgcatgtcagggatgatccgtctctatgctgccatcatccagctccggtggccatatggaaaccgacaggagattcaccctcatggcttaaatcatggatggcgctggttggcacagatcttaaacatggagcccttgtcagatgtgacagccaccctcctctttgacttcctggaggtgtgtgggaatgccctcatgaagcaataccaggttcagttctggaagatgctaattcttatcaaagaggactactttcccagaattgaagctatcacaagctcaggacaga

SEQ ID NO: 21140 - DNA, 795 bp, Macaca Mulatta
gttcaaggcggtccctggattccagaccgagcagatccgcaagaggctgcgctgccgcaggaagacggtcctggtgcttatgtgcatcctcaccgcctacgtgctgtgctgggcgcccttctacggcttcaccatcgtgcgcgacttcttccccaccgtgttcgtgaaggagaagcactacctcactgccttctacatcgtcgagtgcatcgccatgagcaacagcatgatcaacaccctgtgcttcgtgacagtcaagaacaacaccgccaagtacttcaaaaagatcatgctgctccactggaaggcttcttacaatggcggtaagtccagtgcagacctggacctcaagacaatcgggatgcctgccactgaagaggtggactgcatcagactaaaataaccccctggactttgcaaagcttaagcacaaggcagggtcctgcggacactgactagtgtgcttggatgcacatcaacctgggactttttgtttgcggcagagggcagagtaaatggaccactctgtgaaccatgttttcaaggagctcagagtttctacaatgcatgtgaccagacactatcaatagtggcatttgttgaatgtctaatttgcacaccagtaggtactggtaagacttatatatgctgatgacattagttggcaaaatgaaattggaattaaacagaggaaaatgttgtggtgtagatagaaataagggagtttccacaaaagaactggagtaggtatctaggatacaggtacatgtgctcgcagtgtgagggtatctctgg

SEQ ID NO: 21141 - DNA, 137 bp, Macaca Mulatta
agatgttgatgaatgtgctacaggaagagcctcctgccctaggtttaggcaatgtgtcaacacttttgggagctacatctgcaagtgtcataaaggcttcgatctcatgtatattggaggcaaataccaatgtcatg

SEQ ID NO: 21142 - DNA, 657 bp, Macaca Mulatta
tcagatgtggaggtaccacatggttctctgagcagcgaaacttttcagtttcaaccaccattacctcctgacactcctccactcccccggggaactcctccgcccatcttcacccctccactccccaagggcaccccgccgctgactcccagtgactcaccccagaccagaacagcatctggagctgtggatgaggacacactgactctagaagaacttgaagaacagcagaggcggatctgggcagctctcgagcaggccgagagtgtaaacagcgactctgacattcctgtggacacacctttaactgggaattccgttgcctcatcaccttgtccaaatgagctggacctccctgtcccagagggaaaaacatctgaaaagcagatgctggatgagcctgaggtgccagaaatttttacaaagaagtcagaagctggacatgcctccagtccagatgctgaggtgacatcactttgtcagaaggaaaaggcagagttggctccagtaaaccctgaaggtgccccccttgataatggcagtgtcgtaccagactgtgacgtcagcaatggggacagccggaagctctttcctgcagacaccagtccttcaacggccactaagattcatagccctatacctgacatgagcaaattt

SEQ ID NO: 21143 - DNA, 488 bp, Macaca Mulatta
cagcggttcagtagctcagctgcagggtggcaatgacacagggacggacgaggagctagaaacgggcccagagcaaaaaagctgcttcagttaccagaactctccgggaagtcatttgtccaatcaggatgccgagaatgagtctctgctgagcgacgccagtgatcaggtgtcagacatcaagagtgtctgcggccgagatgcctgggacaagaaagcaaacactcacgtcaagcttccaaatgaagcgcacaactgcatggataaaatgactgctgtctacgccaacatcctgtcggattcctactggtcaggcctgggccttggcttcaagctgtccggtagtgagaggcggaactgtgacacccgaaacggcagcaacaagagtgattttgactggcaccaagacgctctgtccaaaagcctgcagcagaacttgccttctaggtccgtctcgaaagcaagcctgttcagctcggtgcagttgt

SEQ ID NO: 21144 - DNA, 872 bp, Macaca Mulatta
ggtgggagacagactgactggggcaatcggcgtgtgtaaggagaatgtgatgaagaaaggattcgaccccatgactcctgagaatgggttctgggctgtagagttgtatggaaatgggtactgggccctcactcctctccggacccctctcccattggcagggcccccacgccaggttgggattttcctagactatgaatcaggagacatctccttctacaacatgaatgatggatctcatatctatactttctccaacatctctttctctggccccctccggcccttcttttgcctatggtcctgtggtaaaaagcccctgaccatctgcccaattgctgatgggcctgagggggtcacagtcattgctaatgcccaggacctttctaaggagatcccattgtcccccataggggaggactgtgcctctgcagatgcagacacactccattctaagctaatccctacccaacccagccaaggggcaccttaaggaatattccagctcatctgttttcctttcctctaacccctctcctccatagccttctgaagcttcaccagccagcttcacccagcctgtttcttcctgttgggtggtgattaattaatcctgtgaaggttgcattactgctgctagaaaaggtggggactgcaccttccgaatctgtttctgtaccaatatttgggggatggaggggtgactcaaactgcttcttgtgttctcctaatcccttaagactagaacctataggaaactacttggagcaaactcaaaggacagattagggatcgagatcgggtcaggttagcatggggttgtggttgaaatgtcttggtatccaggataagggtatgtggaaaaacaggct

SEQ ID NO: 21145 - DNA, 1088 bp, Macaca Mulatta
  misc_feature (1)...(1088): n = A,T,C or G
tgagactgataaatccctgctgccggcaactcctgannnnnnnnnnnnnnnnnnnnnnnnnnnnnnnnnnnnnnnnnaagtttgacccctcctacagaaacgatctgaacaactgggtggcagaagaaattctagcaattaagtatgtggaacaccctcagatagacagcctggacctgcgcggagaagtgctttaccccaacctcagctttgagacgatggagctggattttggctgcatcctgaacgatactgagctcattcgttacgttaccatcaccaactgcagccccttggttgtgaagtttcgctggttcttcttggtgaatgatgaggataatcagataaggtnnnnnnnnnnnnnnnnnnnnnnnnnnnnnnnnnnnnnnnnnnnnnnnnnnnnnnnnnnnnnnnnnnnnnnnnnnnnnnnnnnnnnnnnnnnnnnnnnnnnnnnnnnnnnnnnnnnnnnnnnnnnnnnnnnnnnnnnnnnnnnnnnnnnnnnnnnnnnnnnnnnnnnnnnnnnnnnnnnnnnnnnnnnnnnnnnnnnnnnnnnnnnnnnnnnnnnnnnnnnnnnnnnnnnnnnnnnnnnnnnnnnnnnnnnnnnnnnnnnnnnnnnnnnnnnnnnnnnnnnnnnnnnnnnnnnnnnnnnnnnnnnnnnnnnnnnnnnnnnnnnnnnnnnnnnnnnnnnnnnnnnnnnnnnnnnnnnnnnnnnnnnnnnnnnnnnnnnnnnnnnnnnnnnnnnnnnnnnnnnnnnnnnnnnnnnnnnnnnnnnnnnnnnnnnnnnnnnnnnnnnnnnnnnnnnnnnnnnnnnnnnnnnnnnngctgtttgaccacgtcacagagagggaaatcacgctgacgaacacggggaaagtcggctttgagttcaaagttctgactgacccccagtcttctccagacaaccttctccctggagtgccactaatcctgcctctctccgtaagtaaacagtgggaggggcccgaattcaaacctacaagtcccaccccgatgcaggtgagtattcatggccaggattacaagtgtgactttttctttttattaaaactgaagaactctcagaagca

SEQ ID NO: 21146 - DNA, 640 bp, Macaca Mulatta
  misc_feature (1)...(640): n = A,T,C or G
gccctgcagaaagatgtggaagattttctgagcccgctgctggggaagacacccgtcacccaggtcaatgaggtgacaggtactctgcgaatcaagggctactttgagcaggagcttaaagcctggctcttggagannnnnnnnnnnnnnnnnnnnnnnnnnnnnnnnnnnnnnnnnnnnnnnnnnnnnnnnnnnnnnnnnnnnnnnnnnnnnnnnnnnnnnnnnnnnnnnnnnnnnnnnnnnnnnnnnnnnnnnnnnnnnnnnnnnnnnnnnnnnnnnnnnnnnnnnnnnnnnnnnnnnnnnnnnnnnnnnnnnnnnnnnnnnnnnnnnnnnnnnnnnnnnnnnnnnnnnnnnnnnnnnnnnnnnnnnnnnnnnnnnnnnnnnnnnnnnnnnnnnnnnnnnnnnnnnnnnnnnnnnnnnnnnnnnnnnngacggagtcttactctgttgcctaggctggagtgcagtggcttgatcttggctcaatgcgacttctgtctcccaagttcaagcaattctcctgcctcagcctcttgagtagccgggattatagatgcctgccaccacatttggctaatttttatatttttagtagagaagggatttcaccacattgaccaggctggtcttgaactcctga

SEQ ID NO: 21147 - DNA, 601 bp, Macaca Mulatta
atacaagtacatccaggagctatggagaaagaagcagtctgatgtcatgcgctttcttctgagggtccgctgctggcagtaccgccagctctctgctctccacagggctccccgccccacccggcctgataaagcgtgccgactgggctacaaggccaagcaaggttacgttatatataggattcgtgttcgccgtggtggccgaaaatgccctgttcctaagggtgcaacttacggcaagcctgtccatcatggtgttaaccagctaaagtttgctcgaagccttcagtccgttgcagaggagcgagctggacgccactgtggggctctgagagtcctgaattcttactgggttggagaagattccacatacaaattttttgaggttatcctcattgatccattccataaagctatcagaagaaatcctgacacccaatggatcaccaaaccagtccacaagcacagggagatgcgtgggctgacatctgcaggtcgaaagagccgtggccatggaaggggccagaagttccaccacactattcgtggttctcatcaggcagcttggagaatgcgcaatactctccagctccaccgttac

SEQ ID NO: 21148 - DNA, 679 bp, Macaca Mulatta
gtatttattggagatttaaaatcatcttattctgacttaattaccaatatccctgaaggccagattcattgaacaacagaaaatttcattatgattgcttttaagaacagattcttcagctgatttagtgataagaatccagaaaagaaaatgtactagtaatgtattctctccccagatgaaattgctgccttattcagattcactctcttgagccagattttgaatttcactgcagactgcttcagactcctaatcataggcttgtaaacctactaataaataggctcttcccctcttcccagtactttttgtcatttagagatataaacttgggcatataaaaatgcaacttgtattcctctgtatatttctccctgacttataaatcttgagactttgattgtaagagcatgtatcatcagatgagaaatataaataggaactggggtcattgagccttaggtagggaatatatcaacccaatttcttcctctcttctcccttttataggacaaataatctacctcatctgctcttacattgaatagtgcaaaaaggaatacgatttccacaaacctgccacatattttgtgtggagcaatgatgcttgtccctttaattcaaatgtcactttccatttgaagccctttgggaaaggcatgctgaaaattctagg

SEQ ID NO: 21149 - DNA, 652 bp, Macaca Mulatta
ctcatcccggcgttgccccgcgtaccgtcgcctggcgctccgccgctttcccggtggttcggggcacttgggtcccacagtctggtcctgcttcaccttcccctggcctgactcgtcgccatggcacaggttctcagaggcactgtgacggacttccctggatttgatgagcgggctgatgcagaaactcttcggaaggccatgaaaggcctgggcacggatgaggagagcatcctgactctgttgacatcccgaagtaacgctcagcgccaggaaatctctgcggcggttttaagactctgtttggcagggatcttctgggatgacctgaaatcagaactaactggaaaatttgaaaaattaattgtggctctgatgaaaccctctcggctttatgatgcttatgaactgaaacatgccttgaagggagctggaacagatgaaaaagtactgacagaaattattgcttcaaggacacctgaagaactaagagccatcaaagaagtttatgaagaagaatatggctcaagcctggaagatgacgtggtgggggacacttcagggtactaccagcggatgttggtggttctccttcaggctaacagagaccctgatgctggaattgatgaagctcaagttgaacaagatgctc
